United States Patent Application Publication US 2008/0050393 A1 - sequence listing, part 17

SEQ ID NO: 60515 - DNA, 8689 bp, Homo sapiens
ttttttttttttaggggggggagcatttattttaatttttgtcttgcagctctttgtagaggacctagcctttctttactgaactgaaggggtttggtcccatcacccgaagactggcccacctgcccacacaggtgggggcacaggaggtctgggaggccccaggaggtggaagttcaaaagccttgcctggccctgtccatcccactggctgaggccaggccggagggccaaccccaggggccctttgtatgcaagccgacccaaacaagggcccagtgcatagttaagacacaaacaccacacagctgtccagagcctccaaagcactgtttatccaggctccatggaaccaagtgcccccagctgcctgccctagtcctcaggggggcactggcaccgcagtggcctcggcctgagaccctcgatgagccccagcctaacctgctccaaagccactgacacatgcatgtttagcccttggcccatcaagatggggccctgggaatgaactggctgcagaccctcctccatcccacacccccaggggctccatcagtcctggctagctcagcaccatgttaaatagcttccttgcaatctcccttaaataaacccatccccagagcaacctacccaccctgcaccctgaatatattatcctattggcttatgccttctagactggaggcgctctctcctcttgccctctactccaggggataccatctccctaaaaaaccaggggaggaagtttttttctcaactctggggcagagacaaagggtggcctgggttggagtggaaaagccaggaatagcttcctctgtcccttccctccccagggtacttccttctccttgccctcttagcagcctgggtcaggcgcgacttacccaaggtcacagacccaggacccagagtcatgacccatgtaggaggttaccctggttttgacagcccaaaccagctccagggcaggaggactgaacttaagcctgcctccaccttggcccctgcagttctccaggctcggagtgagctgagggaggttccagctcttgactccactctgtcccggacccctgggactatctcccaggaccctccacccctggtgtctccaggtctctcttgctctggggatactcagacagcaccgggcatggaagcaatggggcccgggacatgggcaagcctgtccctggcccgatcagcatctgggcccaggccaggcctcacacccagtactggccattcttaagggcagggttgggtgtccggcagaactgcagcagctctgggtcaggctggcctcctggagggggcccctggccaggcacagctgtgagcgggatggcctggcctggctccaccttgcgaaaggtctcggtgtcaccagccaggccgttgcggggcttggcagtcaggacctggacgtcatgcttgcccgtcttgttgcgttttcggaggtagaagagcaggggcaggatgagcgccaggagcagaagtaccaggcacatggggatgatgacgctgaacatgttggcctcaaggaagctcaggaagcctcccttggccacagcgggctcagggctggatgccatggggcctggctcgcctgtgggggtgctgctctctggcttccctgcttccgtccgggcggcctcggggacactgagcagggccacgctgtagggccgggcagcattgtaaggctcagtggcaaagtccagggaggccacagcaggcgggacgccctgtgcccacagctccagagtgagactgtcacctgcggggccgggggccctcccctctggcctgcccacctccagccccagcctcccgtcctcaaggtcctgctgagtgaactgctccaccagctggctgcccccgggctccgtcctggctcggggcacgcggaccacgcggccatgccggggtccctccaggaggcggaagcgcggcacactgcctgtgcggttggccagctcgccagcatctaggacggtggggtccaggcgcagggtggcaccctggggccatggcccacctgcccacacatgcagcagagccctcacagtgacgttcactacggctgatgcattgacacccctagccagtgccaggactctgaagtggtcatgagaggaggagaagttggtgaaggcaaagaccacctcgccctggtctatctggaattggctgaaggccgaggtgggccgcccgcccaccaggagatgcccatactggggtccctggatgaggcggtatgctgcctctggctcctcccgatctgaaaccacccggagctgctgctggctcagtgaggagcgccccaaagcttggggcacctccaggggtgcccgcagctgcacctcgatggcggatggtaggatgtccacagccagggacatgggcaggggtgggctggccccatcagacatgctcagctggaagatgcctgccacgctgctcccgttggccacgaaggccagccgccctgaatccacatcggcttgcgtgaagcgggtcacgggccccaggccaccacccaccaggctgaggaagccgttgtggggtgcccgctggacctcgtactcaatctccccaggagctgagtctgggtccaccacactcagctgggcccgggagatgggggcacgagagcctcgggtgagccggagtgggacagaggcctgtggctgagggggccgctcatttacatccctcaccgtgatggcaaaggcctctgaggtttggggtccagccacggaggcccctgctggcccctggaggtgggcacgaaagtggaagccatcctgctgggtgcccccaccgccgtgggcatacactagctgccctgcagccagctgggactgcaggaagtggggctgcccagcatggaggggctcctcggacaccaacagctggccccggctggggaactgtgtgacctggaagagcacatcatgctctgagcgctggggtgatggaacgctggccaagagattggaggcatccagagcagccacggtgatcctggcccgctggccctcggggacccagagacctttgttcttccagaggtggctggggcgctggggacaggcagcctcaaaagacacagccacagcaagggtggcggccacgtcccgggcaggcggcgaggacagctggagctctagggtatcatgggcctcccaaaagggctcggggggcatctcatgctcatacagaatattcccagcgtagacctctgcctgagtgaagttcaccagggcctcccctgtgctgtcctgctgggcgtggaacagccggcctagctgggggccccgcaccacacggtagagcaggagctgggggtcagtgcctgcgctggagctggccctgagggtctgactgctgagtggctggacggaccctgggcagacagtcagtgtctggctgcccttcagcgagaggagcacttgcttctgggccgtcactcggaagaagtgtccgggggaagtgtgctcgccgtcagagaggcggaacgggaagcctccatccagggttcctctgtgtgagaacagcacgagcccgccgtccagctgggcctgcgtgaagctgcgcacctcagtgcccggcgccccccgcagcactacccgcccgttgctgggctgctcgatggtgtagaccagatcctcagacccagagtcgccgtccgtgctcctcagagcctccgcagggatgggcgcagtggccccctcccacatctgcaggcctgtgtttgtagtgaggatggggggttggtcattgacaggcaggacagtgacagtgaaggccacaggatggctctggcgatccatctcggaggcattagccatcaggacaaaactgtctgtcagtgtctcgctcccgtcatgcacgtagcggatcagctgctcttccaccattctccaggagaaggcgctgagggtcctggcttgaggtccgtcctccttctgcaggggtccatgctggggtggctccagcacctgcaggctgaggcccaggagagtggggaagtagggcccggagacacggagcagtggaggggccagggtgaggctgccaccctcagggacgctgaagttttgcgcctctagtgggatggcagcgggcagcacctccagctccacaaggacgccctcgaggggagcacccaggcctgaggccacatccagcgagaaggcatcgctccaggcctcagggcgggagtgcaggtacaggaccctgcctgtgtccactgcctcctgggagaagctctgcacagggtccaggctgggtggctcatctgccaaggcgccacgcgacaccatcaccaggtagccggcactcggtgggctcttcactgagaatacgatgtctgcaggtggcactgcctcctgggctgcctccagctggtcccttctgatctcagctgcctctccctggaagacgtagatcttcttgtgccggaccagcttcagtggggccagtgggccctctagggcaatggtcacttgtagggtggcatccgtgtgcactggccctgcttccacggagaaggccatggtgtcttcggggctgaggctgccattgtggctatagagaacggccccatccagcaggtcctgctgggagaaggctgtggctggctgaccagcccggactagttgtccccagcgagggccagctgtgacgtggtagtggacctcatccccactgcggatgtcgaggttggtgtccaggtggagcacggccgtgtcgatggtgccctggcctccttgagggaccacaaggctggagccgttggccacacggaggtagggttccgaggcctgcacctccagcagcgcagtggcctggtgttgcccgtcggacacctgcagctggatccagccacggtcagcccctgagtgcacgaacagtactcgcctcttcctgaggtcctcctgggtgaagcggtagatgggccgcgtgggctcatctacggccacgatactgccaaagaggaggtccttgcgggtaagcaccagctgggcgtcagcaaagcccgagtcagcatcgctgaaggccacgtcgtctgtagtcagcagccgccgcccaccccgggccacatggaagatccggctgatggtctgcacaggggcgtggtcattcacgggctggatggccactcggaagacaccccgtacctcctcccaggccatgtcaccactgctctcgccctggcgggtagcaacaaatgggatatcatcttctgtggtctcggagtcatcatgctggtagaccagccggccacgcaacaggtcttcattggtgaaggatgtcaccatagtggtcttgtcctgtgtcccacgccaagccaacctcccaaggcggggccgctccatgacctcatagaggtagctggcactgttgagactcttgacaaagaggtggtcagcagagaggacaccctcaccaccctcaggcaccacgaggaggacattggtgaggacaggcgcatctgggtcaccaccaatgtggatggggaaggtatagagtggggagaaatatggtggagctgtgacacggaaacggaaggtgtcctcgactgcctctgaggcacgagctgtggccccataggtcacccggccagcctgtatgtcatcctgggtgaagccctggccatctgacagccttgtgccctgtagttgaaggttgcctttcctgggagcctgaaccacctcataatggaaggttggggggcttgggcctgcctcctccagggtggcctccaggtgggctgtggtgagggtctcctgctgggtgttctgagtgtgcagtggctccagccgcagcatccacacagtggctctctggatggtcactgggaaggacagattgctcaggatctcctggcccacctgcacctccagggccaggttctccacggtgtcgtaagcgtggtgctgtgggtcagtgctcaggtacctcacgcggccctgctccacatcccgctggtggaacgcctgtgtggcccaccactcagcaccctccaccccacctgtactatgcttctgcagctccccaaactgcagggccccagtgacgcggaacagcacgctcacatcctgccccacggcattggtctccaccgacaggttggcgggcaagatgggcatggcagagccttgggccagtcgcaaccctgtgctgcggtggatctgtatggccggccggatggccaccaccttcagcgtggccggggggctggcctgcagtccatcgctgacccggaacgtcaagtcctgtgcaggaccaccgcagtggacatagactaggctgccggcctccaactcccggcaggagaactcggtcgccggctccccaggctggtctcggcgctccacggggaggccagaggaggtgccaaggacctggaaggtgaggccctcacaggcagagtccgggtcataggcctggaaaacctcaggccccagcggcttctgcgtgtgttccaggatcaccatgaggctgccatgtgggaagatgatgtggggtgggtcattgacagggttgacctggatgggcaggaggtatgtttggcccctccgaaggcatgagggcatgggcacccgagccgtcaccgacacctccagcaccagctggtcggaggtgtcctcagagccatcgtggatgaagcgggccttgcggttcaccacgtccaggagggtgaacatttttcgtgcctgggcacccaggatgtccagctcgagctcgccatagtgtgcccctcgggtcacgctgaacagcacctgggatttgcgcagctcagcctccatcaggtccagcgtgggctgcacatgcctccactcaagccaggctgtgccaccctcggccaccaccagtgggctgatagtcagcagctgggtgaaattggcaaagacaggaggcagccctggctcaggcacgcatggctcaggcagctccatggctggccaagcctcgggagccagggtggagaaagcttcataatggccataggcatcgtcctcatactcctcctcctccagcctgcagccggctgccatgttgcgcgtcagcaaagcttcccgcagcccccgcctctggccattgacactgaggtcttccatgcagcccagcagggaggcattggtggcctctggtgtcaggcccaggcggtgttcctggaggtgacgagaggcctctgcatccagccccccgagaaggagactgccccgtggctccaggtagctgaggactcctcggttcgaagtatgcgtagggtactggtccacggagatttccagccggtgagcattgatgtggacactgacctcatggggctgcccatcggccacaggcacactgttgtggagcaatacggtaccctggcccttctccaccacggcccgcaggtggccctcaaatatgtccacatagatgaagtccccacgccggccccctgcctggaaggccaagggtgcctgccggctctgtgtggtgagtgtaaactctagggttccttcgtcctgagtgccccaggcagggaaggcagccagagagtggggcccagagaagcccagggccacatcatcactggcagaaaactcttcagcacagccctcatgcacatcgggggtcagaggccggaggaggctgcggccattgagggtggctgcatggaggcaacccctcaggggtcggctggttcccctcaggtagggcaggccaagggtcccagtgcccccaacaaagagcccataggggacctctaggggggctcctgggactgctgaggaggcgttcagaaacccatcgactgacaacgtggcccagccctctacgacagtcagcaccacagtgtgggggatggagtcactcagcagcgtctctgctggagtctgcagcctcagctcctcctggcccagaacaagtctgacctgcaggtgtccagagtagagctgcagcaggaggtggtcagctgggcctgctgccaggagaaggagggcttcgggttgggacatggagaactgcagctgcaggtctatgtcagtcagagccatggccacagtcacctccgggtggttctaaccaaagaaggaagcgaactgttgtccttagtatcttctagacgttccagaactgatgtcagatttggctcatcagagtccacagaccatatcggtgaagaagatgaataggattcctgctgcatccagggtacaatgcgcctttccagaacacagcagcgacccggggtagagggatcgctcaaacagcaccagaggctgcattccaacttttcctccatcaacgagtccgttttcattgttagtttctccttaaacacgattggctgaacatgcgggaacaaggaaaacctgaccgtttcggcggctgcaggagtccagagcatgcgcgcgcttccggctgccccctcctcgccttgacccagcactgctggacccatctggtccgttcttcacactcgcggactggaggctccgggcagcacaaccaccaactcgtgtgtgtgttggggtgggggtggggggcacaaaaccaccccctcgtgtgtgtgtgtgtgtgtgtgtgtgtgtgtgtgtgtgtctcccaagggaacagcactgctgagttcaggctatcagctcatggactgtcagcaaaaacgaaa

SEQ ID NO: 60516 - DNA, 1331 bp, Homo sapiens
ttttttttttttcatacacaagccggtgatactttattatataagagagttgtcaaaaggacagtttcatttctgtttcagaatccccacattccagtgatccatctgttgacacaattaacataaactatttgctgatatttactgagtgcttgcaatgtatcagagtcattaaataagatgcaacttctactgtgaaaactggaatcttcattaggacacagacttagaaaaggcccagtttcaaggattctgacttgcacagactgagcactcccatttccagaagttcgaatacctcctttcttatctcgggaatgtccatcattctcctcaacttctgatctctccagttccagtcaaaaaccagaaattttaaggggctcaaattaaggccaccttgtttaacaagttctttaattctccccggagttcctacacccaggtgcaccacacgcttctccagcaactttacctgcgcctggacctttatgtgctttgcaaataattttataactttgccgtctcctctgaatgctgtcatcgacctaatgagctccagggctcggacggccgagctgcagatgatcagcatcaggaccgatttcttctcactgtggttcttcctaagttttacccacttaggacaaatttcttttaggtatgaggaaagactgtgagtcaaatcattggccttgaggaaacaggagtctggcaggttcagttcttctaattcaatcaccaagcgtctgctgctataatagtccttcatcagcttctgtaggtcttcaggtaaccctggttttggttctgattttgcaagaacatcagtaattttcttctttcttcttttcctggtcttggtggtattctcttttctttcctttggttgtatcaaaaaacattctttaggctgtttggttttctctgaaggtacaggaactggaactgtctcctgctgcatcacttctgtgtctccttctccttcaccatctgatgcttctgggctgctgcctgctccagtcggctggttctcccaccactcgtctccgagatcgtctgccatttcagctcaggtctcgacgtgggcagaacatcacgggtaggcgaccagctgcggagaatcacgttgtctcaaagccaggcggccggcgtagctacacgcggagctcccgctagacactgtcgcctccgccccgcggcgatgacgtcacacctctgccccgcctctccggcagccgctcccagactcgtcgcagtttccacacaggcgccgacaggcagaagcagtttggaaacgcaacataaatccccccaaagatttatacttg

SEQ ID NO: 60517 - DNA, 1169 bp, Homo sapiens
cccgtctttttttttttccccccccggggaaaaaggggattttttccaagggcattaatttggggaccccccgggtttttccctccccccggtgttaaaaccccggcccgggaatttatttttggggccccataaaaaaaattttaccttgccagccccggggagttaaaattggttcttttaaaagggcccccccttttttttttttttgatctaagaaactttattgctcagaaccttccctccctgggcaatggaaagagctttggagaccagcccatggggacagagtcagaggcactgggtgtaaaaaagagcgagcgtgtggcacatttggtccattgtcatgtgtgggtatggcaggaggagggggtaatctagaagccccacatctagggccttctagggacccagatatgcccccttaggcaaggctcacatgccaaagcaaagcagatgaggtcagcctggcttgggttgagggctcagtgcctcttagccttgccctggggttcttggaccttccggaaactgagccacatcaggctcacgttgatagcataggtggtgatacaaacaatgcagaaatcatagagcacgaagaacaggatccaggccaggtagacagaaccagcgagagacaccagggagctcagcagcatcaggacagaggcccagcgtgtccgcaggcaacctaacaatagctgtagtgtgtagaagatgcaaccgaatatgctgttggattgattgaggatgctgtcctgtcccagcacatgctccaccagcccgaaacccctgccccacctggaggagaagacgcgcgaacagctgatggcggtgcccacgtcgcagagcgcgcggtaatcccggtcccgggcgcgcgccgccttcacgtgcagcgcgtagagcgagagcactaagcccgtcaggcaaagagcgagccgcacccagccagggctcccccaggtgctgcccattatctccaggttccgcccgaggcgcccgcggagaaaaccagccacggagcaggggccgggcggcgaatggccgcgcccctcctggccctctgactcggcgattggccggccgtgctcgcactccacgacccaaatggctgttccagggcgctagtcaagcgggcgagttaggaaaacagcgaagaatgccgg

SEQ ID NO: 60518 - DNA, 995 bp, Homo sapiens
  misc_feature (1)...(995): n = a,t,c or g
ttttttttttttcccaaaaaactttatttattgtttcaagtggcaaaatgtcattggtctctgtggggtacctggcggggcagacggagacctggggtgaggcagggatacagtcccacccattataaaaatcaaaggcttttataaaaaatgctataaattggtatcaaaagaaaacccaagggaggctggaggaggaagcagagagggagagggaaggaggagaggaagggacaaaaccttcaaccactagtgatgaaatccagggaagggaaggtgtggggggagttcggagggtgatacaaagtgcataaatgtgcctccccagacgctcctcagaggtggaggggacagaggctgcagcctggggcatggtggggctccagccgtctcctcacccagggaccccacaggaatgggcactgcctgagactgccaggtgggaagaacctcagtgacttctcagaccttcttcttcttcagtttcagggcttgaagccagttgggcgacgatccttctgaccctgaggatttctctggcttgggaggtaacgtgaggggctttcccagtcctgggaccttgcaggatttcgaacgctggaccgcggactccttctggctcgacttgctctcagccagctctccctcctcagctgagcgattccgggggcgcagcttggccttcagggctgaggggctcaggccaggaaagaggttgactttcagccccttggtgcccaacgacatccgtgtccggcggctctgaggttcctccactacctcttcatctgaagatggcacccgagatgcccgtggctctgtagagtcctggaacaggtgtgcatccgagtctgctgcctccgacaggcccaaggtacccccaggccgaattgaccggggcccggtgcccacgcttgcgccccaagttggccggctccnnnnanngnnntgncgntgctaaagttccggggtngagnnaggccggactgactgct

SEQ ID NO: 60519 - DNA, 587 bp, Homo sapiens
ggggctggaagtggaagcgcagcggcagaaggagagggagagagaaagagagagaggctaattaaaaaaggatactccgagggaagagagcaagggcggtgcgccgccaaggaccaactagcggcggagcttcgatcttgcctaggcgcggagagctcccaacctgggctggaaccttgcccagcacaggtggctgctacaccccatgtaaaaagcggaaaataaaatgaagattttccagcgcaagatgcggtactggttgcttccaccttttttggcaattgtttatttctgcaccattgtccaaggtcaagtggctccacccacaaggttaagatataatgtaatatctcatgacagtatacagatttcatggaaggctccaagagggaaatttggtggttacaaacttcttgtgactccaacttcaggtggaaaaactaaccagctgaatctgcagaacactgcaactaaagcaattattcaaggccttatgccagaccaaaaattcccaggttcaattattggcttccattaagataaagaaagccagccagctcaagggccattcagaatttaaggtttag

SEQ ID NO: 60520 - DNA, 1838 bp, Homo sapiens
tggggggtggtatggagagagaatgggcgatgtttctcagggctgcttcaagcgggattaggggcggcgtgggaacctgaagctcggcgtccgtgatggtctagggggctttcgaggcgatcgggcggtgtcagtcttcagccgctaagccgagaggatctgatttaaaattggtgagatgttccttgggctggtcagtctgaggacctgaggtcgtaggtggatctttctcacggagcaaagagcaggaggacaggggattgagctcccaagggaggtcccccgatccaagtcacggcaccaaatttcatgcgcggcaccaaatttcatgcgcgtccgtgtgaagagaccaccaaacaggctttgtgtgagcaataaagctgtttatttcacctgggtgcaggcgggctgagtccgaaaagagtcagcgaagggagatagggatggagccgttttataggatttgggtaggtaaaggaaaattacagtcaaagggggtttgttctctggcaggcagaggagtgggggtcacaaggtgctcagtgggcaggagtgggagtcgcaagatgctcagtgggggagctttttgagccaggatgagccaggaaaaggaatttcacaaggtaatgtcatcagttaaggcagggaccagccattttcacttcttttgtggtggaatatcatcagttaaggtggggcaaggcatattcacttcttttgtggatctttagttgcttcaggccatctggatgtatacttccactgtgagagttacccgaagctcagcatccgtgatggtctagggggcttccgaggcgattgggcagtgtcagtcttcagccgctaagccgagaagatctgggaaggagtcagtcagagagccttgggccggagttccaggggctctgggagtggcttgcccaaggtgagttgaacagtccgattttcagtggggtcccacacagatgggacgcggcttaggaggaatcccaggctgcgggcattcctttgcccagtggccagatttccgtcacatgtagcaagctccggatttgaaattggtgagatgtttcttgggctggtcggtctgaggacctgaggtcgtaggcggatgtttctcacagagcaaagagcaggaggacaggggattgatctcccaagggaggtcccccgatccgagtcatggcaccaaatttcatgcgcgtccgtgtgaagagaccaccaaacaggctttgtgtgagcaataaagctgtttatttcacctgggtgcaggtgggctgagtctgaaaagagtgagcgaagggagatggggtggggccattttataggatttgggtaggtaaaggaaaaaggggggttctctggcaggcaggagtgggggtcacaaggtgctcagtaggggagcttctgagccaggatgagccaggagaaggcatttcacaagataatgtcatcagttaaggcaggaatcagccattttcacttcttttgtgatttttcagttacttcaggccatctggatgtatacgtgcaggtcacaggggatatgatggcttagcttgggctcagaggcctgacatcttctttcttaatttctttcacacataccccttcctttctgcttctatggccgatatcctggttcagcccctgactctatcacttttaacctgaaataactgcaatatcgctaaaacgtattcctcttcttgttctcctcccaccccaatccttcctgcatactccagaacagctccccattcagaaacttttttttcttcgagatggagttttgctcttgttacccagactggaatgcaatggcataatctcggctc

SEQ ID NO: 60521 - DNA, 580 bp, Homo sapiens
tttcgtgtctgaggcggctgtggccacgtctgaggcggctgtggccgcgtcggtgtccgcgtcgaggagccggggcagggcacgatggcggactgggctcgggctcagagcccgggcgctgtggaagagattctagaccgggagaacaagcgaatggctgacagcctggcctccaaagtcaccaggctcaaatcgctcgccctggacatcgatagggatgcagaggatcagaaccggtacctggatggcatggactcggatttcacaagcatgaccagcctgcttacagggagcgtgaagcgcttttccacaatggcaaggtgcaggtgatggtcctaccagtgtgtctgttgaggtcacccgtcctaaagtgacctccctgaaagcctgagttgaaatccagactccacttcttgaggcctggccttggactcttgggcagcctctggaaatcctcctcttcaggcccagcggataccccaccttccctgtccatgtcttccttgtactccctgtattacccattgatgtgtaacaggtcaccctaaaacttcacctaaaatagcaatgaaaaaaaaaa

SEQ ID NO: 60522 - DNA, 1669 bp, Homo sapiens
ggataaataatatcctatatatttatacatttctatgttttaaatagatataaaaatagagtctatagagctgggagagcagtgggaagcctggcgctgtgctgtgcaaaggggaagggagcacggccttcggagagggagccggggaaggccagcaggcagggttggctggcaagggggcctcctacccggagtgttggagaggagagtggctgggtcccggctcgctccatgcactttctctccttttccacaggcttggtctgaggttggaaggagataccccctgagctccagctgaggtgccccctacctctccccacccccacagcccacgcttaggcggtcactgctgcttggcagtaggacgtggtctctgactcctgggtggagggaccactgcacaaactccttcaaaaccctcccccaccaggactgagcagcgtcagtggcaataggaaaggtccaaactggatcaagagctggtccaggaaagataccgcccctgccctgttagatgcttctgctgcccctagaggccaagcccctgaagtgcagccgtcctggcctccctcacttgctcaaccactgtcaggaggagaggatgtgggcagcatgagcatcgccaggcagcgctgcccaccatccacaggctttctggccagggcagggggcatcagctagcaggaaacggtgggagagacatatctgcacactcataaattcaatggctactccagtccagaagcagggctttggcccagcccgctccgcgcagcagctgctgctggctgtactcaggacaacgctgttccccctccctcacagaggccccgtggcccctaccccactcccgccgtaacaggcaggtttagttcacatacactgttcgcattctgtgacttgaggcagaggctgagctgggataccccaagctcatccactttcgttggggagggcccctccctgggtttatcaccagctcctagcccgggccgggcggggatgtctgggggccacgcgggggcactggtgcaagctggcagcatgacagagggcttgtgcagccctgacgggacccagaagcccatttgctcgcagtttcctctctctgtttttttcctcctggaggtaggagagagggcctgaccaggcaccagatgatggagcaagggcagctgcatgctccctctctccagaccagccttctgcttttggggtccgaaggggcatttgctcccatcctgagcctcctctgcccctgtcttgctcttccctaccatcctacaagtacctcagtctccagcaggcccacccctccacctgcagcccagggcgggtctgttctgccaatgcccacctccttgagccacagttagctgccaactgggtcttgggacaccctccagtacctggctcaagagagaccaggccgggccgagccttcttcccactgcagtggactagacccacggccaggggatgggcatccccaggtagcaatcccacaatgcactgtacctcaaagagagagcacgccaggggcaccaagggaccgagccctctgtccagagggggacagcggtcacaatactgctcaccaaaagacaaaggccaggctgccctcgggcacctctcagtcttcacttttgtctctccggaagaacca

SEQ ID NO: 60523 - DNA, 5600 bp, Homo sapiens
caaagttgtcatgaaaatttattaagaaaaataaaatagagttcattttattaagagggcattaaatcttagttggtaatgtctctttccttctttcctttgcagagtatgtatgtaactgctctgtggttggaagcctgaatgtgaatcgctgcaaccagaccacagggcagtgtgagtgtcggccaggttatcaggggcttcactgtgaaacctgcaaagagggcttttacctaaattacacttctgggctctgtcagccatgtgactgtagtccacatggagctctcagcataccgtgcaacagttctgggaaatgccagtgcaaagtgggtgtcattggctctatatgtgaccgatgccaagatggatattatggctttagtaagaatggctgcttgccctgccaatgcaataatcggtctgccagttgcgatgccctcacaggtgcttgtttaaactgccaggaaaatagcaaaggaaatcactgtgaagaatgtaaagaaggattttatcagagtcctgatgccactaaagaatgtcttcgctgcccttgttcagcagtgacatctacaggcagctgctctataaaatcgagtgaattggaacctgaatgtgaccagtgtaaagatggttacataggcccgaactgcaataaatgtgaaaatggctattacaattttgacagcatctgtagaaagtgccaatgtcacggccatgtgtacccagttaaaactccaaagatttgtaagcccgagagtggtgagtgcatcaactgcctccataacaccactgggttttggtgtgagaactgcctataaggttatgttcacgacctcgagggaaattgcatcaagaaagttattcttccaacacctgaaggttctaccattttggtttccaatgcctctttgaccacatcagtgcccacccctgttataaatagtacttttacccctacaaccctgcagactatcttttcagtaagcacttctgaaaacagcacttcagctttagctgatgtatcatggacccaatttaacatcatcattttgacagtcatcatcattgttgtggtgctgctaatgggatttgtgggggctgtatatatgtaccgcgagtaccaaaaccggaaactcaatgcccccttttggaccatcgagctgaaagaagacaatatcagtttcagcagctaccatgacagcattcccaatgcagatgtttcgggattgttggaagatgatggcaatgaagtggctcccaatgggcagctgaccctgacgacgcccatacataactacaaagcctaaggagctagaactgttctgaattgttaaaccacagtgcttgctaagacagagtcagcccctgggccagacaaagcctggctagagtttgctgagaaagcaaaggcaaatagtgcatctgaaattttcaggtacaaatttgtaatgcgcttagcctatctattgctcttagttttcccatgaagatctgaagcgttcactgtcattaggacttgaagtaaagtatatttttgtaccaaaccacatgggagtatggaaaggctgaaccccatagtgcagcccaaaaccactttgacctccagatagactcctggggaagcattcaccaagccagtggtaacaagatgatgaatgtggagggggaaaagactgctggaagacttcatctccattcctgaaacattttttttaaaacagtgtcagggattatattcgttttactatacaaaaggacatcattgaggaaaagcttgtttctaggctgtatcacagtaaataatcttgattgtttctagaacaggggtagaaaagtcccaagatcttcagaagggcttggttttttcctcccaggattcttgctcagtgatgagttgaaagcacaggataagcttctaagggaggaaggcagcattggggagcaggaggctgatggtcctcctcagggtctcagtgtaaatgataaattgtctaaaaataaggaatattcctgcctctagagaaataaggtgtacatagttaatgtagcatatctggtcgacgttgtatttgtatctatttgtaaaaaaaaaatcatgtcatattttatcatctggaatttatttgtacagcagttaatggtgttgtaaaaagaaaaatatggggattgcttaaaatactgtaaaatagatggcaatattgctagagctgggactctggtgagcatccgtcatttttagtccttcttgaggacattgctgaaatttataagaggtcgaatgtttctttctttcctttctcagtctaaaagtaaagttatatgctctttgacttactatgattcaagcaatagattttgaagtcagtaatcgttaagctgggacataggatgcattctccaaaaacattaatctaattagacattagccaccctatatattttacatagattaatataaaacatatcctcattaaaaaatgtttttcttgaatgtaaaagatagtcttccaaaggatagaaatattttagttccaagagaaaagccatcatattacttgggatctgtagttttcatgcctatgaaatatttataatcctccctcaccccaaataaaaaatctcctacatgtgaacatagcctgtcactcatttgccatgaggtatgtgccatctccctgcagtgctatagttctcccattgtcttcctgtctggttaatgagcagctttgtagatgggtgtgtctagttagttcttgctttttgatggagttttttcctagaggccaactactgttgctctcgtttattatgatattgacattttgggttaagcaaggtgggtgggaaaggtggtcagatgttaaatataacttattaggaggaacagtgaactgtgaagtggttagaaaaaaaataaaaacttcttattagattagacctaggaaattcaagctgacccctttgcctaacttccctagagaaaaacctagaacttggtcatccctttataggagacccctaagttgttctcagggtttggagatgatgttctggagggagtacaagcaaataatctacttctggtaatctgagggtgctttgcgtatttggccattgctcagaagaatagaggttacattatattacattatatgaaaattatttagtttttctatagccctttgtagtttgcaaagcacttttccatatgtgtgtcctctcttccacaccatagccccctgaggaagtaattgttgtccccattttatagatgaaaaggctgaggcacagaggagctaaatatcttgttcaaggctatacaatgtgtgtgattattaggcttggaatcagggcctctaactctaaagcacatgttttttcaactatatgcagaaattgcctagccatggacacaagaaagctgggaggaagagttctacttgtggatgtttttaattttttttaaatatcaggagcaatccagggccatacagctatgaagcacttagtgaaaagaacacaagaagatttactaactgaagttagtattagtgattagaaaacaaaactgccagtttgtgcttcattaaggtgaactcatctctccaagcaggaagggaaaatttgctttccctagcagttgctgcatatgtgtgtacagactgcacaattctaagaaattgtgcaaaatggcatacctgtctttctcccagatacaccgccccctgccccccccaaaaaaggtcaggattaaaggtggtgagaagtgaacatttattaaacagaagttaaaccaatagagagaaaggaggtttgttggagtctaagaggattttgaccatgtagaaattccttgaaacagaccttaaaaggtattgaaaaattgaatcacaaagaaagtttacctttaaatacttgttaatggctcctagatcatggttataatttttctcaatgggaaaaaaagtcttaaaatttgttttaaataagatcctctaatgtctcgagctttttgattctggaaataatttgctttaaaatataaatcaatcagaaagtgatctaccactgaaatcattctaggaaactagcatgggatgcactgcacaatgttctttcctctaaaggcatgggccccataaactgtggcatctggcagcaggatgccatcagtcctttagaaagcctaattttgggccgggtgcggtggctcacgcctgtaatcccagcactttgggaggccgaggcgggtggatcacaaggtcaggagttcgagaccagcctggtcaacatggcgaaatcccgtctctactaaaaacacaaaaattagccaggcgcagtggtgcgcacctgcaatcccagctactcaggaggctgaggcaggagaatcacttgaacctgggaggcagaggttacagtgagccgagatggcgccatttcactccagcctgggcgacagagcaagactctgtctcaaaaaaaaggaagaaaaagaaagcctaatattgggagaatgtttgtgtaaggattggaaatctgtttatttttaaataagatagcactgatgtgaatcttatttggaaattacagatactgccattaagcgatgcttttatcttcattaattcattttggtaagcgcctatgcatttctgatggttaggtgccctaggtagtgttaagtatgtccgtgtcctcccttactcccctctcgctccctctaccctctatcccctagggttcttttattaatggaatttctccagttatagagaaaaaaatgacatttgaaaactaaagctcatttatattaatactaaggtcctgtgggcctagtgcgttactcttcccagtgatacctagattttaagagtagagaacagaggaaacatgggatgagaggagagaggttttttagacaacatttgtagacacctcaaattatatcactgttctctagcgccaatattcccaggtaaattgaccattaaagcaatactcactgacctactagtttattttggtcagctgagtaccatcaggatatttaaccctttaagtgctgttttgggagtagaaaactaaagcaacaatacttcctcttgacagctttgattggaatggggttattagatcattcaccttggtcctacactttttaggatgcttggtgaacataacaccacttataatgaacatccctggttcctatattttgggctatgtgggtaggaattgttacttgttgctgcagcagcagccctagaaagtaagcccagggcttcagatctaagttagtccaaaagctaaatgatttaaagtcaagttgtaatgctaggcataagcactctataatacattaaattataggccgagcaattagggaatgtttctgaaacattaaacttgtatttatgtcactaaaattctaacacaaacttaaaaaatgtgtctcatacatatgctgtactaggcttcatcatgcatttctaaatttgtgtatgatttgaatatatgaaagaatttatacaagagtgttatttaaaattattaaaaataaatgtatataatttgtacctattgtaaaaaaaaaaaaa

SEQ ID NO: 60524 - DNA, 1569 bp, Homo sapiens
  misc_feature (1)...(1569): n = a,t,c or g
ttctaattcagcatatatcatctcagaatggatccccagcaggaaaaaaaaaaaaaagttactaaaaaggaaagtatccatacactgaaaacttaaagcatattcctttttggttgccttgtatgtagaaatcagttctccaagtgctgtgaatggtgccacttaggagtagaaactgatgattgttgaaatggcctttgggtggtctgaaatagaccagtggaaacagtagctttgtaggcaagaaggcaatagtaagaaaatgaaaaattgactccccaaactgccatcactccttttaccatcttttttgtgtttttagtagtttggtttctgacggagacaatagaaacttacttaaaagtaaaatttaattctagctgttgcaaacaggccaatattgggtcctcagttggggccaacttgggtagacgagacagtagaaacttctgttttctgggagctgcatgtgtcggattcatctgtcatggccttcccacacaccatcttcatgatgcaagcttggaactggagagaaaggtacaattggagataaccttggcagatgaggaagtatgggaaaaaagaccttattctctgtatcaccaaagccttgcacaatgctttgtacccagaatgcccttaggtggttttgaatctatcttccccatcctgaaaactatctagattccagtctagaactactcctgggtctacggtaatcctaaactggtcaagtctgagacctcactgttggtaaattcacaaaccatcctgcttcataaaagcactgtcagcagaggcccctccattactagcaggtgctcccagctggaaaggactgccaattctcttctatccagggaggtttcaaattagttttgagtctacctctgggattgaggaaacaataccatctgaaagtagggtttttgccacttagggtttggtgtttattagctcggatttcagatgggataggaaatcccccagtaccttcagatgataagatattttagagatttttgcatgtggtatgatttctgtgcttcacacatgctcgtgcaggctaaaagttggaagggaaatgattaagaaattattaaatgcaaggactgaaaattgagaggaatctgagtttttatttttatttttttaattttatttaagttccaggatacatgtgcaggatgtgcaggtttgttacataggtaaacttgtgccatggtggtttgctgcacctatcaacccatcacctaggtattaagcccagcatgcattagctatttttcctaatgctctccttcccccacctaaccccccaacaacccaaatgcccatcaatgatagactggataaagaaaatatggtacatatacaccatggaatactatgcaaccataaaaaggaatgagatcatgttctttgcagggacatggatggagatggaagccattatcctcagcaaactaatgcaggactatatgttctcacttataagtgggagctgaacaatgagaacatatggaaacagggaggagaacaatatagaccggngtcctcttgcat

SEQ ID NO: 60525 - DNA, 3544 bp, Homo sapiens
ttttttttttttctgtttctccaaaattttattttaatttaaattacagggccagccagatattctgataagaaattcacttttccttaggagaaagaaaatgctttcatggcattgttaacaaatgtatacatctccacttttttaagggttaaaaatcacattaagtaactgccttatgtaaaattaaacctttataacacaaaaaccacttccagtataatagtcttggtaatatgaatatattaaatgatcataacttcaaatgcaacatttcaaacttaaatgttttcacattgttttgcttaaaaacaaaacccacgaagtctgaactaccttcagattccaatgtaagagtaacatgaatgttgtgtctgacacgctgcaccctcacttcttccacctaaaaggctacgacctcactgccaaagtggaagctgttctagatgtgtaagttctaagaatgagcttggcaagaagacgtttcttccacttggtgtaatccatgtttttacactaactccatacacacagcactacaccacaaagccaggacaccacatcacggccaagtcttccttcctaaacatccaagagatttttttttcaaggagactagattgccttatttcacacagattctggtaaagacagtcttgagaaatgccaattatgatgtagactgccattttaataaaaataaaatatatctatattttctggagctattttcctaactggtgttcctgaaggtttaaaacctgctgaaacagcaattgggaggcccattttactggccagtatataattccattagtaagagaggctagcaaagaataatcatatcaatttcttaatcagctgcagccatgctgaatttgaactggcaaactctgatttgtcagttgttagttgtgatcttcatatcactaaaatgaacagataccattctaataacttttaccatagatatagtctagaagacattgttcctgcccgtggtcccagtaacaaaaaagtggtgcaaaatcagttactttataaatactgataatttgcagcattaaggaacaggacattaaaaaaaataaatttccccataggacacctatgactaggaagtcgtcttttcctaagagaagccaaagttttaattattcagttcacaactattgtactgggttacttagtctaagaaagaaaaggtgctctacagagatttcccacacacacaaagaatcagcattaatttagcataatctctatcattcacagatctggcagattcattaactcatttaaaatgaataaggccaataggatgcaggaaggtgtggctgactgagctccagggctgtatcgcagcttattgatggcaccccattaggtaactgaatacaaaggactggtttactttctttttcttttaatgctgtgatacttaaatgttaaatcagcattttcatgtgatctgaagtatttcaattacatatgagcattcattgttttttgcaaaaactcagtattaggtaatagttacatactactacaataacattcctctgctgtacaaattaaaccatttaaaagaaatgagcattctaagaattatatacaaaagaaaccttgaagcagtgttgaaatgaaatgcaaggtgtcattgctagctctactgttttaaagtatctttgaaaagtaaaattaacaaatacccttcaacatatccaggtttacaagtctcaagaaaatcaaatgtcaaaaaattctagaaagctgtgaaaagcatatatacattttccttatgatcttatgaggcttctttacacttttaagaagttgctaagtttcagtatcaatttattcgcatgtcaactttagctgcccccaaactcccattttggatagctcccctctgatttcagataaagctctgcgtcatcttccttcagcgaaggtgcgcgacctgaaggtgcgcgatctgacgcagggatgccaggtgtgcacttgccacactgcactcagatcgccaacaaagatgggtgcaaacacataggtctaatctgatatcagtgccctctttcctaaaccacactctcatccatacatttgccttcatgaacccagccatgttcagaactcccgtagcacagtctttgaattctgaaatgacacaaagatcaagagaaagcccacatgtgccctagtgtgcaagcagcagcagctacgatctccaacctggactgaaaaacaaaagggtaaaatgaaaaaccgttcacttaacagcagattagcagtaatgttcctcatgaatcaataagagtgcctgatgctgaatagctaacagcaaatgctgaatttggatttaacatagatgtttattggagattaagcttcttgctgagctggtctcttcaaatccctgatctgtttaactaaataggtcttctcgtcgttaaactgctcatcctccgtcctgtcgttctgaaacttgctgaggaactctatgagtttggcctggttcttgaggaggatgtctaggatgggctgcgtcttgttaggattggctacaaacaccttaaaaacgtgaaaggcctcaaactggatgttgcgacttttgtctcgcagcaggttcatcattaaatttgaggttccacaggtttactgatgtattttgtcataattgtgaagttgtgtctatctagtagtagttcaccgagaagcttcagtgactgtctttttgtcacataattttctgaatgaagtaacttctcatattcactgaaaaatctatcataatgctgttccaaaaattctgcactgagcaatttatgtcttgtaagtaaatccttgaatgtggcaaatgcatctgaagctatgtcaaatgttgacatttcgacatatctgaagaaatcataaaactgttccgaccacaaaatgatttttgcaagtggttcatgtctgatgcattctcttaacattattccacaatttagagctatttctggagattcataccctttcaataacatgaacaaaatattctgttgggtgcagatgtattcaacagtaggagttctcgtaccaatttgtcttctgagaatattgttgaaaatttgagccacgtcttttttgccctcaaagtcaatgagctgtaaatcagctaccagggtgctaaggagcccactattatagagttcttgagcaagttgagctactgcttctgtctgaggctctttttcatttgtgccatacagaatttctttcatggcaaccagatttttggaaacttcttctgtagccttttctgcttttttatcagaaatgtcttgcttttccagaacagccatgctctccttcagattcttcacaatgtctgctggagatttgtgagacttcccaaacgggaacggcatgacggcagcggcaggggcctccgctgcactccgcctgtgctacggggctgtcttccgttgtcttccgcctgtgcccccgccccggcgcctgaaggctctgtgtctcccaggccgcgccgctccccacgaaa

SEQ ID NO: 60526 - DNA, 3645 bp, Homo sapiens
ttttttttttttaaaatacacattgcttcaggccaacgtgactgcagtttatttatttgactattttatggtaggggagaaggttgagtgttgttgtgaaagccctgatatcagtaatggggatgatacaatctgccagcagaggagaggttggcaggtaggtcagctgcatcacttcacaagaagaatttgaatcctcactagaaggggtaccatcctcttccagttcatacttcccatatccaacaacatgaacgctgagcattttacttcctggccctctatgggccttgaaccagttgaccaggtctgattttgagaatgacttcagtgcttcaatctcgtgggcaaggcggtcaaagaggtactgctgtgtaaccacttcattccagttcctatccacctcctccccaaggtgggtatcctcacactccttcagcttgatgagagctgtgacctgggtgttgaatgcctcttcagtgaggttctcaatcttctcctcaaagctagaaagaaactcttctatcttcttatcaacaacttcagaattgtatttggttgcctgagtccccacagtgacagaaaatcctagaatcccggatgtgttcctacaggtagggtagacatggtacccaagggtctgcttggttcgaaggaagtcaaaacaaggttcttccatgtgcatcacaagcagctccataagcgtatattctcttagactcctggtacctgactggtagtacacagtgacttcagagttggcatcacccttgttcagagctttcactttgcatagatggtggccactgggcagctctaccacctggaactgcacaggcatctcctgctccagaggcttgaagtttagtttgtcaacaacatatttcaggaaatccatagattctgtgcttgtgacattcccttgtaccaggccctccacaaagagctgggatttgaattctttgacgaagctcagcagagactcaagggaaaggccgtccatcaaagcctggtacttgtcaatcatagaccaacgggcatattccaagattaaaagccgtacatctttggccaaagtctcgggcttgatgaggatgttaaagtaggtcttcttcaactgctcagttatcattgtaaagacagctggtgtggaattgaactcagctaagtagtcaataatgagctgaaacagtagaggtagtttgtggttaaatcctttcactcgaataattaaaccatgttctccagctaccagtttatactccagctgtgcccacatctgcttcataagctggttcccgcaaggttatgcgtaaggatattgacaaagatatcaaagaggaccacatttgctgcagatttctgtatcaacggtgaaattagatggaaacgtatatatgctttggggattttgaatttgttgtctttcttataccacaggcaaccttgtggagtattcacaattttaactgggtattctgtttccgggcaatcgaaagccttcaacgtaaagtccgtggctatgtacttgttttcagctggaagatgaagatctggatttaattcgaaattactattccacagttcagcccaagagttttcaatatcttctatactatattgagttccaaaccatttctccttgaggtcacattttccctcattagcaccagacagtaaaacaagatttgctttttgaggaactagctgattcaaggcttcaccaatgacttctggcttgtattcaaaaagaagctgatctccagtgagaatgtcctgcaatgggtacagctgcatgttctcacacatgttttccacatactcaactggatctgtctgttcttggtaatgaaattcattatcctcaattttccgaatctcttcaaaaattcttttttgtgggcctagcttctgcagcatttttaaatactgaaagacagtgtaagcaacctcataaaaatgttcataaccctcatcagtcaatgtaatagaaatgctgaacactgaataagtagaattttgctcaaatcctgtctcaccatttccaccaaacagtgcaagagcccagcattttttcctaaggaaagaaagaatgctgcctttgccttcatgtccaaccagccaggatatataatgaagtggcttcaccctgtaatgttgctgttgaggaggaagtgcccatgtgatggtcagagcatgaatttttctgattggaacaactctataaagtttgttaaatgctggtgtgtcaaatggatccgttaaatggccaaagtttggtctgggtaacccattgtttggtatctgagagaagatttcagtcacccacttttccaaagtatccagtgtttctttggattgaaccactaaagtcatgtaatgagaagagtagtaacgcatccagaattctctcaatctagcatgtgtatcaatattattctttcttggctcatgcttgagcgtctcagcatttccccaaaaaaattttcccataggatgtccaggtctagcaaggcttccaaacaacatttcctttctgtttgcatcagaaggccttgcaagttgatattcactatcaacagcttcaacttcacggtcaattgcatctctgatcattagtgggtggatgaagaactgcgcccatctatcaagagcttccttgaagtacttcctctggacatcaaactgaaagacagtgcgttcacaatcagttgaggcattatcactacccccatgcttcttcaggaaggcatcaaatccattctcatctggatatttcaaactacccatgaataccatgtgctccaaaaagtgtgccagccccggcaggtcatctggatcagcgaaactcccaactccaacacaaagagccgctgcagactgtttttcagtagttttttttctagcttctgctctctcttctaattcttccaattcattatcctcagtatcaagatcatcatcatgttcatcatcaaactcatcttcatcatcaaaaccctcttcatcgtcatcttctatttcagctccagaatcttcatcatcatcttcttcttcttcctccacctcctcttcttcttcatcatctgttgtatttcctgttttaccttccatattacttaggtctgaaatcagaagtgcctgcaagccattctgtaatttgatgtatcggtattgcttggggtcgctgggagacttgacgatctcagggtccccagcattactgagagaccccctccgtccctcttcctcagattcatccgctcctagacgggcaacccggctgttctcgcccagatcctgtccattgggctgcaggtcagggcagctgcaggtagacttcgccttgttccttccaggcatggccagaataggaaagggtctggcagcagcagagtcttcgcaccgaccccgcgtttcgattccccagagcgccgcgagctcccgcccggcctcacacaacttcctccgggtggcacagactgcagcaacagtgactctcctcagcattcaccaccaagctggagcgatggacatcccgcttcccaggacccacctcctccgcgttctagaggcggtggcggccggccctggtgatgccgcagccgcggggaacaggcctgaacccctcccccaacccagtct

SEQ ID NO: 60527 - DNA, 4652 bp, Homo sapiens
ctcattgtgtctgtgtcgaggcgtcgggagggcctaagtccgtgtgcggtgcccttcggccggcctgagccccagagtcagctcccctttctcgcccagcgcccccaggccgctcccggggctcacggaatagtaaagaaacacatcataaaacctcccaggacataaaggtgagcacagaccctgtttggatcaagtcagttcctggagcctgaatgatgactgctgaatcacgggaagccacgggtctgtccccacaggctgcacaggagaaggatggtatcgtaatagtgaaggtggaagaggaagatgaggaagaccacatgtgggggcaggattccaccctacaggacacgcctcctccagacccagagatattccgccaacgcttcaggcgcttctgttaccagaacacttttgggccccgagaggctctcagtcggctgaaggaactttgtcatcagtggctgcggccagaaataaacaccaaggaacagatcctggagcttctggtgctagagcagtttctttccatcctgcccaaggagctccaggtctggctgcaggaataccgccccgatagtggagaggaggccgtgacccttctagaagacttggagcttgatttatcaggacaacaggtcccaggtcaagttcatggacctgagatgctcgcaagggggatggtgcctctggatccagttcaggagtcctcgagctttgaccttcatcacgaggccacccagtcccacttcaaacattcgtctcggaaaccccgcctcttacagtcacgagctcttcctgctgcccacattcctgcaccccctcatgagggtagtcccagagaccaggcgatggcatctgcactattcacagcggattcccaggcaatggtgaagatcgaggacatggctgtgtccctcattctggaggaatggggatgtcagaatctggctcggaggaatctcagtagggacaacaggcaggagaattatgggagcgcatttccccagggtggtgaaaacaggaatgagaacgaggagtcaacctcaaaggctgaaacctcggaagattcagcatcacgcggggagacaacaggaagatcccagaaagagtttggagagaaacgtgaccaggagggcaaaacaggagaaagacagcagaaaaaccctgaggagaaaaccaggaaagagaaaagagattcagggccagctataggaaaggacaaaaaaaccatcacaggagagagaggtccaagggagaaggggaaaggattgggaagaagcttcagtctgagctccaacttcaccacccctgaagaagttcccacgggaacaaagtctcacagatgtgatgaatgtggtaaatgcttcacgagaagttcaagccttatccgccataaaataatccacactggagaaaagccctatgaatgtagtgagtgtgggaaagccttcaagtcttaactcccaaccttgtcctgcatcagaggatcccacacaggagagaaacctcatgaatgtaacgagtgtggcaaagccttcagccacagttccaatctcatcctccatcagcgcatccactctggagagaaaccttatgaatgtaatgagtgcgggaaggccttcagccagagctcggaccctcaccaagcatcagagaattcacacgggggagaaaccctatgaatgtagtgaatgtggaaaagctttcaaccgaaactcatacctgattttgcatcggagagttcacactcgagaaaagccctacaagtgcactaagtgtggcaagggccttcacccgcagctccaccctcactctgcatcacagaatccatgccagagagagagcctctgagtacagcccagcctcccttgatgcatttggcgcgttcctgaaaagttgtgtgtaaaggaagaatttgccatcaagccatttcccccttttgtttctaaaattatttcagagatgtgtgctcctggagggaaaaagaaatacagcctcaacagattaaaaaacaaaagtcacacttaaggatccttctagtcacatcagcagtgttctgcctttatgtagtagttgggcatataatccttccacacagcccctgcagggaaaggctaatcttacggataatccacgtgagatttccacacaagagaaaagcacacgcatagtgaaatgtcagtcttttcagtaatgaggatacctttaaggcactcttggactctcggcaaccacaacataatagttgaaagatcaagattggctccaccaaagtgatacggaggttaggatgctacttgctgcaaacaagccctactttggccaacatcctgcttatttttcaaaaaagagggacagtgaaaaccaaaaacgaaattgttacatgctgctcaaggtagttatatatacgataagttgtatatatgatcactggtagcctaccaaagctgtaaaaaactaggactgtgctaatcagtatcaaaccaaaaggatttctatctcttcccgaaagagagggtatgtgcaccagtctacagttccaaaggactgcaacaaatgtaggatggttctgtcctcatccctgagatcagttctactgaaatggcaacaacaactccaaatacatctctcccttcttgaaatccctaaagcactatcgcactcctaaatgcatttctccacaagttagcacttgattgtatactgtcttttaatccttcattgtttcatgtatgaagtttttaatcaccccctaacccccaaaaaagattcggttgtcaagggatatatttctatccctgccagcacagtgctggacatagtgagtactgaacacctaagaggcactcattcagactgacttctacaggacttctacgtgtgtgataaaagcctgtgaatcgtgagtccctgaaatatggtagcctggcccaggttttaaagagggcctttgtagccccaaggcatgctaaacctctagggtctgatgctgtttttgttccaaatattaacgaaaggcactagtcagccgcctgcatagacctttttaacagtgagttaataccatggaatgtcagaaatgactttatcatcgtcatcttgaagaaaaatatgaaccctgatgaaggtcattttttttttttgacatctttctgtggcaaagctcttagaattctttgcagttagctgctgaacagtatgatgatttggggattttctgaatcatttgtacttagatactggagttcagaagatgtgatttttgttgcttttcagaaaaaggaacgtggtagggagtgttttttcccacgcttttccagtaactttgcaaaagcattaattgttcactggcaattactaaatgtattttgttgctctgagaaactcagcagtgtactgagatgtggctggctgtgccatcgtcatagtgcacagtgacttttctgtttcttatcactaaagactgaggtgaggttatgaaactttcattggtcccatcgttgtgcgcagggtgcaactggctacctagaagctgatggcaggagactgtttcacacacaggagattgtgagctgtgtaagtagtcatcgccactcaagtaggacaagggtcctacccaaggctaggaccgccctgcggaaacagaaacatagactgagaacaaacctcaagactatcagtgtgacctccccataacaagagaaccccatatatagtttgagactttcccttgagaaacttatactaaaactattactcatcagtcattcactgatcagcagctaaagtccatgagaccaaatggttttatatggaaccaacaaagtgggagctaaaactgcacagtggtcattctttggcctctccttggctttatgacttaaaccaactacaacttccctatagcttctaagcagtttcatcagcattacttgggaaaacgtgttgcaagtcaaccagtcactaggatatttctacccatgcaacggaagaaaaacccattactccagaagagtatatctaagtaactaaaatggaggcagaaaatgttttaaggattttcttcaaagaataagccacagcaatggttttgtagaaaactcctgtgcttttgagcaaggacttttgccctctagaaagcaactgaggccaggtgcggtggctcacgcctgtaatcccagcactttgggaggccgaggtgagcggatcacctgaggtcaggagttttgagaccagcctggccaacatggtaaaatcccgtctctactaaaattataaaaattagccgggcatgatggtgggcacctgtaatcccagctacttgggaggctgaggcaggagaatcacttgaacccaggaggcagaggttgcagtgagccaagattgcacactgcactccagcctgggtgactagcaaaactccatctcaaaaaaaaaaaaaaggggcgcccttttaaaagaaccctgggggggcccaaatttacggggggtggccgaggacatggtttttcccttatggggagccatttaaaaccttggccctggccccttttttaaaatgtaatagaggggaaaaccaccaacttggtaatttttgaaaggaacctttattttgggggggtaacttaatgggagaacaaacctag

SEQ ID NO: 60528 - DNA, 3169 bp, Homo sapiens
attcgtgcgccgataatttggtggcggcgtccggagggtgctggtttgttctcggtgaacggcgcgcggggtctctcctgagtgcgagctacgggaccttcgccatgccggggatggtactcttcggccggcgctgggccatcgccagcgacgacttggtcttcccagggttcttcgagctggtcgtgcgagtgctgtggtggattggcattctgacgttgtatctcatgcacagaggaaagctggactgtgctggtggagccttgctcagcagttacttgatcgtcctcatgattctcctggcagttgtcatatgtactgtgtcagccatcatgtgtgtcagcatgagaggaacgatttgtaaccctggaccgcggaagtctatgtctaagctgctttacatccgcctggcgctgttttttccagagatggtctgggcctctctgggggctgcctgggtggcagatggtgttcagtgcgacaggacagttgtaaacggcatcatcgcaaccgtcgtggtcagttggatcatcatcgctgccacagtggtttccattatcattgtctttgaccctcttggggggaaaatggctccatattcctctgccggccccagccacctggatagtcatgattcaagccagttacttaatggcctcaagacagcagctacaagcgtgtgggaaaccagaatcaagctcttgtgctgttgcattgggaaagacgaccatactcgggttgctttttcgagtacggcagagcttttctcaacctacttttcagacacagatctggtgcccagcgacattgcggcgggcctcgccctgcttcatcagcaacaggacaatatcaggaacaaccaagagcctgcccaggtggtctgccatgccccagggagctcccaggaagctgatctggatgcagaattaaaaaactgccatcattacatgcagtttgcagcagcggcctatgggtggcccctctacatctacagaaaccccctcacggggctgtgcaggattggtggtgactgctgcagaagcaagaacccacagactatgacttggtcggaggcgatcagcttcaactgtcacttcggctcccatcctgcacacccacagggctgcagtacagggacttcatccacgtcagcttccatggacaaggtttacggagctgccgtttttagtggctctggatcacaggaaagagtctgttgtggtcgctgtgagggggaccatgtctctgcaggatgtccttacggacctgtcagcggagagtgaggtgctagacgtggagtgtgaggtgcaggaccgcctggcacacaagggtatttctcaagctgccagatacgtttaccaacgactcatcaacgacgggattttgagccaagccttcagcattgctcctgagtaccggctggtcatagtgggccacagcctcgggggaggggcggccgccctgctggccaccatggtcagagccgcctacccgcaggtcaggtgctacgccttctccccaccccgggggctgtggagcaaagctctgcaggaatattctcagagcttcatcgtgtcactcgtcctggggaaggatgtgattcccaggctcagtgtgaccaacttggaagatctgaagagaagaatcttgcgagtggtcgcgcactgcaataaacccaagtacaagatcttgctgcacggtttgtggtacgaactgtttggaggaaaccccaacaacttgcccacggagctggacgggggcgaccaggaagtcctgacacagcctcttctgggggagcagagcctactgacgcgctggtccccggcctacagcttctccagcgactccccactggactcttctcccaagtacccccctctctaccctcccggcaggatcatccacctgcaggaggagggcgcctcggggcggtttggctgctgctctgctgctcactatagcgccaagtggtcacacgaagcggaattcagcaaaatactcataggtccgaagatgctcaccgaccacatgccagacatcctgatgcgggccttggacagcgtggtctccgacagagcggcctgcgtctcctgtccagcacaaggggtctccagtgtggacgtggcctgaccagggccactggaaactgtcccaggaacgatggactcacgcttttgtccttaaactgacttaccatccgaggagttcccatgacgccaaaacagcgaatgtccatcaacaggaatcggatgggaacagaattccatggtctcaatgacttaagtttatgggaagtcattgtggccataatggtagcagaagtagtgagcacgctcaggtgataggacgactcctgagacccagcgaccgtggagacagcctcgggaagccctggcccgtggatggatcccttggctgtctgaggactgctccagaagtgcgggaatccagggcccacccagaagaccgtgaacagttccttagcctcccacccccaaggcagctcttttcatccaactcagtttacaggcgtggtttgtttttcaaactgggcttcctggatgtacaaatggaactgtggtgagggtgcgggctggggttttctcctgggcgtcaccaagggcagccctgggctctggctggggatgaagacgaaacccgatcgggaaagtaagtggagcccccggccccgccgagccacagccccccaactgcctattcccactgcccagttgtttgtccacatcaggagttgctgattgaattcttgctactcttctggctctggggtcggccagtggattcaggagttgaaacaataaagcgcgcgtcacgatagtgcttgtgtgtacagctgcgtgctctcttattggggatttccaggtagcgctactatactgggtggttgtagagcaatgatgtttccacgttttttttaaaccctggggttctggctacagatggaagattgcccaagcactgatttcaccccctctcccaccggaagcccaacagaatgacaggagggagatttctccaaaaaagcagagacccacaggatgggaaaagacactccaacaacagtcagaggacgcacagtacagaaccttaagggggaaggaaagacatgaactgaccccagcttacaagaccctgggcagctgtgaag

SEQ ID NO: 60529 - DNA, 3143 bp, Homo sapiens
aactgtactcctctgctgttcctttgaacttggttcagtaggaagaagtgatatcctccccagaccatctgctttggggagcttggcaaaactgtccagcaaaatgaaaagactcacgtgctttttcatctgcttctttctttctgaagtatcaggcttcgaaatccccataaatggactttctgaatttgtagactatgaagatcttgtggaactggccccaggcaaatttcaattggtggcagagaaccggagatatcagagaagccttccaggagaatcggaagaaatgatggaagaggttgatcaagtaactctttatagctataaagtccagtctactattacttctcggatggccaccaccatgatccagagcaaagtggtgaacaattccccgcagcctcagaatgtcgtgtttgatgttcagatccccaaaggagcattcatttccaacttctccatgactgtggacggcaagacatttaggagctctattaaggagaaaactgtgggccgagctctttatgcacaggccagagcaaaaggcaagacggctggcttggtgaggagcagcgctcttgatatggaaaacttcagaacggaagtaaatgtcctcccaggagcaaaggtgcagttcgaacttcactaccaggaggtgaagtggaggaagctgggctcctatgagcacaggatctatctgcaacctggacggctggccaaacacttagaggtagatgtgtgggttatcgaaccacagggactgagatttcttcatgttcccgacacatttgaaggccatttcgatggtgttccggtcatttctgaagggacaacagaaggcgcacgtctccttcaagcccacggtagcacagcagagaatatgccctagctgccgggagactgcggtagatggggaactggtggtgctgtatgacgtgaaaagagaagagaaggctggtgaactggaggtgtttaatggatattttgtccacttctttgctcctgacaacctggacccaattcccaaaaacatcctctttgtcatcgatgtgagtggctccatgtggggagttaaaatgaaacaaactgtggaagcaatgaagaccatattggatgacctcagagcagaagaccatttctctgtgattgatttcaaccagaacattcgaacttggagaaatgatttaatttcagctacaaaaacacaggttgcagatgccaagaggtatattgagaaaatccagcccagtggaggcacaaacatcaacgaagcactcctacgggcaatcttcattttgaatgaagccaataacttgggactgttagaccccaactccgtctcgctgatcattttggtttctgatggagatccaacagtgggcgaactaaaactgtcaaaaattcagaaaaacgttaaggagaacatccaagacaatatctccttgttcagtttgggcatgggatttgatgtggactatgattttttgaagagactgtccaatgaaaaccatggaattgcacaaaggatttatggaaaccaggacacgtcttcccagcttaagaaattctacaaccaggtctccactccattgctccggaatgttcagttcaactatccccatacatcagtcacggacgtcactcaaaacaatttccataactactttggaggctcagagattgtggtggcaggaaaatttgaccctgctaaattggatcaaatagagagcgttatcacggcgacttcggctaacacgcagttagtcttggagaccctggcccagatggacgacttgcaggattttctatcgaaagacaagcatgcagatcccgatttcaccaggaaactgtgggcctatctaaccatcaaccaactgctagctgaacgaagcctggctcctacagctgccgccaagagaagaattacaagatcgatcctgcagatgtctctagaccaccacattgtgactccgctgacctcgctggtgatcgagaacgaggctggggatgagcgcatgctggcggatgccccaccgcaggatccctcctgctgctcaggggccctgtattacggcagcaaagtggttccagattccaccccgtcttgggccaatccttcaccaacgcccgtgatctccatgctggcacaaggatctcaggtgctagagtccacgccacccccacatgtgatgagagttgaaaatgacccacatttcatcatttatctaccaaaaagccaaaagaacatttgtttcaatattgactcagaacctggaaaaatcctcaacctggtttctgacccagaatcaggaattgtagtcaacggtcagcttgttggtgccaagaagcccaacaatggaaaactaagcacctattttggaaaactgggattttatttccaaagtgaagacataaaaatagaaatcagcactgagaccatcaccctgagccatggttctagcacattctccttgtcctggtccgacacggctcaagtcacgaatcagagggtgcagatctcagtgaagaaagaaaaagtggtaactatcaccctggataaagagatgtccttttctgttttacttcatcgtgtttggaagaagcatcccgtcaatgttgactttctgggaatctacataccccctacaaacaagttctcacctaaagcccacggactaataggccagttcatgcaggaaccaaagatacacatcttcaatgagagaccaggaaaggaccctgagaagccagaggccagcatggaagtgaaggggcagaagctgatcatcaccaggggcttacagaaagactacagaacggatctagtgtttggaacggacgttacctgctggtttgtgcacaacagtggaaaaggattcattgacgggcattacaaggattacttcgtgcctcagctctacagctttctcaaacggccttaaaggtttatagtttgggaaattatatatattaatatacatctttcccctgtcacttttgcagatattcttcggtttgaataattaaaatgaaccagatatcagggtggttaattaaaatgaaacaagataacagggtggtttataaagccttgtaaacccccctaaaaaaataaaccattttacaaatgaaaaaaaaaa

SEQ ID NO: 60530 - DNA, 1636 bp, Homo sapiens
  misc_feature (1)...(1636): n = a,t,c or g
ttttttttttttctggttttcctttttatttaatcaaaggacctggtgaataaacataaatacagcacaattacttcaggatcattcttcatattgtatacacacaaacccatgaacataatctgaaagaaacctgtaagacaagcaatgaaatggcatacagctttttccttcccctcgctcaaaaaaaaagtttaaacacacaaacttacaatctcatcaggcacacactcctcttgtgacaaatgattccagaccatnaaatagtgggtgccaaagaaactatatgcctaacatatgaataacctttgttaatgaaaaaacaggaggcagcccataatggattaagatacattcagttactggataactaggttgtgccctaaagggcattttatccaaaaggagaaatcgtggctggcagagaaaagcgatatataccttacacaatgagaaaataaactggcaagattaatggcatgcatgtttaatactgggaaaatcacagccctccaaaatttctgcacggtttgttataaaagccctctgcactcaactaaaattaaaatgatcttaaaaggataatacttgtaaagtttaagtctcctcagccacagaaattgcaatggaaataaatgttcagagtccattttcaaaacaaaaccaaaacgaaaaatctattcttccgatgacatgcaagatacactgctctacattcccaatgactaggaaaaaaaaaacctcaagtccaatttttaagtttgcagaggctcaagaattttgtattccagcaggagttcaaatcttttggatctttttaccaacaactactggattttccttttctgattttcctcagcagcatcggctttgtaattgtaagagcaattgtgtacatctgagtaaccggtgtacaccacagtaaacatttccacaccggcattcaaacccagtaagtcccactttcttcctgcacatgaaacagcgattctttttttgtttcggtttttcaagagacttgctttgctcttcagatggctgctgtgctgtgtctgatactgaagcctgcacatcttctgtttcaggtactgctttgtccacagatgtactgtccaattgagaagatgctacagattctgataaaagtgactgatttgatacagggctgggctgcatagatgaagatgtagagtctaatgctgactgggcttctggcacactgccatctgtgcattgaacaggtgggcttattctaccattactactattctgtctttgaagatgttctttatagcatactgaacacatgccatttgtacgagggtttccataaaatccacagccagtggaacaaagcataggcacttggctgtgattagtttcttgagccatgttcctcagttgcacacccaagttccccttctggtaagcagctaagtcagtgtcttttgatctggcggcgggtctctccgcctgacacgctgcgcgccgccgccggtagccgccggtgaatgggtacaggtaatgccgccgaacccctgcttgcctccgtccgccaccgccggcccctccgtccgctgtttattaaacttttctgtttggttgttcggcctatgacgcgaccgcgctcgtgccg

SEQ ID NO: 60531 - DNA, 1818 bp, Homo sapiens
tcgattcgaattcggcacgagggggaagatggcggactcggtggctagccgatgaggaggccgcggggggaacccggcccccgggccccgagaccgactgagggagcgacctgcgcagggcccggggagtcatggtctccatcacccaactccatgcttcgagtcctgctctctgctcagacctcccctgctcggctgtctggcctgctgctgatccctccagtacagccctgctgtttggggcccagcaaatggggggaccggcctgttggaggaggccccagtgcaggtcctgtgcaaggactgcagcggcttctggaacaggcgaagagccctggggagctgctgcgctggctgggccagaaccccagcaaggtgcgcgcccaccactactcggtggcgcttcgtcgtctgggccagctcttggggtctcggccacggccccctcctgtggagcaggtcacactgcaggacttgagtcagctcatcatccgaaactgcccctcctttgacattcacaccatccacgtgtgtctgcaccttgcagtcttacttggctttccatctgatggtcccctggtgtgtgccctggaacaggagcgaaggctccgcctccctccgaagccacctccccctttgcagccccttctccgaggtgggcaagggttggaagctgctctaagctgcccccgttttctgcggtatccacggcagcatctgatcagcagcctggcagaggcaaggccagaggaactgactccccacgtgatggtgctcctggcccagcacctggcccggcaccggttgcgggagccccagcttctggaagccattgcccacttcctggtggttcaggaaacgcaactcagcagcaaggtggtacagaagttggtcctgccctttgggcgactgaactacctgcccctggaacagcagtttatgccctgccttgagaggatcctggctcgggaagcaggggtggcacccctggctacagtcaacatcttgatgtcactgtgccaactgcggtgcctgcccttcagagccctgcactttgttttttcccctggcttcatcaactacatcagtggcacccctcatgctctgattgtgcgtcgctacctctccctgctggacacggccgtggagctggagctcccaggataccggggtccccgccttccccgaaggcagcaagtgcccatctttccccagcctctcatcaccgaccgtgcccgctgcaagtacagtcacaaggacatagtagctgaggggttgcgccagctgctgggggaggagaaataccgccaggacctgactgtgcctccaggctactgcacagacttcctgctgtgcgccagcagctctggtgctgtgcttcccgtgaggacccaggaccccttcctgccatacccaccaagggtcctgcccacagggcccaggctgcctctagcgccactactcgagacccttgcccagagggtggtgctggtgttgcgggaaacgcctggcatttcctgccgggacggcccgggtgcttctgggcttcgaggggccctgagggagcggcacctaggcctgatgggctaccagctcctgccgctacccttcgaggaactggagtcccagagaggcctgccccagctcaagagctacctgaggcagaagctccaggccctgggcctgcgctgggggcctgaagggggctgaggggatgatgtggggttcaggatggcccccccatggggggtggatgatttgcactttggttccctgtgttttgatttctcattaaagttcctttccttaaaaaaaaaa

SEQ ID NO: 60532 - DNA, 1081 bp, Homo sapiens
  misc_feature (1)...(1081): n = a,t,c or g
aaactacattttgcaaagtcattgaactctgagctcagttgcagtactcgggaagccatgcaggatgaagatggatacatcaccttaaatattaaaactcggaaaccagctctcgtctccgttggccctgcatcctcctcctggtggcgtgtgatggctttgattctgctgatcctgtgcgtggggatggttgtcgggctggtggctctggggatttggtctgtcatgcagcgcaattacctacaagatgagaatgaaaatcgcacaggaactctgcaacaattagcaaagcgcttctgtcaatatgtggtaaaacaatcagaactaaagggcactttcaaaggtcataaatgcagcccctgtgacacaaactggagatattatggagatagctgctatgggttcttcaggcacaacttaacatgggaagagagtaagcagtactgcactgacatgaatgctactctcctgaagattgacaaccggaacattgtggagtacatcaaagccagggactcatttaattcgttgggtcggattatctcgccagaagtcgaatgaggtctggaagtgggaggatggctcggttatctcagaaaatatgtttgagtttttggaagatggaaaaggaaatatgaattgtgcttattttcataatgggaaaatgcaccctaccttctgtgagaacaaacattatttaaatgtgtgaagaggaaggctggccatgacccaaggtggacccaactacccttaatgccaaagaggtggacaggataacacagataagggctttattgtacaataaaagatatgtatgaatgcatcagtagcctgaaaattgccttatttctccctttcttctcactggagttatttttaatattatctttcctatcagaattacctagtcccttctttgaatatacagaagccatcacgtgagtttatcatttgcttcccaattgttctattttcctttaattttctttcttcttgtccttcatttctaattacctgaacatggtatgatttactgcatcttcagatatacacatataacatcaaaantnaggccaatata

SEQ ID NO: 60533 - DNA, 1630 bp, Homo sapiens
gtctaaacacttctttccctgaggactggaagacattagaataagctccagacaattcaaacattgagattcctgggaactaccagatagtagcatcagttcaccaagaaatgaagctggtgaggcagtgaaaatccagggcctagaaagctgggaatgccatgacgtgggcacattgaaagacaagaggcaggcatgatcagccttgaactttaggaagatcccaggaagctgatggaagacaagatgtggagtgaatgtgaaggtccagaaatgtccttggtgtgtctgacagactttcaggcccatgcgcgagagcagctgtctaagtcaactcgggattttattgaaggtggagcagatgacagcatcacgcgggatgacaacattgcagcatttaaaagaattcgcctccgtccgcggtacctgagagatgtgtctgaggtggacaccagaaccacaatccaaggggaggagatcagtgcccctatttgtatcgcacccacagggttccactgccttgtctggcctgatggggaaatgagcacagcaagagctgcccaagcggcttggtatctgctacatcaccagcacatttgccagctgtagccttgaagacattgtcattgcagctcccgaaggcctccgatggttccaactctatgtgcatccagacctgcagctgaacaaacagttgatccagagggtagaatccctaggtttcaaagctttggtaataactttggatacacctgtatgtggcaacaggcgacatgacattcgaaaccagttgaggaggaacttaacactaacagatcttcaatcacctaaaaagggaaatgcaataccttatttccagatgactcctatcagcacttctctctgctggaatgatctctcctggtttcagagcataactcgattgcccatcatcctgaaagggattttgacaaaagaggatgcagagttagctgtgaagcacaatgtccagggtatcattgtttccaaccatggtgggaggcagcttgatgaggttcttgcttcaattgatgctttgacagaagtggtggctgctgtaaaggggaaaattgaagtctacctggatggcggggtccgaactggcaatgatgtgctgaaggctctggcccttggagctaagtgcatttttcttggagacgcaatcctatgggcccttgcctccaagggtgaacatggtgttaaggaagttttgaacattttgacaaatgagttccacacttccatggccccttacaggctgccggtcggtcgctgagatcaatcgaaacttggtccagttttccaggctgtaagaaaaaagggccaataaccagactgctgaggttgcccacagaaggatccccaaattccagcaccagtgtgtgatgctgtccttcctggaccccattctgtccggaggctcatggcccatatttcccacatttctaataccaccacccctgtgcttcaggccctccaaacccctgtgttccccaaatgttccatgcccttctttgtatcactgactattatatgttgctctcttgcctaaatcttcctctgaagtaaaagatctcaaaaggacagatcattaatgactggaaaaaaaaaa

SEQ ID NO: 60534 - DNA, 369 bp, Homo sapiens
agtccactggcatcttcatgaccatagagaaggctggggctgacttaatgggggagccaaaagggtcatcatctctaccccctctgctgatgcccccatattcataatgggcatgatccctgagaagtctgaaaacagcctcaagatcatcagcaatgccttctgtaccaccaactgcttaatcccccggccaagcccatccatgacaactttggcattgtggaaggacttgtgaccacaatccatgctgccactcctgcccagaagactcgatggcctctgtgggaaactgtggcatatgtctgtggggctctccagaacatcatccctgcatctactggtgttgccaaggctgtgggcaaggccatc

SEQ ID NO: 60535 - DNA, 3340 bp, Homo sapiens
ttccgtcccggagcatcacgctgggagaagacttcgccgctcggggccgcagcctgttgggcaaggcgagcatcatggcctcggattgcgagccagctctgaaccaggcagagggccgaaaccccaccctggagcgctacctgggagccctccgtgaggccaagaatgacagcgagcagtttgcagccctgctgctagtgaccaaggcagtcaaagcaggtgacatagatgccaaaactcggcggcggatcttcgatgctgtcggcttcaccttccccaatcgtctcctgaccaccaaggaggcgccggatggctgccctgaccatgttctgcgggctttgggtgtggccctgctggcctgcttctgcagtgaccctgaactggccgcccatccccaagtcctgaacaagattcccattcttagcaccttcctcacagcccggggggacccggacgaatgctgcccgccgctccatgattgatgacacctaccagtgcctgacggctgtagcaggcacacccagagggcctcggcacctcattgctggtggcaccgtgtctggcctatgccaggcattcctggggcacgggtatggctttgaccaggccctggcactcctggtggggctgctggctgctgccgagacacagtgctggaaggaggcggagcccgacctgctggccgtgttgcggggcctcagtgaggatttccagaaagctgaggatgccagcaagtttgagctctgccagctgctgcccctctttttgcccccgacaaccgtgccccctgaatgctaccgggatctgcaggccgggctggcacgcatcctgggaagcaagctgagctcctggcagcgcaaccctgcactgaagctggcagcccgcctggcacacgcctgcggctccgactggatcccggcgggcagctccgggagcaagttcctggccctgctggtgaatctggcgtgcgtggaagtgcggctggcactggaggagacgggcacggaggtgaaagaggatgtggtgaccgcctgctatgccctcatggagttggggatccaggaatgcactcgctgtgagcagtcactgcttaaggagccacagaaggtgcagctcgtgagcgtcatgaaggaggccataggggctgttatccactacctgctgcaggtggggtcagagaagcagaaggagccctttgtgtttgcctcggtgcggatcctgggtgcctggctggccgaggagacctcatccttgcgtaaggaggtgtgccagctgctgcccttcctcgtccgctatgccaagaccctctacgaggaggccgaggaggccaatgacctttcccagcaggtggccaacctggccatctcccccaccaccccagggcccacctggccaggagacgctctccggctcctcctgcctggctggtgccacctgaccgttgaagatgggccccgggagatcctgatcaaggaaggggccccctcgcttctgtgcaagtatttcctgcagcagtgggaactcacatcccctggccacgacacctcggtgctgcctgacagcgtggagattggcctgcagacctgctgccacatcttcctcaacctcgtggtcaccgcaccggggctgatcaagcgtgacgcctgcttcacatctctaatgaacaccctcatgacgtcgctaccagcactagtgcagcaacagggaaggctgcttctggctgctaatgtggccaccctggggctcctcatggcccggctccttagcacctctccagctcttcagggaacaccagcatcccgagggttcttcgcagctgccatcctcttcctatcacagtcccacgtggcgcgggccaccccgggctcagaccaggcagtgctagccctgtcccctgagtatgagggcatctgggccgacctgcaggagctctggttcctgggcatgcaggccttcaccggctgtgtgcctctgctgccctggctggcccccgctgccctgcgctcccgctggccgcaggagctgctccagctgctaggcagtgtcagccccaactctgtcaagcccgagatggtggccgcctatcagggtgtcctggtggagctggcgcgggccaaccggctgtgccgggaggccatgaggctgcaggcgggcgaggagacggccagccactaccgcatggctgccttggagcagtgcctgtcagagccctgaggggtgtccaccggggacagacccaggggcgggcagagagggaaggagggaggaggcatcttccctgaagcccccaatctggcccccccctccccagacttcctccccaaaacaccccagctttctggcttttctgagggcaagggcatggtgcccacccctcaagtgtaaggaactgcgttccgcccctcaggcccccatgggggcagggatcggcttggaaatcaacgtggttgtccccgccaggccggggaaggttggagcagcccccagggaggggggcactaggtgtcattgtgcccgatgtctggctcccctgcaggagggaggctccagggtaagacagggctggcaggagcagactgcctcagcccatgtgccctgccggccagggcgtgggctcccctcggctgtggtgcctcctctggccccccaggtccacgtcctttaaattggccctttggctcttgcccttggctcccttgggcagacagcaggcttaggccattgatatcgcagttcttcctatcagcttcagtgacccagggtctgaactgcctccatcctagggcaacctggggcagacaggcctggtggggggtggggaaacctccttccacctgagcttgcttgaagggacccagagtctttgggcccagatctttaaacctttgtgtcgtgttgcagcagagtgacgatgggggttggggggttatttattttgcctgtccttatccctgcttggacacctgagcatctgattcctgtccccctggtgccatctggcctggctggagccaggaacaggagggacacttccccagaatccgcatgtttccccagtgattacactccactgccaccgtggtgcctggctttaactcccacccctgctatgactcctctctgcagagacgcgactggcggctccagcagggactacctttcttataaacccagggggaccacacacacacacacacacacacacacacacacacacacacacacacacacacactcttgatcccttgcttccctcccccagtgcgttgtgagatcgccaagttcaaagctgtgcacatgtggacactcaataaatgttgcattggtgaaaaaaaaaaaa

SEQ ID NO: 60536 - DNA, 1310 bp, Homo sapiens
gttaaaaaggcggctgggcggagccgcgggcctccgacggcgggaggacagcgctgcgaggaggcgcccgggacagtcatggagcgccgcctgggagtgagggcctgggtgaaggagaaccggggctccttccagcccccggtctgcaacaagctcatgcaccaggagcagctcaaagtcatgttcgtcggaggccccaacaccaggaaggactatcacatcgaagagggtgaagaggtattttaccagctggagggagacatggttctccgagtcctggagcaagggaaacaccgggatgtggtcattcggcagggagagatattcctcctgcctgccagggtgccccactcaccacagaggtttgccaacaccgtggggctggtggttgagcgaaggcggctggagaccgagctagatgggctcaggtactatgtgggcgacaccatggacgttctgtttgagaagtggttctactgcaaggacctcggcacgcagttggcccccatcatccaggagttcttcagctctgagcagtacagaacaggaaagcccatccctgaccagctgctcaaggagccaccattccctctgagcacacgatccatcatggagcccatgtccctggatgcctggctggacagccaccacagggagctgcaggcaggcacaccactcagcctgtttggggacacctatgagacccaggtgatcgcctatgggcaaggcagcagcgaaggcctgagacagaatgtggacgtgtggctgtggcagctggagggctcctcggtggtgacaatggggggacggcgcctgagcctgggcccctggatggacagcctcctggtgctaagctggggaccttcgtatggcctggggagcgaacacaaggctctgtggccctgtctgtgaccccaggaccctgcctgcaaaaaaagcccctggggtgaaccctcttgccatggcctgaaagcagccacaggtgtgccaagcaccctcgaagtgccatccctgccaaacaactctcccagcccccactacctctctgtgtactgccgctgtgtcccccacagacctgcacattgttgtcacccaccctcctgcccttctcagcccagatgccatgcccctgggcgggcagcagctccccatcttctctggcagactcagcccactgccttgccagtcttgccaggtggtctacccccggccccgctcctgcccattcctctgtccctgcagactcagtgcagcacttccacaccaagaaggccctcaataaaggcttcctgaggaacgcaaaaaaaaaa

SEQ ID NO: 60537 - DNA, 428 bp, Homo sapiens
ggacagatgcctcatgttgaagcaggggtctcaacctggctcacctccagcaacattgagcctccagcacctcctgtctaccaagccccgtgccagtcctgcccagaacccccaggagcccatgagccctctgactctccacaccataccccagtccatcctcctccagagcactcggccgcctgtcctgccccagccacgtgctgtccgcccccgagaagctctatgtcataaatcttaactcagatgggagagggagcctcagagtcacatagccctgggcccaaaccccagctcctccacccaagtactgatggtcaggttcttcagcctcagtttctgtagctgtaagatggggagaatgatctctgggagggttaaatgtgcggcaaaatggccaagagttgggctctgggactaggaccatg

SEQ ID NO: 60538 - DNA, 376 bp, Homo sapiens
gtgtaagtcagagtgaagccttttacactctgccctcttggtacctgagtccttgtctggcatccaggaaggataaggtcacacatggacttgagggtggtgaatgcagaggttttattgagtgatggaagtggctctcagcaggatgatggggaagctggaaaggggatggagtgggaagatgatcgtcgcctggaattcggccatcctgtgaccgatctcctctccagccatccccagccaaactcctctcaatgttcagatgctccttctcttctcctctgccatgccattctgctgctcttctgttctgctcttctgcttgtggagcctgggggttggggtttcaatgggtacaggataagggggcgtggtg

SEQ ID NO: 60539 - DNA, 2372 bp, Homo sapiens
attcggggcagcaacgcgcagaaggtggtgggcgcctcgggctcggggggcgcgggcccccaacccgatccggcgggcccggggggcgtcccggcgctggcggccgccgtcctgggcgcctgcgagccccgctgcgccgcgccctgtcccctgcccgcgctcagccgctgtcggggcgcggggtcgcgggggtcgcggggcgggcggggggcggcggggtccggggacgccgccgccgccgccgagtggatccggaagggcagcttcatccacaaacccgcgcacggctggctacaccccgacgccagggtcctggggcccggggtctcctacgtcgtgcggtacatgggctgcatcgaggttctccgctctatgcgctccctggactttaacacgcgcacgcaggtgaccagggaagccatcaaccggctccatgaggccgtgcctggcgtccggggatcctggaagaaaaaggcccccaacaaggccctggcgtccgtcctgggcaagagcaaccttcgctttgccggcatgagcatctccatccacatctccactgatggcctcagcctctccgtgcctgccacgcgccaggtcatcgccaaccaccacatgccgtccatctccttcgcgtcaggcggagacacggacatgacggattacgtggcctacgtcgccaaggaccccatcaaccagagagcctgccacatcctggagtgctgtgagggcctgggcacagagcatcatcagcaccgtgggccaagctttcgagctgcgcttcaagcagtacctgcacagcccgcccaaggtggcgctgcccccagaaaggctggcagggccggaggagtcggcctggggggacgaggaggactctttggagcacaattactacaacagcatcccggggaaggagccgccgctgggcgggctagtggactccaggctggccctgacacagccctgcgccctcacggccctcgaccagggcccatctccttctctaagagatgcctgcagcctgccatgggacgtggggtccaccggtacagctccaccgggggacggctacgtgcaggcggacgcccggggccccccggaccacgaggagcacctgtatgtcaacacccagggtctggacgcccccgagccggaggacagccccaaaaaggatctgtttgacatgcgaccctttgaggatgccctgaagttgcatgagtgctcagtggcggcaggcgtgacagcagcccctcttcccttggaggaccagtggcccagcccccctacccgccgggcccctgtggcccccacggaggaacagctgcgtcaggagccctggtaccacggccggatgagccgccgggcggcagagaggatgcttcgagctgacggggacttccttgtgcgagacagcgtcaccaaccccgggcagtatgtcctcaccggcatgcacgccgggcagcccaagcacctgctgctcgtggaccccgagggcgtggtacggacgaaggacgtgctgtttgagagcatcagccacctgatcgaccaccacctgcagaacgggcagcccatcgtggccgccgagagtgagctgcacctgcgtggcgtggtctcacgggagccctgagccaggtgaccgttctcagccctggctcctgcctgttctcagccccggctcctgcctgtcatggccttggggctctcagccctcctcctggatcctggtcaggccgaaccaccgctgcctctccttcctccgcatgagcctctggcatggtccttcctccagctggccccgggctgggcagagcctcctcctgccggggcccctgcccaccccctcctttgcctggagtgagggtgttcataccaaagacggaaccatttcgcctttaaagaaaatatatccagaagcagccgctgcctcggagccctggcccgtgggtccccctctcgcctggctggttcggtctaacgccccggagagtcagagctcccaggaccctggggaggaggcggattccgggcctggctgggcttcctcttcccacctgaggactgggtgcacagttgtctttgaggggggacgcttaaggtgctttggggttctcaggccaggatacatgctggcgctgaagtgcaggcagccttgaggtcacctgggatctcggggtagccaggctgctccaagacagtggatatcgaggcagtcgtgaggcccctactccacctgggagcaggggaaggacgtggttgcctggcctgggctgcgcccagcagcttccccccaatcctgccctcccagctgtcgacccagatgggatgttcggatcggtttgtaattaaacctgggaatggccacaagaaaaaaaaaa

SEQ ID NO: 60540 - DNA, 2667 bp, Homo sapiens
ggggggggacagtgctgggatgactatggagacccaaatgtctcagaatgtatgtcccagaaacctgtggctgcttcaaccattgacagttttgctgctgctggcttctgcagacagtcaagctgcagctcccccaaaggctgtgctgaaacttgagcccccgtggatcaacgtgctccagggaggactctgtgactctgacatgccagggggctccgcagcctggaggagcgactccattcagtggttccacaatggggaatctcattcccacccacacgcagcccagcttacaggttcaaggccaacaacaattgacagcggggagtacacgtgccagactggccagaccagccttaagcgaccctgtgcatctgactgtgctttccgaatggctggtgctccagacccctcacctggagttccaggagggagaaaccatcatgctgaggtgccacagcctggagggacaagccctctggtcaaggtcacattcttccagaatggaaaatcccagaaattctcccatttggatcccaccttctccatcccacaagcaaaccacagtcacagtggtgattaccactgcacaggaaacataggctacacgctgttctcatccaagcctgtgaccatcactgtccaagtgcccagcatgggcagctcttcaccaatggggatcattgtggctgtggtcattgcgactgctgtagcagccattgttgctgctgtagtggccttgatctactgcaggaaaaagcggatttcagccaattccactgatcctgtgaaggctgcccaatttgagccacctggacgtcaaatgattgccatcagaaagagacaacttgaagaaaccaacaatgactatgaaacagctgacggcggctacatgactctgaaccccagggcacctactgacgatgataaaaacatctacctgactcttcctcccaacgaccatgtcaacagtaataactaaagagtaacgttatgccatgtggtcatactctcagcttgctgagtggatgacaaaaagaggggaattgttaaaggaaaatttaaatggagactggaaaaatcctgagcaaacaaaaccacctggcccttagaaatagctttaactttgcttaaactacaaacacaagcaaaacttcacggggtcatactacatacaagcataagcaaaacttaacttggatcatttctggtaaatgcttatgttagaaataagacaaccccagccaatcacaagcagcctactaacatataattaggtgactagggactttctaagaagatacctacccccaaaaaacaattatgtaattgaaaaccaaccgattgcctttattttgcttccacattttcccaataaatacttgcctgtgacattttgccactggaacactaaacttcatgaattgcgcctcagatttttcctttaacatcttttttttttgacagagtctcaatctgttacccaggctggagtgcagtggtgctatcttggctcactgcaaacccgcctcccaggtttaagcgattctcatgcctcagcctcccagtagctgggattagaggcatgtgccatcatacccagctaatttttgtattttttattttttttttttagtagagacagggtttcgcaatgttggccaggccgatctcgaacttctggcctctagcgatctgcccgcctcggcctcccaaagtgctgggatgaccagcatcagccccaatgtccagcctctttaacatcttctttcctatgccctctctgtggatccctactgctggtttctgccttctccatgctgagaacaaaatcacctattcactgcttatgcagtcggaagctccagaagaacaaagagcccaattaccagaaccacattaagtctccattgttttgccttgggatttgagaagagaattagagaggtgaggatctggtatttcctggactaaattccccttggggaagacgaagggatgctgcagttccaaaagagaaggactcttccagagtcatctacctgagtcccaaagctccctgtcctgaaagccacagacaatatggtcccaaatgactgactgcaccttctgtgcctcagccgttcttgacatcaagaatcttctgttccacatccacacagccaatacaattagtcaaaccactgttattaacagatgtagcaacatgagaaacgcttatgttacaggttacatgagagcaatcatgtaagtctatatgacttcagaaatgttaaaatagactaacctctaacaacaaattaaaagtgattgtttcaaggtgatgcaattattgatgacctattttatttttctataatgatcatatattacctttgtaataaaacattataaccaaaacattctgtttaccttttcagggctgtattgattggggtgtagactgaactatccggggtctgtttcttttcggtgatgaaagtcttgagaaggtagtaatggataagatgtgagggagaggagagagggagatttggagtgtagggtgagtgcccctcttcttagaactgaatactcttcttctaatgaacttgtattcttgtttccatgtcttcttccctttccttctatagcaaataaagcattcactttgttttggaaaaaaaa

SEQ ID NO: 60541 - DNA, 3123 bp, Homo sapiens
ttttttttttttgccaagatccaaagaaaaaattttatttacaatagagaattttatttgaaacatgcatttcttgtttttttaaaaacaaatcagcaaatgcagatcaagtttacactccttaaggccaagagtccccctatgcacgctgtacatgttccatattaaatcccaaaagctgactcacccctggggaacttgtgttacaaaggggcaaggcccaaggtcagcaatggtgtcttttatttggaggaatcagacaatctccctggatacaggaactctgaggtcaacttgctatgaattatactaggaaaatgcaaaccaatagcaagaaattctgatagtctcctttagtactggcatacaatcaaatcaattttatttaggaaagggaaatacagtaggtgcatacgaaaaagtgaaaacagaacctggtccatggaactggaggaacagcagtgtgccgacggtcatattgcacgcaacagttaagtccaaaacattcggttcagagttagcttttccccattttggcaatcagttcgtcacaaatcttggtgagttcttctatttctttattcttctgctccagcgtcctttccagggcgtccaactcggcagctgctcctttccgcaaggctggcctggtgggcggcttgctcctgctgggccttgcctcgaacctgagcaatcttcagcattggccctgtccagtttctcctccagcgtgcaccttcagggcctggtacctctgctcctccttcttcacccgggacaggtactcctgcgcacatctcttcaacacctcttcattcttgcggaagccttctaggacctccttcatcttctcatatcttctgaagaggtcggccagagactttctccacggagttcaggtcggccaggggcttgctccttctccagaaccagctgctgcaccgtctggtggggagactgacttctctctctgttcgtcctctatcatctgagcgatggtcttctcatactcggccactattttcctcatttccatcacttcccgcctgctttcttcatatttatctttccattctgagacctctctctccttggttatgatctctgctctggcgatctggagggcagagtccaggtcgggctgctggaacagaaggcctgcaggtttctccacctcagcggtcccgatgcgggagtacaaggctgttttggagatggagacgtctgttgggtgagcagcctctctctggagtttctgagcgaatagtggggggttcttttctgctaagtcgggctccagatagtcaagtgcaccacagagagagacggggtgagctagcctgctgaggagggcgtcagcagaggcaaaggagccctcgggagctgtaatttcaatcgcttctgaaggggtgcccaagcccatggcctccagctccttctgggaggatttctctggcacctgcaagtgtgactcttggttaggggccagtcctcgtgggacaggatgctggtttttcgcagcagtgttcacaagggcttcagtctcttcaaaacttgaccctgaacacggcgtcggggactctgacatgcggacgggagatgacttgacagggctctcctgagaagtgtcaaacataaggtacaaggcctgcttcttcggggcatcgtcgtcctgaggtaaggaggagccaattttctccatatattcaatttcataggagtttctgtaatccaactcctcagtgggtgaactgaatttggtctcgtttacaaaggtggacaggtccgagggctgcgggtagtcctgtttgtcagcctctaggtccactgtcatgcacgtccacttctggttggtgaccgccagcttttcctcatctgtggcgtggaccaccgcagagatcactggtggtgtttctggtgtagcagctggggtggggtcctgggaaggtggatcagagagaggagaccgttttggcgactttttcaccctaaatgtgtcagtctttaggggcgtcttcttcttcttggcgggcttgtttagcccatccccgtccactccattggcttccatagcactggctgggatctcaaaggaggctggggatttagaaggtgagctgggggtcttagaggatgtcttaaaggggtcaacggactcatcacaggtgtctgggtcaaagttgtatgattgttggggcagtttgggagactcctgcatttttgaggtggaagaaaaagggttaaaattggggtcatcccacttgtcaatatcaaaggtgtaagtacctttagcaatggggatgtcattgggttcagcaggggatctgggaggtgaggcaggagtgttgtcaagtttctcgggtgtctttttcatctttggcctcctcaggggcattttggcaactggctttttgcctatctttttggtaggaggggggttttcctgctggttgtcccaactactcttgtcctcagaatagtcaaactccagccttacggagtgccctttggctggagagtcctcttgccccccgctatccgatggggttacctcccctgcctccggggccgtggtaagaggcagcgttttcctcccgacagggggtgagttctgcactctgccacctccagaagccggggggacaaccccttctacactctctgagtccagagggcaggcagctttgggccccgcagcgggctcaaggggcgtctcctccaataaggctgggctaggaccttccgtcttggcagattccgttttcgtctcagatgctagattctccccactggggacaaggctctcttcatctggctcctgttgcgtctccttcactgggggggtctctgtgggtttcttggtggtctgtttcttttttaaggaaggcggcctcggttttttagttcgcttaagggtactagaagcactgctggaacccgtgctatatgcatctggggcaagggccacggcctcgggattgcctgaggaagaagccccatcaaagtcactggcttgcaggctgagcgaccgggacagtgtagacttagagatggggacggaatccgtggacttcctccgtgtgttcaataagccctcctgattcttagcgtctgaggcacgaa

SEQ ID NO: 60542 - DNA, 350 bp, Homo sapiens
agaagatcaatgaaactaatgattagttattggaaacggttaccataggcaaaactttggttagactgaccaagaaaaaagactgaagatacaaattatcaaaatcgggaatgaaagaggagacatcgctcctatccctgcagaaattaaaaggattataagggaatactatgaacaactttatcccattaaattagacaacttagaggaaatgggcaaaatcattgaaagacataactactaaaactcaagaagaaatagagaatctgaatagagttatactaaataaagcaattgaattagtaactaaaaatcattctacaaagctcatacccagatgactactctca

SEQ ID NO: 60543 - DNA, 1098 bp, Homo sapiens
tttaactccccctcttcttaagagaattttaatgaagctgagataagaggcatatttacttgcagtttgccccattgttaccctggattcctccgagcgcacaagcttaccgcaaggctgactgtggatgtacttgggaatctctcgtcggctgtcctcaatgctcacgttcttagcataccttcaccctagagaaaggcccccacatcgggcgccagatgaaggggtggcctgcccctccacacctgtgggtatttctagtcaggtgggatgagagactgagaaaagaaagaagacacagagacaaagtatagagaaacaacagtgggcccaggggaccggcactcagcacaccaaggacctgcaccggcaccggcctctgagttccctcagtttttattgactattattttcattatttcagcaaaaaggaatgtagtaggacagcagggtgataataaggagaaggtcaacaaaaaaaacatgtgagcaaaagaatctatatcataattaagttcaagggaaggtactatgcctggacgtgcacgtaggccagatttatgtttctctccacccaaacatctcagtggagtaaagaataacaaggcagcactactgccaacatgtctcgcctcccgccacagggcagcttttctcccatctcagagttgaacaaatgtacgatcgggttttacaccgagacattcagttcccaggggcaagcaggagacagtggccttcctccatctcaactgcaagaggctttcctcttttactaatccacctcagcacagaccctttatgggtgtcaggctgggggaccatcaggtctttctcatcccacgaggccatatttcagacaatcacatggggagaaaccttggacaatacgccgctttcaagggcagggctccctgcggctttccacggtgcattgtgcccctggtttattgagactagagaatggtgatgacttttaccaagtatactgcttgcaaatattttgttaacaaggcacgtcctgcacagccctacatcccttaaaccttgatttcatacacacatgtttttgtgagctccaggttgggtcaaagtggt

SEQ ID NO: 60544 - DNA, 1344 bp, Homo sapiens
cccacgcgtccgtggggaggaagtctccacccctgggaggctgaagccaggcatagcgcgctggctaggactccagtaccgtgaagggaggcagtgagagcaaacatctgtgcctcattcctgatctcaaggggaaagcaagaacaacacctgtgaagggaaggagggtggatcggcctgactggccctgggaagcacagaggagcctactgggaccagggaagagactgacaagagaagggaggcctgtccctgcctgcttctgtctcaagaagattgttatcacttcctctggtgaaatcctgccttcctgtccccacggcccctcagctgatgccaccttactctggagaggatgggcagagcctcctatggagggagccctgtgggtcaccaaagctccagtgaccacccccgggcaaagacctgcagatcccctgttagagacgggcccaggactttgtgcggggtgcccactgttgctctgagccttcacttcctcagggaggcttcctcaggatctcgaacctgcggaaggaggaccagtctgtgtacttctgccaagtccagctggacatacagatcagggaggctgtcgtggcagtccatcaaggggacccacctcaccatcacccagggtgagtccagctgccctggcaccaaggaaccttcctggttcagccataggctcaggtgtgtggagggaatgacctgaggggctgtatgagggaacaacctcctggggctcccctatgcctgagttcctgcaactcagaagttgaggcccagagatccaggtagagggggctccagtcctgggactgccctgcaagtcatgtggcctgggacagggcttctccaagctctgtcccctcctgtgtagggcagggaggtcagaggggaccctgcagatccagtctcatgtctgggggtcaaggggtggcctcgagagggaccagtctctgtgtaggggaccgtcagccccctcaccccttgagcaagactgtggtccctgcaccaagggagcaggcctggggtgggaagaggccagctgggctgtggtggtgcctggggactgcatgggagcccctgccagggagggagagggacagaggacaagctgggggctctggtgcttgggctgggggctgagcgcctgtgacctccactggcttcctccttctcctctctgaggactgaatctggggtgcagcagagcacagactcaggcccgcctttcctctccctgaaagagcctgcgctggccttggacagagaaagggatgagaagtgaggctgagtgcggtggggtctgcagggatccaggtgggaggggcccagccc

SEQ ID NO: 60545 - DNA, 2075 bp, Homo sapiens
  misc_feature (1)...(2075): n = a,t,c or g
gggtctcagatgaaaagatgtacatggtgaatgataggtccaggacttttccccctctcctgacttgtggtccagcccctcccgcacccaccttatctcccacattcctccttggggaataacatggaggacagatcttttcctgtggcctgaggtggcctggggacagcaaacagacttcccatctgcctttgtcctttcctgcttccacaggtggtccaaaccagccctcgtcactccccacaccacgtggttaggtgggtagaccccacagccctgtgtgaggagcttctgcttccactggagaacccgtgtcagggcagggcccgcttgctgctcacaggcctccacgcctgtggggatctgagtgttgccttgcngagacacttctcctgctgtcctgaggtggtggccctggctcagtgggctgctgctacatgaagctgagtgaccctggcggctacccactgagtcagtgggtggctgggctgcctggctatgaactgccctaccgttccatcttggatgcctacatcatcgaatttttcacagacaacctatgggacacactcccttgctcatggcaggaagcattggatggactgaaaccaccacagctggccacaatgctgctggggatgcctggggaaggggaggtcgtcaggtacaggtcagtgtggccactcaccctgctggccctgaagtccacggcgtgtgccctggcctttacccggatgcctggctttcagaccccctcagaattcctggagaaccccagccagagctcccgactaacagctccattccggaaacatgtcaggcccaagaagcagcatgagatccggaggctgggagagttggtgaagaagctgagtgatttcacaggctgcacccaggttgtagacgtgggctcaggccagggccatctctcccgcttcatggctcttggcctggggttgatggtgaagagcatcgaaggggatcagagactggtggagagagcccagcgcctggaccaggagcttctgcaggctctggagaaagaggagaagaggaacccgcaggtggtccaaaccagccctcgtcactccccacaccacgtggttaggtgggtagaccccacagccctgtgtgaggagcttctgcttccactggagaacccgtgtcagggcagggcccgcttgctgctcacaggcctccacgcctgtggggatctgagtgttgccttgctgagacacttctcctgctgtcctgaggtggtggccctggcctcagtgggctgctgctacatgaagctgagtgaccctggcggctacccactgagtcagtgggtggctgggctgcctggctatgaactgccctaccggcttcgggagggggcctgccatgccctggaggaatatgctgagcggctacagaaagctggccctggccttcgaactcactgctaccgtgcagcactggagacagtcatccgacgggcccggcccgagctccgtcggccaggcgtgcagggtatccccagggtccacgagctcaagattgaagaatatgtgcagcgggggctacagcgagtggggctagatccccagctgccactgaatctggctgcccttcaggcccacctggcccaggagaaccgtgtggtggccttcttcagcctggctctactgcttgccccactggtggagacgcttattctactggaccggctgctgtaccttcaggaacaggccctttctcccaggtttccatgctgagctcctgcccatcttcagtcctgaactctctcccagaaacctggttctggtggccaccaagatgcccctgggtcaggctctttctgttctggagactgaagacagctgatgcagcctgaggagacatctcagaccccatcatctgaaagtgcccagagagcacagtggcagagtacatctcatccagagaaacagcatcctgcatcctccagagtcctggttccttcagtttcatcccctttctctccttccatggattatgtaatacattgtaaagttttaattaattaaaaattggatatctgaaaaaaaaaa

SEQ ID NO: 60546 - DNA, 6309 bp, Homo sapiens
gattgtttgaatttgaaaacggtaacatcgcagtgctgctcgcgggtctggctagtcaggcgaagtttgcagaatggaatctaattttaatcaagagggagtacctcgaccatcttatgtttttagtgctgacccaattgcaaggccttcagaaataaatttcgatggcattaagcttgatctgtctcatgaattttccttagttgctccaaatactgaggcaaacagtttcgaatctaaagattatctccaggtttgtcttcgaataagaccatttacacagtcagaaaaagaacttgagtctgagggctgtgtgcatattctggattcacagactgttgtgctgaaagagcctcaatgcatccttggtcggttaagtgaaaaaagctcaggggcagatgggcacagaaattcagttttttcccaggttttttgggcccagcaactacacagaaggaattctttcagggttgcattatgcaccccagtaaaagacctcttgaaaggacagagtcgtctgatttttacttacgggctaaccaattcaggaaaaacatatacatttcaagggacagaagaaaatattcgcattctgcctcgaactttgaatgtattatttgatagtcttcaagaaagactgtatacaaagatgaaccttaaaccacatagatccagagaatacttaaggttatcatcagaacaagagaaagaagaaattgctagcaaaagtgcattgcttcggcaaattaaagaggttactgtgcataatgatagtgatgatactctttatggaagtttaactaactctttgaatatctcagagtttgaagaatccataaaagattatgaacaagccaacttgaatatggctaatagtataaaattttctgtgtgggtttctttctttgaaatttacaatgaatatatttatgacttatttgttcctgtatcatctaaattccaaaagagaaagatgctgcgcctttcccaagacgtaaagggctattcttttataaaagatctacaatggattcaagtatctgattccaaagaagcctatagacttttaaaactaggaataaagcaccagagtgttgccttcacaaaattgaataatgcttccagtagaagtcacagcatattcactgttaaaatattacagattgaagattctgaaatgtctcgtgtaattcgagtcagtgaattatctttatgtgatcttgctggttcagaacgaactatgaagacacagaatgaaggtgaaaggttaagagagactgggaatatcaacacttctttattgactctgggaaagtgtattaacgtcttgaagaatagtgaaaagtcaaagtttcaacagcatgtgcctttccgggaaagtaaactgactcactattttcaagtttttttaatggtaaagggaaaatttgtatgattgtcaatatcagccaatgttatttagcctatgatgaaacactcaatgtattgaagttctccgccattgcacaaaaagtttgtgtcccagacactttaaattcctctcaagagaaattatttggacctgtcaaatcttctcaagatgtatcactagacagtaattcaaacagtaaaatattaaatgtaaaaagagccaccatttcatgggaaaatagtctagaagatttgatggaagacgaggatttggttgaggagctagaaaacgctgaagaaactgaagattaggggaaactaaacttcttgatgaagatctagataaaacattagaggaaaataaggctttcattagccacgaggagaaaagaaaactgttggacttaatagaagacttgaaaaaaaaactgataaatgaaaaaaaggaaaaattaaccttggaatttaaaattcgagaagaagttacacaggagtttactcagtattgggctcaacgggaagctgactttaaggagactctgcttcaagaacgagagatattagaagaaaatgctgaacgtcgtttggctatcttcaaggatttggttggtaaatgtgacactcgagaagaagcagcgaaagacatttgtgccacaaaagttgaaactgaagaagctactgcttgtttagaactaaagtttaatcaaattaaagctgaattagctaaaaccaaaggagaattaatcaaaaccaaagaagagttaaaaaagagagaaaatgaatcagattcattgattcaagagcttgagacatctaataagaaaataattacacagaatcaaagaattaaagaattgataaatataattgatcaaaaagaagatactatcaacgaatttcagaacctaaagtctcatatggaaaacacatttaaatgcaatgacaaggctgatacatcttctttaataataaacaataaattgatttgtaatgaaacagttgaagtacctaaggacagcaaatctaaaatctgttcagaaagaaaaagagtaaatgaaaatgaacttcagcaagatgaaccaccagcaaagaaagggtctatccatgttagttcagctatcactgaagaccaaaagaaaagtgaagaagtgcgaccgaacattgcagaaattgaagacatcagagttttacaagaaaataatgaaggactgagagcatttttactcactattgagaatgaacttaaaaatgaaaaggaagaaaaagcagaattaaataaacagattgttcattttcagcaggaactttctctttctgaaaaaaagaatttaactttaagtaaagaggtccaacaaattcagtcaaattatgatattgcaattgctgaattacatgtgcagaaaagtaaaaatcaagaacaggaggaaaagatcatgaaattgtcaaatgagatagaaactgctacaagaagcattacaaataatgtttcacaaataaaattaatgcacacgaaaatagacgaactacgtactcttgattcagtttctcagatttcaaacatagatttgctcaatctcagggatctgtcaaatggttctgaggaggataatttgccaaatacacagttagaccttttaggtaatgattatttggtaagtaagcaagttaaagaatatcgaattcaagaacccaatagggaaaattctttccactctagtattgaagctatttgggaagaatgtaaagagattgtgaaggcctcttccaaaaaaagtcatcagattgaggaactggaacaacaaattgaaaaattgcaggcagaagtaaaaggctataaggatgaaaacaatagactaaaggagaaggagcataaaaaccaagatgacctactaaaagaaaaagaaactcttatacagcagctgaaagaagaattgcaagaaaaaaatgttactcttgatgttcaaatacagcatgtagttgaaggaaagagagcgctttcagaacttacacaaggtgttacttgctataaggcaaaaataaaggaacttgaaacaattttagagactcagaaagttgaacgtagtcattcagccaagttagaacaagacattttggaaaaggaatctatcatcttaaagctagaaagaaatttgaaggaatttcaagaacatcttcaggattctgtcaaaaacaccaaagatttaaatgtaaaggaactcaagctgaaagaagaaatcacacagttaacaaataatttgcaagatatgaagcatttacttcaattaaaagaagaagaagaagaaaccaacaggcaagaaacagaaaaattgaaagaggaactctctgcaagctctgctcgtacccagaatcctgaacgcagatcttcagaggaaggaagaagattatgctgacctgaaagagaaactgactgatgccaaaaagcagattaagcaagtacagaaagaggtatctgtaatgcgtgatgaggataaattactgaggattaaaattaatgaactggagaaaaagaaaaaccagtgttctcaggaattagatatgaagcagcggaaccattcagcaactcaaggagcagttaattaatcagaaagtggaagaagctatacaacagtatgagagagcatgcaaagatctaaatgttaaagagaaaataattgaagacatgcgaatgacactagaagaacaggaacaaactcaggtagaacaggatcaagtgcttggaggctaaattggaggaagttgaaaggctggccacagaattggacagatggagggtaaaatgcaatgatttggaaaccaaaaacaatcaaaggtcaaataaagaacatgagaacaacacagatgtgcttggaaagctcactaatcttcaagatgagttacaggagtctgaacagaaatataatgctgatagaaagaaatggttagaagaaaaaatgatgcttatcactcaagcgaaagaagcagagaatatacgaaataaagagatgaaaaaatatgctgaggacagggagcgtttttttaagcaacagaatgaaatggaaatactgacagcccagctgacagagaaagatagtgaccttcaaaagtggcgagaagaacgagatcaactggttgcagctttagaaatacagctaaaagcactgatatccagtaatgtacagaaagataatgaaattgaacaactaaaaaggatcatatcagagacttctaaaatagaaacacaaatcatggatatcaagcccaaacgtattagttcagcagatcctgacaaacttcaaactgaacctctatcgacaagttttgaaatttccagaaataaaatagaggatggatctgtagtccttgactcttgtgaagtgtcaacagaaaatgatcaaagcactcgatttccaaaacctgagttagagattcaatttacacctttacagccaaacaaaatggcagtgaaacaccctggttgtaccacaccagtgacagttaagattcccaaggctcggaagaggaagagtaatgaaatggaggaggacttggtgaaatgtgaaaataagaagaatgctacacccagaactaatttgaaatttcctatttcagatgatagaaattcttctgtcaaaaaggaacaaaaggttgccatacgtccatcatctaagaaaacatattctttacggagtcaggcatccataattggtgtaaacctggccactaagaaaaaagaaggaacactacagaaatttggagacttcttacaacattctccctcaattcttcaatcaaaagcaaagaagataattgaaacaatgagctcttcaaagctctcaaatgtagaagcaagtaaagaaaatgtgtctcaaccaaaacgagccaaacggaaattatacacaagtgaaatttcatctcctattgatatatcaggccaagtgattttaatggaccagaaaatgaaggagagtgatcaccagattatcaaacgacgacttcgaacaaaaacagccaaataaatcacttatggaaatgtttaatataaattttatagtcatagtcattggaacttgcatcctgtattgtaaatataaatgtatatattatgcattaaatcactctgcatatagattgctgttttatacatagtataattttaattcaataaatgagtcaaaatttgtatatttttataaggcttttttataatagcttctttcaaactgtatttccctattatctcacacattggatcagtgaagatcctaggaaagaggctgttattctcatttattttgctatacaggatgtaataggtcaggtatttggtttacttatatttaacaatgtcttatgaattttttttactttatctgttatacaactgattttacatatctgtttggattatagctaggatttggagaataagtgtgtacagatcacaaaacatgtatatacattatttagaaaagatctcaagtctttaattagaatgtctcacttattttgtaaacattttgtgggtacataggacatgtatatatttacggggtatgtgagatgttttgacacaggcatgcaatgtgaaatacctgtatcatggagaatgaggtatccatcccctcaagcatttttcctttgaattacagataatccaattacattctttagatcatttaaaaatatacaagtaagttattattgattatagtcactctattgtgctatcagatattaaatcattctttttatcttatttgtttttgtacccattaaccatccccacctccccctgcaaccgtcagtacccttaccagccactggtaaccattcttctactctgtatgcccatgaggtcaattgattttatttttagatcccataaattcgacgcggccg

SEQ ID NO: 60547 - DNA, 3636 bp, Homo sapiens
attgacttcttatagctgtacgcccgcgcgaccggacgcggattcccgggtcgacgatttcgtgtccgtgagagtggcgtgggggcggggaggagaggcggcggcggcagtgtccaagctacgccactcgggctggggcgttgggagcgggagtgcagagcgtggtcgtggcggcggcggtgagaagagcgaggcggaggagggggtgccatggccgggcagcagttccagtacgatgacagtgggaacaccttcttctacttcctcacctccttcgtggggctcatcgtgatcccggcgacatactacctctggccccgagatcagaatgccgagcaaattcgattaaagaatatcagaaaagtatatggaaggtgtatgtggtatcgtttacggttattaaaaccccagccaaatattattcctacagtaaagaaaatagttctgcttgcaggatgggcattgttcttattccttgcatataaagtttccaaaacagaccgagaataccaagaatacaatccttatgaagtattaaatttggatcctggagccacagtagcagaaattaaaaaacaatatcgtttgctgtcacttaaatatcatccagataaaggaggtgatgaggttatgttcatgaggatagcaaaagcttatgctgcctttaacggatgaagagtcccgggaaaaattgggaagaatttggaaatccagatgggcctcaagccacaagctttggaattgccctgccagcttggatagttgaccagaaaaattcaattctggttttacttgtatatggattggcatttatggttatccttccagttgttgtgggctcttggtggtatcgctcaatacgctatagtggagaccagattctaatacgcacaacacagatttatacatactttgtttataaaacccgaaatatggatatgaaacgtcttatcatggttttggctggagcttctgaatttgatcctcagtataataaagatgccacaagcagaccaacgagataatattctaataccacagctaatcagagaaattggcagcattaatttaaagaagaatgagcctccacttacctgcccatatagcctgaaggccagagttcttttactgtctcatcttgctagaatgaaaattcctgagacccttgaagaagatcagcaattcatgctaaaaaaagtgtcctgccctacttcaagaaatggttaatgtaatctgccaactaattagtaatggcccggaaccgtgaagaaagggagtttcgtgctccaactttggcatccctagaaaacctgcattgaacctttctcagatggcccgttcagggacttcagcaatttaaagtctcccccttctgcaggctcccctcatattgaagaggacaatcttagacgggtttctaatcataagaagtataaaattaaaactatccaggatttggtgagtttaaaagaatcagatcgtcacactctactgcacttccttgaagatgaaaaatatgaagaggttatggctgtccttgggagttttccatatgtgaccatggatataaaatcacaggtgttagatgatgaagatagcaacaacatcacagtaggatccttagttacagtgttggttaagttgacaaggcaaacaatggctgaagtatttgaaaaggagcagtccatctgtgctgcagaggaacagccagcagaagatgggcagggtgaaactaacaagaacaggacaaaaggaggatggcaacagaagagtaaaggacccaagaaaactgctaaatcaaaaaaaaagaaacctttaaaaaaaaaacctacccctgggctattaccacagtcaaagcaacagaaacaaaagcaggcaaatggagtcgttgggaatgaagctgcagtaaaggaagatgaagaagaagtttcagataagggcagtgattctgaagaagaagaaaccaatagagattcccaaagtgagaaagatgatggtagtgacagagactctgatagagagcaagatgaaaaacaaaacaaagatgatgaagcagagtggcaagaattacaacaaagcatacagcgaaaagagagagctctattggaaaccaaatcaaaaataacacatcctgtgtatagcctttactttcctgaggaaaaacaagaatggtggtggctttacattgcagataggaaggagcagacattaatatccatgccatatcatgtgtgtacgctgaaagatacagaggaggtagagctgaagtttcctgcaccaggcaagcctggaaattatcagtatactgtgtttctgagatcagactcctatatgggtttggatcagattaaaccattgaagttggaagttcatgaggctaagcctgtgccagaaaatcacccacagtgggatacagcaatagagggggatgaagaccaggaggacagtgagggctttgaagatagctttgaggaagaagaggaggaagaagaagatgatgactaagcagtactcctgaatggaccacagtgtttgcacatatttgcaattttttgctgttttgaaagtgtatcataaacccagaaacagtacagaactgatgttgagggaggtgtagtttttttactcttgaaatgggtgcataatataactaggcagtggcggtgccttggtacaacctcaaaaatgttaaggcttattgaaacctttcaagtaggggatggtacatttatttcatctgcaaatgataataaatcctttgttattataactgtccagaagtgttgggctatgtattatctgatcagtctatggtcccagtaaaagtaaagatgcagggaaacacagtctgtaaatggagcgacttttctttgttcagccttagtttttagcaaacaccacaaatatggtttaaggtaacatcgccccaaggtttaagtaacatcgctcaagtggataatcccctggataagctctgttggtggaccattttgcagtgatacaacagactccactgcatagattttaaactttaatttttacttattcttggtcataaagttggcattctactcacattcccacaggataatagagggcctacgttttggaatttcccttttccttaattgccccagagttatcagacagattataaaaatggcttttaatggcttaaaccatttcctaaacctctatcttagcagatcaatgcagggatctaattcttttgataagttctagctctaaaagtgatagtgggactgtatgttttctgatactggtggcttatgttattaaaccttttttaaaaaaggttcactctaaaagctgaactacatccttagttttcagtctacttgactctatcaggagctttttaaggaaagtaagtataacatgcaaaggaagcttttttttgtattcattttggactcctgtcaataaaaatagaagtttgttgactcgttttatgtttcaatggtgtgtgtctttttactatcaggacataaatagggcaatccacttctttatttttcaactaaagattgaatagtattgtacattactgctaaagtgactgctatttctgtatactgtagaaaaacccaggagtgagagggatttcccctcata

SEQ ID NO: 60548 - DNA, 2373 bp, Homo sapiens
ggccttggggctttgtgagatagctagggtcgacttgtgtggattctagtagaacggagctgaccctatccgaacaggcccctgccctgcttggatagaggcctccgaacaggagtaaagaatggctgttgaacatccacaaggcacctgcaagactatgaatcaaagttgagaccaagaaattatttctgaaaaaggatatggaaaaccttacaaaacacagcattgagtgttcaagtttcagaggtgattgggaatgtaaaaaccagtttgagagaaaacagggatctcaggaaggacatttcagtgaaatgatatttactcctgaagacatgcccactttcagtatccagcatcagagaattcatactgatgagaaactccttgaatgtaaggaatgtgggaaggattttagttttgtatcagtccttgttcgacatcagcgaattcatactggtgagaacaccttatgaatgcaaagaatgtggcaaggcctttggtagtggtgcaaaccttgcttaccatcaaagaattcatactggtgagaagccttttgaatgtaaagaatgtgggaaggcctttggtagtggctcaaaccttactcaccatcagagaattcatactggtgagaaaccctatgagtgtaaggaatgtgggaaagcctttagttttggatcaggccttattcgacatcacatcattcacagtggtgagaagccttatgagtgtaaggaatgtgggaagtcctttatttttgaatcagcccttattcggcatcacagaattcacacaggtgagaaaccttatgaatgtatagattgtggtaaagcctttggcagtggttcaaaccttactcaacatcggcggattcatactggtgagaaaccttatgaatgcaaagcatgtggaatggcctttagcagtggttcggctcttactcggcatcagagaattcataccggtgagaaaccatatatatgtaatgaatgtggtaaggcctttagttttggatcagcccttactcgacatcaaagaattcatactggtgagaaaccttatgtatgtaaggaatgtgggaaggcttttaatagtggctcagatctcactcagcatcagagaattcacactggtgagaaaccctatgagtgtaaggagtgtgagaaagcctttagaagtggttcaaaacttattcagcatcaaagaatgcatactggagagaaaccttatgaatgtaaggaatgtgggaagacctttagtagtggttcagaccttactcaacatcacagaattcatactggtgagaaaccctatgaatgtaaggaatgtgggaaggcctttggtagtggctcaaaacttatccaacaccagctaatccatactggtgaaagaccctatgaatgtaaagaatgtggaaagtcctttagtagtgggtcagctcttaatcggcaccagagaatacacactggtgagaaaccctatgaatgtaaggagtgtgggaaggctttttatagtggctcaagccttactcagcatcagagaattcatacaggtgagaaactttatgaatgtaagaactgtgggaaggcttatgggagggattcagagtttcagcaacataagaaaagtcataatggtaagaaactctgcgaattggaaactataaattgaaattatgtgctgaaggaaggactctaaacatatgacttaagaaaattcatagtggtgaaaatctctacaaatagaactaaggtacaaatgccttacttatgcttcacaggttagtcagtctaagaatatttatacaggaaaaaaatcaccccaaataaaataaatatttgaagatccttatctatattcattccttcattacttttggaaaattcttacttgtgaatgttaaaaatgaaaaaaaaatcatttattatattttgcctcaactttaaacattggaaaactcatttctgggttaatcctactatattttttcaatggtcttttttttttgtattatacaaaattactgattcattgaaaaattattttatttattgcaagcctaaatttatcctttttttctttcctgattatcctaacaccatttattcaataaccttgtccattttcatattttttttattgactatttgatggtaagttacatttttattcacataaagcttggatatcaggtcagggtttttttgtttttgtttttgtttttgtttttttgagatggagtctcactgtcaccaggctggagtgcaggggggcaatctcggttcactgcaacctccacctcccgagttcaagtgattttcctgcctcagctccccagtagctgggactacaggcgcccgccaccacgcccagctt

SEQ ID NO: 60549 - DNA, 851 bp, Homo sapiens
ttttttttttttgcaggtgcatttgtttctttatttaaaaaaatcatctgggggcatggtctgaggaggacacccctcccatggctttggggaggacgcaggttccaggagtcacagggcagaaacacgcggggtgggtgggggcgtggccggagtggggaggggctgtgcccccagcacctgggggtggctcccacggcaccaggtgggctagggcaacagtatgtacaggcgagcagtgctcctggacccggtcggggccggctggggccccattctgcggcaggggagctctggggcacagggtctgagtcccatcttgggctgcagggaccgcgagggccgtccagggaggctggacagcgggggcctttatctgggcccatcaggtggatgagaacggacactgcaaaccgctcaccacctgggccagggctaggcctatccggcaggggccgtccccacactgaatcctgcgtgcgcagaactcaagccggcatccaggcagtgggaacgccccgcaggctgggcttgggtggcctcgggcacgtgacaggtggggcccgtgtcctgataaacggacaggaacaaaaggaacgcaaggtctgggacccacggctctgggagcagcgccacccaggctggctcctggcagagaaatgggaatcgcaaatgcattgcaatgtgcagtgaagagacgcgagggacgcccgcggcgcaccgccggcagacgacgtgggcaggcgccctgagctgcgggtccgtgggccctggcccaggccggcacagccctgtccctagtcctgagggattgtctccacacggcctggccactggcctggccacctccc

SEQ ID NO: 60550 - DNA, 5225 bp, Homo sapiens
tttcgtgggagggaacgctccaggtaaagcgctgggggaggaagcgacgccgaggagctacggtttcctccagaggtctccgcccctctgcccctatattcccagagctcgagtctgatccgggccttgccgggcaccctggaaaggcgggggtgatagtacagatggagacgcaactgcagagcattttcgaagaggtggtgaaaacggaagttatagaagaggcttttcctggcatgtttatggatactcctgaagatgagaaaacaaaactaattagctgtttgggggccttcagacagttttggggtggtctttctcaggagtctcatgaacagtgtatccagtggattgttaagtttattcatggtcagcatagtcctaaaagaatttcttttctttatgactgcttagcaatggcagttgagactggtctccttccacccaggctggtttgtgaatccctgataaactctgacactcttgagtgggaaagaacacagctttgggccttaacatttaaactggttcggaaaataattgggggagtggattacaagggtgttcgagatctcttaaaagtgattttggagaagattttgacaattcctaatacagtgagctctgctgttgtacagcagcttctggcagcaagagaggttatagcatatatcttggaaagaaatgcctgcttattaccagcctattttgcagtcactgagatcaggaaactgtatcctgaaggcaaacttccacactggttacttggaaacctagtatcagacgttgtggataccttcaggcccacagcaaggataaactccatttgtggtcgctgtagtcttctgccagaagtaaataattcgggtgccatttgtaattcatggagaactggatcctgctactcttcgttttcctttgaaaggccgttttgccaatatgataagcgatctgtttgaaccacagactgctttgttgaggatatgtattggagcagccttattccagggatatggtctgcaatatgctaggtttaaataagcagaccttgaacattgctcagcacaagcagcgctgccctgtgctggaggaccagttggtggatctggttgtttatgccatggagcgatctgagaccgaggagaagtttgacgatgggggaacaagccaactcctgtggcagcatctctcaagtcagctcattttctttgtgcttttccagtttgcaagttttccacatatggtgctttctcttcatcagaagttagcagggcgaggactgattaaaggcagagatcatcttatgtgggttctcctgcaattcatttctggaagtattcagaaaaatgcactagctgattttctccctgtgatgaagctcttcgacttgctatacccagaaaaagaatatatcccagttcctgatattaacaaaccccagtcaacccatgcctttgcaatgacctgtatttggattcatctcaatagaaaagctcaaaatgacaactccaagctacagattccaatacctcattccctaagacttcaccatgagttcctgcagcagagtctaagaaataaaagtttacagatgaatgactataagattgctctattgtgtaatgcatactctacaaattcagaatgttttacattacccatgggagctctggtagaaactatttatggaaatggaattatgaggatacctctccctggaacaaactgtatggcttcaggatctattacccccttacctatgaacctcctggattcactgacagttcatgccaaaatgagccttattcacagcattgcaaccagggtgataaaacttgctcatgcaaagtccagtgtggccttggctccagccctagtggaaacttacagtcgtttattggtctatatggaaatagagtctttgggcatcaaaggatttatcagtcagcttttgccaactgttttcaaatcacatgcatgggggatcttacacacactccttgagatgtttagctaccggatgcatcatattcagcctcattacagagttcagctcctgagtcatcttcatactttggctgcagttgcacaaacaaaccagaaccagctccatctttgtgtcgagagcactgctctcaggcttataacagcattaggtagctcagaggtacaaccgcagtttacacgcttccttagtgatcccaaaacagtgctctcagcagaatctgaagaactgaaccgagccttgatattgaccttggctagagcaactcatgtaacagatttttttacaggctctgattcaattcagggaacttggtgtaaagacatacttcagaccatcatgagtttcactcctcataattgggcttcacacaccctgagctgttttccaggcccactacaggcattcttcaaacaaaataatgtgcctcaggaaagccgttttaatctgaaaaaaaatgtggaggaggagtataggaagtggaagtcaatgagcaacgaaaacgacattattacccacttctctatgcagggctcccctcctctctttctttgtcttctctggaaaatgctcttggaaacagatcatattaatcagattggctatagagtattagagagaattggagccagggccttggtagcccatgtgaggacatttgcagatttcctggtatatgagttttctacatcagcagggggtcagcaactcaataaatgcattgaaattcttaatgacatggtatggaagtataacattgttacactggacagattaattctctgcctggccatgcgtagtcacgaaggaaatgaagcccaggtttgttatttcataattcagttgctgttactcaaaccaaacgattttagaaatcgagtaagtgactttgtgaaggaaaattccccagagcactggttacagaatgactggcacaccaagcacatgaattatcacaagaaatatccagagaagttgtattttgagggcctcgcggaacaggtggatcctccctgtacagatccagtctccctatctgcccatctattttgggaatgtgtgtcttcgattccttccagtatttgatatagtaatccacagatttttagagttgcttccggtatccaaatcactggagactctactggatcatctaggaggcttatataaatttcatgatcgtccagtgacttatctgtataacactctgcactattatgaaatgcacctgagagaccgcgcatttctcaaacgaaaactcgtccatgcgatcattggctctctgaaggataatcgaccgcagggctggtgtctaagtgacacttacctgaaatgcgctatgaatgcacgagaggaaaatccttgggttccagatgacacctactattgcagattgattggcagactagtcgatacgatggctggcaaatctcctggtccctttccaaactgtgactggagattcaatgagtttcccaacccagctgcccatgctctccatgttacttgtgtggagctcatggccttggcagtttcaggcaaagaagttgggaatgcccttctaaatgttgtcctaaaaagtcagcctttagtgccaagagagaacattacagcatggatgaatgcaattggtttgatcatcactgccctaccagagccatattggattgttcttcatgatcgaattgtgagtgtcatcagcagccccagcttgacgtctgaaacagagtgggttggctatccattccgcctctttgatttcactgcctgtcatcagtcctactctgagatgagttgtagctatacgttagctcttgcacatgctgtgtggcaccattctagcatcggacaactttctctcattccaaagtttcttactgaagtacttcttcctatagtgaagaccgaattccagttgctttatgtataccatcttgttggaccatttttacaaagatttcagcaagagagaactcgttgtatgatagagattggtgtggcgttttatgacatgctgctgaatgttgaccagtgtagcacccatttaaattacatggatcccatctgtgacttcctctatcacatgaagtatatgtttactggtgacagcgtgaaagagcaagtagagaagattatctgtaacttaaaaccagctttaaaacttcgtcttcgattcatcacacacattagcaagatggagccagctgcagtgcctccacaagccatgaacagtgggtctccagcacctcagtctaatcaggtgcccgtgtctttaccagtaactcagtgaagccagactgtactgtggagaaagtagaaatatatccgtctttgagagtggactcaaaccttttaaatctgaatgcgatcacactgtagtgatatagtagaagcagtgatgatattcagattgttttattttgattcaaatgatgaatctgttgacaccttataactcccatctccctatctatatttttgtctctaagagatcaagtaagatacatgttgttcatattcataacaacttattagagctatgtaggaacatagaggtatctgtgatcaaatgacttgtcattggcactttcagtctttcctattctagccgttgtttttgtttgtattttttattattaatgacatatttagtcttcagatatattattttaaaggcaccacacatgtaaaacagttattacaaatattttatacataaatctcttggtagattttcagaataatagagatttatatcaagaaaaggaatctagattttgttgcattgtaggagcaaacaaggcttcatattctttttaaaatgacttgaaattttattataaatttccatagtttctatcaaggtcaactggcagttttattacctttgctatggacttgaacttactgtataaaattagttggaagccatgtaagaaaataacatctgaaaattcttgaacttaaaatcatgcttaaatggttgattctccaatttctttttttaaaaataagttaattgcttttgcaggttgacactctcacctgacagatgatgtaattcttcaatttttataatcttaaaatttttaaattttatatttgtaaatacagtacacattttatttcttggattttgagagacattgttaattttgggggaattggcattgcgaaagacttgaaaactaatgagtaaagtctgctgaatgaaaaaaaa

SEQ ID NO: 60551 - DNA, 5514 bp, Homo sapiens
ttttttttttttggataataaaaatttaatagcaatatcataaaataaacacacatattaaaaaatcaagtatttagtttcggatattagaaataatatacataataaattcaacatactgatagtgctgcaagataagattttatttttcaaattacatattatcgccaaccagcctgctttggactcagaggttcaaaaactttgcttttattacgaagaacatctggactgtagacacctctaacgaaaccaggttatacttggcatattgtgattgaagctgtgtgatcaacatcttaatgacctaactaaatcctctcataacagaaagaagttcaacaggcaaacatttccctccctaggatcctagttaccaaaactgtcacagtgtcaaaataaaaataattatttcctcctttttaacatcttattgtccttgaagcttatgtatggaggaagttaaaaaccaaaagagcaactttaagctatatgctaagtcagtgttaaatccacagactaatttttcgatatagtattcctggttctggtccttaaagagaaataaaggcattaaaccaactttttatatgtcaagaaatataattttgctattctttcataatcaaatctttcaatgatttctaagactgtttctacagcctgtgtgctagttcaggagacacactgattgtaaaaggacttgagaatataaactttaaggctaaaaatttcatcttcaaaatgtatagatgtaaacagagcccttgacaaggtgatttaatgtagaactgctggccagaatgaaaacaagtactagacagaaaaaagatcatgcttaaagactccattgaaaaaccacagacaggtccttcatgacataggtaattccttcaacctaaagacatttgctgaaactcaaagttaccctattgcatagtaaatcttcaaaaccattaagtcaggttctgggtcaatgtttcctatgctttggttggatgatttaataaagtatatattttatgagatttaaccatggaattcaatgaacaaaatagataaaatattagaatcttcattgaaaaatggcatgtttctccatctttttcatgcaataagaaagtccatcttaaatctgattttttaaataaataattgctgtatttcccactgaagcttgttattctgataagccaaattcaaatgctttcatatagttgaggattaaaaaacattttgaggattattcatcattatcttcttggtaggctccatctgccatgactaaatgaagaatcttggcataaagatgctgatgttcatttcccaaaatattttgaactatttttgaacaaatttcaatattttcatcttcatcttcatgaatagcctttattttctcataaacctcaaagaatttttcaaagcccatttcctgctccagatgaagtctcagttcctctaaatggttaaagacactatcgcattcacattcactagcaatttcaccatcactgttatctgagtgccattcttcgttcagggcactttcactgctgggattgtcatcttcatctgccacatctgtcccatttgcagttggctccacatcactgttcttcaagactgactcttcttcttcactgtattcttcaccaggttgttccctaagtaactgttccatcgaggcctgcagctcttgtaaatctgtgtcagtttcttcaaacacaatgtcttcagaatcagaaggtccttctttaatgttttcatcttcaatttcatctatttcaagattgtcttgacgaacatctcctacggtgggaacatccataagggttctgaacagctttgagagatctggaagtgaacatgtccttaacatctttgggttgtttgcatcaaacagaccagttgaaagtccaatcagcaaggaattcttgtttttattttttggtggtaaatgcgagtgagatcgaaatgcaaaggattcttctggtgaacactgaactgattgaacttgagggactaagttcaagtgttcagaatgaaccaccttatggaaaaatggttccggttgcacagacttatctacatcacatttagagtgctgagaatcattggttccaggctctatatgaatgtcactaagttggtccacagtactcgagactccatcttcagaaacttcattttcctgaatggtgatcctatctgccgactgagtttcctttgtttctttttcctcactaatccacacatcagtaatagtgcatggcaagcttctcatctttgtttgttccacttggctcttgtagaatttctgtttccaaatcatcaggttcttctaaatttccttccagtttcaatgacatctgtggagatgcctcactgaactcgggactttttgtctcaacaggagaatcaacaatagctgatgggtttatttcatgtgaaatacattgtacttttttttctccagtaattaagggtttgtacttttccccttcgggagaaatctcacttctaatagttgtattttctaatagttctgtctgaagttgtagttcagcttctccaagtatctttagaacagaatctgtcggacttttcccccaggctcttcttggagatccattaggacctaatttaataacttctcccactgtatgtctttcagttgtagagaaggatgtatctagtgttaactcatccagaggaatcacaagttgacctcctgcctcccacttcttgcgatcagatgaaactgatttttctttttcatgctctttggcatcttcatgaacatttatctcaaaagtatcagagagattctgctttcctttttcatcttcttgagctttaagattttcatttaatctacgaagtatttctcgcttacttgaaatagcattgttggtcttttgcatctcttctgaagtttcccgggtatcagttaaactactgtccacgccaacttctttcaaagctgaagttacagaaataacagatctcatctgttgctttgatggagagccacctgtttcatgctgtcccaaaggtggagaaacatcagaactcttaactcctttagccaccaaatgctcttcccacacttttttttctctctcataagcctcctttctctttcgttctagttgttcttttagtacagcagcacgtgcatttgcatgggccttcagtgattcgattttttttgcgcctcatgtcagcctcttcacttccttcttgtccttcagaatgattagcttctttcttttcaccacgaagtttggctttaatctgttggcgctcattgaaattctgtagtcttatttgcctcagtcttgccagataaacctcttcctctttgtttcttggcttccctcctcttgaagagctgggcctgcctccatacatagctgccaggttttgcaggattcccatatgtccttcggctcgagctttattctgcatagcttcccgttttcgctgcaggaactcttctacttgtttagctctttctacagctagctgccctttttgcctttctggaagacctcgaccatatatttctcttttccatttagcttcattatcttctgctctttgttgctgcatttggtcaaaaatggcatggtaatgttcatactgtcctcgagaagaaaaagatgatggagctatagtccctccactgcccagaaaaggagcctttacttcaccacttccaccagcacttagcacatttctccatccttgttccctggccctatttattctttccaacctttccttttcttgccttttcatttgttcagccttcattaaactaataatctgatccttttgtttcttttctttttcaataaattccagccttctctttcttgctgcttcctcagatattttcctcctttcttccccagtattcactctcttctctggagtttgatgggcctgtttatgtttttgcagtggtttcttttcgtgtaattttttatctccatatttcttatatgctaaaggtattccatatttagcggcaggctttgtaattttctgagcaggcataacagaaatcgagttttgtcctgaagctggtcttttaagctggtataaggcttgtgatccaaacttcgaaaaatgtttttaagacaaaaattcttcgtgcaataagctgaggagagagaaacttttcaatgcgtttggctataaaacctttctccaatatggagttgactgatggtctatccctaggatttcttttaaataactgagacaccaaactgcggagatcataggaataatgcaaagacacaggtggaaaagatccagatattatcttcagtaccaggtttttcatactgccagcttcaaaagcatgtttaagtgtacacagctcataaaggacacaccccagagcccaaatgtcacttttattattgtaaggtttgttttcacagatttcaggtgacaagtagtatggggtccctatgcaagttcgagccagctctacagtactattaagaactctagcaattccaaaatctccaagttatactgttccatctttagttaaaaatatgttctgagatttaatgtctcgatgaagaatttttctatcatgtacatgtttcagggccaaacatatctgtacaaaccagtccaaaatctgatcctcttgaaacaaaacgcctttctgagcatttattcgcttaaacagatcccctccctcacagtaatccattactatgtagagagagccattttcttcaaatgattctctatactggacaatatttggatgcttcatgtttgccaatactgcaacttctctccttgattcttctctttctttactggacattcttgagatgttaatttccttgataacatactgtctgccatcttctgtagatttaacaagaatggcttttccaaatgaaccttctccaatcttctgtagtctaacatacttctccatgattctttttctaaggcatctttacagatatgctagacatttaaaaaactcagtgacacaggacgttagtaggaataacggtgatgactaataagcatcagtctaggtgtggcagtcttcctacggggcttaataaagcagaggtaccatcccgcattttgaaaatgacatcctgacactcgtcttcagttgataccacgggtttgactccgtcctgtctcgggcgacgcccgtaagacaggtcgacactaccccgacgaaacaaacaaactggtttctgagccccgtagaaacggcggggtgcagcagggggagtgcctccgttaccgcctctccaacttcacagaggtcgttgctagtggccacggcggggtggggacgggcggcgttcgggactgggaagctacttgactgccacgtgctcctgcctcgcaacagcggctctagattccgagttatggggacaactgctcgagaggccagggtagggtaaggactccgcaacctagggtcccaaaaccctggagcgaatg

SEQ ID NO: 60552 - DNA, 3117 bp, Homo sapiens
cattggacttcagcatgactactcagttgccagcttacgtggcaattttgcttttctatgtctcaagagccagctgccaggacactttcactgcagctgtttatgagcatgcagcgatattgcccaatgccaccctaacaccagtgtctcgtgaggaggctttggcattaatgaatcggaatctggacattttggaaggagcgatcacatcagcagcagatcagggtgcgcatattattgtgactccagaagatgctatttatggctggaacttcaacagggactctctctacccatatttggaggacatcccagaccctgaagtaaactggatcccctgtaataatcgtaacagatttggccagaccccagtacaagaaagactcagctgcctgggccaagaacaactctatctatgttgtggcaaatattggggacaagaagccatgcgataccagtgatcctcagtgtccccctgatggccgttaccaatacaacactgatgtggtattttgattctcagggaaaactggtggcacgctaccataagcaaaaccttttcatgggtgaaaatcaattcaatgtacccaaggagcctgagattgtgactttcaataccacctttggaagttttggcattttcacatgctttgatatactcttccatgatcctgctgttaccttggtgaaagatttccacgtggacaccatagtattcccaacagcttggatgaatgttttgccacatttgtcagctgttgaattccactcagcttgggctatgggcatgagggtcaatttccttgcatccaacatacattacccctcaaagaaaatgacaggaagtggcatctatgcacccaattcttcaagagcatttcattatgatatgaagacagaagagggaaaactcctcctctcgcaactggattcccacccatcccattctgcagtggtgaactggacttcctatgccagcagtatagaagcgctctcatcaggaaacaaggaatttaaaggcactgtctttttcgatgaattcacttttgtgaagctcacaggagttgcaggaaattatacagtttgtcagaaagatctctgctgtcatttaagctacaaaatgtctgagaacataccaaatgaagtgtacgctctaggggcatttgacggactgcacactgtggaagggcgctattatctacagatttgtaccctgttgaaatgtaaaacgactaatttaaacacttgcggtgactcagctgaaacagcttctaccaggtttgaaatgttctccctcagtggcactttcggaacccagtatgtctttcctgaggtgttgctgagtgaaaatcagcttgcacctggagaatttcaggtgtcaactgacggacgcttgtttagtctgaagccaacatccggacctgtcttaacagtaactctgtttgggaggttgtatgagaaggactgggcatcaaatgcttcatcaggcctcacagcacaagcaagaataataatgctaatagttatagcacctattgtatgctcattaagttggtagaatattgactttttctcttttttatttgggataatttaaaaaatgatggatgagaaaagaaagattggtccgggttaatattatcctctagtataagtgaattactagtttctctttatttagacaaacacacacacaccagataatataaacttaataaattatctgttaatgtagattttatttaaaaaactatatttgaacattggtctttcttggacgtgagctaattatatcaaataagtatcacaaatcttttacgcagaagaaataaaaactacgggtagaaaacataagaactatcataaaatttacttacaaggaggctgctcttgttaccacttttattatattacgtatcacttattcagctctgctgaaaatttccaatgactttgtttgtttgctctttttgttttttacctaaacaatacattttgattctcttgtgggttgataatgtctccccaaaatttacatgttgaagcacctcagaatgtgactgtatttggagacagggtctttaaagaggtaaaataaggtcattaggatagaccctaattcaatatgactgatgatcataaaagaagaggcgagtagggcacaacaggcacaaagggagaccataaggagacacagaggaaggacaactctttacaagctaagaagagagggcctcagaagaaaccaaccctgccaacaccttgatcttggacttccagcctccaaaactatgagaaataaatttctattgtttaagtcacccagtccatggtactttgttaggcagccctggcaaatgaatcaaagacccattcctgttcctctccccaccactactgttttctactgtaatctgaagcttcaacaaaaggcttacctggtaagaatattcagctggtctgggtcctcaagactccaatagacactcttaaagaaggattgctgatggattgatagtgaaaccattagatcattgaattcctctggaattagaaaaccagagagtcccattttaagaaattagatatttaatatagcattgtgtgttctattttagtaacagcagaatctcttgacattacacaactcagtgaaacaacatcatttaagccaaaatatctcccaactgactgatagactctgagcactaatatcatagtgctgtgatgatggacaattacatagtaccgataacagccatgcactgtgcaaagcatgcccttctgcacaggagagcaaggcacttgcagtagtgatctatgccagcaaaacatcattttgagacaaacatttttgtggcagatgtttttcctaaaaagtactatatcatccaagaaatatttgagtaaaatcccttgttcttttgggtgacattaactgacatttgctttttttcaagacctaatagaaaataagaaagcccataatgtatttagaaacaggaatcctcagagcaattctctgtattctcatataatttcaatgtaaaacagaaaacatattgatgtgttggtgataggcttgaattattaaaaacttcaaaaacaaaaaaaaaa

SEQ ID NO: 60553 - DNA, 4360 bp, Homo sapiens
ccgcgctctctgatcagaggcgaagctcggaggtcctacaggtatggatctctggcagctgctgttgaccttggcactggcaggatcaagtgatgctttttctggaagtgaggccacagcagctatccttagcagagcaccctggagtctgcaaagtgttaatccaggcctaaagacaaattcttctaaggagcctaaattcaccaagtgccgttcacctgagcgagagactttttcatgccactggacagatgaggttcatcatggtacaaagaacctaggacccatacagctgttctataccagaaggaacactcaagaatggactcaagaatggaaagaatgccctgattatgtttctgctggggaaaacagctgttactttaattcatcgtttacctccatctggataccttattgtatcaagctaactagcaatggtggtacagtggatgaaaagtgtttctctgttgatgaaatagtgcaaccagatccacccattgccctcaactggactttactgaacgtcagtttaactgggattcatgcagatatccaagtgagatgggaagcaccacgcaatgcagatattcagaaaggatggatggttctggagtatgaacttcaatacaaagaagtaaatgaaactaaatggaaaatgatggaccctatattgacaacatcagttccagtgtactcattgaaagtggataaggaatatgaagtgcgtgtgagatccaaacaacgaaactctggaaattatggcgagttcagtgaggtgctctatgtaacacttcctcagatgagccaatttacatgtgaagaagatttctactttccatggctcttaattattatctttggaatatttgggctaacagtgatgctatttgtattcttattttctaaacagcaaaggattaaaatgctgattctgcccccagttccagttccaaagattaaaggaatcgatccagatctcctcaaggaaggaaaattagaggaggtgaacacaatcttagccattcatgatagctataaacccgaattccacagtgatgactcttgggttgaatttattgagctagatattgatgagccagatgaaaagactgaggaatcagacacagacagacttctaagcagtgaccatgagaaatcacatagtaacctaggggtgaaggatggcgactctggacgtaccagctgttgtgaacctgacattctggagactgatttcaatgccaatgacatacatgagggtacctcagaggttgctcagccacagaggttaaaaggggaagcagatctcttatgccttgaccagaagaatcaaaataactcaccttatcatgatgcttgccctgctactcagcagcccagtgttatccaagcagagaaaaacaaaccacaaccacttcctactgaaggagctgagtcaactcaccaagctgcccatattcagctaagcaatccaagttcactgtcaaacatcgacttttatgcccaggtgagcgacattacaccagcaggtagtgtggtcctttccccgggccaaaagaataaggcagggatgtcccaatgtgacatgcacccggaaatggtctcactctgccaagaaaacttccttatggacaatgcctacttctgtgaggcagatgccaaaaagtgcatccctgtggctcctcacatcaaggttgaatcacacatacagccaaggcttaaaccaagaggacatttacatcaccacagaaagccttacccactgctgctgggagcccctgggacaggagaacatgttccaggttctgagatgcctgtcccagactatacctccattcatatagtacagtccccacagggcctcatactcaatgcgactgccttgcccttgcctgacaaagagtttctctcatcatgtggctatgtgagcacagaccaactgaacaaaatcatgccttagcctttctttggtttcccaagagctacgtatttaatagcaaagaattgactggggcaataacgtttaagccaaaacaatgtttaaaccttttttgggggagtgacaggatggggtatggattctaaaatgccttttcccaaaatgttgaaatatgatgttaaaaaaataagaagaatgcttaatcagatagatattcctattgtgcaatgtaaatattttaaagaattgtgtcagactgtttagtagcagtgattgtcttaatattgtgggtgttaatttttgatactaagcattgaatgactatgtttttaatgtatagtaaatcacgctttttgaaaaagcgaaaaaatcaggtggcttttgcggttcaggaaaattgaatgcaaaccatagcacaggctaattttttgttgtttcttaaataagaaacttttttatttaaaaaactaaaaactagaggtgagaaatttaaactataagcaagaaggcaaaaatagtttggatatgtaaaacatttattttgacataaagttgataaagatatttttaataatttagacttcaagcatggctattttatattacactacacactgtgtactgcagttggtatgacccctctaaggagtgtagcaactacagtctaaagctggtttaatgttttggccaatgcacctaaagaaaaacaaactcgttttttacaaagcccttttatacctccccagactccttcaacaattctaaaatgattgtagtaatctgcattattggaatataattgttttatctgaatttttaaacaagtatttgttaatttagaaaactttaaagcgtttgcacagatcaacttaccaggcaccaaaagaagtaaaagcaaaaaagaaaacctttcttcaccaaatcttggttgatgccaaaaaaaaatacatgctaagagaagtagaaatcatagctggttcacactgaccaagatacttaagtgctgcaattgcacgcggagtgagttttttagtgcgtgcagatggtgagagataagatctatagcctctgcagcggaatctgttcacacccaacttggttttgctacataattatccaggaagggaataaggtacaagaagcattttgtaagttgaagcaaatcgaatgaaattaactgggtaatgaaacaaagagttcaagaaataagtttttgtttcacagcctataaccagacacatactcatttttcatgataatgaacagaacatagacagaagaaacaaggttttcagtccccacagataactgaaaattatttaaaccgctaaaagaaactttctttctcactaaatcttttataggatttatttaaaatagcaaaagaagaagtttcatcattttttacttcctctctgagtggactggcctcaaagcaagcattcagaagaaaaagaagcaacctcagtaatttagaaatcattttgcaatcccttaatatcctaaacatcattcatttttgttgttgttgttgttgagacagagtctcgctctgtcgccaggctagagtgcagtggcgcgatcttgactcactgcaatctccacctcccacaggttcaggcgattcccgtgcctcagcctcctgagtagctgggactacaggcacgcaccaccatgccaggctaatttttttgtattttagcagagacggggtttcaccatgttggccaggatggtctcgatctcctgacctcgtgatccacccgactcggcctcccaaagtgctgggattacaggtgtaagccaccgtgcccagccctaaacatcattcttgagagcattgggatatctcctgaaaaggtttatgaaaaagaagaatctcatctcagtgaagaatacttctcattttttaaaaaagcttaaaactttgaagttagctttaacttaaatagtatttcccatttatcgcagaccttttttaggaagcaagcttaatggctgataattttaaattctctctcttgcaggaaggactatgaaaagctagaattgagtgtttaaagttcaacatgttatttgtaatagatgtttgatagattttctgctactttgctgctatggttttctccaagagctacataatttagtttcatataaagtatcatcagtgtagaacctaattcaattcaaagctgtgtgtttggaagactatcttactatttcacaacagcctgacaacatttctatagccaaaaatagctaaatacctcaatcagtctcagaatgtcattttggtactttggtggccacataagccattattcactagtatgactagttgtgtctggcagtttatatttaactctctttatgtctgtggattttttccttcaaagtttaataaatttattttcttgg

SEQ ID NO: 60554 - DNA, 7728 bp, Homo sapiens
ctcgacgatttcgttaacgtcttcccttggagatgggcgcgcaaaccaaccagtgggtctgggggcggcggtgatgggcgtggagctggcccaatgagggtaggggtgggtggggcagccccgagcagcagtgctaaaggagcccggcggaggcagcggtgggtttgggactgaggcgctggatctgtggtcgcggctggggacgtgcgcccgcgccaccatcttcggctgaagaggcaattgcttttggatcgttccatttacaatggcgcagagaactggactcgaggatccagagaggtatctctttgtggacagggctgtcatctacaaccctgccactcaagctgattggacagctaaaaagctagtgtggattccatcagaacgccatggttttgaggcagctagtatcaaagaagaacggggagatgaagttatggtggagttggcagagaatggaaagaaagcaatggtcaacaaagatgatattcagaagatgaacccacctaagttttccaaggtggaggatatggcagaattgacatgcttgaatgaagcttccgttttacataatctgaaggatcgctactattcaggactaatctatacttattctggactcttctgtgtagttataaacccttacaagaatcttccaatttactctgagaatattattgaaatgtacagagggaagaagcgtcatgagatgcctccacacatctatgctatatctgaatctgcttacagatgcatgcttcaagatcgtgaggaccagtcaattctttgcacgggtgagtcaggtgctgggaagacagaaaatacaaagaaagttattcagtaccttgcccatgttgcttcttcacataaaggaagaaaggaccataatattcctggggaaccttgaacggcagcttttgcaagcaaatccaattctggagtcatttggaaatgcgaggactgttcaaaatgataactcatctcgttttggcaaatttattcggatcaactttgatgtaactggctatatcgttggggccaacattgaaacataccttctggaaaagtctcgtgctgttcgtcaagcaaaagatgaacgtacttttcatatcttttaccagttgttatctgggagcaggagaacacctaaagtctgatttgcttcttgaagggtttaataactacaggtttctctccaatggctatattcctattccgggacagccaagacaaaggtaatttccggggggaccctggggaggcaatgcacataatgggcttctcccatgaagagattctgtcaatgcttaaagtagtatcttcagtgctacagtttggaaatatttctttcaaaaaggagagaaatactgatcaagcttccatgccagaaaatacagttgcgcagaagctctgccatcttcttgggatgaatgtgatggagtttactcgggccatcctgactccccggatcaaggtcggccgagactatgtgcaaaaagcccagaccaaagaacaggcagattttgcagtagaagcattggcaaaagctacctatgagcggctctttcgctggctcgttcatcgcatcaataaagctctggataggaccaaacgtcagggagcatctttcattggaatcctggatattgctggatttgaaatttttgagctgaactcctttgaacaactttgcatcaactacaccaatgagaagctgcagcagctgttcaaccacaccatgtttatcctagaacaagaggaataccagcgcgaaggcatcgagtggaacttcatcgatttcgggctggatctgcagccatgcatcgacctaatagagagacctgcgaaccctcctggtgtactggcccttttggatgaagaatgctggttccctaaagccacagataaaacctttgttgaaaaactggttcaagagcaaggttcccactccaagtttcagaaacctcgacaattaaaagacaaagctgatttttgcattatacattatgcagggaaggtggactataaggcagatgagtggctgatgaagaatatggaccccctgaatgacaacgtggccacccttttgcaccagtcatcagacagatttgtggcagagctttggaaagatgtggaccgtatcgtgggtctggatcaagtcactggtatgactgagacagcttttggctccgcatataaaaccaagaagggcatgtttcgtaccgttgggcaactctacaaagaatctctcaccaagctgatggcaactctccgaaacaccaaccctaactttgttcgttgtatcattccaaatcacgagaagagggctggaaaattggatccacacctagtcctagatcagcttcgctgtaatggtgtcctggaagggatccgaatctgtcgccagggcttccctaaccgaatagttttccaggaattcagacagagatatgagatcctaactccaaatgctattcctaaaggttttatggatggtaaacaggcctgtgaacgaatgatccgggctttagaattggacccaaacttgtacagaattggacagagcaagatatttttcagagctggagttctggcacacttagaggaagaaagagatttaaaaatcaccgatatcattatcttcttccaggccgtttgcagaggttacctggccagaaaggcctttgccaagaagcagcagcaactaagtgccttaaaggtcttgcagcggaactgtgccgcgtacctgaaattacggcactggcagtggtggcgagtcttcacaaaggtgaagccgcttctacaagtgactcgccaggaggaagaacttcaggccaaagatgaagagctgttgaaggtgaaggagaagcagacaaaggtggaaggagagctggaggagatggagcggaagcaccagcagcttttagaagagaagaatatccttgcagaacaactacaagcagagactgagctctttgctgaagcagaagagatgagggcaagacttgctgctaaaaagcaggaattagaagagattctacatgacttggagtctagggttgaagaagaagaagaaagaaaccaaatcctccaaaatgaaaagaaaaaaatgcaagcacatattcaggacctggaagaacagctagacgaggaggaaggggctcggcaaaagctgcagctggaaaaggtgacagcagaggccaagatcaagaagatggaagaggagattctgcttctcgaggaccaaaattccaagttcatcaaagaaaagaaactcatggaagatcgcattgctgagtgttcctctcagctggctgaagaggaagaaaaggcgaaaaacttggccaaaatcaggaataagcaagaagtgatgatctcagatttagaagaacgcttaaagaaggaagaaaagactcgtcaggaactggaaaaggccaaaagaaaactcgacggggagacgaccgacctgcaggaccagatcgcagagctgcaggcgcagattgatgagctcaagctgcagctggccaagaaggaggaggagctgcagggcgcactggccagaggtgatgatgaaacactccataagaacaatgcccttaaagttgtgcgagagctacaagcccaaattgctgaacttcaggaagactttgaatccgagaaggcttcacggaacaaggccgaaaagcagaaaagggacttgagtgaggaactggaagctctgaaaacagagctggaggacacgctggacaccacggcagcccagcaggaactacgtacaaaacgtgaacaagaagtggcagagctgaagaaagctcttgaggaggaaactaagaaccatgaagctcaaatccaggacatgagacaaagacacgcaacagccctggaggagctctcagagcagctggaacaggccaagcggttcaaagcaaatctagagaagaacaagcagggcctggagacagataacaaggagctggcgtgtgaggtgaaggtcctgcagcaggtcaaggctgagtctgagcacaagaggaagaagctcgacgcgcaggtccaggagctccatgccaaggtctctgaaggcgacaggctcagggtggagctggcggagaaagcaagtaagctgcagaatgagctagataatgtctccacccttctggaagaagcagagaagaagggtattaaatttgctaaggatgcagctagtcttgagtctcaactacaggatacacaggagcttcttcaggaggagacacgccagaaactaaacctgagcagtcggatccggcagctggaagaggagaagaacagtcttcaggagcagcaggaggaggaggaggaggccaggaagaacctggagaagcaagtgctggccctgcagtcccagttggctgataccaagaagaaagtagatgacgacctgggaacaattgaaagtctggaagaagccaagaagaagcttctgaaggacgcggaggccctgagccagcgcctggaggagaaggcactggcgtatgacaaactggagaagaccaagaaccgcctgcagcaggagctggacgacctcacggtggacctggaccaccagcgccaggtcgcctccaacttggagaagaagcaagaagaagtttgaccagctgttagcagaagagaagagcatctctgctcgctatgccgaagagcgggaccgggccgaagccgaggccagagagaaagaaaccaaagccctgtcactggcccgggccctcgaggaagccctggaggccaaggaggagtttgagaggcagaacaagcagctccgagcagacatggaagacctcatgagctccaaagatgatgtgggaaaaaacgttcacgaacttgaaaaatccaaacgggccctagagcagcaggtcggaggaaatgaggacccagctggaggagctggaagacgaactccaggccacggaagatgccaagcttcgtctggaggtcaacatgcaggccatgaaggcgcagttcgagagagacctgcaaaccagggatgagcagaatgaagagaagaagcggctgctgatcaaacaggtgcgggagctcgaggcggagctggaggatgagaggaaacagcgggcgcttgctgtagcttcaaagaaaaagatggagatagacctgaaggacctcgaagcccaaatcgaggctgcgaacaaagctcgggatgaggtgattaagcagctccgcaagctccaggctcagatgaaggattaccaacgtgaattagaagaagctcgtgcatccagagatgagatttttgctcaatccaaagagagtgaaaagaaattgaagagtctggaagcagaaatccttcaattgcaggaggaacttgcctcatctgagcgagcccgccgacacgccgagcaggagagagatgagctggcggacgagatcaccaacagcgcctctggcaagtccgcgctgctggatgagaagcggcgtctggaagctcggatcgcacagctggaggaggagctggaagaggagcagagcaacatggagctgctcaacgaccgcttccgcaagaccactctacaggtggacacactgaacgccgagctagcagccgagcgcagcgccgcccagaagagtgacaatgcacgccagcaactggagcggcagaacaaggagctgaaggccaagctgcaggaactcgagggtgctgtcaagtctaagttcaaggccaccatctcagccctggaggccaagattgggcagctggaggagcagcttgagcaggaagccaaggaacgagcagccgccaacaaattagtccgtcgcactgagaagaagctgaaagaaatcttcatgcaggttgaggatgagcgtcgacacgcggaccagtataaagagcagatggagaaggccaacgctcggatgaagcagcttaaacgccagctggaggaagcagaagaagaagcgacgcgtgccaacgcatctcggcgtaaactccagcgggaactggatgatgccaccgaggccaacgagggcctgagccgcgaggtcagcaccctgaagaaccggctgaggcggggtggccccatcagcttctcttccagccgatctggccggcgccagctgcaccttgaaggagcttccctggagctctccgacgatgacacagaaagtaagaccagtgatgtcaacgagacgcagccaccccagtcagagtaaagttgcaggaagccagaggaggcaatacagtgggacagttaggaatgcacccggggcctcctgcagatttcggaaattggcaagctacgggattccttcctgaaagatcaactgtgtcttaaggctctccagcctatgcatactgtatcctgcttcaaacttaggtacaattgctcccctttttatatacagacacacacaggacacatatattaaacagattgtttcatcattgcatctattttccatatagtcatcaagagaccattttataaaacatggtaagaccctttttaaaacaaactccaggcccttggttgcgggtcgctgggttattggggcagcgccgtggtcgtcactcagtcgctctgcatgctctctgtcatacagacaggtaacctagttctgtgttcacgtggcccccgacgactcagccacatcaagtctcctagaccactgtggactctaaactgcacttgtctctctcatttccttcaaataatgatcaatgctatttcagtgagcaaactgtgaaaggggctttggaaagagtaggaggggtgggctggatcggaagcaacacccatttggggttaccatgtccatcccccaaggggggccctgcccctcgagtcgatggtgtcccgcatctactcatgtgaactggccttggcgagggctggtctgtgcatagaagggatagtggccacactgcagctgaggccccaggtggcagccatggatcatgtagacttccagatggtctcccgaaccgcctggctctgccggcgccctcctcacgtcaggagcaagcagccgtggacccctaagccgagctggtggaaggcccctccccgtcgccagccgggccctcatgctgaccttgcaaattcagccgctgctttgagcccaaaatgggaatattggttttgtgtccgaggcttgttccaagtttgtcaatgaggtttatggagcctccagaacagatgccatcttcctgaatgttgacatgccagtgggtgtgactccttcatttttccttctcccttccctttgggacagtgttacagtgaaacacttaggcatcctgtttttggttggtagtttaaggcaaactgacatttacgggaaagttgccttaggacactacagtactaagacaatgttgaatatatcattcgcctctataacaatttaatgtattcagttttgactgtgcttcatatcatgtacctctctagtcaaagtggtattacagacattcagtgacaatgaatcagtgttaattctaaatccttgatcctctgcaatgtgcttgaaaacacaaaccttttgggttaaaagctttaacatctattaggaagaatttgtcctgtgggtttggaatcttggattttccccctttatgaactgtactggctgttgaccaccagacacctgaccgcaaatatcttttcttgtattcccatatttctagacaatgatttttgtaagacaataaatttattcattatagataaaaaa

SEQ ID NO: 60555 - DNA, 1812 bp, Homo sapiens
cggggcttcgcgtctgtgcttcctgtggctgacgtcatctggaggagatttgctttctttttctccaaaaggggaggaaattgaaactgagtggcccacgatgggaagaggggaagcccaggggtacaggaggcctctgggtgaaggcagaggctaacatggggttcggagcgaccttggccgttggcctgaccatctttgtgctgtctgtcgtcactatcatcatctgcttcacctgctcctgctgctgcctttacaagacgtgccgccgaccacgtccggttgtcaccaccaccacatccaccactgtggtgcatgccccttatcctcagcctccaagtgtgccgcccagctaccctggaccaagctaccagggctaccacaccatgccgcctcagccagggatgccagcagcaccctacccaatgcagtacccaccaccttacccagcccagcccatgggcccaccggcctaccacgagaccctggctggaggagcagccgcgccctaccccgccagccagcctccttacaacccggcctacatggatgccccgaaggcggccctctgagcattccctggcctctctggctgccacttggttatgttgtgtgtgtgcgtgagtggtgtgcaggcgcggttccttacgccccatgtgtgctgtgtgtgtccaggcacggttccttacgccccatgtgtgctgtgtgtgtcctgcctgtatatgtggcttcctctgatgctgacaaggtggggaacaatccttgccagagtgggctgggaccagactttgttctcttcctcacctgaaattatgcttcctaaaatctcaagccaaactcaaagaatggggtggtggggggcaccctgtgaggtggcccctgagaggtgggggcctctccagggcacatctggagttcttctccagcttaccctagggtgaccaagtagggcctgtcacaccagggtggcgcagctttctgtgtgatgcagatgtgtcctggtttcggcagcgtagccagctgctgcttgaggccatggctcgtccccggagttgggggtacccgttgcagagccagggacatgatgcaggcgaagcttgggatctggccaagttggactttgatcctttgggcagatgtcccattgctccctggagcctgtcatgcctgttggggatcaggcagcctcctgatgccagaacacctcaggcagagccctactcagctgtacctgtctgcctggactgtcccctgtccccgcatctcccctgggaccagctggagggccacatgcacacacagcctagctgcccccagggagctctgctgcccttgctggccctgcccttcccacaggtgagcagggctcctgtccaccagcacactcagttctcttccctgcagtgttttcattttattttagccaaacattttgcctgttttctgtttcaaacatgatagttgatatgagactgaaacccctgggttgtggagggaaattggctcagagatggacaacctggcaactgtgagtccctgcttcccgacaccagcctcatggaatatgcaacaactcctgtaccccagtccacggtgttctggcagcagggacacctgggccaatgggccatctggaccaaaggtggggtgtggggccctggatggcagctctggcccagacatgaatacctcgtgttcctcctccctctattactgtttcaccagagctgtcttagctcaaatctgttgtgtttctgagtctagggtctgtacacttgtttataataaatgcaatcgtttggaaaaaaaaaa

SEQ ID NO: 60556 - DNA, 2631 bp, Homo sapiens
cggcggcgtcgaccagacactgacacttgcagttgtctttggtagtttttttgcactaacttcaggaaccagctcatgatctcaggatgtatggaaaaataatctttgtattactattgtcagcaattgtgagcatatcagcatcaagtaccactggtgtggcaatgcacacttcaacctcttcttcagtcacaaagagttacatctcatcacagacaaatgatacgcacaaacgggacacatatgcagccactcctagagctcatgaagtttcagaaatttctgttagaactgtttaccctccagaagaggaaaccggagaaagggtacaacttgcccatcatttctctgaaccagagataacactcattatttttggggtgatggctggtgttattggaacgatcctcttaatttcttacggtattcgccgactgataaagaaaagcccatctgatgtaaaacctctcccgccgccctgacacagacgtgcctttaagttctgttgaaatagataatccagagtcaagtgatcaatgagtatctgttcacccaaacccaaatgtggaaagaacacaaggaggaccataggacttccagtcaagtgaaaaattaaccatgtggactggaccctcccaataaattatatacctgcctaagttgtacaatttcagaatgcgaattttcattataatgagttccagtgactcaatgatggggaaaaaaatctctgctcattaatatttcaagataaagaacaaatgtttccttgaatgcttgcttttgtgtgttagcataatttttagaattgtttgagaattctgatccaaaactttagttgaattcatctacgtttgtttaatattaacttaacctattctattgtattataatgatgattctgtcaaatgaaaggcttgaaatacctagatgaagtttagattttcttcctaattgtaaacttttgagtctggtttcattgttttaaataaattaaggggacactaaagtcctatcattcatttccttcattggctgaacagggcaagatataatattacatgaatgattactatattttgttcacactaataaagcttatgctcagaaatgccatacacacacacaaacacacacatttatcatttaatgcataaatcaacacaaaaggttttcccattaatatgaaatattacatatatataagtgccatatttaaaataatttgtctaaacagtagaactatgtcggagcactcactgaagcttgcattccgctgaaagagttatttgtgtaagtagagtatccggagaaggaaaagaacttacgacctttctttataacagaaagctcagctgtaaattcaacaagatgtgcaaaccggacatgcaggtgaatattttaataggttactataaggttctcaattaaattctttaatctgtccagtcccagtttctcttattaataaaactttggaaattgctttaaaccatttaaaggaaatttctagatatagaaactaaggactgtgactatacagctgtcactcatttgtagtaaaacttaaaaagcaaaaacaaaaaacaaaaaagaccttcctgtgatactttatttccgaactaataaaaatctatatgactttttattattgtgtgataaccaagtaaatgttttctattttgcatattttcaggcatggtaacagaaatttaccttttaataaattaaaaaatctaaattttaacctacttgtatgttcggagagtgtttttgtactatattgactacttaaaatagagaatgagactaagaagggaacatttctgttgatacatgttttttaaaagtaattttaagagcattattaggttaatttaatccaattaatgacccaaatgccaaggtaattttaaatttacatttttaataaaagcaacatgttgaaacaagagagggtgagattaacctttttgctaaagtaatttacaagtcaaagacaggaagagatcagagtgaatgtgccttcttaaccagagctacagaatttagtgaataattaaagtacaaactgctttgacctccttgaacttttccaagcaatttctctgtacttctatatatgaatgtcttagccaattttctgctactataacagaatacgacagactgggtaatttaaaaagaaaagaaatttattttcttcctagttctggaggctgggaaggcgaagggcatggcactgacatctgccttgtaactgatgagaaccttcttactgcatgataacaaagcagcaaggcaagcaaaagcgtaagatgaagagagaggaaatgaagccaaacacatcctttcatcagaagcccattccctctataaggcgttattacatttatgagaatggagtcctcatgacctaatcgtgaccttaaaggcccctcccaacactgttacaatggcaattaaatttcaacaaaggttccagaggtgacattcgaatcagcaatgaaattttcatagttaaatttggtattcgtgggggaagaaatgaccatttcccttgtatttttataattaaatcagcaaaatattgtaataaagaaatctttcctgtgaagataccatgacccc

SEQ ID NO: 60557 - DNA, 2036 bp, Homo sapiens
ttttttttttttttacttgacagatttcattgaatctaataaatctgtatgtatgtacatatatatagacacacacaaattttaacttgttattaatctttatagagacagtgtctcactctgttgcccaggctggagtgcggtggcatgattagaactgactgtaaccttgaactcatgggctcaagcgatcctcctgccttggcttcccaaaaccctggaattaacagatgtgagccaccacactggccaaattttaacatctttgttattgaaatacaagtgtttaatttgccggcatattttttaacaatacataaaatactaccgcatcttaaagttgatgttatcttagattcaatgaaatatgataactggatgtgaataagaaggaattcaaaagcaaagtttcaaacccgagtgactggaagggagtttccttgagccccacaggagagtctaaccaaatcttccatttgagcaatgatccccagacaatactgctctcccaccttccccacttgaacttattaataagaggaagtagttattaatgacaactttaatatgaacatgtgcttaaccctcaagaaattgtcacaactgaaagacgggagcaagctgacactgcaaggaacacatgatgctttggaatgggtggcctgcgtattcaaacacatcaaagcagcagttacttgaacaatcggaacttcttcaaatactggcccacttcttccttggggtagggccggagagcaatacaagtggcgatattctctggttgctcaagccacagcatgtggtcaatgttcttctgttgcagggtctcggccagctcctttagggtggtctcatctggggcctcgaggaccactttgcgcatgcgccccagctcttggaggtaagcggctgtgtgcgggtggtcgcggtgagtgtgcaaggccgcggtggccgcgtgacaagcctgcgctaccagtgcgcccgccggccaggagaacggagcttgtgatagatcctttcgtaacaccaagtattgtaccaggacctgcggctccgccccagaggccgccatcttcctgaccacccgaaaggccggacctactccccggtgcatcttgggatcagggcggggccctgagcgccgccatgcttttgtacggcaggatcgcaaagcacgccgggaccggttggtttggttttgaagacgtggatggcgggaattctcgcttctggcctggcaaggacattggagtccctatcaccggttgcctagacaacttcatgggaaggcccttgggaatctgagatggagcaggcgaaccctttacgtccagatggcgagtccaaaggaggtgttttagctcacttggaaaggctagagacccaagtgagcagatcccgtaaacagtctgaagagctgcagagcgtgcaggcccaggaaggtgctcttggaaccaagattcataaactaaggcgtctgcgagatgagctgagggctgtggtgcggcaccggcgagccagcgtgaaagcatgtattgccaatgtagaacccaaccaaacagtggagatcaatgagcaagaagcattggaagagaaattggaaaatgtgaaagccattctgcaggcatatcattttacaggttttgtttgtttttttaacctaatttagtctgggtctgcctctagtgagttagtttgctagatgtgttatcagtcctggaattatttcataatttatagtattttacaccctctgccctcatcactcacacacacacacacacagacacacacacagctgacgtgctatttgtaggcctatcttcacctacaagattgactggcccctttgtacagcagctcagttggtggctggcttattccactcatcttaacagttcgtcatgtgccagaccttgtactagaactgtctttactgctggcttgttttctgccactagtgaaatagtttgaactttccaagtctccgtttcaccgtaaatagggatttattctcccatctatgcccctgtatt

SEQ ID NO: 60558 - DNA, 3053 bp, Homo sapiens
atgcgatgtttggttttcagagaaggggattgggcaccccacgactacagctctggcttctcctcctcgaattctgggaggtggggagcggccagctccactactccgtctcggaggaggccaaacacggcaccttcgtgggccgcatcgcgcaggacctggggctggagctggcggagctggtgcagcgcctgttccgggtggcgtccaaaacacatggggaccttctggaggtaaatctgcagaatggcattttgtttgtgaattctcggatcgaccgcgaggagctgtgcgggcagagcgcggagtgcagcatccacctggaggtgatcgtggacaggccgctgcaggttttccatgtgaacgtggaggtgaaggacattaacgacaacccgccggtgttctcgctcagagaacaaaagctgctgattgcggaatctaagcaatcggactcgcgttttccactagagggagcttctgatgctgacattgaagagaatgctctattgacctacaggctaagtaaaaatgagtatttttctttagattcaccaacaaatggtaagcagattaaaagactgtcacttattttaaagaagtctctggatagagagaaaactccggaacttaatttgctgctaacagctacagacgggggaaaaccagagcttactggcaccgttcggctgttagtccaagtcttggatgtcaacgacaatgatccagagtttgataaatcagaatataaggtgagccttatggaaaatgctgctaaagaaactcttgtgctcaaactaaacgccacagaccgagacgaaggagtcaacggagaggtaacatactccttctccagtgatgtttctccagatataaaatccaagttccacatggaccccttaagtggggcaatcacagtgataggacatatggattttgaagaaagtagagcacacaagatcccagtcgaggctgtcgataaaggcttcccacccctggctggtcattgtacagttcttgtggaagttgtggatgtaaatgacaatgctccacagttgactctcacttccctgtctctccctattccagaggacgcccaaccaggtaccgtcatcacattgattagcgtgtttgaccgagattttggagtcaacggacaggttacctgctccctgacgccccgcgttcccttcaagttggtgtccaccttcaagaattactattcattggtgctggacagcgctctggaccgcgagagtgtgtccgcctatgagctggtggttaccgcgcgggacgggggctcgccttctctgtgggccactgctagcgtgtccgtggaggtggccgacgtgaacgacaacgccccggcgttcgcgcagcccgagtatacggtgttcgtgaaggagaacaacccgccgggctgccacatcttcacggtgtctgcgcgagacgcggacgcgcaggagaacgcgctggtgtcctactcgctggtggagcggcgggtgggcgagcgcgcgttgtcgagctacatttcggtgcacgcggagagcggcaaggtgtacgcgctgcagccgctggaccacgaggagctagagctgctgcagtttcaggtgagcgcgcgcgacgcgggcgtgccgcctctgggcagcaacgtgacgctgcaggtgttcgtgctggacgagaacgacaacgcgccggcgctgctggcgcctcgggtgggtggtactggtggtgcagtgagcgagctggtgccgcggtcactgggtgcaggccaagtggtggcgaaggtacgtgcagtggacgctgactcaggctacaacgcgtggctttcgtatgagttgcaaccggtggcggccggtgcgagcatcccgttccgcgtggggctgtacactggtgagatcagcacgacacgagccctagatgagacggacgcaccgcgccaccgccttctggtgcttgtgaaggaccacggggagccctcgctgacagccacagccaccgtgctggtgtcgctggtggaaagcggccaggcaccaaaggcgtcgtcgcgggcatcgttgggcattgcaggcccagagaccgagctggtggatgtcaacgtgtacctgatcatcgccatctgcgcggtgtccagtctgttggtgcttaccctgctgctgtacacggcgttgcggtgctcagcgccgtcctctgagggcgcatgtagtttggtaaagcccactctggtgtgctccagcgcggtggggagctggtcattctcccagcagaggcggcagagggtgtgctctggggagggcccacccaagacagacctcatggccttcagtcccagccttcctccttgtgctggatctacagagcgaacgggagaaacagctctgcttcctcagaatcctttgcaaagccacgacagcccaaccctgactggcgttactctgcctccctgagagcaggcatgcacagctctgtgcacctagaggaggctggcattctacgggctggtccaggagggcctgatcagcagtggccaacagtatccagtgcaacaccagaaccagaggcaggagaagtgtcccctccagtcggtgcgggtgtcaacagcaacagctggacctttaaatacggaccaggcaaccccaaacaatccggtcccggtgagttgcccgacaaattcattatcccaggatctcctgcaatcatctccatccggcaggagcctactaacagccaaattgacaaaagtgacttcataaccttcggcaaaaaggaggagaccaagaaaaagaagaaaaagaagaagggtaacaagacccaggagaaaaaagagaaagggaacagcacgactgacaacagtgaccagtgaggtcctcaaatggaaacaagccacttagccagtttttgtaataatggcaaatctctcccatgtagcaattccctgctcctttttcctatctacatgagccctcttagagacctcagaaatctgcagaaagttccctgtgtctgttttgggacgcatttaacaggttttgtcgtaaaagctttactaagtctgg

SEQ ID NO: 60559 - DNA, 1998 bp, Homo sapiens
ttttttttttttgtgggtaaaaccatttttattaactgaccaaagcacatcattttgttttctgatttgaggtaaaatcataaaacacagttcacaagaaaatacaatgactatttaaccacaattacaagtttgaaatctcactaggtgttcatatacttttacaaattcatacaactgtatagtctacttaagcttagtgttaaccaaaagagcaatatcaaagacctagacacttgactactacttttgcagtgggtatagttttataacaacagaataactgttaccttatgaatatactttactttaaaaaccacttgactagcgactgtactgtttcctcgtggttcaggggtgtgcatgaaggctcttaggagagcaaacacctgttcctattctgtatgtccctccctcatttcaaatgagagtaaccaattgagtaaaataaccaaataaccattgccccaccatgaacatggggcttgggaagacagtcctacaatcttcatcatatatttaggtttttaggccagccagctctttttttccaaagctttcttttgaatgttcagatcctattaatcctaactatagactactgtgtttgtgagggtgtctgagtgtctatgtgagggcaaggacaacagtgcagtccagaaacacagaaaatatgcttttttgcagctgagctctgttttgagatttcattttgttactggacagcgcttaatccataccaaagtctttggaacactgcagatttgctttagaggtagataaaacagaaatcatgcagttaagtcaattgagaaaaaaaaagggatttgttgtctttacagaacatcatgactaaaagttgatcctttgctcttggtgcacatttaagatttttacctgttttgggaaatacccaagtcttccttgtctctcaggaaaaacacatttaaattcatcctgtactaactacagatagaagaacagcagtattaccatgtgtattgcagcactgcagttcactttctggatttgtgacacacaaacacatcatgtgacgtcgcatgcacgcgtkkgcttgggkccctcgagggatcctctagagcggccgcccttttttttttctttttcattctaagaagttaattttattagtgtcactagtgatgttaattaaaaaacttatagcaagtgctcaaaactttctaaatattgtaatcactatgttttaaagacagagtggactgttacaaatgattttgcaaaatacaaaaatagatatacttccactgaaatgctttaatcatttttccgggcactctcatcttttggttcttcctcatctgagtacacagtgggctcctccccctccttcagcagtttgcccacgtgatgatacttgaaagtgaactgagactcccagtcactcagagtctccctgctgggcagcaagtgaggtcagaaagggtcatcgttactcatccttcaggggcttccttatccagggcaaaattgtaggcaaggcccctgggatgcattttcttccagcaaagaccccatacgggcccctcgggccccgtaagaaatttgcgggcctttgggtcacatcgaacaccttgccgttgatggcccatgagtatggcgcggggtcctggacgccgtcgaagcgccgcagcttcggcggggggtgaagtcgcgccgcttgaggcggggcagagggggcggctcgtcgtcgtcgctgtcgccgcttggccgccggctggtccccgcgcacgatcttgtagagcaggaagatgcatgaggccaagcagcagcaggttgagcggcgacgtgaaaatctcatgcagcagcccgccgctctccagatcgcttgggtcggcgccagtcgccaccacatcctcggcagccatgatctctggagtaaaggttgggccgcgctaggcagggatccggaactcgccactttctcctccctctgagcgagcgagtggcgcgcggggt

SEQ ID NO: 60560 - DNA, 7240 bp, Homo sapiens
  misc_feature (1)...(7240): n = a,t,c or g
ggcacgaggcaaagctcaagatggcggacaaaacgccaggcggatctcagaaggccagttcaaagacgagatcatcagatgttcattcatctggatcttcagatgcacatatggatgcatctggaccctcagatagtgatatgccaagtcggacacgacctaagagcccaagaaaacataattataggaatgaaagtgcccgtgaaagcctttgtgattctcctcatcagaatctctcaagacctcttctggaaaacaaacttaaagcattcagtattggaaaaatgagtacagctaagcgaactttaagtaaaaaggaacaggaagaattaaagaaaaaggaggatgaaaaggcagctgctgagatttatgaggagtttcttgctgcttttgaaggaagtgatggtaataaagtgaaaacatttgtgcgagggggtgttgttaatgcagctaaagaagaacatgaaacagatgaaaaaagaggtaaaatctataagccatcttcaagatttgcagatcaaaaaaatcctccaaatcagtcttccaatgaaagaccaccatctcttcttgtgatagaaaccaaaaaacctccacttaaaaaaggagagaaagaaaagaaaaaaagcaatttggaactcttcaaagaagaattaaagcaaattcaagaggaacgtgatgagagacataaaacaaaaggcagattaagtcgatttgaacctcctcagtcagattctgatggtcagcgtcgttctatggacgcgccttcaagaagaaatagatcatctggtgttcttgatgattacgcacctggctcacatgatgtaggagatccaagcactacttaatttttaccttggaaacatttaatccacagatgganttgaagaaatgctgttgccaagaatttggaagatttggaccgttagccagtgtgaaaatcatgtggcctagaactgatgaagaaagagccagagagagaaattgcggctttgtggcctttatgaatagaagagatgctgaaagagctttaaaaaatttgaatggaaaaatgattatgtcttttgaaatgaagttaggttggggtaaagctgtacctattcctccacatccaatatacattccgccttctatgatggaacatacgcttcccccacctccatccggactgccttttaatgcgcagcctagagagcggttaaaaaaccctaatgctcctatgttaccgccacctaaaaacaaagaggattttgagaagactctgtcgcaagccatagtcaaagtggttatcccaacagaaaggaatttgctcgccctgatacatcgaatgatagagtttgttgtacgtgaagggccaatgtttgaagctatgattatgaacagagaaatcaacaatcctatgttcaggttcttatttgaaaaccagacaccagcccatgtttactataggtggaagctttattctattctgcagggagattctccaactaaatggcggacggaagattttcgtatgttcaaaaatggatctttttggaggccaccaccattaaatccgtacttgcatggaatgtcagaagagcaagaaacagaagcttttgtagaggaacctagtaaaaagggagcacttaaggaagaacagagggataaattggaagaaatcttgcggggattaactccaaggaaaaatgatattggagatgcaatggttttctgtcttaataatgctgaagctgctgaagaaatagtggattgcattactgagtcgttgtccatcttaaagacaccccttcctaaaaagattgccagattatatttggtttctgatgttttgtacaactcttcagccaaagttgctaatgcttcatattatagaaaattttttgaaacaaagttatgtcagatattttcagacctcaatgccacctatcgtacaattcaaggccatttacaatctgaaaactttaagcaacgggtaatgacttgcttcagagcatgggaagattgggcaatttatccagaaccatttttgatcaaactacaaaatattttcttaggacttgtaaatattattgaagaaaaggaaacagaggatgttccagatgaccttgatggtgcccccatcgaggaagagcttgatggtgcacctctggaagatgtagatggaattcctattgatgctactcccatcgatgatcttgatggagtccctataaaaagtcttgatgatgatcttgatggagtgcctttggatgcaactgaagactcaaaaaagaatgagcctatatttaaagttgccccatcaaaatgggaagctgtggatgaatctgaattggaagcacaggctgttacaacttctaaatgggaattatttgaccagcatgaagaatcagaagaagaagaaaatcaaaatcaagaagaagaaagtgaagatgaagaagatactcaaagttccaaatctgaagaacatcatttgtactctaatccaatcaaagaagaaatgactgagtctaagttctctaagtactctgaaatgagtgaggaaaaacgagccaaacttcgtgaaattgagctcaaagttatgaagtttcaggatgaattggaatctgggaaaagacctaaaaaaccaggccagagttttcaggagcaagtagaacactacagagataaacttcttcaacgagagaaagagaaagagttagaaagagaacgagaaagagacaagaaagataaagaaaaattggaatctcgctccaaagacaagaaggaaaaagatgagtgtactccgacaaggaaggaaaggaagaggcgacacagtacatcccccagcccatctcgcagtagcagtggtagacgagtgaaatccccatcaccaaaatcggagcgatcagagcgttcagaaagatctcataaagagagctcacggtccaggtcatctcacaaagattctcctagagatgttagcaaaaaagccaaaagatcaccatctggttcaaggacacctaaaaggtctaggcgatcacggtctagatctcctaaaaaatcaggaaagaagtccagatcccagtccagatctccacacaggtctcataaaaagtccaaaggaaaaacaaacactggccgtaaattttttaagaaggctgtcacttattggaaatgcgatttgtttttgtgccctgaacggtctgttttttaaaaaaacaaaaaaaatcaaatgaaagagcattccctggggttttttgtttgtttgtgtatgcatgtgtaaactcatgagcaactgcatctgtagatctgtcattggtttatattgtgtaaattactttcattgtggctatttctcaagatgaaatttttattgttctaatggatttcgatcagaaatggtgtataatggatctgctgacagtgagtagtattttgttttaggatgttgtgacttagcaaaaataatacagatgtcttccccccttttgtagctttgacaatttgaattagatttcaaataaaatctgaacagaaaactataatgttgtttttttgccccaccggtgatattaagtcccttaaagtcctactgagtttcacactactgttgtgcttcttatacctgatgcactttataagccccagtgttcaagtagcttaagttttatatttactaagatgactatccaaattaagggacctgagactcctatttggtggtttgctaaccatttgcttttgataagtttctcttgggtaatactaatacccagatatcaaagactaggtagatatggcatggcgttttgttagtggaatgcctggctaaaacatttttttcacagaagcaatatgatttccatacatccaacccatgttctgagcaactacttacttttagggggaaattaaatatcttttcatttcctcttctattatgaaagaagtttatttgtaaaacaaattttctaacaaggtttggccatagaattctcttgtatgattgttgaccttttataatcttctgtaggctatctttcaaacactggcatcagaatattttttataagtttgtgtttaaacagcttagttggtccccccccccactcccaagagacttgggtttagttatagctttaagtaaaatttaaaaataaaatgtttttcaggaaacttcgtatctaatggtttgtaaattcaaggtgcaaaaagttgatttaaaccatttgcagagttgaactctattatgaaaataaatttgctacggtatgaggaagaaataaaacttgtgtaatgttggtcataatactgctataaatataataaagggttatgtagaattgaactgacactattatttgtgaatcttgatttcagttttttatgtaggcacttcatacactggtttgatgggttttttttttcctccctaaaagagaaagtagaaaactattctaacaatggattattttgatttagcttgctttttaaaaaaatcttttcaacttgttttacttaatcttgcctagtcacaaaataagatgtgcacccatggtttggagagttcctatattagctgagcagtgagatacactatttccaaacggtgcacacctacagtagctttggaaatgagccaatcactgttttacttaatggttcttatcagcatgcaaatattgcttgaaagttatttccttattcactgttttgttagtccattttgttaggaaacattaattcctaaaaatttgttcagaataattaaaagtgaacatttggtgctgatactcaaaaacctacaaatgtagccatttaaaaagtaacatgtttttctcccctgctcattgcctgggagaatggaattttatataactacctttctttgcaaaaataacggtcgtgtcgagttggtggtgattttggcattccatcttgcactggtttctagtataggcttataaataattggtcaggtaataatctttccagtcaagttgcaagggatgcttatttctcttcaaaaaaagacatcctgcgggattgagtagaaaattttaggtcagttttgggtgcttatttgtaatatttttcctactacattggagtttagcagttctttttttctggatccagatacaagtgtcatggtttatcttacagtgggtgaaactgactttcttttggttgggtgggtgaggatttcttaggcctgatagaatatatattctgtgaagtttgttaatgtacatattagattgtattggattttttttttttgaattgcaaatggtattattagataggttatttccagttttacttcatgacaaattacctagagtaaacctacttaatactcccatggattctatgaaagtttaatgggatcagaaattggtgacttataagggggaagatattctaccatatttttataatagcttattattcatgtttcttgtctgaaggacactcaagttacagagcaaaatttctataggttgactagaatgttcataagcatggtcttccagttgcaggaaagatcatgttctatctgtggacacttactgtcctctaccacagctacgtgccagagttgttttccacagttcttataaagggcatgacttaggctctttaccctccaacttaatgtttatacacagggattgtttactaggttaatgacatttaactcccctctcttctgtaggtgagagaaaataagtaagtcttgatctgtttcttaccaaagagagacagacctatgatggaaaatgatcacgtctctgaattttttctttaacgttatagttccttattacagatagtaagcatatgggaatttctgagctataacatgttgagaagttagaaattaaaactaacacaacaaaaggcgctgaatcaaaagatctttgcttttatttggctcagaatgtttttggcttttctgctaaagatggcagaaattactctacacagacctgatttttctttattgcagaccattcttgtgggcttaccctgagacttttatcccaattagtgaatcttggagggaatacttgcttatttatgacttaagtatttccccccaaactttaatattcttgagcacttgaaaatacttttgagaaattttaactgtgattaaatttaggtttattagaaatattctgtacacatttgcctccatggtggcgtaagttctgaaaaattatatgaccgtgacaatagtttatcatcatcattattgttattcaaaataagggtaaataaatctctgtattgccaaagtgacttaaactgttctgatgaccacacagtgtgatttctttagcagagaaagttggttttaaaaataaatagtaccacttttctaagactgtacagtttacaaataaggtttttttctttgttgttttcctcttctattaagttttagtgaaaagcctaattacagaaaattgtgcagatactagtgaagatactagtataagtttaaaggaacatgtgactgtaaaatctcacatttacaaagtgcttgatctcttcatatttcacacgcatgttttagaatagattttagggagtgtttaattcattatccttttgacttaaaatttttgttaccaacttcctaggacttagataatatataaataagtacaaatcccaggggaagtgttgtgatgctagactaaaaggtgggaatgtgctgctgttccgtgagccttgttccattgttgaaaatttgatgcctcagtgtttattcagtaccacctcatggagcttcaatgtaaatggattatatgtataattggtaatttgtatagttttgtagattgtagattaaatgcactcatcatgtcacatgtgattgtgcttggagtatttggtggttttattcttttactttcaacggggttcttgtctgttacatctctggtgatttgaaatatcaggaaagacagtttgtcagaaatgagaataatatagttgaaatcagttgggctaaaatattctacagcaagacaatttcttttgggtgaactgattctataatttacttacttttaaatgtaaggattagatttattgttgagctgctttccagatcagactgtcactttatagtttttctatctcacagattctatagttgcaaacaaagcgttgtgaaatttcccttttgttgtttttgacttttaattaatacacagtacattgttttcatagcaaacttaaa

SEQ ID NO: 60561 - DNA, 1773 bp, Homo sapiens
gcggcccgcgtcgaccgagcgcacgccgagcccgtccgccgccgccatggccaccacggtgacctgcacccgcttcaccgacgagtaccagctctacgaggatattggcaagggggctttctctgtggtccgacgctgtgtcaagctctgcaccggccatgagtatgcagccaagatcatcaacaccaagaagctgtcagccagagatcaccagaagctggagagagaggctcggatctgccgccttgtgaagcattccaacatcgtgcgtctccacgacagcatctccgaggagggcttccactacctggtcttcgatctggtcactggtggggagctctttgaagacattgtggcgagagagtactacagcgaggctgatgccagtcactgtatccagcagatcctgggaggccgttctccattgtaaccaaatgggggtcgtccacagagacctcaagccggagaacctgcttctggccagcaagtgcaaaggggctgcagtgaagctggcagacttcggcctagctatcgaggtgcagggggaccagcaggcatggtttggtttcgctggcacaccaggctacctgtcccctgaggtccttcgcaaagaggcgtacggcaagcccgtggacatctgggcatgtggggtgatcctgtacatcctgctcgtgggctacccacccttctgggacgaggaccagcacaagctgtaccagcagatcaaggctggtgcctatgacttcccgtcccctgagtgggacaccgtcactcctgaagccaaaaacctcatcaaccagatgctgaccatcaaccctgccaagcgcatcacagcccatgaggccctgaagcacccgtgggtctgccaacgctccacggtagcatccatgatgcacagacaggagactgtggagtgtctgaaaaagttcaatgccaggagaaagctcaagggagccatcctcaccaccatgctggccacacggaatttctcagcagccaagagtttactcaacaagaaagcagatggagtcaagccccagacgaatagtaccaaaaacagtgcagccgccaccagccccaaagggacgcttcctcctgccgccctggagcctcaaaccaccgtcatccataacccagtggacgggattaaggagtcttctgacagtgccaataccaccatagaggatgaagacgctaaagcccggaagcaggagatcattaagaccacggagcagctcatcgaggccgtcaacaacggtgactttgaggcctacgcgaaaatctgtgacccagggcttgacctcgttgaacctaaaaccattggcaaacctggttgaaggaatggactttccacagatttttactttcggagaaccttgcttggccaaggaacagcaagccgatccacacgaccatcctgaacccacacgtgcacgtcattggagaggatgccgcctgcatcgcttacatccggctcacgcagtacattgacgggcagggccggccccgcaccagccagtctgaggagacccgcgtgtggcaccgccgcgacggcaagtggcagaacgtgcacttccactgctcgggcgcgcctgtggccccgctgcagtgaagagctgcgccctggtttcgccggacagagttggtgtttggagcccgactgccctcgggcacacggcctgcctgtcgcatgtttgtgtctgcctcgttccctcccctggtgcctgtgtctgcagaaaaacaagaccagatgtgatttgtttaaaaaaaaaa

SEQ ID NO: 60562 - DNA, 3934 bp, Homo sapiens
ttttttttttttggcaatataacatgtctattttattttaaaaaacaaaacccaaaccacctgaccccttccccaggaggctcttgacgaaactctagggaagggcctggctccagccaagcaggggacagtcagaagatgtcaacatggatgccaggctggtgggctccgcccttctccaagccccccatccaccccctttgctcctcggtgctacaggcactgccgggttgaggggacaggcagggcaggactgtgggcatgcagagcctcctggcagccagggagggctgcccgcccccctgcatctggcgaggcaggcagctgtgtgcgcagtgatggagctaggaggaggaaacatgcgcagacaccccgtgttcccgcttccccacgtggccaggagagtgttcaaacacgaacaaggatggctgggcactcagggccccagcccccaacccaggagaggaagaggggggtcccgccctcctggttcttttgttcgtccttagatggatggtgttctcggtgccactcggcagaaattctgcagactgaggcggaggcccgggaggagggcgtgcatccgcagagcccacagggctcggaccctctgcccccagcgacctccattcgctacctgtcgggcaggatgcccaggggtgccgggcacctgatctggatccctggagtggagggaccctgtcttaagccacactcggtggttctgccgcccagggcaggggtggactgtaggctcccgacagcatgacaacagccgtgacagtgtgcctgccggctggcgtgccttcctttcctgcccaccagggacgccaaccagctctgcctcagcaccaggggtctcgggaggctcggccgcggcagagactgtcgctccgctgccaggcgctgtggatgaggctcaaggcatcctcgaatttcttcttgttggaggcttcctggatcgccgtgtgggggaggtccacctgatagatggttttccacccagagttcagtgcagacagcaatcggtccagttcagaagtgcagctcaggtagatgacccagggcgggaggagctgctggctgtcctgggagaactccaagacgcagtactccttgcccggctcggtggagacggcgctgatgtcgcccagcttggctgtgcccaaagagcggaagaagctggtctggcaatcctcatggcacgtaaagaggcggtcatccgtgaggaccaggcagcagggtatgcaggggctgggagctacgccctgggggatgacccctttggacacagcctggcagagatgctgcatccactcggccatctcggcctcgctctcggcacttagctccaggcagggcggatcggagagaatgacctggaaggcgtggggccgatccgtggtgttggctctccggcagccaccgcactgctccccccccatgttcaccgagagcagagggatgacgtcggtgcggtccgggtactggtagaggatcccgttgctgagcaccacgaagcacgtcttccagtgttccttgcccaggtaggaggtgcccgccttgtagtgcagcatgccttctttggtgatggtgccctcggggggtgagcagtggcagggcgtggggcccagggactcgtctgtggggtcctcccagtgcacaaggccgtagaagcgcacggtgacagcagatgcctcacacttcgattcttgggccacaaatttggccagtgccagcttctccatggtggcatccgtcaggatgctggggtagggaggttctcgacagcctttgatcatggctgacttcaaagaagccaaaaagaactcagccagcgccacatcagccgtgtccagcagaaactgcttcctgcggttggtgcacaccagcttcaccgtctgctggtcaaggccaaccgacacatagtcaagttcattgtaagaaacggcctcttccaccaggtatggcttctctgtggcccctttccggagcaggtagacatagcagtctgtgagcagcacgtacagcagctgcaggttgccctccatgtgcccggtgctcatccggatcattttgaacagctgctcttcgttttctcggaacacgtggatcatgagcaggagcaggtgattgttgtctactctgaactccgaggaatggaccatctccgaagggctcccctgtccctcatccaccccagaatcctcagcgctactcagacacgggctgggctggtctcgcttgagctggcagagaacctcctgggtcccaggctctggctcagacacaggcccctccctgaccagggacagctgggcctccagctcctgagcctccctcgtggtatcctctaggggccgaggcgtctgtccctctcctcctcctccctcttcttcttggccagcagcctcagggctactaggaacatgcagcggttggccaagccctgcagggtcatggtggccgccacctgatgtaacagtgcttggactctcgacggtaaagcggtagaagtccattggggctgaaagcccctcactaaagtcgcaaagcggcggcctctccggggcatccccgggagagccggtccgaaaggactggtctgggggctcagcacgggagcaccaggtgctggggtccagctgcccgttgagctggtcgataaccttgctcaggggctgccccaagcgctccatggaggtgtccttcatctcagggatcagcaggcccggctcggagcgctcgctgctctccgtggtgctgctcggcccctctccctcctcctggggggaggcaagcatagtgtctggcgagtcccgcccaaggcttgggctgccgttgcggctgtcaccgtccccctgcttggcacatttcttctggctgcaggcggggtggagtggacttgcctcctcatctgatctgctctttttcttcttgccaattttcttcttcttggtgaccctgatgacctcgagctccgtgcaggcatccggcgggtccagggcctgggcctcctccttctcctgagaggtggtgtgcacgggggtggtgtcagaggaggacacagtctctgccggctcctcgttgaaggggttctggcgctgggtggggctcctggtggaggccttgctgctggtcaggtcggaggctgtggagcggggaccactgaccgtgtctgtgaggtctccatcttcccagtctgtgctggggtacagacggcactgcttggaaacacatctccaaaatcataatcctcactagatggggcaatcgcacttgtcatcccactccaggttggtggaggtgacggagttgaaagagttgagggacagactgtctgagccgtggaccgagctgggaaggcggtcttcaaagtccagcaggtactgaggtttgtagtagttcggcatgtagggggccaggtctaggtaaggggcatccagatccagctcgaaacgaatgaactctagccccgacaccaaggtccagaagagcgtcaggtgatcgtggctgcagaccagggcattcttgacgtagtacttatgcagcaggcccaggttctcctggaacaaccgcaggtagctctccaaggagttctcgttgagggccaggtacagccaggcacggctgcgccccaggttggtggccacgtgctgcagcacctcgatctgcttgatggcctctctccgagtaaaatgcaccacgagcacccagtagccagaggagaggtcttgcagtccgtacagcagggcgtggtccaggtgctcacacagacgctgtaggaccttgtcatggttccggatggcagggatctcatcctcacatgcagcaaaatagctctgcaacttcttcaccgacagcgagatgttctccaggatccggtccttcacctcccccggctccatggcgctgccaccgtcgccgcacgaaa

SEQ ID NO: 60563 - DNA, 407 bp, Homo sapiens
ttaaaaacaatgtcttctgttcatgcaaatgtctttaataaagaaggaaggatttgttgtaactctctgaagacatgcacaatctgaggctccgaaagtgtccaaattctgttctctggattcaagatgactgaggcttgagccgagctttcgctcaccatccaacactgctgtttgccgccgtcgcagacccaccgctgacttccacccctctggatatcgcagggtgtcggctgcgctcctgatccagcgaggcgcccattgctgctctggatagggctaaaggcttgccattgttcccgcacagctaagtgcctgggttcatcctaatcaagctgaacgctggttgctgggttccatggttctcttccatgacccaccacttctaatagagctgtaacactcac

SEQ ID NO: 60564 - DNA, 6924 bp, Homo sapiens
  misc_feature (1)...(6924): n = a,t,c or g
attcggcacagggaggccatcaggggctgggacagttcggttattgacactccaagaattaggaagcagacatgaccttttagtgccacaaaagatgaattggctgaattatctgaagctgaaagtgaaggagatgaaaagcccaaactccggagaccctgtgaccgttccaatggctatggaagaactgaatgctttaaagttgagaaaaacctgctagtttatgggtggggccgatggagagagattctatctcatggccgtttcaaaaggcagctaaatgaacacgatgtagagataatttgccgagctctcttagcatattgccttgttcactaccgaggagatgagaagattaaaggtttcatatgggatctcattactccaactgaagatggacagacacgagagctacagaatcatctaggcctatcagctcctgtacccaggggtcgaaaagggaagaaagtaaaaactcaaacaagctcatttgatatacaaaaagcagaatggcttcgaaaatataatcccgagcagctccttcaagatgaaggctacaaaaaacatataaaacaccactgtaataaggttttgcttcgtgtgagaatgctgtattatctaaagcaagaagttattggaaatgagtgtcagaaagtatttgatggagttgatgcaagtgacattgatgtttgggtaccagaaccagaccactcagaagttcctgctgagtggtgggattttgatgctgataagtcactccttattggagtttttaaacatggatatgaaaaatataacactattcgagcagacccagcattatgcttcttggaaagagtgggaaaacctgatgagaaagcagttgctgctgaacagagagcgaatgattatatggatggggatgtggaagatccagaatacaaacctgccccagccatctttaaagatgatatagaggatgatgtttcctcaccaggagatcttgttatagcagatggagatggtcaactgatggagggtgataaagtatattggcctactcaatcagctttaaccacacgtttgaggcgtctcatcactgcataccagcgtactaataaaaacagacaaattcaacagatacaaccgactttctcggtgcctaccagtgtaatgcagcctatttatgaggaagccactcttaatcctaaaatggcagccaagatagaaagacagcaaagatggacaagaagagaagaagctgacttttatagggttgtatctacatttggagtggtttttgaccctgacagaggccaatttgattggacaaaatttagagctatggctaggctacataagaaaactgatgatatgtttggaaaaatatttgtacgcattcatgtccatgtgtcggagggtttgtccgtcttccttccaaaagaagaattggtggatccaaatatttttatccagcccatcacagaagaacggtgcttctaggactttggtatcgcattgaacttctaaggaaagtacggggnacaggcccttcgacatccacagttgtttgaacgcttgaagctttgccatccaaatcgcagatttaccagtctggtgggaatgtggccctcatgatagggatttgcttattggtgctgccaaacacggggtgagccgaacagactatcacattcttcgtgatcctgaactctcatttatggcagctcagaggaactacagtcaaagtaagatggctcattcaaggacttctaccccacttctacagcaatatcaagtagcactttctgcttctcctcttacctctctacctaggctcctagatgctaaaggtattattctagaggagatgaaagttaaaagtgaaaaccttaaagaggagcctcagtcttctgaagaagaatctatgtcttctgtggaaaccaggacactgataaaatctgagcctgtaagtccaaagaatggtgttttaccacaggctactggagaccagaaatctggtggaaaatgtgaaacagacagacgcatggttgcagccagaacagaacccctaactccaaacccagcttctaagaaaccaagagtccacaaaaggggatcagaatctagttctgattctgactcagattctgagagatcatcttgttcttccagatcatcttcttcctcatcatcctcttcttgctcccactctcgatcaggctctagttcttcttcatcttcatcttgttcttcagcatcttcttcatcctcttcctccacctcttcctcctcctcctcctcttcatcttcatcagaagaaagtgacagtgatgaagaagaagcccaaaaacgagaaagtactactcacatgaaagcctatgatgaagaaagcgtcgcgtcactgagcactacccaggatgagactcaggatagttttcagatgaacaatgggacaccagagtctgcttatatcttacaaggtggatatatgctggcagcctcgtattggccaaaggatcgtgtgatgatcaataggttggacagtatttgtcaaacagttctgaaaggaaagtggccttcagctagaagaagttatgatgctaacacagtggcttctttctataccacaaaactgctggacagccctggagcagctacagaatacagcgagcccagtgtacccactcccccaggtgccggtgttaaagaagaacatgatcagtcaacacagatgtcaaaggaaggtggtttgaagttgacatttcagaagcaagggcttgctcagaaaagaccatttgatggtgaagacggtgctctggggcagcagcagtacctcactcggcttcgagagcttcaaagtgcatcagagaccagcctcgtcaatttcccaaaatccataccagtatcaggtacttccattcaaccaacccttggtgccaatggtgtgatattagacaaccagcctatagtcaaaaaaaggcgaggaaggaggaagaatgtagaaggtgttgacatcttcttttttaacagaaataaaccacctaatcatgtttctttaggcttaacctcctcacagatttccacagggataaatccagcactatcctatactcaacctcaaggaattcctgatacagaaagtccagttccagttattaatcttaaagatggaacgagacttgcaggagatgatgcaccaaagagaaaggatttggaaaaatggcttaaggagcacccgggttatgtggaagatttgggagcttttattcctagaatgcagcttcatgagggaagacccaaacaaaaaagacaccgttgcagaaaccccaataaactagatgtgaatagtctcactggagaagaacgtgttcaactgattaacagaagaaatgctagaaaggttggaggtgcatttgctccccctttgaaagatttatgtagattcctaaaagaaaattcagaatatggagtagctcctgaatggggagatgttgttaagcaatctggatttcttccagaaagcatgtatgaacgtattctcactggtcccgttgtgagagaggaagtaagcaggcgggggagacggcctaaaagtggaattgcaaaggccacagcagcagcagctgctgcatctgccaccagtgtttcaggcaatcctttgttagccaatggactacttccaggtgtggatctcacaactcttcaggccttacaacaaaacctacaaaacttgcagtcactgcaagtaactgctgggttgatgggaatgcctaccggccttccttctggaggagaagctaaaaacatggctgctatgttccccatgctgctgtcaggaatggctggattaccaaatctgttgggcatgggaggactcctgacaaagcctacggaatctgggacagaagacaaaaagggaagggactctaaggagtcagaaggaaaaacagaaaggacagagagcctaagttcagagaatggtggagaaaactctgtgtcaagttctccttccacatcctctactgctgcattaaatacagctgcagctgccaacccattagctcttaacccactattactatctaatatactttatccagggatgcttctcactccagggccttaatcttcatattccaactttgtcccagtccaatacttttgatgtacaaaacaaaaacagtgacttaggctcgtctaagtctgtagaagtaaaagaagaagattccagaattaaagatcaggaagacaaaggaggaactgaaccaagtcctctcaatgaaaacagcacagatgagggttcagagaaagctgatgcttcatctggatctgatagtacatcgtcgtcatctgaggattcagattctagtaatgaagactgattcccagactctgcacttaaaatatgaactgattttggattttttctttaataattaattgtaaataccccagtgttgagtgcatcaataacttactggaccgaacattttcagttaatttggtttaggagtgcaaactgctttcagagactttttgcatgtaatatttcttaagattcataagtttctgaactcgtatgtactatcaaatacataaaggtgtaaaattacaacaaaaggcattataattttgttgggggttaattttatgaaaattatgctcaataagagttgtatatttaatatatttgcagtgaacacagaatactttatgcatattactgatttaatttgaatatagttttacagcctccttgacacctataatttacagatcaaaactcagcaataatttgggcagctaatgaatgtcatgaaagctgtagaatctacatcaccatccattgctttaattacatgaaaatgctctagtgttgtgatgcactgctgatgtttccaattcaggtacaagtatgttttaaagaagaaataagtttcccaatcagccaatttaactggctacctgttacctcagctgagttagtttaggaagtttacattcgtttctaattctatacttgttttcaggggttttttaaacacatcctatatatcatgtcaatctggcaagaaatatgacttgctttttgctgagcttaattcagatatcagtaaaattaagtcataaaataatcatgtgtcatgtgactttggcaccctatagacatacttagttttaacttttcaaagtttggcctcctattagaaataatcatgtctcagatgagtaatgtctgtttccagggttcagaaaaggcaaactcatgaaatgccactgaaaagaactttcaacacagcatacttcatgtaaaagaaattgtttgtttgctttctttgtgtagatttctatttgtgttttatgtcatggaaatattccagaattaacagataatagtggtaaagtaatatgcagatagtctaaattcattttgagtttctaggtgtaagcagactaaatgttgcccagaatcagtgttgggttatcagtttatattaaatatactgagttgcccgttttgaaaatgcactttgaataatctcaaaaagatgtacaagttatacctgtaaaccacaaaagtgaagcctgaggcttctgttcaatttcatagactcctttaccatgtaaaatttgtctgatatttgatttgtgatacaatttctcctgctaaagctgctattattctgacaaggtagaggtccaggttcacctttatatatatttaaaacaattagtactgaattggacataaaaatattgacattctaaggagagatatatgttagcatttttctggtactcaaataagttagtagtaaagtctgcaagggcataaatttagggggaaaaagtgtcccagttctctcctacagaaaaaatactttcagtatgttttgataaaactgttgctttgtcatgagttagtcaattgtatcaggttttccaagacctttaccagtaaattatgtttctgtatgtaaaataaccccttattagagagacagtgttatatgtatttacaaaattatataagttccattgggattgtattgattttgtattttcccaaaatagtactttgaattgatagtcctttatgcaatgtcttagcaatagtctctataatgcccatccaggagaagtgggtagtaattcttcatcatgaaaatgatatattacatatttagtatcttccctttgcagtattgcacttttgtttaactagaatacacctatgagatagccaaagtttcaaacacagttatcttagtttaccggtggagtatttcaacaccaaccacatttcccttcctccctctaattctacccacatgatctttattccttcctttcgccaattaaaaaaaaaaaaaaggaaaaaaaatctgtagatcttgtcactaaaatctaatttatatcaaatttatgagagaaagtattttcctaattatggtcaaataaatttggttaacatcctagtgattctctttctatataataaggcaattacagttttcaaagcattaagtctaacataactttaaacattctcttaggtttcaagacacttctatttaatattcattggggaaaagttgtccagctatcagctaagaaaacacatgcaaatatggttgtgtaaagttaagggttataaggaaaaaaaaatcagtagaattacataatactaaagttgcagttgaaagaatatccaagtatgtgttggtagttactaaaagaattatagctgttattgccttgtatttatagcccttgtttcaggttttatgattcaagtcttagtccaatctttcttttggacatttgcaatatttaccagttgtgttttgtgtagtctgaatttgctttctgtagttgagcaaacgtcttaaaaagtcatttgtaatttattaaattactttctatgatgttctatagagc

SEQ ID NO: 60565 - DNA, 5539 bp, Homo sapiens
tttcgtattggctttcaggctggcgcctgtctcggcccccgcgccagttttgggctggttggcgcggaatcgggagattcgggaccatggcacctgtgcacggcgacgactgtgagataggggcgagtgctctgtcagattcagggagttttgtatcttctcgagcccggcgagaaaaaaaatcaaagaaggggcgccaagaagccctagaaagactgaaaaaggctaaagctggtgagaggtataaatatgaagtcgaggacttcacaggtgtttatgaagaagttgatgaagaacagtattcgaagctggttcaggcacgccaggatgatgactggattgtggatgatgatggtattggctatgtggaagatggccgagagatttttgatgatgaccttgaagatgatgcccttgatgctgatgagaaaggaaaagatggtaaagcacgcaataaagacaagaggaatgtaaagaagctcgcagtgacaaaaccgaacaacattaagtcaatgttcattgcttgtgctggaaagaaaactgcagataaagctgtagacttgtccaaggatggtctgctaggtgacattctacaggatcttaacactgagacacctcaaataactccaccacctgtaatgatactgaagaagaaaagatccattggagcttcaccgaatcctttctctgtgcacaccgccacggcagttccttcaggaaaaattgcttcccctgtctccagaaaggagcctccattaactcctgttcctcttaaacgtgctgaatttgctggcgatgatgtacaggtcgagagtacagaagaagagcaggagtcaggggcaatggagtttgaagatggtgactttgatgagcccatggaagttgaagaggtggacctggagcctatggctgccaaggcttgggacaaagagagtgagccagcagaggaagtgaaacaagaggcggattctgggaaagggaccgtgtcctacttaggaagttttctcccggatgtctcttgttgggacattgatcaagaaggtgatagcagtttctcagtgcaagaagttcaagtggattccagtcacctcccattggtaaaaggggcagatgaggaacaagtattccacttttattggttggatgcttatgaggatcagtacaaccaaccaggtgtggtatttctgtttgggaaagtttggattgaatcagccgagacccatgtgagctgttgtgtcatggtgaaaaatatcgagcgaacgctttacttccttccccgtgaaatgaaaattgatctaaatacggggaaagaaacaggaactccaatttcaatgaaggatgtttatgaggaatttgatgagaaaatagcaacgaaatataaaattatgaagttcaagtctaagccagtggaaaagaactatgcttttgagatacctgatgttccagaaaaatctgagtacttggaagttaaatactcggctgaaatgccacagcttcctcaagatttgaaaggagaaactttttctcatgtatttgggaccaacacatctagcctggaactgttcttgatgaacagaaagatcaaaggaccttgttggcttgaagtaaaaaagtccacagctcttaatcagccagtcagttggtgtaaagttgaggcaatggctttgaaaccagacctggtgaatgtaattaaggatgtcagtccaccaccgcttgtcgtgatggctttcagcatgaagacaatgcagaatgcaaagaaccatcaaaatgagattattgctatggcagctttggtccatcacagttttgcattggataaagcagccccaaagcctccctttcagtcacacttctgtgttgtgtctaaaccaaaggactgtatttttccatatgctttcaaagaagtcattgagaaaaagaatgtgaaggttgaggttgctgcaacagaaagaacactgctaggttttttccttgcaaaagttcacaaaattgatcctgatatcattgtgggtcataatatttatgggtttgaactggaagtactactgcagagaattaatgtgtgcaaagctcctcactggtccaagataggtcgactgaagcgatccaacatgccaaagcttgggggccggagtggatttggtgaaagaaatgctacctgtggtcgaatgatctgtgatgtggaaatttcagcaaaggaattgattcgttgtaaaagctaccatctgtctgaacttgttcagcagattctaaaaactgaaagggttgtaatcccaatggaaaatatacaaaatatgtacagtgaatcttctcaactgttatacctgttggaacacacctggaaagatgcccaagttcattttgcagatcatgtgtgagctaaatgttcttccattagcattgcagatcactaacatcgctgggaacattatgtccaggacgctgatgggtggacgatccgagcgtaacgagttcttgttgcttcatgcattttacgaaaacaactatattgtgcctgacaagcagattttcagaaagcctcagcaaaaactgggagatgaagatgaagaaattgatggagataccaataaatacaagaaaggacgtaagaaaggagcttatgctggaggcttggttttggaccccaaagttggtttttatgataagttcattttgcttctggacttcaacagtctatatccttccatcattcaggaatttaacatttgttttacaacagtacaaagagttgcttcagaggcacagaaagttacagaggatggagaacaagaacagatccctgagttgccagatccaagcttagaaatgggcattttgcccagagagatccggaaactggtagaacggagaaaacaagtcaaacagctaatgaaacagcaagacttaaatccagaccttattcttcagtatgacattcgacagaaggctttgaagctcacagcgaacagtatgtatggttgcctgggattttcctatagcagattttacgccaaaccactggctgccttggtgacatacaaaggaagggagattttgatgcatacgaaagagatggtacaaaagatgaatcttgaagttatttatggagatacagattcaattatgataaacaccaatagcaccaatctggaagaagtatttaagttgggaaacaaggtaaaaagtgaagtgaataagttgtacaaactgcttgaaatagacattgatggggttttcaagtctctgctactgctgaaaaaaaagaagtacgctgctctggttgttgagccaacgtcggatgggaattatgtcaccaaacaggagctcaaaggattagatatagttagaagagattggtgtgatcttgctaaagacactggaaactttgtgattggccagattctttctgatcaaagccgggacactatagtggaaaacattcagaagaggctgatagaaattggagaaaatgtgctaaatggcagtgtcccagtgagccagtttgaaattaacaaggcattgacaaaggatccccaggattaccctgataaaaaaagcctacctcatgtacatgttgccctctggataaattctcaaggaggcagaaaggtgaaagctggagatactgtgtcatatgtcatctgtcaggatggatcaaacctcactgcaagtcagagggcctatgcgcctgagcagctgcagaaacaggataatctaaccattgacacccagtactacctggcccagcagatccacccagtcgtggctcggatctgtgaaccaatagacggaattgatgctgtcctcattgcaacggggtgggaactttgaccccacccaatttaaagttcatcattatcataaagatgaagagaatgatgctctacttggtggcccagcacagctcactgatgaagagaaatacagggactgtgaaagattcaaatgtccatgccctacatgtggaactgagaatatttatgataatgtctttgatggttcgggaacagatatggagcccagcttgtatcgttgcagtaacatcgattgtaaggcttcacctctgacctttacagtacaactgagcaacaaattgatcatggacattagacgtttcattaaaaagtactatgatggctggttgatatgtgaagagccaacctgtcgcaatcgaactcgtcaccttccccttcaattctcccgaactgggcctctttgcccagcctgcatgaaagctacacttcaaccagagtattctgacaagtccctgtacacccagctgtgcttttaccggtacatttttgatgcggagtgtgcactggagaaacttactaccgatcatgagaaagataaattgaagaagcaattttttacccccaaagttctgcaggactacagaaaactcaagaacacagcagagcaattcttgtcccgaagtggctactccgaagtgaatctgagcaaactcttcgctggttgtgccgtgaaatcctaagggaatcccaggagtaaccaaggagggggtagttgaaaaatcccagcttcctctgtgcctccactctggccctaaatgctcctccagcatctgtttctcccttgggactgtgtctcatgtttgtgtgaatgtagaccaggaaagggggctgcaaaaatgttgagtctaatgttcgtaagcatcatagaaattcctgtcttcatattaagatgtactgctttaaaacacaactccagagcccctccccaagctcccctccccaagctcctgaagacccggtttctgagggagggaaattgctacttggattgagagtagctggaatgtaagtgaccccaggctttgcctcagggcctttagcctatgtcccccccacataaagagagcttctcagagcctgactgaagagctgacgttttgctttttcatatgccaattaaacccggtctaaatccaaatgcttctccagccatccaggagtggctgtccttttcagtcttgtcttttatataggtagctgagggggaagatttagaagccttgcactcactaaatagattaaacagagcaggcttgtttgttgaattgctccaaagtccaacagacacacactgagcaggtgttttacactcacattcccttttttgccccttaaatagaaagtgcaggtaaaggtttatacaacaagaaagcacattgaaaataatttgatactctaacaatccattaacatgtgtaggggttacggtgaggatcactgtgttgtattcagaaaaacggggagagggatgcttaattggccctggcgcttgctatttttttctcatttcttcacaataggaccgtctttggcagcagcaaaatgtatttcagtatggcagtctttcctctcttacattattggtaagattatactaacaaaatgtttccccttgtacaattatgctgtgtttttaaaaaacattgacctgtgtgtttttataaaagaaaaagtatgttgtgccttcttcttaagaataaagttttctaaagggaaaaaaaaaa

SEQ ID NO: 60566 - DNA, 1123 bp, Homo sapiens
ttttttttttgtatttgtagaaaacctttaatgttccccaggctgagggagccctgtgagccagctaaaaacccccactgtgaagtccctgccatgtcccagcagtgtggagtggcatggggcttcatcctgactgtcagaggctgaagccactaccatctcctcgaatgcgactcccccagccagaactggcctgctcctggtcatccagggagggcagagagctgcgggtaccaggatgtcggcagccagggtgcaggtcccagcacgggggcccctgagacagcccattggaactgggaggctggcggttctcaatgaccaggtcactgctgtcatcgtcactatcaggctcagcaggcccaggccctgcagagggaggacctgtcaaacgcccagatgcccctcgcaccacgttattgcgctggttggcgggcttgacagtgacaatgagggttatggctgttggcaaccatcatgtccgtcacttggttcaaagtcttccctgctacttcaatgccattgacctcgaggatctcatcactgaccgccagcagccctgtactctcagccagacccccacgtaccaggcgggagatgaagattcctggaacccgctccagggccctggggagccacacgcacgctcatgccatctcggatgtagaagcccagggggcggtctgaaccatgcttgtgcagccgcacccgtcggtgggtctcaggcagtaggtccacgtctatgactgaggaaacctggcggaaatcttggggcaggctgattagcaagggtggccgggtgcgcaggggtgccactggccgcagcaagagccctttcttgcgccgctgcagagagttggaggcaaaagccaggccgctggagtcagcttcccgcttctgcaccagtaggcgcagtggcggggcccgctgccagggcccggtgcaggctgtcgtcgttggtgaggggcagcaggtcgccatgagcatccgtatagccaagtagcacgtccaggcccgggatctgtgcaccgcccgcagcaaccgcgagaactcctgaagccgctcaccgaagccgaggcaggcgaagcgtcggaactcggcgtcaaattgctcttcacctcga

SEQ ID NO: 60567 - DNA, 2213 bp, Homo sapiens
ttttttttttttaactaaaatggtcacttttaatgggaaccagaggtatagttacaattacatagtccgacacaaaaaaacccttgggtgatcaggaattggaaggttacaaaataacgagggtaacactgggtacaggacaaaaagctgttccagaacctggggagccaggctaattaatacggcctctccctgcgatcctgtctgtgctcacccctggaatccatcttgccagggccaaagccacctctgtccccaccaccccggccccctcggaagcctccacggtccccgccgcggccccggtagccgcctcgatcatagcctcctctgccaccacgacgatcatccccgtagttaccccccatgtgagagccacctggtccccctcctgggccatctggtttaggggccttacactggttgcattcattcctccaagagaagttcatattctcacaggtgggattaggacacttccagtcaccagctcgctgctgtcctccaccgccaccacctccactgggaaatcctcctcggccaccaccaccactgccaccacctccatagcctccacggcccatgggtcctcctcgccctcggcctccacgaccattgccaccaccccgattaaagtctgcccggcgagtagcaaatgagaccttgataggatttccggagaattctttaccatcaaaccagtcaatagctgctttagctgaaggtgggtcatcaaaagagaccgttgcctctcccttcagcttgccagtttccctgtctgtgtacaaattaatcatgggctgtcccgttttcttgtttgtcttaataataccaatctgcttgaagtaatcagccacagactcaattgtaacattctcacccaggccttgcacaaagatggtgttgttgtctgaattatcctgttcggagtcatgacgtgatccttggtcccgagggccaccaaatttattgaagccaccacggtcacttccgcccatgccacctctgcctccacggccacctccacgacctctgggttcatagccaccactgctgcggttgtaaccagcagcgccgccgcgagccgccgccaccactgccacccctgcagcggcctccacggtcctggctgtcgatagccacggctgccagctgcaccagtctggtcttgattgccataaccaccaccaccaccactgccgccgccgccgccacctccgccgccaccaccactaccactcatggaggattgatcttggccatagctacctccacctccacctccacctccaccaccactgctgctgttgtactggttctgctgtccatagcctcgagggggattatagctttgctgctgtccatagctttgctgctgtccaccatagctaggctgctggctgtagctcccactctggggctgcccatagctgctgctctgagaactgctaccgtaacttcccgaggtgctgctgggagctggctgctggccatagccaggataggaggactgctgcccgtaagacgattgggagctctggctactgccatagccgccagtcgagccatatccctggggagttgactgagttccatagctgttctggctctggccataagaagaatagctgctctggccatagcctgaagtgtccgtggactggctataaccactgtaactctgctgtccgtagggctgactgctctgctgggaatagccctgcccgggctgggtggggtaggccccatagctttgggttgcttgttgggtataatcgtttgaggccatgtccgcgcacgcgcgcacaggcaagcaagcaacgaagttccaacaccgctgagcaccgacgcctggaggactgagcagccccgcctcctgcgtcgaagcttaagtacgctccgccgcctacgcaccgcgcaggcgcgcaccaaacgcggaagagcagggggaggcaggaacgcactccgcccccttcgtagggcaggtagagggtccgagcaggcagaagggaaacaagttaactagaatcatgcgaatactatacataatcatattttttgaggaagaacccctctctcctcggcaggactagcccacgatctatctccacccccatgaaggcacagtggtacggcctgagtgcccgctgggggcggggcgagggggcggtcccggcggctggggacgaaactggagtcacagccggggagag

SEQ ID NO: 60568 - DNA, 1943 bp, Homo sapiens
tcatcataacttatgttccatattttttaacccacatcactcttgaaatcgactgttcagttgatgtgcaggcttttacaggataagcgctaccagtgtgtctattccttggcagaaatctttaaggtcctggcttcattttatgtcattttggttatactttatggtctgacctcttcctacagcctgtggtggatgctgaggagttccctgaagcaatattcctttgaggcgttaagagaaaaaagcaactacagtgacatccctgatgtcaagaatgactttgccttcatccttcatctggctgatcagtatgatcctctttattccaaacgcttctccatattcctatcagaggtcagtgagaacaaactgaaacagatcaacctcaataatgaatggacagttgagaaactgaaaagtaagcttgtgaaaaatgcccaggacaagatagaactgcatctttttatgctcaacggtcttccagacaatgtctttgagttaactgaaatggaagtgctaagcctggagcttatcccagaggtgaagctgccctctgcagtctcacagctggtcaacctcaaggagcttcgtgtgtaccattcatctctggtcgtagaccatcctgcactggcctttctagaggagaatttaaaaatcctccgcctgaaatttactgaaatgggaaaaatcccacgctgggtatttcacctcaagaatctcaaggaactttatctttcgggctgtgttctccctgaacagttgagtactatgcagttggagggctttcaggacttaaaaaatctaaggaccctgtacttgaagagcagcctctcccggatcccacaagttgttacagacctcctgccttcattgcagaaactgtcccttgataatgagggaagcaaactggttgtgttgaacaacttgaaaaagatggtcaatctgaaaagcctagaactgatcagctgtgacctggaacgcatcccacattccattttcagcctgaataatttgcatgagttagacctaagggaaaataaccttaaaactgtggaagagatcattagctttcagcatcttcagaatctttcctgcttaaagttgtggcacaataacattgcttatattcctgcacagattggggcattatctaacctagagcagctctctttggaccataataatattgagaatctgcccttgcagcttttcctatgcactaaactacattatttggatctaagctataaccacttgaccttcattccagaggaaatccagtatctgtagtaatttgcagtactttgctgtgaccaacaacaatattgagatgctaccagatgggctgtttcagtgcaaaaagctgcagtgtttacttttggggaaaaatagcttgatgaatttgtcccctcatgtgggtgagctgtcaaaccttactcatcgggagcccattgggtaattacctggaaacacttcctcctgaactagaaggatgtcagtccctaaaacggaactgtctgattgttgaggagaacttgctcaatactcttcctctccctgtaacagaacgtttacagacgtgcttagacaaatgttgacttaaagaaaagagacccgtgtttcaaaatcatttttaaaagtatgctcggccgggcgtggtggctcatgcctataatcccagcactttgggaggccaagatgggcggattgcttgaggtcaggagttcgagaccagtctggccaacctggtgaaaccccatctctgctaaaactacaaaaaaattagccaggcgtggtggcgtgcgcctgtaatcccagctacttgggaggctgacgcaggggaattgcttgaaccagggaggtggaggttgcagtgagccgagattgtgccactgtacaccagcctgggtgacagagcaagactcttatctcaaaaaaaa

SEQ ID NO: 60569 - DNA, 5138 bp, Homo sapiens
gaactggctgttggtgggggtgcagcactgagccgccgacggggcgggtgggctttgctgccgagcaggcggcgccgtcttggggcctagcggcgaggcgacccgcacagtactgtaagattgatgttaaaggcatggtgttcaccccacttcatcagcgtacataagttatctcttcttttggacccttattttatgccataatgcaacaagctttagaactagctttggatcgtgcagagtatgtcattgaaagtgcccgacagagacctcctaaaaggaaatacctatcaagtggaagaaaatctgtatttcaaaaactttatgacttgtatattgaagaatgtgaaaaagaacctgaagttaagaaattaagaagaaatgtgaacttgttagagaagcttgttatgcaagagactttgtcatgtttagtgggtcaatctataccccaggaaatgagggatattctctgatgctcaggggaaaaaacggatcagattccgagaccattcgactgccctatgaagaaggagagttgcttgaatatttggatgcagaagaattacctcctattttggttgatctcctagaaaaatctcaggttaatatttttcattgcggatgtgtcatagcagaaatacgtgactacaggcagtccagtaacatgaaatctcctggttaccaaagtcggcacattctcttacgtccaacaatgcagactttaatttgtgatgtacattcaataacaagtgataaccacaaatggacccaggaagacaaacttttgcttgagagccagctcatcctagctacagctgaaccactctgtcttgatccttctatagcagtcacctgcactgcaaacagactgctctataacaagcaaaagatgaacactcgcccaatgaaacggtgtttcaagaggtattccagatcctctctgaatcggcagcaagatctatctcattgtccacctcctcctcagctgaggttacttgatttcttacaaaaaagaaaggaaagaaaagcaggtcagcattatgacctcaaaatttctaaggcaggaaattgtgtagatatgtggaaacggagtccctgtaatttggccataccttctgaagtagatgtggagaaatatgctaaagtggaaaagtctatcaaatctgatgactcacagccaacagtctggccagcccatgatgtaaaagatgattatgtatttgaatgtgaagctggtactcagtatcagaaaacaaagctgaccatcttgcagtcgcttggagatccactttactatggtaaaatacagccatgtaaagcagatgaagaaagtgacagccagatgtctccatcacactcgtccacagatgatcattcaaattggttcattattggatcaaagaccgatgctgagagggtagtcaatcagtaccaagaattagtccagaatgaagccaaatgtccggtcaagatgtcacacagctccagtggctcagccagtctgagtcaggtttctccagggaaagaaacagatcaaactgaaaccgtgtcagttcagtcttcggtattggggaagggtgtaaaacatcgacccccaccaatcaaacttccctcaagctcaggaaatagttcctcaggtaactattttacaccacaacagacaagcagctttctcaaatctccaactcctcctccttcttctaagccatcaagtattcctcggaaatcatctgtggatctcaatcaagttagcatgctttctccagctgccctatcacctgccagctcatcacaaagaaccacggccacccaggtcatggcaaactctgctggacttaacttcatcaatgtagtgggctctgtttgtggggcccaggctttgatgagtggttcaaaccccatgctgggctgtaacactggtgccataactcctgcaggaataaacctgagcggccttctaccctcaggaggtctgctaccaaatgcactgcccagtgcaatgcaggcagcttctcaagcaggtgttccatttggtttaaaaaatacttcaagtctcaggcccttaaatctactccagcttccaggtggttcacttatttttaacactctgcagcagcagcaacagcagctctcccagtttacaccacaacaacctcagcagcccacaacttgtagtcctcaacagccaggggagcagggttctgagcaaggttcaacccagtcaagaacaggccttatctgcctcagcaagctgcctgttattaaccttactggagtaggaagttttatgcagtcacaggcagctgcagttgcgattcttgcagcatcaaatggctatggcagcagcagcagcacaaacagctcagctacatcatcatcggcatacaggcagccagtcaaaaagtaaaatgaagagaggcatgccaaccactccaaaattttgagtcttgcattactttttgttccttttttaaaaacacaagagcactgaatcaaaagaattgagtttctactttttgttttttttaatgtgtcagtattttacattgctagatgtacaaactttatacagaagcacaaccttatcatttttaaataaaaacagggaaatggtttaacaaactagggttggtttgcctaagtcattgctttttaaaaatggtttcactatacataatatatatggaagtgacctaagaaataatagaaacatctttcagaagaatgtagtttgatatttatttagtataaaacgtttgtgcacagtgttaacaaatacaatttttacaaatctgttttgaaaatgtggtggctgtttatttgggtttcatactcttaattacttcatccatcagttttttaacttctttgtgtcttgtaactgctcggctcatacagtcctgaagtttagctccagttagcccacttccacctggtttgtgaagacaacagagtttgccttcctcatccattactattgttaaggttcctgttgccagatgttcctcctctccagtagggtcaactataagcaaagtgtcatcaaacacagcaaaggaagttgcaactggatgagttctaatattcaaataacttttcttctttaaattaacttctgctaaaggcggtttcttcatttatagtaacttcaggcaactggtacattttttaaagccgctagcaaagcaaatgtgcaggcatccaaaatgtttccatcgtagtcgaggcaaatgagatcacagtatagaacccagacaagctttcctggagaaatgcataaggtcctctttctgaattatctgtgaattttcaatgacatctgcaatgaactggctagacacttgggcctcttctccaggaggtgcagaccggaatcaacgtatcctttatcaggggcatctgttgatggtgctgcaaattcctatagtagcaaagaaatgtttcctattgaaagaagctactgaaaaattatgaagacaatttagcaatcagttatggaaggctctatcaaatatcagcttagggaattgtgtcagggcctctacggacattggtgctgatcctcacaatagctctacaagataagaaggcactacagtacagtggactacactacagtgctgctcggcaagattacctggagatcttttaaaaaatagtaactgggtttgtgcccccaactactagccaagaatcttaatttgttctccagatgatagagcaagatttaggaactgctgctttagtggtaaagagcaaaagctcagctgggcgcggtggctcacaccggtaatcccagcactttgggacacagaggcgggcggatcacctgaggtcaggagtttgagaccagcctggccaagatggcaaaaccccgtctctactaaaaatacaaaaattagccaggcatggtggcgggcgcctgtaatcccagctacttgggaggccgaggcaggagaatcacttcaacccaggagacggaagttgcagtgagctgacatcgtgccactgcactccagcctgggcgacagagcaagactccgtctcaaaaaaaaaaaaaagcaaatgctctgcaattactaagccagttcaaatgtcagagccatacttactggctgagagacttcaggcaagttatttaacctcttaccttaaactcctcatcttgtcaaatgggaagaaaatagtgtctactcctagggactgttaataagggccaaatgagatagacctgttaaatcccaggcataaaacctgacaaggagcaagttctcaaatcttactgttatacatcactccaggtttacgaaagaagaatctcaactgaggttaaataacacagggtagactgtagtcaaagaagcacaggctttggagtcagatttatgtctaagttttacttatgagtcttatgtacctggacaggttactgaaagtcatctgtaaaacaggaggtgaagacaagtaacaaatgattgttataggcattaaagtggataattctgtaaagcacctaaaaaggtgtctggaacatagcaagtactcagtaaatggtagccagtattccctcaaatttttcttttcaacaatttcaattttctacacatttacacagattacatgtcatcactggctaaaaggatgtcaccaaaaatctgttaatgtctcaaatgatataacaatttttttaaaatggtgactcagattttaaaagttgtttcattttgctacatttgacaattgttcacttagtcattaaacttgggtcatattatctaacactcatagtgaaagctcttgggaaattaaacattaaaaattgacacccaactaccaaatcaagagtagaattacaggtgtatattacaatctaataaataaagctaactttgtaactcaaatctcaataggacatatttagacttactgctttaactccacagattactgtagtatttcccaacttcactaaagcagaaccatctgcggtactaattgaaccgatgttgacagttgtggttctgaattcaccaagttctcttccatcaggacggcagttctctttcagaaatctcctgtaatactccagaggttccacggttttgaacccagccgccatcttcccgcccgcgcgtctg

SEQ ID NO: 60570 - DNA, 1917 bp, Homo sapiens
  misc_feature (1)...(1917): n = a,t,c or g
aaatcgactcgctcggtgttcgcccgccgacgccgcacggcttgctggggctgggctcttcctcgcggaagtggggaggaggcggttgcggttagtggaccgggaccggtaggggtgctgttgccatcatggctgaccccgacccccggtaccctcgctcctcgatcgaggacgacttcaactatggcagcagcgtggcctccgccaccgtgcacatccgaatggcctttctgagaaaagtctacagcattctttctctgcaggttctcttaactacagtgacttcaacagtttttttatactttgagtctgtacggacatttgtacatgagagtcctgccttaattttgctgtttgccctcggatctctgggtttgatttttgcgttgattttaaacagacataagtatccccttaacctgtacctactttttggatttacgctgttggaagctctgactgtggcagttgttgttactttctatgatgtatatattattctgcaagctttcatactgactactacagtattttttggtttgactgtgtatactctacaatctaagaaggatttcagcaaatttggagcagggctgtttgctcttttgtggatattgtgcctgtcaggattcttgaagttttttttttatagtgagataatggagttggtcttagccgctgcaggagcccttcttttctgtggattcatcatctatgacacacactcactgatgcataaactgtcacctgaagagtacgtattagctgccatcagcctctacttggatatcatcaatctattcctgcacctgttacggtttctggaagcagttaataaaaagtaattaaaagtatctcagctcaactgaagaacaacaaaaaaaatttaacgagaaaaaaggattaaagtaattggaagcagtatatagaaactgtttcattaagtaataaagtttgaaacaatgattaaatactgttacaatctttatttgtatcatatgtaattttgagagctttaaaatcttactattctttatgatacctcatttctaaatccttgatttaggatctcagttaagagctatcaaaattctattaaaaatgcttttctggctgggcacagtggctcacgcctgtaatcccaccactttgggagaccgaggcaggtggatcacgaggtcaagagaaagttaccatcctggctaatacggngaaaccccatctctactaaaaatacaagaagattagctggctgtggtggcatgcacctgtggtcccggctactcgggaggctgaggcaggagaatcgcttgaacccgggaggtggaggttgcattgagccaagatcacgccactgcattccagcctggtgacagagcgagactcagtctcaaaaaaaatttaacgagaaaaaaggattaaagtaattggaagcagtatatagaaactgtttcattaagtaataaagtttgaaacaatgattaaatactgttacaatctttatttgtatcatatgtaattttgagagctttaaaatcttactattctttatgatacctcatttctaaatccttgatttaggatctcagttaagagctatcaaaattctattaaaaatgcttttctggctgggcacagtggctcacgcctgtaatcccaccactttgggagaccgaggcaggtggatcacgaggtcaagaggttgagaccatcctggccaacatggtgaaaccccgtctctactaaaaatacaaaaattagctggatgtggtggcacacacctgtagtcccagctagtcaagaggctgaggccagagaatcgcttgaacctgggaggtggaggttgcattgagccaagatcacgccactgcattccagcctggtgacagagcgagactcagtctcaaaaaaaaaaaa

SEQ ID NO: 60571 - DNA, 1980 bp, Homo sapiens
attttaaatacacacacccagggggctctgccccctgtaaaagaaaaaaaatcaaaacaaacaaataaataaccccaaagagatggacccaggggagaacgcgtaagtgtgaggggcatgagtatacacgagtgtgcgtgtctttccctctcccttatttgtctccgtatgagtctctccttgtaccctccccctgcctcgatgatattactcccccagacttggaagccgctgccagagtgacgctttgatggtatctgcaagcgtttttgctgatcttatctctgccccctgaatattaattccctaatctggtagcaatccatctccccagtgaaggacctactagaggcaggtggggggagccaccatcagatcataagcataagaataatacaaaggggagggattcttctgcaaccaagaggcaagaggcgagagaaggaaaaaaaaaaaagcgatgagttcgccaaatatatggagcacaggaagctcagtctactcgactcctgtattttcacagaaaatgacggtgtggattctgctcctgctgtcgctctaccctggcttcactagccagaaatctgatgatgactatgaagattatgcttctaacaaaacatgggtcttgactccaaaagttcctgagggtgatgtcactgtcatcttaaacaacctgctggaaggatatgacaataaacttcggcctgatataggagtgaagccaacgttaattcacacagacatgtatgtgaatagcattggtccagtgaatgctatcaatatggaatacactattgatatattttttgcgcaaacgtggtatgacagacgtttgaaatttaacagcaccattaaagtcctccgattgaacagcaacatggtggggaaaatctggattccagacactttcttcagaaattccaaaaaagctgatgcacactggatcaccacccccaacaggatgctgagaatttggaatgatggtcgagtgctctactccctaaggttgacaattgatgctgagtgccaattacaattgcacaattttccaatggatgaacactcctgccccttggagttctccagttatggctatccacgtgaagaaattgtttatcaatggaagcgaagttctgttgaagtgggcgacacaagatcctggaggctttatcaattctcatttgttggtctaagaaataccaccgaagtagtgaagacaacttccggagattatgtggtcatgtctgtctactttgatctgagcagaagaatgggatactttaccatccagacctatatcccctgcacactcattgtcgtcctatcctgggtgtctttctggatcaataaggatgctgttccagccagaacatctttaggtatcaccactgtcctgacaatgaccaccctcagcaccattgcccggaaatcgctccccaaggtctcctatgtcacagcgatggatctctttgtatctgtttgtttcatctttgtcttctctgctctggtggagtatgggcaccttgcattattttgtcagcaaccggaaaccaagcaaggacaaagataaaaagaagaaaaaccctgcccctaccattgatatccgcccaagatcagcaaccattcaaatgaataatgctacacaccttcaagagagagatgaagagtacggctatgagtgtctggacggcaaggactgtgccagttttttctgctgttttgaagattgtcgaacaggagcttggagacatgggaggatacatatccgcattgccaaaatggactcctatgctcggatcttcttccccactgccttctgcctgtttaatctggtctattgggtctcctacctctacctgtgaggaggtatgggttttactgatatggttcttattcactgagtctcatggagagatgtctgttctaagtccacttaaataatcctctatgtggttgataagtatctgaatctgtttc

SEQ ID NO: 60572 - DNA, 1404 bp, Homo sapiens
gtttcagagggagtacacgtaaggggcaaaagcagcaacggaatacgacaacggaataagcatgaatacgacctggctacctgaaggaggtacaagaaaattccccaggacacagagctggtttggagcctttctttgattttattgtttctattaatggttcaagattaaataaagacaatgacactcttaaggatctgctgaaagcaaacgttgaaaagcctgtaaagatgcttatctatagcagcaaaacattggaactgcgagagacctcagtcacaccaagtaacctgtggggcggccagggcttattgggagtgagcattcgtttctgcagctttgatggggcaaatgaaaatgtttggcatgtgctggaggtggaatcaaattctcctgcagcactggcaggtcttagaccacacagtgattatataattggagcagatacagtcatgaatgagtctgaagatctattcagccttatcgaaacacatgaagcaaaaccattgaaactgtatgtgtacaacacagacactgataactgtcgagaagtgattattacaccaaattctgcatggggtggagaaggcagcctaggatgtggcattggatatggttatttgcatcgaatacctacacgcccatttgaggaaggaaagaaaatttctcttccaggacaaatggctggtacacctattacacctcttaaagatgggtttacagaggtccagctgtcctcagttaatcccccgtctttgtcaccaccaggaactacaggaattgaacagagtctgactggactttctattagctcaactcccaccagctgtcagtagtgttctcagtacaggtgtaccaacagtaccagttattgccaccacaagtaaaccagtccctcacttctgtgccaccaatggaatccagctacttacatttaccgggtctgatgccttttaccaggcagggactgcccaaccttccccaaccttcaaccttcaaccttcccaggcaccacacattcatggccgggggttgggctttaccaggaatttgttaaacccggggttttgccacctctttcttccatgcctccccgaaacttacctgggcattgcacctctccccctgccatccgagttcctcccgtcattccccttggttccagagagctcttctgcagcaagctcaggagagctgctgtcttccctcccgcccaccagcaacgcaccctctgaccctgccacaactactgcaaaggcagacgctgcctcctcactcactgtggatgtgacgccccccactgccaaggcccccaccaccgttgaggacagagtcggcgactccaccccagtcagcgagaagcctgtttctgcggctgtggatgccaatgcttctgagtcacct

SEQ ID NO: 60573 - DNA, 3864 bp, Homo sapiens
cagagaacgtttgtctgcctgatgagagccacttgggttaagaaactacctgtgaatagtcatcatttctgtccttcattggggaatacttttagaggccagtttccaaaaattctgcttaaaaaagaattctggttttgtcttactcttccagatgagatatcacagaggcttgggcctagattgtcatcagcatactgctatactattcgtttgttcttattaagccttattgtgtgtaatgctgttactttttcagagtgttgcggagataggaacatgggagagaaacaatctgggtaacatgaaagtgatgctggttgctaagggaaggcaacttgattctgtgggaagggctgtagctgatccatccgttgtctagatttgagtatgagcacagtggaagaggattctgacacagtaacagtagaaactgtgaactctgtgactttgactcaggacacagaagggaatctcattcttcactgccctcagaatgaagcggatgaaatagactcagaagatagtattgaacctccacataaaaggctttgtttgtcctctgaggatgatcagagtattgatgattctactccttgcatatcagttgttgcacttccactttcagaaaatgatcagagctttgaagtgaccatgactgcgaccacagaagtagcagatgatgaggttactgaggggactgtgacacagatacagattttgcagaatgagcaactagatgaaatatctcccttgggtaacgaggaagtttcagcagttagccaagcatggtttacaactaaagaagataaggattctctgactaataaaggacataaatggaagcaggggatgtggtccaaggaagaaattgatattttgatgaacaatattgaacgctatcttaaggcacgcggaataaaagatgctacagaaatcatctttgagatgtcaaaagacgaaagaaaagatttctacaggactatagcatggggtctgaaccggcctttgtttgcagtttatagaagagtgcttcgcatgtatgatgacagaaaccatgtgggaaaatatacacctgaagaaattgagaagctcaaggagctccggataaagcatggcaatgactgggcaacaataggggcggcgctaggaagaagtgcatcttctgtcaaagatcggtgccgactgatgaaggatacttgcaacacagggaagtggacagaagaagaagaaaagagacttgcagaagtggttcatgagttgacaagcactgagcccaggtgacatagtcacacagggtgtgtcttgggcagctgtggctgaacgagtcggtacccgctcagaaaagcaatgtcgttctaaatggctcaactacctgaattggaaacagagtgggggtactgaatggaccaaggaagatgaaatcaatctcatcctcaggatagcagaacttgatgtagctgatgaaaatgacattaactgggatctgttagctgagggatggagtagtgtccgttcaccacaatggctacgaagtaaatggtggaccatcaaaaggcaaattgcaaaccataaggatgtttcgttccctgtcttaataaaaggtcttaaacagttacatgagaaccaaaaaaacaacccaacgcttttggagaataaatcaggatctggagttccaaacagtaataccaattccagtgtgcagcatgttcagataagagttgcccgcttggaagataatacagccatctcttctagccccatggcagcattgcagattccagtccagatcacccatgtttcttcagcagactctcctgctaccgttgactcagaaacaataacactaaacagtggaacactacagacatttgagattcttccctctttccatctacagcccactggcactccaggcacctacctacttcaaacaagctcaagccaaggccttcccctaactctgactgctagtcccacagtaaccctgacagctgctgctcctgcttctcctgaacagattattgttcatgctttatccccagaacatttgttgaacacaagtgataatgttacaggtgcagtgtcacacaccaagagtcatcattcagactgttgccacagaggacatcacttcttccatatcccaaggcaggaactgaccgtcgatagtgatattcagttcattctggattttcctgagcctccagacgccctagaaggcaaacactttcccagatgaaattcatcaccctaagatgactgtggagccatcatttaatgatgctcatgtatccaaattcagtgaccaaaatagcacagaactgatgaatagtgttatggtcagaacagaaaaagaaatctctgacaccgaccttaaacaagaggaatcaccctctgatttagccagtgcttatgttactgagggtttagagtctcccactatagaagaacaagttgatcaaacaattgatgatgaaacaatacttatcgttccttcaccacatggctttatccaggcatctgatgttatagatactgaatctgtcttgcctttgacaacactaacagatcccatactccaacatcatcaggaagaatcaaatatcattggatcatccttgggcagtcctgtttcagaagattcaaaggatgtcgaagatttggtaaactgtcattagaataattcttagaaataggcagttcaagcaaagaaggcacactgttaattacaacctcttcaaagaaataggagcaacccccaagaggcttaatttaccaatttaaatagccacagtccttaagccacacacattgttgctgctatgactttttacctcctttaaacacatcatctgaggttgagttttatgacagtatgtagttgagtggaggctgggagttttaagcataaatccctgtttagtgttacatgggaataaggaatttcattcacttcagccactaagaaaagtttagaatcacgaaagcttaactgctgtggtttaaagtacagtttctctaaagatcagacatggcactgtctcctctcaagcctggttgtagttcagatgagtcttttcaacatggtcttcaacatggtctagagcttaccagtgatcttctgatcttcaagaagactaagtttgagacttgaccagcatacaagtatagagacctaggaggtggtcttgtggtggtacatttggttaacccattgctggcagtgggagctgatttaggcagggtaaacaggaaagcattaaaagttaaaattcactacaggttttttgttacttttaaagggaatatggataagcatagtaacaaaacccaccagaatctaagcagttttcaccccctcagaaaccactgtcattagtttacaaagttagcactttgaagtaaaactaaatgaggaaggaagtaatgttacctatccttgataccatgaccatttattagatgttttgctatataaattaccgagagaatagtttgtcatccacttagtgtgttagctggtggggtacaatataacctctcatctcaggctattttaaaaaaacaatatttgcttctataacaaaaggaaacaaatctaagaatcattcctgtactacagaagggttaaggcaaaggtagccttttgggctttttaatgaatatgacccctatagaaaagtcaagaaaaaaaaacccttgtataaattattttatttattattgtaattagatcttcacaaagttgtcttttcactgtgttttgtcaacgtgaaattaaattgtagttataagcaaaagttggttgcctagggaacaattgtatattcagtttaacagaaataaaagaatatttgtctt

SEQ ID NO: 60574 - DNA, 1898 bp, Homo sapiens
acggggctgtacgagctggtgtggcgggtgctgcacgcgctgctctgtctgcaccgcacgctcacctcctggctccgcgttcggttcggcacctggaactggatctggcggcgctgctgccgcgccgctctgccgcggtcctagcgccgctcggcttcacgctccgcaagcccccggcagtcggcaggaaccgccgtcaccaccggcacccgcgcggggggtacgtgcctggcagccgcacaccaccggatgcgctggcgcgcggacggtcgttccttggagaagctgcctgtgcatatgggcctggtgatcaccgaggtggagcaggaacccagcttctcggacatcgcgagcctcgtggtgtggtgtatggccgtgggcatctcctacattagcgtctacgaccaccaaggtattttcaaaagaaataattccagattgatggatgaaattttaaaacaacagcaagaacttctgggcctagattgttcaaaatactcaccagaatttgcaaatagtaatgacaaagatgatcaagttttaaattgccatttggcagtgaaggtgctgtctccggaagatggaaaagcagatattgtaagagctgctcaggacttttgccagttagtagcccagaagcaaaagagacccacagatttggatgtagatacgttagccagtttacttagttcaaatggttgtcctgatcctgatttagtattgaagttcggtcctgtggacagcacattaggctttcttccctggcacatcagattgactgagattgtctctttgccttcccacctaaacatcagttatgaggactttttctctgcccttcgtcaatatgcagcctgtgaacagcgtctgggaaagtagtggtcattggttgcataatttgatctgaggcttatggaggaaaggacccaagtgactctgatgtttacaaagcacctatgaaaccctgtacacacctatgaaaccctgtacacacctagttcataatcctcataatttatcaacaaacacaaagaagtgtcttacttgaaagtgagtgtgtgtgtgtgcgtgtgtgcgtgcacacatgtgcacgtttgtatgtgtggaaataaacataaatggggacgtgttggagaaggaaatacatagacctacaactttgagcatatagcagtgatgttttaggaactgaaatgtcacacttaataaagtcttcagcccagctacttccctatttttgtggggagaagagggcctgattagaactgttctggttgtgtttggcgggaggggaataatttttgttcagtccttcttagtgaccaaactttaatttttaagaataatatattgacttactgaactgaagcattctgagttgaaaggagctccagaggagtggagttctgtgttgctcacatgttaaaatcttgctcaccttcagagcagagggaatacctatcttcagatatccgtccattttcatctcttaattgtagtcaaaagtatgacttgagagtgttgctctggtattctgggttctgaagtctggtattctggtattctgggttcaaaagtatgacttgagagtgttgctctggtattctgagagttgctctgtattctgggttctgaagattatttgaaaaataactcctactacattgaaatgcagacttaaaaatttaaacattggattaggcagtcaaaaaaaccaagcaagcataaaaggtcaataagttgtaatcttgatagtaaaggtggaaaacttattataaatggaaagaaagttttatttccttttttgtttgatgggcagtatgccatattatacccaaagttcttttaaaaaatatttccatcaaccatttttatttaaaataaacatttgagggagt

SEQ ID NO: 60575 - DNA, 6685 bp, Homo sapiens
gacagcctgggcataccatatatctcctgccaactgtggtaatctgcaacttgctaccctgtgaacttgatttttatgttaaaggaatgccaattaatgggacgctgaaacctggcaaggaggcagctctccatacagctgatacatcccagaacattgagctgggggtatcactggagaatttccccctctgtaaagaattgctcattccacctggaacccaaaactatatggtgagaatgcgactctatgacgtcaaccgtcggcagctgaacctcaccatccggattgtgtgtcgagcagaaggatccttaaagatcttcatttctgctccatattggctgattaacaaaacagggttgccactgatcttcagacaggacaatgccaagacagatgctgcaggccagtttgaggagcatgagctggcccgtagcctgagtcctctcttattctgctatgctgacaaagagcagccaaacctctgcacgatgagaatcggaagggggattcatccagaaggcatgccgggctggtgtcagggcttctccctggatggtggtagtggtgtccgagctttgaaagtcatccagcaaggaaaccgcccagggctgatctataacattggtattgatgtcaagaaaggccgaggtcgatacattgatacctgcatggtcatctttgccccccgttacctgttagataataaatcatctcacaagcttgcatttgcacagagggaatttgccaggggacagggaacagccaatcccgaaggttacatttccacccttcctggttccagtgtggtgttccactggcctcggaatgactatgatcagctattgtgtgtcagactgatggacgttcccaattgtatttggtctggaggctttgaagtcaacaagaataattccttccatatcaacatgagggataccttgggaaaatgcttcttcctacgagtggaaattactctccgaggagctacgtataggatctcatttagtgacacagatcagttacctcctcctttccgaattgacaacttttctaaggtcccggttgtctttactcagcatggcgtagctgaacccaggctccggactgaagtgaagcccatgacttcattggattatgcctgggacgaacccaccttgccaccttttatcactctgactgttaaaggggcagggtcctctgagatcaactgcaacatgaatgatttccaggataatcggcagctttattatgaaaatttcatttacattgctgctacatatacattctctggcttgcaggagggaacaggcaggcctgtggcttccaacaaggccattacctgtgcggagctcgttttggatgtctcacccaagacacaaagagtcattttaaaaaagaaggaaccaggaaagcgttctcagctgtggaggatgacaggaacaggaatgctggcccatgagggctcctcagttcctcacaatcccaataagccctcagccgcccgctccaccgaggggtctgccatcttagatattgctggtctcgctgcagtgactgacaacagatacgagccactgatgctgagaaagcctgaccgcaggcgaagcacaactcagacgtggagtttccgagaaggaaaactgacctgtgggttacatgggttggtcgtccaggccaaaggaggactttctggtttgtttgatggagctgaagttgttcttggtcctgacacttccatggagcttttggggccagttccacctgaacaacaatttattaatcaaaaaatgagacctggttctggaatgttatccatcagagtcatcccagatggaccaactagagcactccagataacagatttctgccaccggaaaagcagccgttcatatgaagtggatgaacttcctgtcaccgaacaagagctgcagaaattaaagaatccagatacagagcaggaattggaagtgcttgtgaggttagaaggtggaattgggttgtccttaattaataaagtcccagaagaactggtctttgcaagtcttacaggaatcaatgtgcactatacacagctggcaaccagtcacatgcttgaactcagcatacaggatgtacaggtggacaatcagctcattggtaccacgcagcccttcatgctctatgtgactcccctgagcaatgagaatgaggtcatcgagaccggcccagctgtgcaagtcaacgcagtgaagttccccagtaagagtgcactgaccaacatctacaagcatctgatgatcacagctcagagattcacagtgcaaattgaggagaaactgctcctcaagctgctaagtttctttggctacgatcaagcagaatcagaggtggaaaaatatgatgaaaacctccatgaaaagacagctgagcaaggtggaacaccaattcgatactactttgaaaatctcaaaatcagcattcctcagatcaagctaagtgtgttcacctccaacaagctcccattggatcttaaggccctaaaaagcaccttggggtttcctttgatacggtttgaagacgctgtgattaatctagatccattcactcgggtacatccctatgagaccaaggagttcatcatcaatgatatcctcaaacatttccaggaggaactcctcagccaggcagctcgaatcctgggatcagtggattttcttggcaatcctatggggcttttgaatgatgtttctgaaggggttactggactgataaaatatggaaatgtcgggggcctcatcagaaatgttacacacggagtatcaaactctgctgccaagtttgctggaacattatcagatggcttagggaagacgatggacaatcggcatcagtcagagcgggagtacatcaggtaccatgcagccacaagtggtgaacaccttgtagccggcatccatggcctggctcatggtatcattggtggactgaccagtgttataacttcgacagtggaaggtgtgaaaacagaagggggtgtcagcggtttcatatctggccttggaaaagggcttgttggcactgtaaccaagccagtggcaggcgccctggattttgcatcagaaacagcccaggcggtgagagacacagccacactcagcggccccaggactcaagcacagagggttcggaaaccgcgttgctgcacggggccccaggggctgcttccccgatattctgagagccaggcggaaggacaggagcagctcttcaaactcacagacaacatacaggacgaattcttcatcgctgtggagaacattgacagctactgcgtgctcatctcctccaaagctgtttacttcctgaaaagtggagactacgtggatcgagaagccattttcctagaagtcaaatacgatgacctctaccactgccttgtctccaaagaccatgggaaggtgtatgtgcaggtgaccaagaaagccgtgagcacgagcagtggagtgtccatccccggcccctcccaccagaagcccatggtccatgtgaaatctgaggtccttgctgtcaagttgtcacaagaaataaactacgcaaagagcctctactatgaacagcagcttatgttaagactcagcgaaaaccgagagcagctggagctggactcctgaagccccgctgctgagatgggcgctcccgacacagcgcagacccaccaggaggaaagaggcccagctctcagctgacgatggaggcagaaccggagtcgggtttggggaagttgtcaaggaatgagggaaagtaaatcctcatgaggaaaagtacaaatggaaatcgtattaatttgtgaggcagggagttattttagattatgggaaataatttttaaaggtattggttaaataacgtttaaaaacatgtactgagatgaatctaatttttagattgccctgtattttgttaacatgtatatatgtacaacagtgtgtttgtaaatatataggaacgtttctgaacagggtctgtgctatgtgtaaaggtttgttaactgtaaagtaatataaagttatattggatcttctattgcactaattctagatgtctaattcaggatactgtctatagaaaggcattcttaaaagttaaagaatgttacgtcttagttttggagactaaagtattcccagtaaagtgggttgaggtgagggctgtggtcctgaaagggacgcctttgacatcgtggctgtccagttgggctgtgagctgtggcacccaggactggcgctggcccttcagaaggatctaggagaggggcttgggagcccacttttaatttctcacccccattttacaaagagtgcttagattcttacaaattatgatgtaagttatccatttggctttttcctaactagtcttaccaaacttagggggaaacctgtgctccattaccacatgggtgcaagtcagcattgtaagttttctcaggttattattattagagaggttggaaacattggtaaactctgttgattgagaaggaaaaaaaaaagtccccattgaactgttgcaacaaatcagaaatccacataaaagtgctctcctgcctgggcagcaacaaccaagaacaaagccccgggactgttttctttttaataaagccacaggcaggcatcgtagctccacagcccgaggggacacaggatggaaaccccaggatgagaagggagcagggagagttccagaaagggggatgaaataggagtattaaaaagctgcgttggtaagtttttcatggaaccaagatttgacaaaggcatctcttatccttggttttaaattcctgctgggagcaaggcctggtatgagcgccctgggtcttgtttttggtgtttcgcttttctgtaaggattaagcagatagggagaagggaaaaggggcctcactttagaatgaatgagtcaccttgtgatttttaaatttttattttaataaagctaatcaatttctacaaccttgtcacatgtagctgagtctgggatgactcagtggatcagtggatgcgtggaaggttttggtgtttataactcatgacccaaatccttccaagacacaaatgaagctaatcttcttcccctccctttcctctcccacttcccctctgtgtctgtgtctgtgtgtgtgtgtgtgtgtgtgtgtgtgtgcgcgcgcgcgcgtgcatgcagagaggaaggaagggagctttagcacaagtagctacatagtgttcaaggatcagctttcttgaactccgaggcttggttgcctttgctgaactccaagttagtggattgcagaatggaaacttggcttttgcggcactgggtgagttttagtttgtgtgtgtcttgctggggggtggtgatgattgtctcagcactcacgcactgcacaagatggcagcaggatacagcactgcacaagatggcagctcctctgcagcttcctcctcagcctccctccttgcacccccacaggtttggcttgtggtttttgtcatcagtaacctactgcctgagatcatgatctcttaaaagatgagactctcggaagggttgattgtatgcgtcagtgagccttctatcaccttctggaacaaagtcacttgaaatctcttgatgagattaaggagtttagtgttactaagaaaatctgctttgggccgcagcagtgctgggtgttctcagacctgactgaggaagttagctgcgggctgccctgtgggctggtgcttcaggaggaatccagagaagtgttcagatgccccccttgggctcctttctaattttaatcagctctttaaatagctgcccatctcctgtgattgcacaaccaagcactttgacatttgcaccttaggagaggcagatgttaaaatggaatccaaagaccacctagggcggggctgggtgggagatgggagggccaactgcgagctgctccacttctcagctctcccctgccctgcagccctgggccagacaaggccagaaggtttcaggggcatttgacatcccctcctggttctcaccaggaaaacatccaaagctttggaggaaacaggccctgcccctggctccttaaatgccccgtctctttgtaaactgatattcagccagcaatgcctaagactttgttaagatcatttctactgcttttctttctgcttcaaacacacagttcgtctctgaggaaagtaaaataaatggaataagagtaaattgggtaaggagatatccaaagctacccagtcccttgacccagcacagttggccgacccgtgtcactccctggctgtcgctgcttctctgtgctcactgaagggtgagccaggccagtgcttccccagcccctgggcctggtcactacacagtggaaaacagacaagcggccccttccccaaatcccaagagtgtcttgctgcttggtgggtgctcatcgcaatgttctgaaggctccagggccactttgtttgtaagtatgatctgggcctcaaaataccatagtagctgcttgataaaattctaaaaatatctggttctctattatgtaaacactattacagtcaccagtgtgtgaagactcttgagtctggttctcatatcagagtcatcatttttcttcctgtggaataaaatgccttgtggacttcccaaaaaaaaaa

SEQ ID NO: 60576 - DNA, 7028 bp, Homo sapiens
cgtggtttgtagatgtgcttggggagaatgggggcctcttctccaagaagcccggagcctgtcgggccgccggcgcccggtctccccttctgctgcggaggatccctgctggcggttgtggtgctgcttgcgctgccggtggcctggggtcaatgcaatgccccagaatgggcttccatttgccaggcctaccaacctaactgatgagtttgagtttcccattgggacatatctgaactatgaatgccgccctggttattccggaagaccgttttctatcatctgcctaaaaaactcagtctggactggtgctaaggacaggtgcagacgtaaatcatgtcgtaatcctccagatcctgtgaatggcatggtgcatgtgatcaaaggcatccagttcggatcccaaattaaatattcttgtactaaaggataccgactcattggttcctcgtctgccacatgcatcatctcaggtgatactgtcatttgggataatgaaacacctatttgtgacagaattccttgtgggctaccccccaccatcaccaatggagatttcattagcaccaacagagagaattttcactatggatcagtggtgacctaccgctgcaatcctggaagcggagggagaaaggtgtttgagcttgtgggtgagccctccatatactgcaccagcaatgacgatcaagtgggcatctggagcggccccgcccctcagtgcattatacctaacaaatgcacgcctccaaatgtggaaaatggaatattggtatctgacaacagaagcttattttccttaaatgaagttgtggagtttaggtgtcagcctggctttgtcatgaaaggaccccgccgtgtgaagtgccaggccctgaacaaatgggagccggagctaccaagctgctccagggtatgtcagccacctccagatgtcctgcatgctgagcgtacccaaagggacaaggacaacttttcacctgggcaggaagtgttctacagctgtgagcccggctacgacctcagaggggctgcgtctatgcgctgcacaccccagggagactggagccctgcagcccccacatgtgaagtgaaatcctgtgatgacttcatgggccaacttcttaatggccgtgtgctatttccagtaaatctccagcttggagcaaaagtggattttgtttgtgatgaaggatttcaattaaaaggcagctctgctagttactgtgtcttggctggaatggaaagcctttggaatagcagtgttccagtgtgtgaacaaatcttttgtccaagtcctccagttattcctaatgggagacacacaggaaaacctctggaagtctttccctttggaaaagcagtaaattacacatgcgacccccacccagacagagggacgagcttcgacctcattggagagagcaccatccgctgcacaagtgaccctcaagggaatggggtttggagcagccctgcccctcgctgtggaattctgggtcactgtcaagccccagatcattttctgtttgccaagttgaaaacccaaaccaatgcatctgactttcccattgggacatctttaaagtacgaatgccgtcctgagtactacgggaggccattctctatcacatgtctagataacctggtctggtcaagtcccaaagatgtctgtaaacgtaaatcatgtaaaactcctccagatccagtgaatggcatggtgcatgtgatcacagacatccaggttggatccagaatcaactattcttgtactacagggcaccgactcattggtcactcatctgctgaatgtatcctctcgggcaatgctgcccattggagcacgaagccgccaatttgtcaacgaattccttgtgggctaccccccaccatcgccaatggagatttcattagcaccaacagagagaattttcactatggatcagtggtgacctaccgctgcaatcccggaagcggagggagaaaggtgtttgagcttgtgggtgagccctccatatactgcaccagcaatgacgatcaagtgggcatctggagcggcccggcccctcagtgcattatacctaacaaatgcacgcctccaaatgtggaaaatggaatattggtatctgacaacagaagcttattttccttaaatgaagttgtggagtttaggtgtcagcctggctttgtcatgaaaggaccccgccgtgtgaagtgccaggccctgaacaaatgggagccggagctaccaagctgctccagggtatgtcagccacctccagatgtcctgcatgctgagcgtacccaaagggacaaggacaacttttcacccgggcaggaagtgttctacagctgtgagcccggctatgacctcagaggggctgcgtctatgcgctgcacaccccagggagactggagccctgcagcccccacatgtgaagtgaaatcctgtgatgacttcatgggccaacttcttaatggccgtgtgctatttccagtaaatctccagcttggagcaaaagtggattttgtttgtgatgaaggatttcaattaaaaggcagctctgctagttattgtgtcttggctggaatggaaagcctttggaatagcagtgttccagtgtgtgaacaaatcttttgtccaagtcctccagttattcctaatgggagacacacaggaaaacctctggaagtctttccctttggaaaagcagtaaattacacatgcgacccccacccagacagagggacgagcttcgacctcattggagagagcaccatccgctgcacaagtgaccctcaagggaatggggtttggagcagccctgcccctcgctgtggaattctgggtcactgtcaagccccagatcattttctgtttgccaagttgaaaacccaaaccaatgcatctgactttcccattgggacatctttaaagtacgaatgccgtcctgagtactacgggaggccattctctatcacatgtctagataacctggtctggtcaagtcccaaagatgtctgtaaacgtaaatcatgtaaaactcctccagatccagtgaatggcatggtgcatgtgatcacagacatccaggttggatccagaatcaactattcttgtactacagggcaccgactcattggtcactcatctgctgaatgtatcctctcaggcaatactgcccattggagcacgaagccgccaatttgtcaacgaattccttgtgggctacccccaaccatcgccaatggagatttcattagcaccaacagagagaattttcactatggatcagtggtgacctaccgctgcaatcttggaagcagagggagaaaggtgtttgagcttgtgggtgagccctccatatactgcaccagcaatgacgatcaagtgggcatctggagcggccccgcccctcagtgcattatacctaacaaatgcacgcctccaaatgtggaaaatggaatattggtatctgacaacagaagcttattttccttaaatgaagttgtggagtttaggtgtcagcctggctttgtcatgaaaggaccccgccgtgtgaagtgccaggccctgaacaaatgggagccagagttaccaagctgctccagggtgtgtcagccgcctccagaaatcctgcatggtgagcataccccaagccatcaggacaacttttcacctgggcaggaagtgttctacagctgtgagcctggctatgacctcagaggggctgcgtctctgcactgcacaccccagggagactggagccctgaagccccgagatgtgcagtgaaatcctgtgatgacttcttgggtcaactccctcatggccgtgtgctatttccacttaatctccagcttggggcaaaggtgtcctttgtctgtgatgaagggtttcgcttaaagggcagttccgttagtcattgtgtcttggttggaatgagaagcctttggaataacagtgttcctgtgtgtgaacatatcttttgtccaaatcctccagctatccttaatgggagacacacaggaactccctctggagatattccctatggaaaagaaatatcttacacatgtgacccccacccagacagagggatgaccttcaacctcattggggagagcaccatccgctgcacaagtgaccctcatgggaatggggtttggagcagccctgcccctcgctgtgaactttctgttcgtgctggtcactgtaaaaccccagagcagtttccatttgccagtcctacgatcccaattaatgactttgagtttccagtcgggacatctttgaattatgaatgccgtcctgggtattttgggaaaatgttctctatctcctgcctagaaaacttggtctggtcaagtgttgaagacaactgtagacgaaaatcatgtggacctccaccagaacccttcaatggaatggtgcatataaacacagatacacagtttggatcaacagttaattattcttgtaatgaagggtttcgactcattggttccccatctactacttgtctcgtctcaggcaataatgtcacatgggataagaaggcacctatttgtgagatcatatcttgtgagccacctccaaccatatccaatggagacttctacagcaacaatagaacatcttttcacaatggaacggtggtaacttaccagtgccacactggaccagatggagaacagctgtttgagcttgtgggagaacggtcaatatattgcaccagcaaagatgatcaagttggtgtttggagcagccctccccctcggtgtatttctactaataaatgcacagctccagaagttgaaaatgcaattagagtaccaggaaacaggagtttcttttccctcactgagatcatcagatttagatgtcagcccgggtttgtcatggtagggtcccacactgtgcagtgccagaccaatggcagatgggggcccaagctgccacactgctccagggtgtgtcagccgcctccagaaatcctgcatggtgagcataccctaagccatcaggacaacttttcacctgggcaggaagtgttctacagctgtgagcccagctatgacctcagaggggctgcgtctctgcactgcacgccccagggagactggagccctgaagcccctagatgtacagtgaaatcctgtgatgacttcctgggccaactccctcatggccgtgtgctacttccacttaatctccagcttggggcaaaggtgtcctttgtttgcgatgaagggttccgattaaaaggcaggtctgctagtcattgtgtcttggctggaatgaaagccctttggaatagcagtgttccagtgtgtgaacaaatcttttgtccaaatcctccagctatccttaatgggagacacacaggaactccccttggagatattccctatggaaaagaagtatcttacacatgtgacccccacccagacagagggatgaccttcaacctcattggggagagcaccatccgccgcacaagtgaacctcatgggaatggggtttggagcagccctgcccctcgctgtgaacttcctgttggtgctgcctgcccacatccacccaagatccaaaacgggcattacattggaggacacgtatctctatatcttcctgggatgacaatcagctacacttgtgaccccggctacctgttagtgggaaagggcttcattttctgtacagaccagggaatctggagccaattggatcattattgcaaagaagtaaattgtagcttcccactgtttatgaatggaatctcgaaggagttagaaatgaaaaaagtatatcactatggagattatgtgactttgaagtgtgaagatgggtatactctggaaggcagtccctggagccagtgccaggcggatgacagatgggaccctcctctggccaaatgtacctctcgtacacatgatgctctcatagttggcactttatctggtacgatcttctttattttactcatcattttcctctcttggataattctaaagcacagaaaaggcaataatgcacatgaaaaccctaaagaagtggctatccatttacattctcaaggaggcagcagcgttcatccccgaactctgcaaacaaatgaagaaaatagcagggtccttccttgacaaagtactatacagctgaagaacatctcgaatacaattttggtgggaaaggagccaattgatttcaacagaatcagatctgagcttcataaagtctttgaagtgacttcacagagacgcagacatgtgcacttgaagatgctgccccttccctggtacctagcaaagctcctgcctctttgtgtgcgtcactgtgaaacccccacccttctgcctcgtgctaaacgcacacagtatctagtcaggggaaaagactgcatttaggagatagaaaatagtttggattacttaaaggaataaggtgttgcctggaatttctggtttgtaaggtggtcactgttcttttttaaaatatttgtaatatggaatgggctcagtaagaagagcttggaaaatgcagaaagttatgaaaaataagtcacttataattatgctacctactgataaccactcctaatattttgattcattttctgcctatcttctttcacatatgtgtttttttacatacgtacttttcccccttagtttgtttccttttattttatagagcagaaccctagtcttttaaacagtttagagtgaaatatatgctatatcagtttttactttctctagggagaaaaattaatttactagaaaggcatgaaatgatcatgggaagagtggttaagactactgaagagaaatatttggaaaataagatttcgatatcttctttttttttgagatggagtctggctctgtctcccaggctggagtgcagtggcgtaatctcggctcactgcaagctccgcctcccgggttgacaccattttcctgcctcagcctcctgagtagttggccttaccagtagatgggactacaggcacctgccaac

SEQ ID NO: 60577 - DNA, 236 bp, Homo sapiens
atgaaacgggacctagtaatggatcactgctcttgggagccttacagtctactgtagtttagttaactgggaaataattttgagctcatttttatttttctgtaagctcagctgctgaacgcccaaattcttccctggtacatgcatgttccatatcgacgttctgctgctatgcacgctggtattctgcaatagctggccatgtttttccttgagcctgggtcgacgcggtcgct

SEQ ID NO: 60578 - DNA, 771 bp, Homo sapiens
gaagaattgggacttaactcaacctggccatgagcagcctgaggaggaggggaaaggtcagatgggcctgtagaaggaagactggaaagattcaacgacgcttggggttgggactgagggggcaggcgggaaggaaagaaggaggatttgggaggaatcgcattgggaacagagactagggagggaacaaagtgtgaaaagtgcctggacgtaaggcacctcaaaccatttgcctattttttgacaaaaattatttaggtcttgtaggatggagaaatcgaaagtgccattttctggccatttagagccattgtcaagtttgtattggggccaagcggtgttgcagaagaaaatgaggcatttaggttttaggtcaggtgtgagttgaagaggttttaagttcttgagcacacaggctaagggagaaggaggaatggaggatggaaggttgcccatagtgaaggaagcaaacccagagaaaagagagcgtaaagacacggagggaaggggtttggggtttcttgccccctagaaaagtgggacttgctgctaagggtgaaggagaaggggttaaggggtacttgcccctgccccaggaaagcaggacttgccactaagggtgaaggagaaggggttgggggggtacttgcccctgccccctagaaaagcgggacttaccgctaagggtgaaggagaaggggttgaggggtaccttgcccctgccccagaaaagcagagaaggggtagagacaaggagagaaggggttgggg

SEQ ID NO: 60579 - DNA, 3801 bp, Homo sapiens
ttttttttttttcaacaaggaaatgtatttattttttcctttagaatttggctcagaacagtaacaaaaatatttacattaaaataaattaacatgcaattacttaaccatatgtaataatttacgttggaatatattagccttcccatgagtttaataaaaactaatatttggttttagattcaataccatcctttcaaatatttggtatgaaacttggtagcaatgcaattgtctgatgtacagagcagatttcaccatgagagattacaccaaagaacagatgtcccttcccagaacattatctcaccccagactcagaaactgagcagccaagcttccttcccaggaatcaccatggaatgtctgaacaataaccaggccctggagattactgcagggctggcagagttttaggaatcagccaaactctttttcacactaacccactaggaaggatatagttcaaatgtaatgttgagtccttcagtttatttgaacactgaaacaatatgttgtagaaaccttcattttcccaaaatagaaatctgaaagatatatgcacatgatttcttagatcatctaaaagtacccataaaaacctgtcactagggccaggtgtgatggcttacacctgtaatcccagcaccttgggaggcagaggcgggcggatcacctgaggtcaggagttcaagaccagcctggccaacatggtgaaaccctgtccactaaaaatacaaaaaaaaatcagccgggcgtggtgcatgtgcccgcaatcccagccactcaagaggctgaggcaggagaatcaccgaacccggggggcagaggttgcattgagccactgcactccagcctggggttcatgccattctcctgcctcagcctcccgagtagctgggacccgccaccacacccagctaattttttgtatttttagtagagacggggtttcaccatgtttcaccatgttagccagggcggtctcgatctcctgacctcgtgatccgcccgcctcggcctcccaaagtgctgggattacaggcgtgagccactgtgcccggcctggaaggattattaatgcaaacttcaggatgaagtgatatccccaggcaaggcctgaaggtctcagtggtattaatacattagtaagcagagttctaagaaggcttcctctctattattgtagctgctttggcacagaaaattgtgactgtaacttacagggtttgagctaaaatgacccctagtaagaagacattcagaaagaatagcaatcctaacaaaaataggagtggggaaaggtgaactctggaagaggagaccaaaagtgaaaacatttctctgccaaagtcacctgcagttcaataccagatttgattgttaagaaacggtcatcctaaagacaagaacttgattccactcaggagctctggagagaaggtccatgtctgttcctggaggtctagtagatcctgcgtgttgtgtagtccagaaccatgctggcagcacccagcagggcggggtcaaccaaatccgaaaccaccacatccacgtcctgcacggaggacaaggcctgctggcgaatgacgtctttgacaatgtggatatagtgactggccaggactccggagaggatcacaagggagggattcatggtatggaggatgttcacaaccccaagacccaaagctgttccagctgttcttaggatgctctgggccttcgcattgccaagtttcgcagcttggatgagatggagcgcacccacagcctcatcttttggcactgacatcccttccaccaagagcaggtcctcatcatggagcttttttgcctccctctgcaaggccattccagaggcgtatgcttcaatgcacccatggcttccacaggaacaatcaggcccatccagagacacaacaaggtggcccagttctgcagcacagaaggagcttccgtggatcaattcatgctgatggataattccaccaccgattcctgtgcctgtgataagtgtaacaaagttttccagtccctttccttggccaaatttcctttccgccagggcagcacagttgccatcattgtctacccacacagggagatgcaaagtgtcagaaaggggggtcctaaggtccacagagttccactcttggatcagtttggttgaatgcagcacaattccttcccgaggatttacacggccacctgtggaaatgcctactcccaaaattctgcagttcagttttacagcttctgctgcagcttccacacacatctgtaggattaaattaatcctctcttcataggttttaggattgaactgagtatacttcttaactatttcacccttcatgctgactattgcaactcggaggttcgtcccgccaagatcaacggccaaggcacttagagtttcaagaatatggtcaatatcttgagagatattctccttcacaggaggaaagcagaatttcttttgcagtggctcttgaagatcgatagatttgagaaacttcaaaatccttggaacagcatttccatccccatatatctttgaacaagggtactgtttaccaaactgaaggtgcagtgcttgcaatattttgtcttgggtgtcagcatcccggacatgaagatcattctcccctgtttcctccttccaatctgaacgtgttcccccaggttggatcacaggtgttcccaaaagctcccaacttctcgaacccccacagctgctgttcccaatcatacagccagcatgggcaaccaactgtataaactggtcaaatgggacgtgtttaactgcacgaaagttgggatgatgctcaatgcccttcttccgcatcactcgaaccatctctttgctccctgcgtcaatatttggaaacaggactagggtccgcttgttaaatgagataagtgcatccaatgttaattcaaacatttttatggaatgcttaatgtcagtggtcacagggtgctgtagtgcaacaatgtaatctttagattttacatcatcacctagccacatgcgaatgatgctcatgtagtctttgttcttggctgagagaagtttgtcataggaagggcagcctgccaaaaggatgcgatcatggtcctcacacatggatatcaggtgctgctctgcactgcgggtgcagcacacatgataatgagccagttttgttatggcatgtctgatagagtcatcaatggtcccactgacttccccaccttcaatgtgaaggattcggatgttcatcaaggcagcagatgtggccagagccagggcatcaaacctgtctccatgaacaatcatgatatcaggcttcaggcgattaaggacatctggcagcttcactagggccaggcctactgactccaccatggctgcctcatcttctcccctcacaattgtgtgtagcctggtgttaatgtcaaagtcatcttgttcaatcattcgatatgtatttccatagtcatctatcaggtgagagccaagtaccacaacatcaagttcaaagaactcaggttcggttttaatgccaaacatgatcggggcaagtttagaataatctgcacggttacaagtagcaacacaaacccgcagctttcggttatttccattcttctccatgatttgcttgtttcgttttgagaggttcttaaaatagagttccagacgccgtcagaggctccctcccacgccgccaccgcgctcctcgggcgagggacgaaccaagcgccacgaagcaggcagagcgcgagcctgcccctcggtttccgcgctcacgt

SEQ ID NO: 60580 - DNA, 368 bp, Homo sapiens
ctggactttcacatggatcgtaatagacaacttcatcctgtttttctaaaaaggtattaatgattgtttaaaacatattttattatttgtaaaaatgcactcaatttttttaaatgtaaggaaaataaagatcacttgtaatgccaccactgagaatcactattaacatataaaaaatgtatgtgtataaatgtaatatacatatacacgtgtatatatacatgactatacacatgtattaagcagcatgtgtgtatatacaagtagtatatgcatgtatatatacctgtacagacatacgtatatatacacacgcacatacacatactacttacatagctacacatatcaatggagttctaaaagaa

SEQ ID NO: 60581 - DNA, 8604 bp, Homo sapiens
gctgcacctcccaggggacagtccccacatgattacaaaagccaggtgccctcatcacccgttacccctgacctgtccacttgttttgaataaaccttcattctccaagcagatccccaaacttccttgtccttgttacacgtctacctcacaacctcacaattcaacaacaggtaaatacctggattcactgatttctttactgtccttctctgagggttgggaaggtgggggctagaaaaggctcataatttttaaactcttgggaattaaacttgggaatttctattcctacagtgttttctctgggatttttagctcactgatcgccctagaatagtgtgaactctccagataggtcctgctgtgataggccaggggagtaggctgtgcagtgacggcttagggtaataagtaatggttggaggacaccagcataggagcagagtttagaacttaagaggacaagaaagctgctcagtggctggcgtatagctgtgaaggtaaccaaacaccaaagagggagtctgtcatttttataaggctggaagcgaatgttccttttctaccttaacatacagtttagggggttgcaccaagacaaagtttccaggctggagggtaatacatatccagcgcgagtgaagtccccactccaacatataccctttttgggtgggtaaacacctctttgcatgtggacagaaaatgtttatacttaaacagacatattttgcatatttttatctggagacttcttctagttttatactcttcccacatctatgccaatgccaccattctaaaacttacactccttttctacccctggtcttttccttgtccttccctacaacttggtagaggtccattttgtcttacttcacactttttttttttttaaataaaacacaaaagtctacgtcttggtgtcttatccgtgagtgggaagtggtaagctggtgatggtcccatatttgctatgacaggaacacagaggtggcagcttaggaagctggggccacatctcacaaggcaggacctggatgcactgaatcccccctttgctccagcaactcagccagacatttaggcaggagcactaatgaccctttccatcccacacagagggtatggaacaggagcccctgttgttcccttgcctgtggtctcttaagccagtcatacctatcccaacgccgtctccccctcaggtgtgtagaagggaagatgaataccacagagtcttttgaatctctatcaaatgtggtttttttattcaacaactgacaagcacttttctacagctgcacttgtggaacatcacatggcaaaaacaggagttttttcgctagactttttttttctttttaaccttattaaaaatgagattggtcctaaaaatatagaaagaaataaatttaaattcacaaaaaactgtacattatcaaaaagtcactaaaacaccacatttggttatataaaaagtcccttttgctgtaaaaggaacacagaaacttgttggtgttgatggtgtggtttcttcctgtcaaccagactgatgggagggaagcaaaagggcagggggtgggttgtctttttattttaaacctgctttccctaccaaatactcttgtcatgaagagaaaatccacctagctcaagggggcagtgaagatgaggaaagaaaagcaagaaatggcccctttgatcatgccctatccctaccacccccaaccccgctccagcccccacttcttcaaactgaggctaggaccccaccccgccatatgagtgcctggtccctagggaaagagatggagctgggagaggaacacaaagcaggaaccatggagatttcactcccccatccacctcacaatttcactcccccatccacctcacaatgaaattaatctagcacatcttataccaggggaaaattgccagggggaaaaagcagagcccccaactctaacagtttcaactgtctaacacaaagtttgttacagcgcagttatttagataaaatataaatatttatgcataatataaagtcaattcaaatattcttcaatccacctcttaaaagcaaaaaaaaatctcaaataaaattaaaagttttgaggtttatctgacagaaaaggcgactttagaaataggctatgagggagaaggggcataaaggaataaaggggctgccccaggacctacactgcccctacccccttcagtggctcttcagtgctgccagaatacaaggaatgctccacctcacctggcacccccaccccccaatggaacatttcttggatgcctcagctctctgcttgggccagccagcagccacctccccagtgcaagtacccgtaatctctgaagggaggggctctgctgagcaggaaaagcagggggccaagtgcccatggctatagctgggagtcagcagctttcctctcgtgttgggggcttaacttggacatagtcacatgtagggcagtgatggacccagaacccctcctccctactctcctgtgctccagggtctctgctgctggggaaggggtcctggggtatgaagtaaatgaagaaaagcacaactaaatgggattaggaaatgatccagttctaccactctcccgtagaagcttaagattcaaagctaccgagaagagagggagttcctgctgaaagattgcacagtctgaagaggctggaacaaaaatgaccaggagagagacacagccttgtctccagagaaattgttcctgtggtttcccaaagacaaaaaagtgatggttttaaacaatgggaaaaatgggaatgaaaacaggtacttggggaaactgaatggatcctatcaaacaatacagggtcacaagcacgcacacacacacacacacacacacacacacacagcgcgcgctctgaggctgacacacacacacacacacacagcgcgctctgaggccgacacacacacacacacacacacacacacacacacacacagcgctctctctgaggccggccccattgctacctggcctccatcttagggtgcacccaaactcagcaatagttgtccctgaggagttcccaagagggtttgggaaggaggtggggaatgttgctgtataggcccatgaagccttcctgccctctcccgagctacgtgagtttcagaaaaggctggaaactcagcatgtgaggagcatccaacatcatacaggggatagctatcggcaggaagatggggacagaagacagggacctctgaacatttttttttcctttgaagggaaaagatttgggagaagagaaaaggagggaggaacccgtacacgatagttttacattattggatgagagaaaatctgaaaactggggggtgggaggtgggaaaagaaagacagcgagaagcagggaagggactgaacatggaagcagcatgtccagggcccggtgtccggcgcgacacacttgggagttaagtccactttactggccgtcactgcgggtccgcacacagtacagagtgtttcttggtttcacacattcactagaactattgctattgttaaataaccccagaatgctggggcacgtacaggggaggagaggaagcagggaggaggaagtagggacgactttccccctccccatttttaattagcaaataaaacagaaaagaaaaattatttttttctttctttttttggcttttagtccagaaggacctcatctctgcacctcttacttgaggagcaagaggagggaagggagaaagggatgtaggaataagaggatgtggggcactgccaagggcaaggtcaaaaatcagggttgtatctgacttgagtctggacccagggcagcatcagcaggtgaaaatggcaggtttttgtttggaaggtgggggaaggatgccacaaggtgactccccacctcccttgcctcacagattggccctgttttccctgataaaactcctcccagcggctcttcgaagaagcggcgcatgatgtgcccagccttgcctacttcagagtcatcctcgttgaaagtctggcagttgtcaaataccaggagggcatcagccgcaaactcctctgagctggtgtaccctcccctgagcagccgctcccgcatggtggaaaaatccataggatttttgatgatgcgccggtacccactcaccaaacgtgggttcacaggctctaggaaaggccaggctgcatcatgggactccatctccatcaggataatctcgcaaaatgtgagatcactgtggtggttccgcatagagagtcgccgccgcttggagggggagagcccttcttccgagtaccgaggccctgctgctgggctttctcggcccctcaacagtacccggcgtcggcggccatcaccctctgagaagttcagcgaataaccacttttccgcttctggccacgctttgggaaaccaggcttctgagtgaattctccctccacctgctgagccaaacagacagtacagaaccaatctccttctgggacagcctccatcttgggacgatggcagtaaatgtggcagccacggtcacacccatcacaaagcagaagaaactcatcattgtcacccttccggcagactagacatgtcactttgttgacagacttctcccaggcaatggacctctccagctggcccaggcacaagcacacctgggctgcgctccggcaccgctcgagggtctggcgccagacacgaatgcgaggggtgatctcatatgatatctctgtagtggtgccctcaggggcaccattaggtgtgctaagcagggccttctccagcacaacctcatgagttggccagaggggctcccgcaggtaccgccgttctacattctgttccagggcagccagccgcatcacagccaggtccaaagggttggtagttttacgctgaggtgccagtccctccctgccccgacctcgccaggtgatatcctcctgggagtcggagaggtgctcacagtaggccaagtcttcacgggtagagtctgggctaggacatgtccagccccgaatctgcagatcagacatgataacccgctgctccagctcctctacccattgaagcactgctaggtctgtctcgtatgtcttctctttgggggaccagctcataatcccttcttgaaaggcaggtagttgcctgggctcaaagatggggtcagctgagggccgcaggcagacttcctgcaagaagtccctgtgcttgttaaggtgtttgtgaagtgccttctcccggatacctcgggggtgtagggccttgagcatggcatccaacatctcaggatctcgtatccaccaccagcctgagcacatctcaggtgggacaggctgggctgtcagctgggttaggtaacgctgttccatctgtttgaagaacttactgggaggtctccctctccgtttgggctgtcccagccctgtgggactctgtggcatttctccagggtctcctgctcgcctcttaggggccaacccagccaagggcgtggaagagaactgcactggagaacaagggttggcagcactaggtctattcattggcttggaggaggcaagctgctgaggggagggagtgggttggtcctcagaaactgcagggggcggtgtgggggcagcattgcagggcatctgggctgagatgttaaaccagagtgcttgaggatcagggctggattctgcctcatcaggctctggctcctccgggggttgtgatggagctgggtctagttttcccggactgctatcaggtgtgaggactgagctgctcaacagggagctatggctctgagtctggctcagccaagacaggaaggctgactggctgaggtcatgctggctctgacccagtgacaaaggggagccttcttgctccaggaaccccttatgggactgaagctgaagctgaagctgaggctggggctgggcaggagcatgaagctgagcctcaggctgaagctgggcctggggctgttctgaatcctgacccctgacaggggacttaagatgcctaggttgcatagacccgggcttagtttttcgaggtcggcctcgggcccgggcaggagaactggcagtggtgttggagccagctaactccatcttcatagagaagagggcagggttgagtgacgcatgggctgccacttttaaggagtcagtttccttctttatcacctcctcaggaactaagttcccctctgttccttctacaaagataccagccaaatacggcaatacccagtagcgacgtctgtagcggtcctgacccagggagaccgcccgaagcatctgggatgagtgaagcagctttttgcgaaagaaaagctgacgcttgctgagtttttctatctggcgctctagctctgggatgctagatgctgtggcatcaacctctccatctcttcgacccctgcggccagggacagctgctatagactcctcttcttcctcttcttccatgccactggtcacctccatgatccgagaactgcgcctccgtcccaggcattcctctggcccttccatctctacttcagaccgcccagttcgcttggccagaacagttttcagcctccggagccggccttcaacaatccacttgtttttcctgtagctggacatactctccagagtcttgtcaatctcattgatgatgagggtggagccattgagctcatgcacaaggaaggccaggacagcagccttctgctggggtggctgggcctgaaaaggctgggtgcgcaggcggtcacagagggctggctctactccatatgccataaggaagcagcgcaggatctctgacacattgtctcttgtcagtgggatctcagacaccttctcccccaagatctttagggactgacagtaggagggaaagccaggatcatggagtgcagccttcagcagcctgaccagcaggtcttgcacctcacccaagctgtcaccttgacacaggagtccctcctgcaggacccccaggctaggcacatctttggcaggatcaaagcccagcaccttgccaaagctatgcaggaactccacaatggtcaagcagtctgagaaggctccactgggcaatgtcagaccagggactcgtgagaagtcaggcaggggctggtggtcagtcagacacatatcctctgtcggcttcttcatttcctccaagatcatctgctgcctctgccgttcctccaagcgcctctgtgtggccagggtcttatctgctttacaggctggcttggctttggtcacctcctccttttccttcatttttaccttctccttcttttccctcttgactttttccttcagtttttcctgctttgtctttcctttttctttctcagccttggatttcttcttagcttccttctgctttaagctcttggtctcttgtttccgcttatttctggcctgcccttggatagtagtctgacactctccccgttgaaccttctgcctcatcttcttcttgcttttagcaatctttgctttatcctcctcattcaatgtttcttgggcctccagtttctttagggggcggttgtctgtcttgttcaatagctcagtgattttgaccttaggtggccgacctcgaccccgtttcaccttggggacttccttagtcctagccttctcagtgtttcgaggtcgaccccgtttgccagtaattgcctgaatcctcgacgggatctcctctgctgagagctgcacccactgcaagccctctggcgtgtctctttcttcaaagaaatctccaacaggcatacggggactgaagctgaagtgctctcggcggacactgtgtaccacgttgcggctcaggtacttgatcacttctggaaattgcttcatcctcttcccacaggggccataataccaggtctccccctgccatcggtggctgcccttcttgatgcgcacctctctccgccacccatgttggaggggaagacgaacttcttctggggtagcaatacgtctcctcatgacatcaccactaccagaagcagtgagtccttctccagtgatctcttccacgtcagcagtggtttctagaaagctgctgacatccttatttgctggggaggctgttggaaaggcagctgctggggaagttacgggagaggcttttggggatgtcactgaagccgtcaacgggacttctaaggagactgctgggaggactgctgaggaagctggagagaccactgagaagactgctggagagacaactgtagaagctgcgggacaaacttctggagagatttctggggaggctgctggagaaaccactagggagactgctggggaggttgttggcgagactgctggtgaggttgctggatgtagctgaatagtggatgactgatcaggagctggctgggtcagggatggtgggaagtctgaagattgagtttccatttcttcctgttcagcgtcactaccattattcaggtcaaagctgttatcttgcaggacagactcccctaggacaggtggagaggtgggactggcaaagatagaggttgatgtttg

SEQ ID NO: 60582 - DNA, 2632 bp, Homo sapiens
cggcggcgtcgaccagacactgacacttgcagttgtctttggtagtttttttgcactaacttcaggaaccagctcatgatctcaggatgtatggaaaaataatctttgtattactattgtcagcaattgtgagcatatcagcatcaagtaccactggtgtggcaatgcacacttcaacctcttcttcagtcacaaagagttacatctcatcacagacaaatgatacgcacaaacgggacacatatgcagccactcctagagctcatgaagtttcagaaatttctgttagaactgtttaccctccagaagaggaaaccggagaaagggtacaacttgcccatcatttctctgaaccagagataacactcattatttttggggtgatggctggtgttattggaacgatcctcttaatttcttacggtattcgccgactgataaagaaaagcccatctgatgtaaaacctctcccgccgccctgacacagacgtgcctttaagttctgttgaaatagataatccagagtcaagtgatcaatgagtatctgttcacccaaacccaaatgtggaaagaacacaaggaggaccataggacttccagtcaagtgaaaaattaaccatgtggactggaccctcccaataaattatatacctgcctaagttgtacaatttcagaatgcgaattttcattataatgagttccagtgactcaatgatggggaaaaaaatctctgctcattaatatttcaagataaagaacaaatgtttccttgaatgcttgcttttgtgtgttagcataatttttagaattgtttgagaattctgatccaaaactttagttgaattcatctacgtttgtttaatattaacttaacctattctattgtattataatgatgattctgtcaaatgaaaggcttgaaatacctagatgaagtttagattttcttcctaattgtaaacttttgagtctggtttcattgttttaaataaattaaggggacactaaagtcctatcattcatttcctttcattggctgaacagggcaagatataatattacatgaatgattactatattttgttcacactaataaagcttatgctcagaaatgccatacacacacacaaacacacacatttatcatttaatgcataaatcaacacaaaaggttttcccattaatatgaaatattacatatatataagtgccatatttaaaataatttgtctaaacagtagaactatgtcggagcactcactgaagcttgcattccgctgaaagagttatttgtgtaagtagagtatccggagaaggaaaagaacttacgacctttctttataacagaaagctcagctgtaaattcaacaagatgtgcaaaccggacatgcaggtgaatattttaataggttactataaggttctcaattaaattctttaatctgtccagtcccagtttctcttattaataaaactttggaaattgctttaaaccatttaaaggaaatttctagatatagaaactaaggactgtgactatacagctgtcactcatttgtagtaaaacttaaaaagcaaaaacaaaaaacaaaaaagaccttcctgtgatactttatttccgaactaataaaaatctatatgactttttattattgtgtgataaccaagtaaatgttttctattttgcatattttcaggcatggtaacagaaatttaccttttaataaattaaaaaatctaaattttaacctacttgtatgttcggagagtgtttttgtactatattgactacttaaaatagagaatgagactaagaagggaacatttctgttgatacatgttttttaaaagtaattttaagagcattattaggttaatttaatccaattaatgacccaaatgccaaggtaattttaaatttacatttttaataaaagcaacatgttgaaacaagagagggtgagattaacctttttgctaaagtaatttacaagtcaaagacaggaagagatcagagtgaatgtgccttcttaaccagagctacagaatttagtgaataattaaagtacaaactgctttgacctccttgaacttttccaagcaatttctctgtacttctatatatgaatgtcttagccaattttctgctactataacagaatacgacagactgggtaatttaaaaagaaaagaaatttattttcttcctagttctggaggctgggaaggcgaagggcatggcactgacatctgccttgtaactgatgagaaccttcttactgcatgataacaaagcagcaaggcaagcaaaagcgtaagatgaagagagaggaaatgaagccaaacacatcctttcatcagaagcccattccctctataaggcgttattacatttatgagaatggagtcctcatgacctaatcgtgaccttaaaggcccctcccaacactgttacaatggcaattaaatttcaacaaaggttccagaggtgacattcgaatcagcaatgaaattttcatagttaaatttggtattcgtgggggaagaaatgaccatttcccttgtatttttataattaaatcagcaaaatattgtaataaagaaatctttcctgtgaagataccatgacccc

SEQ ID NO: 60583 - DNA, 2015 bp, Homo sapiens
cgttcgtgcgtcctagttccagtacagcgtggagggtttaggcagcgtgttctgattctttgcgggacggcgagcgcatttgtgctttgcccgccgcggcctaggaggccttttgaggccgcgtagtcggtgtttttgaactgactctacagcttctggcaggccgtgcggcgccctgacccggcctcaccatgttggtgctgtttgaaacgtctgtgggttacgccatctttaaggttctaaatgagaagaaacttcaagaggttgatagtttatggaaagaatttgaaactccagagaaagcaaacaaaatagtaaagctaaaacattttgagaaatttcaggatacagcagaagcattagcagcattcacagctctgatggagggcaaaatcaataagcagctgaaaaaagttctgaagaaaatagtaaaagaagcccatgaaccgctggcagtagctgatgctaaactaggaggggtcataaaggaaaagctgaatctcagttgtatccatagtcctgttgttaatgaacttatgagaggaattcgttcacaaatggatggattaatccctggggtagaaccacgtgaaatggcagctatgtgtcttggattggctcacagcctgtctcgatatagattgaagtttagcgctgataaagtagacacaatgattgttcaggccaatttccttgttagatgacttggataaagaactaaacaactacattatgcgatgtagagaatggtatggctggcatttccctgaattaggaaaaattatttcagataatttaacatactgcaagtgtttacagaaagttggcgataggaagaactatgcctctgccaagctttctgagttgctgccagaagaagttgaagcagaagtgaaagcagctgcagagatatcaatgggaacagaggtttcagaagaagatatttgcaatattctgcatctttgcacccaggtgattgaaatctctgaatatcgaacccagctctatgaatatctacaaaatcgaatgatggccattgcacccaatgttacagtcatggttggggaattagttggagcacggcttattgctcatgcaggttctcttttaaatttggccaagcatgcagcttctaccgttcagattcttggagctgaaaaggcacttttcagagccctcaaatctagacgggatacccctaagtatggtctcatttatcatgcttcactcgtgggccagacaagtcccaaacacaaaggaaagatttctcgaatgctggcagccaaaaccgttttggctatccgttatgatgcttttggtgaggattcaagttctgcaatgggagttgagaacagagccaaattagaggccaggttgagaactttggaagacagagggataagaaaaataagtggaacaggaaaagcattagcaaaaacagaaaaatatgaacacaaaagtgaagtgaagacttacgatccttctggtgactccacacttccaacctgttctaaaaaacgcaaaatagaacaggtagataaagaggatgaaattactgaaaagaaagccaaaaaagccaagattaaagttaaagttgaagaagaggaagaagaaaaagtggcagaagaagaagaaacatctgtgaagaagaagaagaaaaggggtaaaaagaaacacattaaggaagaaccactttctgaggaagaaccatgtaccagcacagcaattgctagtccagagaaaaagaagaaaaagaaaaaaaagagagagaacgaggattaacagaaaggaattacgattatatcacccggacacacatcatgcttaagattcaactgggagcataccagggatgctctctaacgtaatcaagggaaggttcagtaagacaaagtgatttatcatctataacttcaaacctatttgtcttgacatcaactctgttaaccttatgtcatcatttcttagagtctttgatatacaaataaaattttctttgtattttaaaaaaaaaa

SEQ ID NO: 60584 - DNA, 4508 bp, Homo sapiens
gtcttgaagtgccactctatattttatttcccagttaaccatgtctacattttctaagatcagtatattgttttctttgttatcatcattaggctccataatataattttacatcatatattattaaacatttatgactacaagaaattcttgaagctacttctacatgtgatcatatcaaagtataaattttgctaacaagacacgctgtgtaccaccttacagatttatagtttatgcggcagagttagaaatctgtgacaagtcctaacacttgtcacatctcaatgtggttttccttaaaaaaagcagccaatatccatgtaaacagtacattgtgagatgtaaaatttgattgatagctcctaaatatcatcccaaatatacacaaattaaaagattattctaaatgctttttcatcttacatatcaagaaactcataaagataacattataaaaggcaacatttgttaaaaggccactgtggttaactttatgtcactggagtcaatactgcagccactgtcaatttcctggatggttgaggttagaagttgattctttcaaggcaaacatcaagtaattcgatttgtctagatgactgaacagagagaattcttagccactcctttcaaatggattgttcaggtcaagttactttaatgccaggtcagtcagggaatcagagaccttggtgttgacctgtgcagaaagactcgcttgtgtaacgttgagatagatgtcatactgctggtccaggccaaggtagcagtcactcatgaaatataatgtgtagatataccttccaggtatttcaggggtataaaaagaaagggaagcaacatgatgatttcgaatatatcctactcttttcaaagcaataagttctctcttatccacttctcctaatatcaaaaaccatccttcgtcttttgatttgggaaatcgaggagtaactgcacagctctctggctttcccttgtggaacccaaagtggactctctgcaagctcacttgaagcacatactcttggtcagcatgcaatttgatccatttgttgtcatctcgtttgtctgcagtcagagttgagacagagagttcattatgtccttcaactaagtcatcccacgagcctttaacacttatgccaacatttatctctggcaagtgagataagaaattccatgcctgtttcgtttttgcagcatgtagctcactttctaccatggagctaaatacatggtctttccctccacaggcatggatcagttcaggaaggcactcgatggaggtccgacccctagcatgtgggcccttcataatcggcttccatttcttgaaaaggtgaagatgatggttttctatgtttggtagtgtaagaagagaagagtcctttaaccaccgaccctggatcaccatctgaatcaggttggtgatattcaggacagtcaccagccagccctggtttgcagccacgtccagcattgcctgacatactctgagagcttggtccaagactgttttggtatcagtgtcataatctgggcagggtagcatggctcggctgagatgtgcctgtagcaggagatgtgctttggtgtgagggctgtcaaatgaatgaggatttgattcaatgggaagacattttgccagttcactattcatatgatcttcattgtgtctcactggcaaatctgtatattcttctgcatcacttagaattgaaagcagttcttcagtactgcattcaggcttcaagcggtccttgaacattttaactgtttgatgcttcaaatagtaataggaggcaattcggccataagttagaggttcaatgctgcgattatcctctccaatttcaatacagtaggaaagttccaattcaatcagggacttctcaatcagatgggacagaaacttgttcacagaatcatggctcacatcacccaaattgtaatagctgggattcatgataagacgtcggaaaaagtaagtccaggtgatataatccaatgcatcttgcttagatgtaattgtaccaccagcaatctctgcatttaagtggtcagagagcactcctaataaacttgattctactgggaaaggttcataaagaaattttttataaaagtctttctttatgtcatgaactagaattacagctttgccttggtcatcgaactgcggcctcccagcacgccccatcatctggaggacatctgtaatggggaaatccacataacgtcttgtttttccatcatagtattctgttcccttaataattactaaatgagctggaaagtttacaccccaggctaatgtgcttgtagcaataagaacctgaactttacagtttacaaatagttcctctactgtttttcggtccctctcatgtagtccagcatgatgcattcctatcccgaaagcaagggtcagcttgaggttggaatctcttactgttgcaatgatgttctccatctctctttcatccatgtttaaccactgctttggatcttcttcagtagccaggaaggcgatcaattccaaagcagtaagacgagtttgacgtcttgatgagacaaatatcaaaacaggtttggctggagaatggcttctaattgcctgaaatgcaggcttgttcatactagccatacgaggacagtaatgttgacctggaaagccttgaatgtgaacttccagtggaactgggcgtactgatggtcggaagttaaacaagcccatctgcttaatattgagccaatcagcaaggtctctggcattagctaatgcagtagatagtccaactattctaacaggcttttctgtgtgtgatgagataaaatttgttcgagatacaatgacctctagaacagggcctctttcctccccaagcagatggatctcatctatgatgagaatagtgacttgctgaacatagttcctattttgccagcttctgctgactccatcccacttctctggcgtagtgacgataaggtcagccttggcaatggatttcatatcaggagtcacatcccctgttagttcaataacttttttaccaagtttttcttctattctaactttccaatcatccattctttcacgtactagggcttttaggggtgcaatatataccgcctttgaagtagggtatttgttgaagactctgaaaatggctaattcagctgcaacagtctttcccgatccagtaggtgctccaagtaggacattacaatccgtgtgatacaatgtatgaaatatttgtgtctgtacagggttaaagtggctgaagttgtacagggcttcatatgctttacatcccaaagctgtgattggtaaaggctgaagatccagtaattctgtatgaggaggatgtctctctggtagaattagatgttgaaagttgataatacatactgcctcagcacccaaccatctatcagacactgctcggatgtagtattgggaaggcaaaggctcaaaaatagggattgtaaataccagtagttgggcttctttactaatgacttgtttttttagagctagaaaatactctgaatgataaatatgatcatttgtaggatcttctacccaaatccaccaaggttctcctactgtcccatgtacctgatcattccaagtgaaatcagcatagatgctgagtgtcactcggaggacagtccttgtgataggctgaatgaatgcttccatcataacagaaggaatctgatgaacacattgtttgaccttcagtccaatattcacatgatgtaaaatgtgacctatttcatctttcctcatgtctttcagcttatccacagtaagctttttttcttctaatcttgttagcatgtgtggtggtaggattgaaaattgtctcaaagggctagcccaaccccaaagcctcttgtcaatggctttactaagattcaggagcctgtaggtcatggtaggccaacgtttcctcagagcaatttcaaaaagagcacggacaattctagctgcattctgtgcaacatatgcagaatctgatataagggagaaactgtccatttctcctcggttgatataagtttgaagtaagatgtttattttcccataactattctctacacctccaggagtggagagttcacaaaaattgcttaataaggtatctaactcctctatttcctcttctctgaccttaatttgatcaaattcttcagctttggagactatggcaaagatatcaccttctgttttgtgagcatcaaagagttcattaaaggtctcaatggtgttgtatttaatatagtaatggctggcagttctacccaaatcagttgaggaaaaatatccagttcgctcctcaaaacgaatcatctgagcttttgtctagttttcgtccaaccttcaatgaccaaactgttctcgatgctttctttaatggtgggtcaatctgataagccttgtgactgatgccatatgctaatggatttgctctcattcgcacataaagata

SEQ ID NO: 60585 - DNA, 3783 bp, Homo sapiens
gtgaattccgcaccatctctctcctgcctgtggggtttctgtcaactagtcgtggagggaaggagactctttaaagaataacatcttattgtggccatgccagaacccactaagaaagaggaaaatgaagtgccagccccagccccacccccggaagaaccaagtaaagagaaggaggccggaactacaccagcaaaagactggacccttgtcgaaactcctcctggggaggaacaagccaagcagaatgccaactcccagctgtccatcttgttcattgaaaaacctcaaggaggaacagtgaaagttggtgaagatatcaccttcatagccaaagtcaaggctgaagatctttctgagaaacccactatcaatggttcaaggaaatggatggacctggccagcaaagccgggaagcaccttcagctgaaggaaacctttgagaggcacagtcgggtgtacacatttgagatgcagatcatcaaggccaaagataactttgcaggaaattacagatgcgaggtcacctataaggataagtttgacagctgttcatttgatcttgaagtgcacgaatctactgggactactccaaacattgacatcagatctgctttcaagagaagtggagaaggtcaagaggatgcaggagaacttgactttagtggtctcctgaaacgtagggaggtgaagcagcaggaggaagaaccccaggtggacgtatgggagttgctgaagaacaccaaacccagtgagtacgagaagatcgccttccagtatgaatcaccgacctgcagcggcatgctgaagcgactcaagcgcagcatcagagaggagaagaagagcgccgcttttgcaaaaattcttgatcctgtatatcaggttgacaaaggaggcagagtgaggtttgttgtggagctggcagatccaaagttggaggtgaaatggaataaaaatggtcaagaacttcgacccagtaccaaatacatctttgaagacacaagatgccagagcatcctgaatatcgataactgtcagatgacagatgattcagagtattatgtgacagccggtgatgagaaatgttctactgagctcttagtaagagagcctccaattatggtgaccaaacagctggaagatacaactgattattgtggggagagagtggaattagaatgtgaggtgtctgaagatgatgcccaagtaaaatggtttaagaatggtgaagagattatcctggtccaaacaagataccgaattagagttgagggtaaaaaacacatcttgatcatagagggagcaacaaaggctgatgctgcagattattcagtaatgacaacaggaggacaatcatctgctaaacttagtgttgacttgaaacctctgaagattttgacacctctgactgatcagactgtaaatcttggaaaagaaatctgcctgaagtgtgaaatctctgaaaacataccaggaaaatggactaaaaatggcctacctgttcaggagagtgaccgtctaaaggtggttcacaagggaaggatccacaagttagtgatagatcatgccctcactgaagatgaaggtgattatgtatttgcacctgatgcctacaatgttactctgcctgccaaagttcatgttattgatcctcctaagatcatcctggatggtcttgatgctgacaacacagtgacagtgattgcaggaaacaagcttcgtcttgagatccccatcagcggagaaccacctcctaaagccatgtggagccggggagataaggctattatggaaggcagtggccggataagaacagaatcttaccctgatagcagcactctggtcattgatatagctgaaagagatgactctggtgtttaccacatcaatctgaaaaacgaagctggagaggcacatgcaagcatcaaggttaaagttgtggacttccctgatcctccagtggcaccgactgtgacagaggtgggagatgactggtgtatcatgaactgggagcctcctgcctacgacggaggctctccaatcctaggatattttattgagaggaagaagaaacaaagctccaggtggatgaggctgaattttgatctctgcaaagaaacaacttttgagcccaagaagatgattgaaggtgtggcctatgaggtccgcatctttgcagtcaatgccgattggcatctccaagcccagtatgccctccaggccttttgttcctttggccgtaacaagccctcctactcttctgactgtggactctgtcactgacacgactgtcacgatgaggtggcgccccccagaccacattggtgcagcaggtttagatggctatgtgctagagtattgctttgaaggaagtacatcagcaaaacagtctgatgaaaatggggaggctgcctatgatctgccagctgaggactggatagttgcaaacaaagatctgattgacaagacgaagttcaccatcacaggtctgccaacagatgcaaagatctttgtgcgtgtgaaggctgttaatgcagctggtgccagcgagcccaagtactattctcagcccattctcgtgaaggaaatcatagaacctccaaagatacacagtcccaagcacctgaagcaaacatatatccgccgagtaggagaccgtgtcattcttgttatccctttccagggaaaaccaagaccagaattaacttggaagaaggatggtgcagaaattgataagaatcaaataaacattcgcaactctgagactgatacaatcatatttattagaaaagcagagaggagccactctgggaaatatgatctgcaagtcaaagtggacaaattcgtggagaccgcatcaattgacatcagaatcattgaccgtccaggtccaccccaaattgtgaagattgaggatgtctgggggagaaatgtcgctctcacatggactccaccaaaggatgatggaaatgctgctatcacaggctataccattcagaaggctgacaagaagagcatggaatggttacgtgtcattgagcatatcatcgaaccagtgccacatactgaattggtcatagggaatgaatattacttccgggtcttttctgaaaacatgtgtggcctcagtgaggatgccaccatgactaaagagagtgcagtgatcgccagggatggtaaaatctacaaaaatccagtgtatgaagactttgatttctcagaggcacccatgtttactcagcctttggttaaccgcctatgccatagcggttacatggccaccctaaactgcagtgtgagaggaaatcctaagcctaaaataacctggatgaaaaacaaagttgctattgtggatgatccaagatacaggatgttcagcaaccagggagtctgtaccctggaaattcgcaagcccagcccctatgatggaggcacttactgctgcaaagcagtcaatgaccttgggacagtggagattgaatgcaaactggaggtgaaagtcattgcacaataaggatttttgaatgtataatatcatctaaggtgggctctccttctgcagactcctcttgcaaggcgtacctccaaacataattgattcatatctgcgagacttacactcaagcaatcctgaggaatactgagggagggcctggctactgtctctctgcactctgctgctttgaaatctggttgaaatgagaaaaagcattttctgttttcccaccaggcccccaagtgtggtctttttctttcctcctaatgttgaagagaaaaaaaaaa

SEQ ID NO: 60586 - DNA, 2799 bp, Homo sapiens
tggcatttgcatggtggccctgtctcatcttggctctgctctccagcttggcagcctctggcttcccgagaagcccctttcggctgcttgggaaacggagcctcccagaaggggtggccaatggcatcgaggtctacagtaccaaaatcaactccaaggtgacctcccgttttgctcacaatgttgtcaccatgagagccgtcaaccgtgcagacacggccaaggaggtttcctttgatgtggagctgcccaagacggccttcatcaccaacttcaccttgaccatcgacggtgttacctaccctgggaatgtcaaggagaaggaagttgccaagaagcagtatgaaaaggctgtgtcccagggcaagacggccggcttggtcaaggcctctgggaggaagttggagaagttcacagtctcggtcaacgtggctgcaggcagcaaagtcaccttcgagctaacctacgaggagctgctgaagaggcacaagggcaagtacgagatgtacctcaaggtccagcctaagcaactggtcaaacactttgagatcgaggtagacatcttcgagcctcagggaatcagcatgctggatgctgaggcctctttcatcaccaacgacctcctgggaagcgccctcaccaagtccttctcagggaaaaagggccatgtgtccttcaagcccagcttagaccaacagcgttcatgcccaacctgtacagactccctcctcaatggagatttcactatcacctatgacgtgaacagagaatctcctggcaacgtgcagatagtcaatggctacttcgtgcacttctttgcacctcaaggccttccagtggtgcctaagaacgtggcctttgtgattgacatcagcggctccatggctggtcggaaattagagcagacaaaggaggcccttctcagaatcctggaagatatgcaagaggaagactatctgaatttcatcctgttcagtggagatgtgtccacatggaaagagcacttagtccaggccacgcccgagaacctccaggaggccaggacgtttgtgaagagcatggaggataaaggaatgaccaacatcaatgacgggctgctgaggggcatcagtatgctgaacaaggcccgagaggagcacagaatcccagagaggagcacctccattgtcatcatgctgactgatggggatgccaatgttggtgagagcagacccgaaaaaatccaagagaatgtgcggaatgccatcgggggcaagttccccttgtataacctgggctttggcaacaatctgaattataacttcctggagaacatggccctggagaaccatgggtttgcccggcgcatttatgaggactctgatgccgatttgcagttgcagggcttctatgaggaggtggccaacccactgctgacgggtgtggagatggagtaccccgagaacgctatcctggacctcacccagaacacttaccagcacttctacgatggctctgagatcgtggtggccgggcgcctggtggacgaggacatgaacagctttaaggcagatgtgaagggccatggggccaccaacgacctgaccttcacagaggaggtggacatgaaggagatggagaaggccctgcaggagcgggactacatcttcgggaattacattgagcggctctgggcctacctcaccattgagcagctgctggagaagcgcaagaacgcccatggcgaggagaaggagaacctcacggcccgggccctggacctgtccctcaagtatcactttgtgactccactgacctcaatggtggtgaccaagcctgaggacaacgaggatgagagggccattgccgacaagcctggggaagatgcagaagccacaccggtgagccccgccatgtcctacctgaccagctaccagcctcctcaaaacccctactactatgtggacggggatccccacttcatcatccaaattccggagaaagacgatgccctctgcttcaacatcgatgaagccccaggcacagtgctgcgccttattcaggatgcagtcacaggcctcacagttaatgggcagatcactggcgacaagagaggcagccctgactccaagaccagaaagacttactttggaaaactgggcatcgccaatgctcagatggacttccaggtggaggtgacaacggagaagatcaccctgtggaacagggccgtgccgagcactttcagctggctggacacagtcacagtcacgcaggatgggctgtccatgatgatcaacaggaagaacatggtggtctcctttggagatggggttaccttcgtggtcgtcctacaccaggtgtggaagaaacatcctgtccaccgtgactttctaggcttctacgtggtggacagtcaccggatgtcagcacagacgcatgggctgctggggcaattcttccaaccctttgactttaaagtgtctgacatccggccaggctctgaccccacaaagccagatgccacattggtggtgaagaaccatcagctgattgtcaccaggggctcccagaaagactacagaaaggatgccagcatcggcacgaaggttgtctgctggttcgtccacaacaacggagaagggctgattgatggtgtccacactgactacattgtccccaacctgttttgagtagacacaccagctcctgttgggatggatggcccggattttatggcatctggaacatgggcacagagaggggcctgtgggaggggctgggaaaataaagtccaaggtcgagaccagaaaaaaaaaa

SEQ ID NO: 60587 - DNA, 2465 bp, Homo sapiens
gataaacccacaagacacaaaacatacctttcgagcagttgggccaagatggcggccgccgagggaccggtgggcgacggcgagctgtggcagacctggcttcctaaccacgtcgtgttcttgcggctccgggagggactgaaaaaccagagtccaaccgaagctgagaaaccagcttcttcgtcgttgccttcgtcgccgccgccgcagttgctgacgagaaacgtggtctttggcctcggcggagagcttttcctgtgggacggagaagacagctccttcttagtcgttcgccttcggggccccagcggcggcggccgaagagcccgccctgtcccagtaccagagattgctttgcataaatccacccctgtttgaaatctatcaagtcttgttaagcccaacacaacatcatgtagcacttataggaataaaaggacttatggtattagaattacctaaaagatgggggaagaattctgaatttgaaggtggaaaatcaacagtgaattgtagtaccactccagttgcggagagatttttcaccagttccacctctctgactctaaagcatgctgcatggtatccaagtgaaatcctggatccccacgtagtgctgttaacatcagacaacgtaatcagaatttactcactacgtgagccgcagacacccactaacgtgataatactttcagaagccgaagaggaaagtctagtactcaataaaggaagggcgtataccgcatctctaggagagacagcagttgcatttgactttgggccattggcagcagtcccaaagactctatttggacaaaacggcaaagatgaagtagtggcatacccactgtacatcttatatgaaaatggagagactttcctgacatacatcagtctgttacacagccctggaaatattggaaagctgttgggtccattgcccatgcatcctgcggctgaagataactatggttatgatgcgtgtgctgtactctgcttaccctgtgtccccaatatcttagtgatcgctactgaatcaggaatgctgtatcactgtgtcgtgctagaaggggaagaagaagatgaccacacgtcagaaaagtcctgggattccaggattgacctcattccttctctgtatgtgtttgaatgtgttgagttggagcttgctttgaaactggcatctggagaggatgacccttttgattctgacttttcttgtccagtcaaacttcatagagatcccaagtgtccttcaagatatcactgtactcatgaagctggtgtacatagtgttgggctaacttggattcataaacttcacaaatttcttggatcagatgaagaagataaggatagtttacaggaactctctacagaacagaaatgctttgttgaacacatcctttgtacgaagccattgccctgcaggcagccagctccaattcgaggattttggattgtacctgacattctgggacccacgatgatctgcatcaccagtacctatgaatgcctcatatggccgttattaagtacagtccatccagcgtctcctcccctgctttgtactcgagaagatgttgaagtggcagagtctcccctccgtgttctggctgaaaccccagattcctttgaaaagcatattagaagcattttgcaacgtagtgttgccaatccagcatttttgaaagcttctgaaaaggacatagcccctcctcctgaagaatgccttcagctcctcagcagagccacccaggtgttcagagagcagtacattctcaaacaggacttggcaaaggaggagattcagcggagggtcaaattattatgtgaccaaaaaaagaaacaactagaagatctcagttattgtcgagaagagaggaaaagtctgcgggaaatggctgagcgtttagctgacaaatatgaggaagctaaagaaaaacaagaggatatcatgaacaggatgaaaaaactacttcacagttttcactctgagctcccagttctctctgatagtgagcgagacatgaagaaagaattacagctgatacctgatcaacttcgacatttgggcaatgccatcaaacaggttactatgaaaaaggattatcaacagcaaaagatggagaaggtgttgagtcttccaaaacccaccattattctcagtgcctaccagcgaaagtgcattcagtccatcctgaaagaggagggtgaacatataagggaaatggtgaagcaaatcaatgatatccgcaatcatgtaaacttctgacaccaccaggagctgactcacacctgaactgaacaccattgaaggcttaaacccatattgtaaaacaggtagaattatctaatttataaaaaggtgttttgatgacctttggtgtggttcatctttttaaatatgttgttttataataattgagtaaatgcttttatttaaaatttggaatgtgctttat

SEQ ID NO: 60588 - DNA, 1484 bp, Homo sapiens
gcggcacggaggagctcaacatgcgtgagtgtatctctatccacgtggggcaggcaggagtccagatcggcaatgcctgctgggaactgtactgcctggaacatggaattcagcccgatggtcagatgccaagtgataaaaccattggtggtggggacgactccttcaacacgttcttcagtgagactggagctggcaagcacgttgcccagagcagtgtttgtggacctggagcccactgtggtcgatgaagtgcgcacagggacctacaggcagctcttccacccagagcagctgatcaccgggaaggaagatgcagccagtaattacgccaggggccattacaccatcggcaaggagattgttgacctagtcctggaccggatccgcaaactggcggatctgtgcacaggactgcagggcttcctcatcttccacagctttgggggcggcactggctctgggttcgcatctctgctcatggagcggctctcagtggattacagcaagaagtccaagctagagtttgccatttacccagccccccaggtctccacagccgtggtggagccctacaactccatcctgaccacccacacgaccctggaacattctgactgtgccttcatggtcgacaatgaagccatctatgacatatgtcggcgcaacctggacattgaacgtcccacgtacaccaacctcaatcgcctgattgggcagatcgtgtcctccatcacggcctccctgcgatttgatggggccctgaatgtggacttgacggaattccagaccaacctagtgccgtaccccggaatccaatttccccatggcacacttacgccccaatcatctcagctgagaaggcctaccacgagcagctgtctgtggccgatatcaccaatgcctgcttcgagccagccaatcaaatggtcaagtgtgaccctcgccacggcaagtacatggcctgctgcatgttgtacaggggggacgtgggtccccaaagacgtcaacgcggccatcgccaccatcaagaccaagcgcaccatccagtttgtggattggtgcccgactggatttaaggtgggcattaactaccagccccccacagtggtccccgggggagacctggccaaggtgcagcgggccgtgtgcatgctgagcaacaccacggccattgcggaggcctgggcccgcctggaccataagttcgatctcatgtatgccaagcgggcctttgtgcactggtacgtgggagaaggcatggaagagggagagttctctgaggcccgcgaggacctggcagctctagagaaggattatgaagaggtgggcgtggattccgtggaagctgaggctgaagaaggcgaagaatactgaggggagggtgtggtgggttctccactccactgccacccccatgcgtggctgctttcaagttctttgcaattaaaggttctgtataaaaccaagaaaaaaaaaaaaaa

SEQ ID NO: 60589 - DNA, 2392 bp, Homo sapiens
  misc_feature (1)...(2392): n = a,t,c or g
atgggtggggggtaacgggggaaactggggaagtggggaaccgaggggcaaccaggggaagatggggtgctggaggagagcttgtgggagccaaggagcaccttggacatctggagtctggcaggagtgatgacgggtggaggggctagctcgaggcagggctggtggggcctgaggccagtgaggagtgtggagtaggcgcccaggcatcgtgcagacagggcgacatcagctggggacgatgggcctgagctagggctggaaagaagggggagccaggcattcatcccggtcacttttggttacaggacgtggcagctggttggacgaggggagctggtgggcagggtttgatcccagggcctgggcaacggaggtgtagctggcagcagcgggcaggtgaggaccccatctgccgggcaggtgagtcccttccctccccaggcctcgcttccccagccttctgaaagaaggaggtttaggggatcgagggctggcggggagaagcagacaccctcccagcagaggggcaggatgggggcaggagagttagcaaaggtgacatcttctcggggggagccgagactgcgcaaggctggggggttatgggcccgttccaggcagaaagagcaagagggcagggagggagcacaggggtggccagcgtagggtccagcacgtggggtggtaccccaggcctgggtcagacagggacatggcaggggacacaggacagaggggtccccagctgccacctcacccaccgcaattcatttagtagcaggcacaggggcagctccggcacggctttctcaggcctatgccggagcctcgagggctggagagcgggaagacaggcagtgctcggggagttgcagcaggacgtcaccaggagggcgaagcggccacgggaggggggccccgggacattgcgcagcaaggaggctgcaggggctcggcctgcgggcgccggtcccacgaggcactgcggcccagggtctggtgcggagagggcccacagtggacttggtgacgctgtatgccctcaccgctcagcccctggggctggcttggcagacagtacagcatccaggggagtcaagggcatggggcgagaccagactaggcgaggcgggcggggcggagtgaatgagctctcaggagggaggatggtgcaggcaggggtgaggagcgcagcgggcggcgagcgggaggcactggcctccagagcccgtggccaaggcgggcctcgcgggcggcgacggagccgggatcggtgcctcagcgttcgggctggagacgaggccaggtctccagctggggtggacgtgcccaccagctgccgaaggccaagacgccaggtccggtggacgtgacaagcaggacatgacatggtccggtgtgacggcgaggacagaggaggcgcgtccggccttcctgaacaccttaggctggtggggctgcggcaagaagcgggtctgtttctttacttcctccacggagtcggcacactatggctgccctctgggctcccagaacccacaacatgaaaggtgaggggcttcctgccacacttggggtggggggcacgcgagaggagctgagtgggacctcactccttccccatccacagaaatggtgctacccagctcaagcctgggcctttgaatccggacacaaaaccctctagcttggaaatgaatatgctgcactttacaaccactgcactacctgactcaggaatcggctctggaaggtgaagctagaggaaccagacctcatcagcccaacatcaaagacaccatcggaacagcagcgcccgcagcacccaccccgcaccggcgactccatcttcatggccaccccctgcggcggacggttgaccaccagccaccacatcatcccagagctgagctcctccagcgggatgacgccgtccccaccacctccctcttcttctttttcatccttctgtctctttgtttctggagctgagctttcctgtctttccttttttctgagagattcaaagcctccacgactctgtttcccccgtcccttctgaatttaatttgcactaagtcatttgcactggttggagttgtggagacggccttgagtctcagtacgagtgtggcgtgagtgtggaggccacctttgggcaaagtggctgtggcaggggcccgggcggcccttccatctggggccgggtgaatggggcgccggctgtgtggcccgaggcctcaccctgccctcgcctagtctggaagctccgaccgacatcacggagcagccttcaagcattccattacgccccatctcgctctgtgcccctccccancagggcttcagcaggagccctggactcatcatcaataaacactgttacagc

SEQ ID NO: 60590 - DNA, 4829 bp, Homo sapiens
tcagtgtggtggaattccacagagtatatcagtcctatccagctcattaccgatgaatgtgagaataacttacatggctaatagtagtagagtatctctcctgggtttttcttttcttcaagtgcttatagctaaatacattctgggaacacttagaacttgctaattcagtattgctacttttacagatgagcctgaagtcttgacagaacctccaagtgccacaaccactactaccataggtatatctgcaacctggacaactttggcaggttctcatggtaaaagaaataataccataactacaaccagttcaaagaggaaaaacaggaaaaataaaattactccagaaaacgttcaaattatatttgatgatccactaccaatttcatacagtcagccagagaaggtgaatggagagtccaagagcagcagtaccagcgagagtggggacagtgataacatgaggatttccagctgcagcgatgaaagtagtaacagcaacagcagtcgtaagagtgacaatcattcaccagctgtggtcactaccactgtgagcagcaaaaagcagccatcagttcttgttacatttccaaaggaagagagaaaatctgtttctggcaaggcttcaataaaattgtcagaaactatcagtgaagggaccagtaattctctatctacttgtacaaaatctggtccatctcccctttcttctccaaatgggaagttaacagtagcaagtcctaagcgtgggcaaaagagggaagaaggatggaaagaagttgtaagaaggtcaaagaaagtatctgttccatcaactgtgatatccagagtgattggaagaggaggctgtaatatcaatgctattcgggagtttactggtgcacacatagatattgataaacagaaagacaagactggagaccggataatcactataaggggtggcactgaatcaacaagacaagcaactcaattgattaatgctttgatcaaggatccagacaaagaaattgatgaacttattccaaagaatcgtttgaaaagctcctcagcaaattccaaaatagggtcatcagcacctaccaccactgctgctaacacttccttaatgggaattaaaatgacaactgtagctctgtcatcaacatctcaaactgccacagcactcactgtgcctgcaatttcttctgcatccactcacaaaaccattaagaacccagtgaataaatgtgaggcctggttttccagtttcttttccatttagcatatcctcctccacagtttgcacatgctttgcttgctgctcagactttccagcagatccgtccaccaaggttgcccatgacccactttggaggtacttttccaccagctcaatccacttggggtccgtttcctgtcaggcctttgagccctgccagagctactaactcgcctaagcctcacatggtgcctcgccatagcaatcagaatagcagtggttctcaggtgaattcagcaggttctttaacttcaagcccaacaactacaaccagttcatcagcttcaacggtgcctggtacatctacaaatggcagtccaagttcaccttctgtccgaaggcagctttttgtcacagttgtgaagacatccaatgccaccacaacaacagtcacaaccacggcaagcaacaacaacactgcacccacaaatgccacatatcctatgcctactgccaaagaacactatccagtatcatccccatcttccccatcaccaccagcccagccaggaggggtttctagaaacagccctttggattgtggatcagcatctccaaataaagtggcatcttcctccgaacaggaagcaggtagtccaccagtagtagaaacaacaaacactagacctccaaacagcagcagttcttctgggagttcatcagctcattctaatcagcaacaacctccgggatctgtttctcaggaaccaagaccacctcttcagcagtctcaggttcctcccccggaagttagaatgactgttcctcctttagcaacaagttctgctccagtggcggtgccttctactgccccagtgacttaccctatgcctcagacaccaatgggatgcccccagcctactcctaaaatggaaacccctgctattagaccaccccctcatggcacaactgcccctcacaagaattcagcttcagtgcaaaattcatctgttgcagtcctcagtgtcaatcacattaaaagacctcacagtgttccctcttctgtccagctaccttcgaccttaagtacacaaagtgcttgtcagaattcagtacatccagcaaataagcctattgctcccaatttcagtgcccccttaccatttgggccctttagcacattgtttgaaaacagccctacttctgctcatgccttctggggaggatctgttgtttcatctcagtcaacaccagaatctatgctatcaggaaaatcctcatatttgccaaattcagatcctttacatcagtctgatacttccaaagctccaggttttagaccaccattacagagacctgctccaagtccctcaggtattgtcaatatggactcgccatatggttctgtaacaccttcttcaacacatttgggaaactttgcttcaaacatttcaggaggtcagatgtacggacctggggcaccccttggaggagcacccgcagctgctaactttaacagacaacatttttccccgcttagtttgttgactccgtgttcatcagcatcaaatgattcttctgcacagtcagtatcctcgggagttcgtgcaccatctcctgccccatcatcagtaccgttagggtcagaaaagcccagcaatgtgtctcaggacaggaaagttccagtccctattgggactgaacgttctgcacgtatcaggcaaactggaacgtcagctccatctgttattgggagcaatttgtctacatcagtaggacatagtggcatctggtcctttgaagggattggtggcaatcaagacaaagtagactggtgtaaccctgggatgggaaatcctatgatccacagaccgatgtctgacccaggagtattttcacaacatcaagcaatggagcgagatagtacaggaattgtaactccttctggtacattccatcagcatgttcctgcaggctacatggactttcctaaagttgggggtatgcctttttctgtgtatgggaatgcaatgattcctccagtagcacctatccctgatggtgctggaggacccatatttaatggccctcatgctgcagacccttcttggaactcactgataaagatggtttccagctccacggaaaataatggccctcaaacggtgtggactggaccctgggcacctcacatgaacagtgtgcatatgaaccagcttggctgatgaggatcagcttgttagcctgcagattccttttcatttggaggaaatcacaagtggccgaaaaaaaaaattatgctcccaaatcattctactgatgtgcttgactgaagtgtgtaggctttttgcagaagatcttactaactgacctattttctgtgaacatttgtgactgcccattccccatcatcatccgttttaccttagttagcatttttcttatcatttttctttttttctttccctcttcccctttggacataactttctgttgaagctgttctttggctggttggttttagtactgtaaactgcttctgagcaaacacggaaatttagcaaaattatgtaaacttgatcctgaagttttagaatggcaaataaatgtacaattgtttacataacagaaaaggctaagcagaaagtaaatttcaatatgtcagtatagaggctctactttatgtagacttaaattaatgtgagatatgtaccttcatattcagaaatctggatgtttccttcatacattaaactattaataagcataacttttctactggtgtaatttaagtataaagtaaaataatgggcattatcattggatgtttccccacattggcttttaaaatacccatcttgctttctttttggtttatttgtagcaaggcacatatagaagaagaaatttctggcttttccatgttgttttattaccttttctcacttttagaactaatacagacttatctcctcactcctttttctctccttacctttaccactaataccagtaaaattatctttctgatagtgaaaaggttctgtcaagattttcactgtaatggctgctacagagatggaccatcttcatcatcaccagtggtttcttctaattataaaatgtttaaactttctgagaatttaaaaagccaccactgttcccagtcagcatatacaagctcttaatattctgtttattaaataattcaatgtactattttatattggatgatattgattcttaacattggcttttcagtcatcaacagtcaacataaaaatttcaattttcagtaatttagtggaaaatatcttatttcttttttcaattttaaaggcttcctgcttttttacccttgtatattatcagtgaaaaggatcaacagttaatttgagccaagtaataaaagaaattctgcatttgtcacgaagacaatttatggtagacagataaatacacagattacagtgtaaagtctccatttaacctgcctataaaagatacaaggccacactaaactactcagtgggatttactatattccatccacttgaaacaataaacagtaatgtatccaagaagattatgtgtcctaccctgtctcatggaaaaattaattata

SEQ ID NO: 60591 - DNA, 2461 bp, Homo sapiens
agatacgtattgagttgtgtagctcaggaatactgtgttcccaactaaataccttccacaaaagtgctattaaaagaagctgtacctctgaagataaagtgggccagtctgaagctctatctagagtccttcaagtagctaagaaaatgaagttgatttctaatggaggagattctgctgtagaaatggatcggagaaatgtgtctgaatttaagagtattaaaaaaacatcattaataaaaaactgtgattctaaaagccagaagtataattgtttagtcatggtgctatctccatgccatgtgaaggaaataaacataaaattcggaccaaattctggctctaaagtgcctttagcaacagttacagtaattgatcaatcagaaactaagaagaaggtttttctgtggaggactgcagcattttgggcatttacagtgtttcttggagatataattttactcacagatgttgttattcatgaggaccaatggattggcgagacagtactacaatcaacatttagcagtcagttattaaatcttggggagttattcatctattcagcctgaagaatattcccagtgtagtttgtggaagttgtacttcaagacttactggccatatgtgtcccccaaaacattcctacctcagagatcttccctccgagggcagccctcagagggtgaacagtatagactttgtaggaattgggagcaccttcaacctgatgtgttagtccacgcagtactaagagttgttgatttcactatactgacagaggcagtatacagttatagaggacagaagcagaaaaaagttatgttaacagtggaacaggcccaagatcaacattatgcgcttgtattatggggtcctggagcagcctggtaccctcaacttcaaaggaaaaaaggttatatttgggaatttaaatatctttttgttcagtgcaattacacactagaaaacctagaattgcatacaacgccttggtcatcctgtgagtgcttgtttgatgatgatataagggcaattacatttaaagcaaaatttcaaaaaagtgcaccctcctttgtgaagatatcagacttagcaacccacctagaggataagtgttcaggagtggttctgattaaagcccagatttcagagctggcatttcctattacagcatctcagaagatagcgctaaatgctcacagttctctgaagagtattttttcttctcttcccaacatcgtatatactggctgtgcaaaatgtggattggaactagaaacagatgagaacaggatctacaaacaatgttttagctgcttgccatttactatgaagaaaatatattataggccagcgttaatgactgccattgatggaagacatgatgtttgtatccgtgtagaatcaaagctgatagagaagattcttctcaacatttctgcagactgcctcaacagagtgatagttccttcctcagagatcacctatgggatggtcgtggcagacctgttccactccttgttggcagtcagcgcagaaccttgtgtattaaagattcagagcctttttgtgttagatgaaaacagctatccattacaacaagatttctccctcctggatttttatcctgacattgtaaagcatggagccaatgcccgtctctgaggccagaggaagaaattgcaggcatttcaaggaagaagtactgaaatgatttgtcttttgaaataaatgaatgacagggcttttgctttggattttttatgaaatatattttacaaagagaattgcactagatatataaattaaaacttttttctaagaaaatcctgtgaggtttaaaaagattgtttttgtcttttggtttcttcctttctcctggagaaatgatctaccagtcaaggcaatatgtagcagatccctgggaattaaaggtttgcccatttgttcactgtatttagtccctgctacattccaggcattgtactaagtatggggaaccacagagaagacattccctcagaaactgctgcagtgctttcgcttatccctacctaaaaaaccgtcaatgtgaaatcatttccttgattataactataatgataatggattagtttatataaacctatgtttagacaagttcaagacaagcgtgtctttctataaaaagtattgaaaatgaaggaaatgagatcatgtttcaatttattaaagcagggaagagcattctgtggttagttcgtgtctaggatttgagtgccttactgaatgcatttaccagcaaacatgtagcaatctgttctctcattgtgattgtggaagaagctcatgtaaaatgatagtcattaatgaggaagtatggcgtggtacttattctgtaagttcagagtatgctgagtgttaatagattatcatattgcctgaaaataaattcatgatgacatgaacaaaaaaaaaa

SEQ ID NO: 60592 - DNA, 2083 bp, Homo sapiens
ggcacgcgcacgaacgcacggccgcgcagcatctgtcttgctggaagctttttcctagaggttgagcggtttgcacaatgtcggaaatggctgagttgtccgagctgtatgaagagagcagtgacctgcagatggatgtgatgcctggcgagggtgaccttccgcagatggaggtaggcagcgggagccgggagctatccctgcgtccctcccgcagcggggcccaacagctcgaggaggaaggcccaatggaggaggaggaggcccagccaatggcggcgccagaggggaaacggagccttgctaacgggcccaacgctggggagcagccaggccaggtggcgggcgcagacttcgagagcgaggacgagggcgaggaatttgatgactgggaggacgactacgactatcccgaagaggagcagctcagtggtgccggctacagagtatcagccgctcttgaagaagccgacaagatgtttctgagaacaagagaaccagccctggatggcgggtttcagatgcattatgagaagaccccgtttgatcagttagcttttatcgaagagctttttttcactgatggttgtcaatcgtctgaccgaagaactcggctgtgatgagattattgatagagagtagttagatgctgttaaaagaggaggaaactacttgaggagggacccaactttccgctatcttttgggttcattccaaatagttttgtgccattgaaaaacttgaccttcaaaaaaatttgtttttcagaatagaacacaataggacagtgactgcacagttgtgaaaaaggaagagaatcattaaagaaaaagaaaaaagattttaagaccgttgaaatcaattatcaagaacgtcctaaaacacctatggctttgactttgttattgatccagattattttccttgcattggggaaaatatctttcatatttgtttgctgtaaagatggttttgcaagaataagtcatgaccaagacaaactgccaatacaaaagcccactgatactaattatataatgagaaaaaaatgtatccaactaggacacatatcttttgagttatttggactgaaagcttaagaaaacttggaaaattctattttgtgatctagtcaagccacagttatcaaaggctacattttcagtgtaagataaatggatgagtaaactcaaatatgtatcacgtgtgctttgtatcttaagatgtgtttccaagagcatctgaaattttgtttgtacatgtatcttgatcatttataaagccactgtgatctataaatcaagaaaatccattgtcataaccatttttaaaagtcaaaaattaagacatccttaattaaaaagtttcaaatctagacactaaatgtgtgtgaatgtacaaagaaaacaaaccattgcttatgctgttatatactagagaaattttgttttgcttgctgttttaacttgacagatgaaggactttagttgaacttcatattgtaagaactgttaataaaagttgtcaagtaaaaagcgctatatctaaaaagactttatgaacagttattctatcaacttttaaaggttttaaacctgcccagaaattaccttggtatctgaagtttccctctgtctcctcctctaattaagcttgttatttgtcatgcaccagcattggagataataaaatttcttgttctgtgtattttgtttggctaatagtattgcatacatactttctctgtatactactttctattgtatgtgttaaccagtattaagggaaaatgatccagcttcagctatctaattcacaaattaatttctggaaattaaactttgtaaattaagtttttgcctataagaatttgctggtctgggaaaacctgccctatcaatgagtatgttgccgtggttaccttactaagatgctgaagttctaggagagtaatgattacatcagaaggctaggttcagcaaaataagtgtatcagcaggttttatcatgatcagtaaaaatgttccaaatgcttctgctccattatagcagtaaagaacgaatatccaatgcaaaaaaaaaa

SEQ ID NO: 60593 - DNA, 759 bp, Homo sapiens
ttttttttttttaataaaaccataacaaatctttcattaaagatctactgagaccttggctgaaatcatctattattgttgctagttagcctctcttctatagttgggtaatgtgtgtcttgccactgtgtttgccagctctcccaagtgaaaagaacactttttataaaaaaattaattgctccaagttttcaggcccaggggaggctctcccattctcctccttcaataagtcccgtccaggtaagaggtgatcttgtggataaattcatcatacttcactttgccattgggttcgatatctgccttccctgaagagatcatcccacttccttgtgggtgagcttctcccccagactcgtgagttttgaccgcaggtcggacgccatgacgtaacctttcttctccttgtccaccatcaacatggctagaagaatttctttctttgggtcttcttgttttatttgcatgtgcataatggtcagaaaagtggagaaatccagctctccatttccgtctatcccgtgggtctgcaggtgccgctgcacctcccctggcgtcgggctggcccccaggcacctcatggccaccatgaggtcggtggcttttatcttccccctctgctgcttgtcatacagggagaagcattccttgtactcattaatttggtcttgggaaagaaacttggccattctggggcctcggctgctacccgtgggcttgctgctcccagaaccgcgttcagttccctctcgtgcc

SEQ ID NO: 60594 - DNA, 412 bp, Homo sapiens
  misc_feature (1)...(412): n = a,t,c or g
ggcacgagctggaaggctgtggtcgaaggccatttttttttgctagttataagcggagtgggtctccagaaccaaagggagctcattcttctcaaaattgacggtgtttatgcccaagaagaaactgaattgtatttgggcaagagatgcgcttatgtacacaaagcgagaacagcacactgactcctggcggcaaaccaaacaaatccagagttatctggggaaggttcactccggcgcacggaaacagcggcatggttcatgccaaattccgaagcaatcttcctgctaaggccactggacacagaatccatgtgatgctgtacctctcaaagatttagaactaacgaaagtaaataaataaaaagtgatttgtcaaatcgggcggncgtggcggctcaacgctgtaatg

SEQ ID NO: 60595 - DNA, 3577 bp, Homo sapiens
gctcggtaaatatgtgttcattaactgagattaaccttccctgagttttctcacaccaaggtgaggaccatgtccctgtttccatcactccctctccttctcctgagtatggtggcagcgtcttactcagaaactgtgacctgtgaggatgcccaaaagacctgccctgcagtgattgcctgtagctctccaggcatcaacggcttcccaggcaaagatgggcgtgatggcaccaagggagaaaagggggaaccaggccaagggctcagaggcttacagggcccccctggaaagttggggcctccaggaaatccagggccttctgggtcaccaggaccaaagggccaaaaaggagaccctggaaaaagtccggatggtgatagtagcctggctgcctcagaaagaaaagctctgcaaacagaaatggcacgtatcaaaaagtggctgaccttctctctgggcaaacaagttgggaacaagttcttcctgaccaatggtgaaataatgacctttgaaaaagtgaaggccttgtgtgtcaagttccaggcctctgtggccacccccaggaatgctgcagagaatggagccattcagaatctcatcaaggaggaagccttcctgggcatcactgatgagaagacagaagggcagtttgtggatctgacaggaaatagactgaccctacacaaactggaacgagggtgaaccccaacaatgctggttcctgatgaagattgtgtattgcctactgaaaaatgggccagtggaatgacgtcccctgctccacctcccatctggccgtctgtgagttccctatctgaagggtcatatcactcaggccctccttgtctttttactgcaacccacaggcccacagtatgcttgaaaagataaattatatcaatttcctcatatccagtattgttccttttgtgggcaatcactaaaaatgatcactaacagcaccaacaaagcaataatagtagtagtagtagttagcagcagcagtagtagtcatgctaattatataatatttttaatatatactatgaggccctatcttttgcatcctacattaattatctagtttaattaatctgtaatgctttcgatagtgttaacttgctgcagtatgaaaataagacggatttatttttccatttacaacaaacacctgtgctctgttgagccttcctttctgtttgggtagagggctcccctaatgacatcaccacagtttaataccacagctttttaccaagtttcaggtattaagaaaatctattttgtaactttctctatgaactctgttttctttctaatgagatattaaaccatgtaaagaacataaataacaaatctcaagcaaacagcttcacaaattctcacacacatacatacctatatactcactttctagattaagatatgggacatttttgactccctagaagccccgttataactcctcctagtactaactcctaggaaaatactattctgacctccatgactgcacagtaatttcgtctgtttataaacattgtatagttggaatcatattgtgtgtaatgttgtatgtcttgcttactcagaattaagtctgtgagattcattcatgtcatgtgtacaaaagtttcatccttttcattgccatgtagggttcccttatattaatattcctcagttcatccattctattgttaataggcacttaagtggcttccaatttttggccatgaggaagagaacccacgaacattcctggacttgtcttttggtggacatggtgcactaatttcactacctatccaggagtggaactggtagaggatgaggaaagcatgtattcagctttagtagatattaccagttttcctaagtgattgtatgaatttatgctcctaccggcaatgtgtggcagtcctagatgctctatgtgcttgtaaaaagtcaatgttttcagttctcttgattttcattattcctgtggatgtaaagtgatatttccccatggttttaatctgtatttccccaacatgtaataaggttgaacacttttttatatgcttattgggcacttgggtatcttcttctgtgaagtacccgttcacatttttgtattttgtttaaattagttagccaatatttttcttactgatttttaagttatttttacattctgaatatgtcctttttaatgtgtattacaaatattttgctagtttttgacttgctcctaatgttgaattttgatgaacaaaatttcctaattttgagaaagtcttatttattcatattttctttcaaaattagtgctttttgtgtcatgtttaagaaatttttgcccatcccaaaatcataagatatttttcatgattttgaaaccatgaagagatttttcatgattttgaaatcatgaagatatttttccatttttttctaatagttttattaataaacattctatctattcctggtagaatagatatccacttgagacagcactatgtaggaaagaccatttttcctccactgaactagggtggtgcatttttgtaagttaggtaactgtatgtgtgtgtgtctgtttctgggctgtctattctagtctatttgttgatgcttgtgtcaaacagtacactatcttaattattgtacatttatagttgtaactgtagtccagctttgttcttcttcaagtcaagatttccatataaatattagaaacagtttctcaatttctacaaaatcctgatgaggtttctactgggaccacattgagtctatcaatcaacttatgcagaactggcaacttactactgaatctctaatcaatgttcatcatgtatcgcttcatttaactaggatttctctaacttaattgctatgttttgagatttttagtttaaaaaccttgtatatcttgttttggtggttttagtgattttaataatatattttaaatattttttcttttctattgttgtacacagaaatacagttaagttttgtgtgtagtcttacgatgtttagtaacctcaataagtttatttcttaaatctagtaatttgtagattcctctggattttgtatatgcatagtcatgtaagctgaaaatatggcaatacttgcttcttcccaattgctttaccttttttcttaccttattgcactggttagcaaccccaatacagagaccaccagagcaggtatagactcctgaaagacaatataatgaagtgctccagtcaggcctatctaaactggattcacagctctgtcacttaattgctacatgatctagagccagttactttgtgtttcagccatgtatttgcagctgagagaaaataatcattcttatttcatgaaaattgtggggatgatgaaataagttaacacctttaaagtgtgtagtaaagtatcaggatactatattttaggtcttaatacacacagttatgccgctagatacatgctttttaatgagataatgtgatattatacataacacatatcgatttttaaaaattaaatcaaccttgctttgatggaataaactccatttagtcac

SEQ ID NO: 60596 - DNA, 6302 bp, Homo sapiens
  misc_feature (1)...(6302): n = a,t,c or g
tctggaattcccgggtcgacgatttcgtctcggccgcggctctgtgcccttgctgctgagggccacttcctgggtcattcctggaccgggagccgggctggggctcacacgggggctgcccgcgtggccgtctcggcgcctgcgtgacctccccgccggcgggatgtggcgactacgtcgggccgctgtggcctgtgaggtctgccagtctttagtgaaacacagctctggaataaaaggaagtttaccactacaaaaactacatctggtttcacgaagcatttatcattcacatcatcctaccttaaagcttcaacgaccccaattaaggacatcctttcagcagttctcttctctgacaaaccttcctttacgtaaactgaaattctctccaattaaatatggctaccagcctcgcaggaatttttggccagcaagattagctacgagactcttaaaacttcgctatctcatactaggatcggctgttgggggtggctacacagccaaaaagacttttgatcagtggaaagatatgataccggaccttagtgaatataaatggattgtgcctgacattgtgtgggaaattgatgagtatatcgattttgagaaaattagaaaagcccttcctagttcagaagaccttgtaaagttagcaccagactttgacaagattgttgaaagccttagcttattgaaggacttttttacctcaggttctccggaagaaacggcgtttagagcaacagatcgtggatctgaaagtgacaagcattttagaaaggtgtcagacaaagagaaaattgaccaacttcaggaagaacttctgcacactcagttgaagtatcagagaatcttggaacgattagaaaaggagaacaaagaattgagaaaattagtattgcagaaagatgacaaaggcattccattcatagaaagcttaaggaaatctttgattgacatgtattctgaagttcttgatgttctctctgattatgatgccagttataatacgcaagatcatctgccacgggttgttgtggttggagatcagagtgctggaaagactagtgtgttggaaatgattgcccaagctcgaatattcccaagaggatctggggagatgatgacacgttctccagttaaggtgactctgagtgaaggtcctcaccatgtggccctatttaaagatagttctcgggagtttgatcttaccaaagaagaagatcttgcagcattaagacatgaaatagaacttcgaatgaggaaaaatgtgaaagaaggctgtaccgttagccctgagaccatatccttaaatgtaaaaggccctggactacagaggatggtgcttgttgacttaccaggtgtgattaatactgtgacatcaggcatggctcctgacacaaaggaaactattttcagtatcagcaaagcttacatgcaggatcctaatgccatcatactgtgtattcaagatggatctgtggatgctgaacgcagtattgttacagacttggtcagtcaaatggaccctcatggaaggagaaccatattcgttttgaccaaagtagacctggcagagaaaaatgtagccagtccaagcaggattcagcagataattgaaggaaagctcttcccaatgaaagctttaggttattttgctgttgtaacaggaaaagggaacagctctgaaagcattgaagctataagagaatatgaagaagagttttttcagaattcaaagctcctaaagacaagcatgctaaaggcacaccaagtgactacaagaaatttaagccttgcagtatcagactgcttttggaaaatggtacgagagtctgttgaacaacaggctgatagtttcaaagcaacacgttttaaccttgaaactgaatggaagaataactatcctcgcctgcgggaacttgaccggaatgaactatttgaaaaagctaaaaatgaaatccttgatgaagttatcagtctgagccaggttacaccaaaacattgggaggaaatccttcaacaatctttgtgggaaagagtatcaactcatgtgattgaaaacatctaccttccagctgcgcagaccatgaattcaggaacttttaacaccacagtggatatcaagcttaaacagtggactgataaacaacttcctaataaagcagtagaggttgcttgggagaccctacaagaagaattttcccgctttatgacagaaccgaaagggaaagagcatgatgacatatttgataaacttaaagaggccgttaaggaagaaagtattaaacgacacaagtggaatgactttgcggaggacagcttgagggttattcaacacaatgctttggaagaccgatccatatctgataaacagcaatgggatgcagctatttattttatggaagaggctctgcaggctcgtctcaaggatactgaaaatgcaattgaaaacatggtgggtccagacctggaaaaagaggtggttatactggaagaatcggacccaagaacagtgtgttcacaatgaaaccaagaatgaattggagaagatgttgaaatgtaatgaggagcacccagcttatcttgcaagtgatgaaataaccacagtccggaagaaccttgaatcccgaggagtagaagtagatccaagcttgattaaggatacttggcatcaagtttatagaagacattttttaaaaacagctctaaaccattgtaacctttgtcgaagaggtttttattactaccaaaggcattttgtagattctgagttggaatgcaatgatgtggtcttgttttggcgtatacagcgcatgcttgctatcaccgcaaatactttaaggcaacaacttacaaatactgaagttaggcgattagagaaaaatgttaaagaggtattggaagattttgctgaagatggtgagaagaagattaaattgcttactggtaaacgcgttcaactggcggaagacctcaagaaagttagagaaattcaagaaaaacttgatgctttcattgaagctcttcatcaggagaaataaattaaaatcgtactcataatcagctctgcatacatctgaagaacaaaaacatcaacgtcttttgtccagcctctttttcttctgctgttccacctttctaaacatacaataaagtcatgggataaaaataatcgatgtatgttacgggcgctttaaccatcagctgcctctcgaatggaagaacagtggtaatggattaacatcctattttgttgtactaaagtgacaaatcggaataatataattggtatggccattaggttcagtccttgaagataagaaacttgttctctgtttgttgtcttatttgtggtggcactcgtttaatggattaactgaggttgctcaatgttcagtttcttttccagaaatacaatgctaggtgttttgaaataaaacttatatagcaattgtttaaagttatcaattgtatataaaatcacagtagcctgctaaatcattgtatgtgtctgtagtattctattcccagaaactatttgaccatgataattcagtttatattcaccacatgaaagaaaaatgggtaacagaagaacccctaaaacaggttaatttggattgtaacgttcagtgaaagaaatttcaacccttcatagccagcgaagaaatttgccttggaagccaagtcagtaccagcttacctatttgattcagttgctgttttctcactctctatatccatttgaaattgatttattttagatgttgtatacttacgttaggctttctgttaatagtggtttttctcctgttgacagagccaccggattatgacacaggatgaggaagattaaggataatcaattgactaatttcatttagaatattatcaaacatttcaactaggtatcagaaaaaggctttctttcataagactattttaaatagaaattatttcaacaattaaagtaatgttgaccatccccctggcagctgaataaagaaaaatttagttcaatttattgcaatttaattacaatactaccttcacaacattttcatgtgttttaaataaatattttttaattggctaaaggacattcaagcaaagaaatgctttctttacttaaaatgtctatctcatttgctgccttttcactaagcctttactttgttaataaaagtgtccattgtgtgatgtttttgattttacagtttgctaaatcttattttcttggagttgctttttggtaacagccccattgctactccccattttattgttttacatcaatgcatgcttcgttgtgatccctcaagatgtaacacttggtatgctcggttgaggatatgaaaaaatacttccgaaaccaggaattcaatgtatgtttgttttatactgtttgataagaaaagtaggtccagccttaagcagcacagatgcgctggtagatgcatagtcaggaactttttttatttcttttaggtctagggacaggagtgaatagaaagggaggagagctctattatgttctatacacagattaggagatgaccttactgggtacacccctctaaccagtgcttacaggttaatgcatgttaatgaatatttttgcagttgtaaagcataacaattacaactacacatctatttctaaagaataaaacaggaccatatttatttacttctgtcaactatagaaagaaagaccttcagctgtatttccacagatttctcccaaggaaaaggctaatattagtcactactgttatcacatccctttgtataagttttaaaaagagatggagggagatcttcatttctttgaggagatcagtattgtaacgtatgtgaatagatgataacaattaatattactaaaagtcccacatgagagtcctgacgccctctccaatgccccacagtaatgtgggcttctttcatgggtttttttttcttctttttagctgatctcatcctaagcatgctttatttttccttgaaagctaggtatttatcaactgcagatgttattgaaagaaaataaaattcagtctcaagagtaaaccctgtgtcttgtgtctgtagttcaaaagtcagaaatgattctaatttaaacaaaaagatattaaatatacagaagttaaattcgaactagccacagaatcatttgtttttatgtcagaatttgcaaagagtggagtggacaaagctctgtatggaagactgaacaactgtaaatagatgatatccaaacttaatttggctaggacttcaattttaaaaatcagtgtacctaggcagtgcacagcacgaaataagtggcccttgcagcttccccgtttaacccactgtgctatagttgcgggtggaacagtcaacctttctagtagtttatgatattgccctctttgtattcccattttctacagttttttccgcagacttctttctgcaaattattcagcctccaaatgcaaatgaatgatataaaaataagtagggaaccatggcaaagagtggtgcttcccaccctcccaatgtgggaatttgacgataggatgagagtcagagtataggtttaaaagataaaatctttagttaataattttgtatttatttattctagatgtatgtatctgaggaaagaaatctggtatttttgctttccaataaaagaggggggggngggngggaatttccaaaagtaatggtttttctctcagttctctaagctggtcctatgttatagccctagcagtatggaaatgtgcctttaaaatatgccttaccttttgaatgatcatggctatatgttgttgagatatttgaaacttaccttggttttcacttgtgcactgtgaatgaactttgtattatttttttaaaaccttcacattacgtgtagatattattgcaacttatattttgcctgtgcttgatcaaaggtcatttgtgtagatgagtaattaaaaaatatttaaatcacattataattctattattggagagcatcttttaaatttttttctgttttaacgagggaaagagaaacctgtatacctagggtcattatttgaccccatagtataaccagattcatggtctaacaagctctcagtgtggcttttctctgaatgcttgaatttcacatgccttgcatttcacagttgtactccatggtcaaccggtgctttttttcacatcgtggtacttgtcaaaacattttgttattttccttggtaaaatatataaaaaaggttttcttaattttcaaaaaaaaaaaa

SEQ ID NO: 60597 - DNA, 1891 bp, Homo sapiens
tgcaggaattcggcacgaggctgagcggatcctcacacgactgtgatccgattctttccagcggcttctgcaaccaagcgggtcttacccccggtcctccgcgtctccagtcctcgcacctggaaccccaacgtccccgagagtccccgaatccccgctcccaggctacctaagaggatgagcggtgctccgacggccggggcagccctgatgctctgcgccgccaccgccgtgctactgagcgctcagggcggacccgtgcagtccaagtcgccgcgctttgcgtcctgggacgagatgaatgtcctggcgcacggactcctgcagctcggccaggggctgcgcgaacacgcggagcgcacccgcagtcagctgagcgcgctggagcggcgcctgagcgcgtgcgggtccgcctgtcagggaaccgaggggtccaccgacctcccgttagcccctgagagccgggtggaccctgaggtccttcacagcctgcagacacaactcaaggctcagaacagcaggatccagcaactcttccacaaggtggcccagcagcagcggcacctggagaagcagcacctgcgaattcagcatctgcaaagccagtttggcctcctggaccacaagcacctagaccatgaggtggccaagcctgcccgaagaaagaggctgcccgagatggcccagccagttgacccggctcacaatgtcagccgcctgcaccggctgcccagggattgccaggagctgttccaggttggggagaggcagagtggactatttgaaatccagcctcaggggtctccgccatttttggtgaactgcaagatgacctcagatggaggctggacagtaattcagaggcgccacgatggctcagtggacttcaaccggccctgggaagcctacaaggcggggtttggggatccccacggcgagttctggctgggtctggagaaggtgcatagcatcacgggggaccgcaacagccgcctggccgtgcagctgcgggactgggatggcaacgccgagttgctgcagttctccgtgcacctgggtggcgaggacacggcctatagcctgcagctcactgcacccgtggccggccagctgggcgccaccaccgtcccacccagcggcctctccgtacccttctccacttgggaccaggatcacgacctccgcagggacaagaactgcgccaagagcctctctggaggctggtggtttggcacctgcagccattccaacctcaacggccagtacttccgctccatcccacagcagcggcagaagcttaagaagggaatcttctggaagacctggcggggccgctactacccgctgcaggccaccaccatgttgatccagcccatggcagcagaggcagcctcctagcgtcctggctgggcctggtcccaggcccacgaaagacggtgactcttggctctgcccgaggatgtggccgttccctgcctgggcaggggctccaaggaggggccatctggaaacttgtggacagagaagaagaccacgactggagaagccccctttctgagtgcaggggggctgcatgcgttgcctcctgagatcgaggctgcaggatatgctcagactctagaggcgtggaccaaggggcatggagcttcactccttgctggccagggagttggggactcagagggaccacttggggccagccagactggcctcaatggcggactcagtcacattgactgacggggaccagggcttgtgtgggtcgagagcgccctcatggtgctggtgctgttgtgtgtaggtcccctggggacacaagcaggcgccaatggtatctgggcggagctcacagagttcttggaataaaagcaacctcagaacaaaaaaaaaa

SEQ ID NO: 60598 - DNA, 4323 bp, Homo sapiens
caatctagtttcaacatacaatgaggatttctgtctgatacagagaaagatacccagtgtctggagggtctgtcttaagaagtgctcttgaagtctgctgggatttcctttcgggactcacagagggaagcctgctccctgagggctttttctcaggcccaatagatcagggtaatcattaccaaatgaggaggaaaggacgatgtcatcgaggctctgcagcgaggcatccttcttccccatgcagtgttaaacactcccctacgcgagaaacgctgacctacgctcaagctcaaaggatggtagagatagaaattgaagggcgcttgcacaggatcagtatttttgatcccctggagatcatattggaagatgacctcactgctcaagagatgagtgagtgcaacagcaacaaggaaaacagcgagcggcctcctgtctgcttaagaactaagcgtcacaaaaacaacagagtcaaaaagaaaaacgaggccctccccagcgcccacggcacgccggcctcggccagtgccctcccggagcccaaggtgcgcatcgtggagtacagccctccgtccgcccccaggaggcctcctgtgtactacaagttcatcgagaagtcggccgaggaactggacaacgaggtggagtatgacatggacgaggaggactatgcctggctggagatcgtcaatgagaagcgcaagggcgactgcgtccccgccgtgtcgcagagcatgtttgagttcctgatggaccgctttgagaaggagtcgcactgcgagaaccagaagcagggcgagcagcagtctctgatcgacgaggacgccgtgtgctgcatctgcatggacggggagtgtcagaacagcaacgtgatcctcttctgcgacatgtgcaacctggccgtgcaccaggagtgctacggggtgccctacatccccgagggccagtggctctgcccgcccactgcctgcagtcgcgggcccggcccgccgactgtgtgctgtgccccaacaagggtggtgccttcaaaaagacagatgacgaccgctggggtcacgtgggtgtgtgccctgtgggatcccagagggtcggctttgccaacacggtgttcatcgagcccatcgatggggtgaggaacatccctccagcccggtggaaactgacatggtaacctctgtaaggagaaggggcgttgggtgcctgcatccagtgccacaaagcaaactgctacacagcattccatgtgacgtgtgcccagaaggctggcctgtacatgaaaatggagcccgtgaaggaactgactggcggtggcaccaccttctccgtcagaaagaccgcttactgtgatgtccacacgcctccaggctgcacccggaggcctctgaatatttacggggatgtcgaaatgaaaaatggcgtctgtcgaaaagagagctcggttaaaacggtcaggtccacatccaaggtcaggaagaaggcaaaaaaggctaagaaagctctggctgagccctgcgcggtcctgccgaccgtgtgcgctccttatattcccccgcagaggttaaataggattgcgaatcaggtggccattcagcggaagaagcagtttgtggagcgagcccacagctactggctgctcaagcggctgtccaggaacggggcccccctgctgcggcggctgcagtccagcctgcagtctcagcgaagctcacagcagagagaaaatgatgaggagatgaaggctgccaaagagaagctgaagtactggcagcggctgcggcacgacctggagcgcgctcgcctgctgatcgagctgctgcgcaagcgggagaagctcaagcgtgagcaggtgaaggtggagcaggtcgccatggagctgcggctgaccccgctgacggtgctgctgcgctcagtgctggaccagctgcaagacaaggaccccgccaggatatttgcgcagcccgtgagtctgaaggaggtaccagattatttggatcacattaaacatcccatggactttgccacaatgaggaaacggttagaagctcaagggtataaaaacctccatgagtttgaggaggattttgatctcattatagataactgcatgaagtacaatgccagggacaccgtgttctatagagccgcggtgaggctgcgcgatcagggaggtgttgttctgaggcaggcccggcgcgaggtggacagcatcggcttggaagaggcctcggggatgcacctgcctgagcggcctgctgcggcaccgcggcggcctttctcctgggaagacgtggacaggttgctggaccccgccaacagagcccacctgggcctggaggagcagctgagagagctgctggacatgctcgacctcacctgcgctatgaagtccagcggctcccggagcaagcgggcaaagctgctcaaaaaggaaattgcccttctccgaaacaagctgagccagcagcacagccagcccctgcccacggggccaggcttggaaggcttcgaagaggacggagctgcgctggggccggaggcgggcgaggaagtccttccgaggttggagactcttctgcagccaaggaaaaggtcgcggagcacatgcggagactccgaggtggaggaggagtccccaggaaagcgcctggacgcaggtctcaccaacggctttgggggtgcgaggagcgagcaggagccgggcggcggcctggggaggaaggccacaccccgacgacgctgtgcctccgagtccagcatctcctccagcaacagcccgctctgcgactcgagctttaatgcgcccaaatgtgggcggggcaaaccggctcttgtgcgacggcacacgctggaggaccgcagtgagctgatctcctgcatcgagaatgggaactacgccaaggcggccaggatcgcagccgaagtcggccagagcagcatgtggatctccactgatgccgccgcctcggtgctggagcctctgaaggtggtgtgggccaagtgcagcggctacccctcctacccggcactgatcatcgaccccaagatgccccgtgtgcctggccaccacaacggcgtcaccatcccggccccacccctggacgtgctgaagattggggagcacatgcagaccaagtctgatgagaagctgttcctcgttctcttttttgataataagagaagttggcagtggcttcctaagtccaaaatggttccccttggtattgacgaaactatagacaagttaaagatgatggaagggaggaattccagcatccggaaggccgtgcggatcgcttttgaccgcgccatgaaccacctgagccgcgtccacggggagccgaccagcgacctcagtgacattgactgacggcccggccgccagcgcgggtcttgtccatagtgttgataagctgtacatgtttgtatattgttcaaaacttaacttattctgatttttagttatagctctttaattctttttccccggggaggggggaggttttatttccaagttttctaggaacccatctccgtctgggcgctgtgagtggggtgggcacgtccgggcagcccagtgcgtctgtcgcacgtccccaggccgtgctgctggcgtcactttctttgatatgtagctttttcttaaagacttttgaatgtttaataattttgtaaatcatgctctttacacagagtaccacttatttaataagacgggatgtaaatttacaatgacaaatgtgtattttaagaaagaaaatgacattattttgaatggtactttgtggaaagaggggagaataaagttatgctgtgtacatcacttgcagatcaccaaaaacactcccgctgcccgtgaccgccggtgggtgtgtccccgctcccgtcgtcccgcccacctcaaaccccgcaggtgtgcctcccagcggattatttattgtagaaagtgtattcatttgctttataatgaaaaatacatttgcaaaggtatattgatatgcatttttatacaggcacataaaaattcaacttggcttgggagcagaatgcattgcattgtataaatgactctggcctgtgtgtactttgattttataacttgtaatcttttgtttacaatgaggggctttctgtaacttgttttaatttagaacactttggtagcaatagaaactttggatacatttttgtatggtacctgtgatgtatatagaattagtactttatttttatttttaagaggtaaagcattatgttggggaaagtagggtgggtttccaaatttgcattttttatattaaaaataaagtcaagatttggaaa

SEQ ID NO: 60599 - DNA, 1164 bp, Homo sapiens
tttttttccaagtgtttcataccttttattacaaaaatcaataacttaattcagttctgtataaagtcgataggacttctggtccaataagcagcctaagctttcattctcatcccaagaagggacaggagtcttggcccagaggctcgtggggaccaccaaaagccttcccaggcagctggagcactgtgtccaaaccaaggaagtccaatgtggggtgtggctgagtgaagagctgttcctaaggagccaagtgctgtctatacaggcttgccccctccaggagcattgggtcacctctggggatggccaggctgaatcagcactgccagcctctgcccacctgatctctgcctgggctggaacaggtcacctgagcaaaagcatgtccccaagaaggccagcgatgtcaacatctccaatgatagggcgaaagaagaggtccccaagcaggctggtcggaatggacttgagggtggaggccgtgaggaggacacgggtcaggcggccttgggctgctgggcaccagggttccaggacttcacacagcacccagtgagcctcctgctgcaggtgcccaatgtgggaggcggcttggaggcctggcacatcggggttgaagagaatgggtcctttcaggcaggcattattccttggggctaagctccaggctccagaaggactccagacagcattgaagccactgcaccgcagccagggagggctggggtctgtctggcagttggccactgcctccactgctgctgggctcctccagcagaatcttcttgagtatgctgggcaccggggcctcagccacctcaaaggtcacagcatcttgggccaacccaagcaggaagagggggccccagcaaccctgcagcagccgccgctggtcctggggaggcagctgccagaaggatggcaggttcctgaggaaggccactgtcttggccagaacatccaaggcctcccggcaggtgcgatgaggtgcacatagctggacgggccggtgctgcctacataggcagcggctacggggtcgggggacagccttgaggctggagctcagaagtgcgtagagaatggcggggcggcttgcagctccctggcatgggcaggcccctggttggctggtgctcatggttagggatctgctctctc

SEQ ID NO: 60600 - DNA, 5175 bp, Homo sapiens
ttttttttttttcacttcaagttttattttgcctcttgcatggtcttttacagttcgttttctacaggaactgagctctgatccaaacaatcaataaaaatgtaattccaaccttaatattcataaccaggaaatagcatagcacttcatgatcctagagtgatgaaagcaagaccagggcatctgtttcacagtcacctgtgaccagaccagccaacatgattactaaaagccaagataaaaccaaaagcaaacttgctaaaaaatcctgaattccatgaggttaactctgaaatcctccaaacaaaatgctagaattgtccactagtgttaagacgagaaaactgaggaaaactcagctgtcttactatctggtaagagtcttcccttcatctcaagccctcaaaaatgcaaacttggttccagctttacaacataccatatccttctatcggttaaaggtttctaacctaaaaaccttctctcctttcttctcacctatttagtgcatactcaaaggctttggttggaagtcactaggtaccactaggtacaatgctttagggctctctcaaagcccacaatggtggagttctgtgaaagaaaacttaagtttctttctctttacccctctcccctcactcagctcaaagttaaacagctgatgcaaaactacagagaagcaagataacaaaatactgttatcaatctatggagaaatcagccagccatgatgaaaaaatgagtcctgccgactatctgccagcttcatgctcagaacccttaaaaacacagaatctaaattaaaatacatgaagctttcacaatccggttaaaggaaaaaggtaactgtaaataactggttaaagtgtgctcattcgttcagaaattagatacaaacatgcaagaattaaagactctgatttaataaaatcagtagtaacaggtcttgagattaaacaactgacctgagggcaaatgggaccaatcagtccctgaaccctacctgacatgtcaaatccaacatttcacatgctgacctaatattgaggttaatttccagaagtaactgcacttttcaacagattaagtcctacaaaattaggctctcgtaccccaaatggtcatggcctacgcctaggtgggaggcactttaaaaataataaaacttcaaaaagaacaaaaacaaccccaaacccaaagacaaaagtaaagaaaatccacttttcactggtttacattattcaaagtgccattctgaaccaacaccctttcatttatagaggaaaaaaatttacaaaaacagtaaacacaaaggatagtcaggttacagctagtttatatacaaagaaatttacaagtttgtcaattgtaggcttttgccacaaacaaatgcacatttgtccctacaaagtacaacatgcctgaaccaacagtcattacaggagacaattggccacgggctttacaaaaagcaggaataacctgccccaaattgaaattatttattcagcttaaactaatgccacaaccatcccacttggaatcactccaccctgacacttctgaaacccactctttctttctttcatctctgccatgtcccctaagactgagaggcatttcactcaataaaccaaggaagatgacagatgttatcttgattactctcaggtggagaaacggcaacccacactggatgcagaaaatagtgctggactacatttattggaagactctctccctgtataagcccatgtaaaaggtctcagcacctaacacaagactcaaaaaggaagcccacatctctctttcatacaggatttgctgcaatactatattctttcccaccagtgagtagtctcaaagtgtgatgggtgagtatttacatagtcttctttgtttcgaatccaattggctgatttgttaccattctagaggctgaactgtatgaagacctcaactaccattcacaaggtgcagttaagagacttttggacagttcacagtgtccaaacaaatgtcaacaggctccgaccaagtataaccacatcctttggaaatccttccatttttgcaatttcaaaacatcctaacttgctgtaaaattccagaattcttttatcatctggtctcacttcacagaaagctccccgggagccattagccttcagtgaagacaggaggcaagccatcatgcttttggccacacttgggtcagttacttttttgtgaatgtccatctttatcagagaagggaaattagcaaggaaagtttctggcagtacttcctgttcttcatggaaactcaacattattttctcagcctcagagagttccttgtcaccatttggcttggtatacttctcctgcatgaaggggatccaggaaattttacattttttaataaagggggtcacatctacagtgcccaaggcataaccacatatgccatcttcatcttctaggacaaagcagtaatccaggctgagggaaagcagccctcctactaacttgtctccaataagatcaggctgactttgaaagggtaaacccactccatcgtcatacatttctctgcaaatcttgtacacggatgcctcatccttaggaaaataaggtctgatagtataaactttggaggtaggagtcagtggaggtggctgaaaaaagagatcatttgccccatcaattggcagcaaacgctggaactctcctgctagaccacctctaaaggcccagggttcttggtctccaattaagaattgtgctgaagaatgactacgacaccctaaccactgtacaaaagacttcaccatagacattatactcttgatatcccaaacataggagtacatgtcataaagaattgtcctgttggcacaattggagagccgagtgaacattcccatcactagtccacacatctcttcaaacttggctgctcgtgaccgccattcttcaattttttcagagtcttttcctttgcaattgacactgacaacactactatttgctcgaagccattgaaattcccgtaacatctgtgctcctttgggtccatgctcgtaaggaaggtagaatagatcagcaagtaactgcaaatcctccagggtcactggttccgcagtgtacaaaggcttttcatttggacctggcacaaactgctccttgtttgtctgttcatcagtttgcatgggggcaatgtcactaatacaatcttcttgcatggacatctctggggattttgattcagctatgctctctttatcagtgtccattggtttcaattcctctgccattttcgcttcaacaatttcactcagtatttggattgtcattcttgtggtccgtttcttcttgtttttccaccaccatgtccatgggttcttcatcaggctgtttcttttcttcttccttggtcagagtagtaggctcaccactcaaggctgctccctggctcataatgggctcctgataaactgttgttactacggttgtggcatttaaagagggtgctgcaactaaaggagtcccatcaactacacttgctttagctccactgtgtgcaacttgcctactgctgtattgatgaggcacaccaaactcttgcaaccattctgttaatgctagctttagagccatctgtggactatagagtacatcagtttcaatatcttcatcactgccttcattttctaattttatctggatggacacagtactatcttcactgtcagtcatcactacatcttttctcactccattcatgtttgatttgtaccaggtggcaagggtgtggatagcaacgtagttggcttcaaattcacaatttggattagtgaggactccttttaaccgtgggatgagttctgtggatcttcctttgtacgggcccagaaacagtctcttctgatcataatcattagcatgaatgttatcccagattactggagctctcttaataatcttagaaacctcttcgatggactctactggaatttctttagaaacaactttgggacctgtccaaagcacttcaattccaggtagaagcttttcacccacagtccttaaatatggagactgagacacatttggataacagaaagtgccacagtattctgtgggacagaagaggaaagtttctggctctcctaggtactgatagatttcatttgtgatggagacttgggcatgagcaaaagaactgaatacctctttgtctgctgcacacatattatggtctatatcatcaaaaagcaaagcaaatgatctgcacccaaactgagaaacctggtccaatttacgtttcaatgtggatacttccttggggttagaaaaagtgatatccaatccaggtgagatcgcatagatgaactctatctcatattctcgtgcagcagagatgagagtcataagttgctcagcttcctccactgaatacatctctcgccaaaacatcctatgtttgtagtcatcttttggggcatacaagtatgtatttaattcccatttctggagccttctaaagagttcttttctctgttccataacccaaggtcttccataaaatccttccaccacaccgcagaggaaccgccgagcccctcctgcagccccggccaccgccgctccctcagccccggcggggttgtcttctccaggtgccggagctgccggcggctccagcgatgcccccgcagaggcggcagggttggagctgagctcgctctcccgctcctccaacgtcgcttgactctccttctgcaccatcctcctgcccccggccgctgccacctctgcgggtcctcctcgacctctgtccgttggggcaccggcccggagccctggagagggcttcagctccaagtgtgcgcccctccggctccttcccctccccctctgcccttccccctccctctccgcagggacccgaatgcccggatgagaagggcggcggcaccggcgcgagccctttgtcagccgcagcctcggctttaagctggggcgccagaagcctaagcggagagcgaggctgtgacctctcgttccctggaagaagacggccaagggtcctgtcctcgttctctgcctctgctgccctcccgataatcttaggtcttccgctgtttcccctccaagccccgagctctccctctgctgctgcctcca

SEQ ID NO: 60601 - DNA, 6584 bp, Homo sapiens
  misc_feature (1)...(6584): n = a,t,c or g
cagtgaaggatgaagaatgattagactctaaggattatgtgtaataatccgggagacatagatgtgccatctcatgaattaaattgttcacttctttcagagacttgtgttactattggagaaaagaaaaatgaagctttgatggaatgtaaagccaagcctgttggtagtccaattgtttaagttttcagataaagaagaacatgaacaaaatgattccatttcaggtaaaacgggtgagactggtgttgaagaaatgatagcaacaagaaaagttgaacaagattcaaaggagacagtaaaattatcccatgaagatgaccatattcttgaggacgctggatcttctgatatttctagtgatgctgcttgtacaaatccaaataagacagaaaacagccttgtaggtttgcctagttgtgtagatgaagtgactgaatgtaatttggaattgaaggataccatgggtattgctgataaaactgagaacacccttgaaagaaataaaattgaaccgttgggttattgtgaagatgcggagtctaataggcagttggagagcactgagtttaataaatcaaacttagaggtggttgatactagtacttttggaccggaaagtaatatcttggaaaatgctatttgtgatgtgcctgaccaaaattcaaaacagttgaatgctatagaaagtactaaaatagagtcccatgaaacagcaaaccttcaggatgacagaaacagccagtcaagtagcgtttcttacttagagtcaaaaagtgtaaaatccaaacatacaaaacctgtaattcattctaagcaaaacatgaccacagatgctccgaagaaaattgttgcagcaaagtatgaagtaatacatagcaaaactaaagttaatgtcaaaagtgtgaaacgaaatactgatgtaccagaatctcagcaaaattttcataggccagtcaaagtcagaaaaaaacaaattgataaggagccaaagattcagagttgcaattctggggttaaatctgtgaaaaaccaagctcattctgtactgaaaaaaacattacaggatcaaactttagtacaaattttcaagcccttaactcattctttgagtgataagtcacacgctcatcctggttgcttgaaagaacctcatcatcctgcacaaactggacatgtatcacattctagccagaaacagtgtcataagcctcagcaacaggccccagcaatgaaaaccaatagtcacgtgaaggaagagcttgaacacccaggcgttgagcattttaaggaagaggataaactgaaactgaaaaaacctgagaagaacctacaaccccgccaaagaagaagcagcaaaagtttttctttagatgagccaccattgttcattccagataacatagctaccataagaagagaaggctctgatcatagctcctcatttgaaagcaaatatatgtggactcccagcaagcagtgtgggttttgcaaaaaaccacatggcaacaggtttatggttggctgtgggagatgtgatgactggtttcatggtgattgtgttgggttaagtctttctcaagcacagcagatgggcgaggaagacaaagaatatgtctgtgtaaaatgttgtgctgaagaagacaaaaagactgaaatactagatccagatactttggaaaaccaagctacagttgaattccatagtggagataaaacaatggagtgtgaaaagcttggattatcaaaacacacaacaaatgatagaaccaaatatatagatgatacagtgaagcacaaggtcaaaattttaaaacgggagtctggtgaaggcagaaattcatcagactgtagagataatgaaattaaaaaatggcagctagctcctcttcgtaagatgggacaaccagttttacctcggagatcctcagaagaaaaaagtgaaaaaataccgaaagagtctacaactgttacttgcacaggagaaaaagcttcaaaaccaggtactcatgagaagcaagagatgaaaaagaagaaagttgcaaaaaggagtgcttaatgtacatcctgctgcttctgcttccaagccttctgcagatcagatcaggcaaagtgtcagacattctctcaaagacattcttatgaagagacttacagactcaaatttgaaggtaccagaggaaaaggcagcaaaagttgccacaaaaattgagaaagagcttttctctttttttcgggacacagatgctaaatataagaacaaatatagaagtttgatgtttaatttgaaagatcctaaaaacaatatattatttaaaaaagtactgaaaggagaagtaactcctgatcatcttatcagaatgagtccagaagaactagcttctaaagagttagctgcttggagacgaagagaaaacagacataccatagaaatgattgagaaagagcagagagaagtggaacgacggccaatcaccaaaataactcataaaggtgaaatagaaattgagagtgatgccccaatgaaagaacaggaagcagccatggagattcaggaaccagccgccaataagtcattggagaagccagaaggatctgaaaaatcgaaaagaggaggttgactctatgtctaaagataccactagtcaacacagacagcatctttttgatctcaactgcaaaatctgcataggtcgaatggcaccacctgtagatgatctttctccaaaaaaagtaaaagttgttgtaggagtagctcgcaaacattcagacaatgaagcagaaagtatagcagatgcattatcttcaacctcaaatattttggcttctgaattctttgaggaggagaaacaggagtctccaaagtcaacgttctctcctgctccacgtccagagatgcctggaactgttgaagttgagtctacctttctggctcgattgaacttcatctggaaaggttttatcaacatgccttctgtggcaaaatttgttaccaaagcctatccagtatctggctccccagaatacctgacagaggacctaccagatagtattcaagtaggtggcaggatatcacctcagacagtttgggattatgtggaaaaaataaaagcatcaggaaccaaggaaatttgtgtggttcgcttcacaccagtaactgaagaagatcaaatttcttatactttgctctttgcatacttcagtagcagaaagcgctatggagtagctgctaacaacatgaagcaggttaaagatatgtaccttattcctttgggtgccacagataaaattccacaccctcttgtgccttttgatggacctgggcttgaactgcatagacctaatctattgttgggcttaattattcgtcagaaactgaagcgacagcacagtgcctgtgctagtactagtcatatagctgagactcctgaaagtgcaccaccaatagcattgccacctgataaaaaaagtaaaatagaagtttctacagaagaagcaccagaggaagaaaatgacttttttaattcttttacaactgtattacacaagcagagaaataaacctcagcagaatcttcaggaagaccttccaacagcagttgaacctttaatggaagtcaccaaacaggagccaccaaaacctttaagatttcttcctggcgtgttgattggctgggagaatcaacctactactctggaattagcaaataaacctcttcctgtggatgatatacttcaaagccttttgggcaccactggtcaagtatatgaccagggcccagtcagtgatggaacaaaacactgttaaagaaattccatttttaaatgagcagaccaactcaaaaatagagaaaacagataatgtggaagtaactgatggtgaaaacaaggagataaaagttaaagtagataatatttcagaatctacagataagtcagcagaaatagaaacatcagtagtagggtcctcttccatttctgcagggtctttgacgagtcttagtctcagaggtaagccaccagatgtttctacagaagcatttttaacaaatttatcaattcagtcaaaacaagaggaaactgtggagagtaaagagaaaacattaaaaagacagcttcaggaagatcaagagaataatttgcaagataaccagacttcaaatagttctccatgcagatctaatgtaggaaaaggaaacatagatggtaatgtgagctgtagtgaaaaccttgttgctaatacagcgaggtctccacagtttatcaacctgaaaagggatcctaggcaagcagcaggacgaagtcagcctgtaactacttcagaaagcaaagatggagatagttgccggaatggagaaaaacacatgctgcctggcctgtcacacaacaaggagcacttaacagaacaaatcaatgtagaggaaaagttgtgttctgcagagaaaaactcgtgtgttcagcagagtgacaatttaaaagttgcacaaaactcaccatcagtagaaaacatacagacttctcaagcagaacaagcaaaacccttacaggaggatattttaatgcaaaatattgaaactgtgcacccatttcgaagaggatcagcagtagcgacatctcattttgaagttggaaacacatgtccatcagaatttccttctaaaagcatcacctttacttccagaagcaccagccccagaacaagtacaaacttttcacccatgaggccacagcagcccaaccttcagcatctcaagtctagcccacctggatttccatttccagggcctcctaattttcccccacaaagcatgtttggatttccaccacatttgccacctccattacttccccctccaggctttgggctttgcttcaaaatcccatggttccctggccacctgttgtttcatctcccaaggtcagccacagcgtatgatgggtcctctctcacaagcatcaaggtatataggcccgcagaatttttaccaggttaaagacattcggaggccagaaaggcgccatagtgacccttggggtaggcaagaccaacagcaactggataggccatttaataggggtaaaggggaccgccagagattttatagtgattcacaccatttgaaaagagagcgacatgaaaaggaatgggagcaagaatctgaaaggcatagacgcagagacagaagccaagacaaggacagagacagaaaaagcagggaggaagggcacaaagataaagagagggcacggttatcacatggtgatcgaggaacagatggaaaagcaagcagagatagtaggaatgtagacaagaagccagataaacctaaaagtgaagactatgagaaggacaaagaacgagagaaaagtaaacacagagaaggagaaaaggacagggataggtaccacaaagatagggaccacactgacagaactaaaagcaaaaggtaaaatttgcaggctgcttcaggattacatttaaataactgttaaaatgttgtatcttgtaaacaaaagaaagattgcctgctaggattgtgccatctttaaaatttttactattggtcatttgcagaacagtaaattctgtgtgttggtacagagtgctctgtaccagtgctcatcatcccttcttcataccaacggtccctagttataggaatttaatatttttaaaagttttacattgctgtatattcaaagatttgttttattaatatgcaataaaggcttagaaattttagttttattccttaattggtaaatatggttaactatggaatatatttacttcctctagtgaatgtcctttatataatgactaatttgggagtaatgtgtgctctgtaagtttgttttaaattgcactgtttttaaagaaactgtagaggagcaacaaaaatccaagcaacttcataatcagattatgctaatcatttagttgagcagtttttgaccaagaatcagaagcccaaggggtacatttattgctttaatctgcactcattgaagtcatttattaccatatactacagctttgtggtaggccattattttcattttcatttttggctcttcagaaacttgaatacttaagcttgtacatgatcttgtgttttgctatcctttttactgtaaaatgtaaatattttaagggatattttgattctaaatatgataaaataatttctcacctattttgtgtgtgtgacttgaaattcagtagtaaaagaatttcttctttaaagctttaattaccttcagacattgattttttgttactcagccaagaacatatagaaatagctatctatgtcaggcattagatgaggggaaaaacaatttttttaaaatcttaaattgtaggctgagatgaattgtgtagttctaaagaggctagaatttagaactacctgtgaaacactgtgcagctatagcccactttataggtaagtttctggaaaacttttacaccatcgcaatttgggtactctgacttcacttaatcatttaaaatttaaaggacccgcaggaactttgagggggaantatgtttttggaatccnttttattaaaatgtgccgg

SEQ ID NO: 60602 - DNA, 6421 bp, Homo sapiens
acaacttgagaccattatcctttgcattgtttttaggagacccaaacatggcaaacctggaagaaagcttcccccgaggaggtacaagaaagatccacaaaccagagaaagctttccagcagtcagttgaacaagacaacttatttgatatttctactgaagagggatccaccaaaagaaaaaagagccagaaggggccagcaaaaacaaaaaagttgaaaatcgaaaagagagaaagcagcaagtccgcaagagagaagtttgaaatccttagtgttgagtccctgtgtgagggaatgcgtattttgggttgcgtgaaagaggtgaatgaactggaactggtgattagtctccccaatggcctccagggctttgtgcaagtcactgaaatctgtgatgcctacaccaaaaagctgaatgagcaggtgacacaagaacaacctctgaaggacctacttcacttgcctgaacttttctcacctggaatgctggtaagatgtgtggtgagcagtctgggcatcacagacaggggcaagaagagtgtcaagctgtctctgaaccccaaaaatgtcaacagagtgctgagtgctgaggccctgaagcctggcatgctacttacaggtaccgtatccagcctggaagaccatggctacctagtggacattggtgttgatgggaccagagcttttctgccactgctgaaagcccaggagtacatcagacagaagaacaaaggtgctaaactaaaggtgggtcagtacctgaactgcattgttgaaaaggtgaaaggcaacggaggagttgttagtctgtctgttggtcactcagaggtttctacggccattgctactgaacagcagagctggaaccttaataacttgctaccaggactggtggtcaaagctcaggtacagaaggtgactccatttggccttacgctaaacttcctcacattcttcacgggcgtggttgactttatgcacctggatcccaagaaagctggaacatatttctcaaatcaggcagtgagggcctgcatcctttgcgtccatcctcgaaccagagttgtgcacctgagcctgcgccccatcttcctacagcctggacgcccactcacccgactctcttgccagaaccttggagcagtgctggatgatgttcctgtccagggttttttcaaaaaggctggggccacctttaggctgaaggatggggttctggcctatgcccggctcagccatctctctgattctaagaacgtcttcaatcctgaggccttcaagccagggaacactcacaagtgtagaattattgactacagccaaatggatgaactggccttgctctctctacgaacgtctattattgaagctcagtaccttagatatcatgacatcgaacctggggcagtggtaaagggcacagtgctaaccataaagtcatatgggatgctggtgaaggtgggcgagcagatgaggggcctggtacctcccatgcacctggctgacatcctgatgaagaatccggagaagaagtaccacatcggggatgaggtcaagtgccgggttttgctttgtgaccctgaagccaagaagctgatgatgaccctgaaaaaaaccctgattgagtccaaactacctgtcattacctgctatgccgatgccaagcctggtctgcagacacatggcttcatcatcagggtcaaggactatggctgcattgtgaagttctacaacaatgtgcagggactggtgcccaagcatgagctcagtactgagtatatccctgacccggagagagttttttacactggccaggtggtgaaggttgtcgtattgaactgtgagccatccaaagagaggatgctcttatccttcaagctgtcgagtgatccagagccaaagaaagagcctgcaggacacagtcagaagaaaggaaaagccattaacattgggcagttggtagatgtgaaggttttagagaagaccaaagatgggctggaggtggctgtcctgccccacaacatccgtgctttcctccccacatctcatctgtcggaccacgttgccaacggcccattgttacatcattggctccaggcaggtgacatccttcaccgagtcctgtgtctgagccagagcgaggggcgtgttcttctttgcaggaagccagccttggtctccacagtagaaggtggccaggatcccaagaacttctcagaaatccatcctggaatgctgctcattggttttgtgaagagcatcaaggactatggcgtgttcatccagctcccctcaggtcttagcggactggccccaaaagctatcatgagtgacaaatttgtgacctccacaagtgaccactttgttgagggccagacagtagcggcaaaggtgaccaatgtggatgaggagaagcagcggatgctgctgtcactgcggctgtcggactgtggtctgggggacttggctatcaccagcctcctcctcctgaatcagtgcctggaggagctgcagggcgtgcgcagccttatgagcaaccgagactctgtgttgatccagacgctggccgagatgaccccaggaatgttccttgacctagtggtgcaggaggtgttggaagatggctctgtggtattcagtgggggtccagtgcccgacctggtcctgaaagccagcagataccatcgcgcagggcaggaggtggaatctgggcagaaaaagaaggttgttatcttaaatgttgatcttttgaagttggaagtgcacgtttcccttcaccagggacttggtggaatagaaaagctagaaagctgaggaaaggcagcgaacaccaggcgattgtgcagcacttggagaagtcctttgccattgcctccttggtagagacgggccacctggcagctttctccctgacctctcacctcaacgacaccttccgctttgactcagagaaattgcaggtgggacagggtgtctccctaaccctcaagaccacagaaccaggagtgactggccttcttttggctgtggaggggccggctgccaagaggaccatgaggccgacccagaaggactctgagacagttgatgaggatgaagaagtggatccagctctgactgtagggaccataaagaagcacaccctctccatcggggacatggtcacagggactgtcaagtccattaagcctacccatgtggttgtgactctggaagatggcattattggctgtatccatgcctcccacattctagatgatgttccagagggcacctctcctactaccaagctgaaggttgggaagacggtcactgcccgagtgattggcgggcgagacatgaagacattcaagtatctcccaataagtcaccccagattcgttcgaaccatcccggagctgagtgttcggccaagtgagctggaggatggccacactgctcttaacactcactctgttagccccatggagaagattaaacagtaccaggccggccagactgttacttgcttcttaaagaaatacaatgtggtgaagaaatggcttgaggtggagattgccccagacatccgggggagaattcccttattgctcacttctctgagcttcaaggttctgaagcatccagataagaagttccgggttggccaggccctgagggccaccgttgttggcccagattcctccaagaccttcttatgtctgtccctcacaggtcctcacaagcttgaggaaggggaagtggccatgggccgagtggtgaaggtgactcccaacgaggggctgaccgtctccttcccctttgggaagataggaacagtcagtatatttcacatgagtgactcctactccgagacgcccctggaagacttcgtcccccagaaggttgtcagatgttacatcctgtccactgcagacaacgtattgactttgtcgctgcgatcatccagaacaaacccggagacgaaaagcaaagtagaagatccagagattaactccatccaggacattaaggaagggcagcttctgaggggctatgtagggtccatccagccacacggtgtgttctttcgccttggcccctccgttgtgggtttggctcggtactcccatgtctcccagcacagcccgtccaagaaagccctttataacaaacacctccctgaagggaagctgctcacagccagggtcctacgccttaaccaccagaagaacctggtagagctgtctttcctccccggagacactgggaagccagacgtgctttctgcttccttggaagggcaacttacaaagcaagaggagaggaaaacagaggctgaggagagagaccaaaaaggggaaaagaaaaatcagaaaaggaacgagaagaagaaccagaaggggcaggaggaggtggagatgcccagcaaggagaagcaacagccccagaagccacaggcgcagaagcggggcgggcgggagtgccgggagtctgggagtgagcaggaaagagtgagcaagaagccaaagaaagccggcctgtcagaggaggacgacagccttgtggacgtgtactatcgggagggaaaagaggaggcagaagagacgaatgtgctgcccaaggagaagcaaaccaagccagcagaagcgccccggctgcagctgtcttcaggcttcgcttggaatgtgggactagactctctgaccccggccttgccacctctagcagagagctcagacagcgaggaggatgagaagccacaccaagccacgataaagaaaagcaagaaagaaagggagttggagaagcagaaggcagagaaggaactgtcccgcactgaggaggcgctgatggatcctgggcggcagccagagtccgcggatgattttgaccgactggtgctgagctcccccaacagctccattctgtggctgcagtacatggctttccacctgcaggccacggagatcgagaaggcccgtgccgtggctgagagggcccttaagaccatctccttcagagaggagcaggagaagctgaacgtgtgggtggctctgctgaacctggagaacatgtacggctctcaggagtccctgaccaaggtctttgagcgagccgtgcagtacaacgagcctctcaaagtctttctccacctggctgacatctacgccaagtcagagaaattccaggaagctggtgaactctacaaccggatgctgaagcgtttccggcaggagaaagctgtgtggatcaaatacggcgccttccttctgcggaggagccaggctgcagccagtcaccgcgtgctgcagcgagccctggagtgcctgcctagcaaggagcatgtggatgtcattgccaagtttgcccagcttgagtttcagctgggggatgcagagcgggccaaagccatttttgagaacacgctgagcacctacccaaagcgcacagatgtctggtcggtctatatcgacatgaccatcaagcacggcagccagaaggacgtccgggacatctttgagcgggtcattcatctgagcttggcccccaagagaatgaagttcttcttcaagcgctacctggactacgagaagcagcatggcactgagaaggatgtgcaggcagtcaaggccaaggccctggagtatgtggaggccaagagctcagtgctagaggactagtggcaggctggctctgtgggacactgtcaacaatgggccagcccggccccgcctcgagtgcctgggcactcggaaaactgttacctcaggactctatttaaatgctgctttttctgcagcacgcttggggaaatcctgtcaggatgaaaaggaagttgagattttttaaatccctcttcgcttgctttattttcagtaccaacttgttatctttttccttatctgaggctacctggggattgtgggcagcaggcccctggactcccagaaatgctgagggtccctcttccaggggagttccctggggagcaagagtagaggggctattcccgagggtcctgtggtcagggtcctgctttgtccctggcaggctgtcagtccagctggagggggtcagtaggctccagggagtgggccctcccctccgatcttggagtctctgggtgttccttcagcctcagcctcactggtacctctctgccctttaggggaggctatgaagtcttggaaaggaggacaaaatcagagcccagagggggaaatggagaaacctgggctgctgaggaaagccacgggtgttggcgtgaactgatgatgtctcatcccacgcccactatggccacattacctaacctctccatatctgggctattcaaggtcttggaggccagcacagacccagctagttgttgaagccagttcttttttgtcttggtcatgagggaattaaacgttttctctggcagaaaaaaaaaa

SEQ ID NO: 60603 - DNA, 1114 bp, Homo sapiens
ttttttttttttgaggctgaaattgaagctttttattttggatatacataccactattactgttttaaagacatttttatgtagtgatactttgtattatggactctataaagttctatactgtaatcaagacatttatataaagtgacactttgggattatttggcctcataagctagatgccagtgaaattggcatacacatcaatagacatgtttacacttccagtgttagggtttttgtttattccagttgtacttcctttggcagacggctattatgttttactttagtgccgtattgtggatgccagagaacttgcatttgccagggaataatctcctgagatgctatattatgaagtagaatggtgtagtctaattcaataaagtcatcatttctttgcacttgcttgacagtttgaatttttaccattttataccatgtgtcttcagtagaattttgccatattatataaccacaggcaacccaggctaaatgtagaacgagcgtcatttctggagatacatttccaaaattgtctgcgaatattttgtgcttctagcggttccttcatggacttaagtctttgataaaatgtgttgtcttcttcatctggattctttccagtttctccttcaaatgtgaagttgacttctggtgcagtttcttgtcccgttgaagggtaaagtacttcagctgtgcagttcaccttaacttgtttttgtataatttcttcaacagcaaatttaaggcgatacttatgtcctcttcctggaatatcctccatgctggcttgtttgaccttctgcacctcaaacaccctgtgcggggtcccctgctggtagttgatgtagttctgtgccaccaaggccgccctggaggctgggtagttggtcggcgggatttccattccggatgagcagtgacttcagggcttgggctactctggcttaacgggaccagtagcagagcgccgcccgtcctgcttgctgctgggtccggttgccgaggcggaaaagtcgcaagctccttcagtctgtcttcttcctcagctccttccgactccggaagctgctgtttgggcccaggctccctgcatccgagagccctg

SEQ ID NO: 60604 - DNA, 3364 bp, Homo sapiens
gaattcccaccacatgaacacttaattaactggagataatgttaaagcaaggtctctacaattttccattaggttgtgcttcaaatagtctataataaggacttgaattaattacattttattgcactataaattggctgttgtcattatacccaaatgtaacaaataaggcagactttaatttctctgtagacctccttggatagaagataagtaatttaaaaatatgtaaaaattgaaaaatttgtgtacttgtttatagtgtctctctgtaaatgtgcatttgaccaaagagattccatccaaataatgagagaaaaacccccccaaatagcatcttctgctttaaaaaattcttggtttgtaatttttttttaaaagtcataaagccactggctttcagagacttattagaacacactcatctcttcatggcatgcttctggctaagtgtcctaaatttggggctccaaattaatccaaaaattccagcccatcttcttcttgtcggttcactgcaacaacctacagacccagccaccgatcctcttccttcatagttatatgtcaggacatagtcttgggcatgcttgtgattttcatcttgattacacagatacactttctttcattgtttaatttttaatcagagtgtgtcctctaatggattcttcaccaagacggggctgagtaaaactgtgccactccgagtaagtgtatctgcagttgtccacctccgtgtgtcctcccctgcaggagtccagggtgtgatggtggccagccccccggcaggattccgaggtctggtgtcctcctttcaccatttcgatggtctcctgacctccgtttttgattcctgatcccacggtgccacaaactccctgagcagaagcgcccacagtttgggttgtgaagccattcgcagaatacactttgtcatctccaggagcttctgtgtttgatacaattaggttctgctgggctaaatcatcaggaattacttttggttgtttagacgtcccagaagccccacagaccagcgtaaacaggatgcaaaagaacaatgctatgcccaacaatattgcaaggatggcccactttccaagttgtactcctccaccgccaatccttggatctacacgatgtgtgcagtcattttcggtaatgcagtcacacagtgtaacatccaatgaagtgacactagacatgccaagtctatctctcactgttataggtactacatatgagccaaatggaggatcattctgataggaaagacgtgctgctgtatcattaattgctttcagtctccacattctctgtacttctgaagtagaactctccagactaaagtcaaagggtgggccatggataggctcatcaggatcaaccgcaacaatctccgcagatgacatggtgggtttgcagatgatcactgtctttttaggtatgaatgggctgttatcattcacgtcttgaagtataatgcccagtgtccccgtacatgttctccctccttggtctgatgcaaggactgtaatattatatatgccatttttgatggtctctgcctctctatccaggcttctgaaaactttgattgatcctgtattttcatcaatggtgacccaccctgttggatcagttaatttcttataccttatgccactgctacttcttgtttctgggtcatatgctttatatccattgcttgttgttcccacttctgcattttctttcatgcgaacagtctgtattggagggttacactcagggccctcatcctgatcttctacattaacagtaactgttgctgtgctcatggctgatcttggactagcctctctggaaaatggagcttcattaactacaccaatttgcaagatcatctgttgcttttcttcataattcaaaggcttaactacacaaagaactccttcattggttttggcatctgttacaattttaaaattgccattttcattgccctttaaaatggtataattagctctccagttagcagtattcactaagtccttatcctcaacagtaactcgtaagatttccacatcaactgtattttcttccactgatgtcacataagaagtacgagtaaatgttggcaagtggtcatttacatcatcaatgttaatgatacaagttgaagttgtctgtagaccaaaatactgaccatccatgtcttgtacttttattttcaactggtacttgtcaattaactctctgtctagctgagatgatgttgtggtgatcacgcctgtagttggatgcatagaaaatagggtgggtgatggtggcacctgcccaatgatggagtacttcaggcgtgtgtgcatcgtgtcaggctcatctttgtcagtagcacacacttgtcccacagtagtgcccactctgcaattttcaaaaattgtaaaagtataagtttcttctgtaaaaattgggtagttatcattttcatcctctattttgattattaggggcagtggaagttctggagtatacccatctggagttgttgcaaaggcaattatctcaaaagattcatactgctcacgatctacaggacgagtacaatacaagtttccagtgtctctctccacataaaataaattccgaggttcttggtcaactccaggacctcttatggaatagtatatggtatagttttgggccgtgtcagattgaacctgttgaaggaaaagtggaaaaggacccaaggagttttctagcatcgaacaaggaattggagcccatcttctcttggcgcgccttagaactttttctttagtatgtcttttctttaggacctttgtttgatgctccaaaaagacaaatattttcttcttttcttggttctcagtgttggaaagtaatatggtaaaacttctcttctccgaggacaatagaatagtatttgttgtatagactgaaccatcctccaaaatttggaagtcaggatcacttgaatgaattagatttgcagctgtaaagcactctttcaggttaactctaccaacaagtttctcggcatctagtttggagggaacatgtaatgtcacatttttgcaggcatcactggcaaatattaagaacgcgaagggtcaccaggaagcagccggcagagggctccgttccaggagccggaggggcgggctgcctccatggagagggctcggggcaggtcgcgggccgagcgtcgggccgggggttaggagggctccgcgggggcgagggccgcggccggagcgcagtctgggcccgctgctcaggaggagcgcgaggcggaggaggtggggcgcgcggagaggtgcttttcttagcttctctgaagcgcctgcctctcatc

SEQ ID NO: 60605 - DNA, 4407 bp, Homo sapiens
tttcgtttctcgcgcggatggtgaagctgaatttggttcgctttaccctcggacaggagagcacggctgggcacggggggactcaccgccagtgagagtagggacgaaggctcagggaaggcgagcttcggtccaagccgttggggtgtggggaggggaatccatttcgtagacagctctgccgaggcacggagaggggcggtgctgcttggggtcaactgggatttagggcttggattcatttaagaacctgagcttccttcaccaaacctagacagcaagagagagacaagcccgaggcctgacttctagcactcctgagtttgagccctatgagcagtggaacctagggaccaccaaggatccagatataattctttcctcagtaatagaaaaaagaatctgggatctaagaagatacctactcattttctaagtgactggccatgtcattgtcccacttataccgggatggggaaggccgcattgatgatgatgatgacgagcgggagaactttgagatcactgactgggatctccagaatgagttcaaccccaaccgacagcgccactggcagaccaaggaagaagccacctacggggtgtgggcagagcgagactcggatgatgagaggcccagctttggaggcaaacgggcccgtgactactctgcgccagtcaacttcatcagcgcagggctcaagaaaggggcagcggaggaggcagagttggaagattctgatgacgaagagaaacctgttaagcaggacgactttcctaaggattttggaccaaggaagctaaaaacgggtggcaattttaagcccagccagaaaggttttgcaggaggaaccaaatctttcatggacttcggcagctgggaaagacacacaaaaggaattggacagaagcttcttcagaagatgggctacgtccctggacggggcctcgggaagaatgcacaaggtatcattaacccaattgaagccaagcagagaaagggaaaaggtgctgtgggggcttatggatccgagcgcaccactcagtccatgcaagacttccctgtggttgactcagaggaagaagctgaagaggagtttcagaaggagctgagccagtggaggaaagacccaagtggaagcaagaagaagcccaaatactcttacaagaccgtggaagagttgaaggccaagggcaggattagcaagaagctcactgctccccagaaggaactttctcaagtcaaggtcatagacatgacaggccgggagcagaaggtctactacagctacagtcagatcagccacaagcacaacgttcccgatgatgggctgccgctacagtcccaacagctgccacagtctggcaaagaggccaaggcccccggcttcgcgctgcccgagctggagcacaacctgcagctgctcatcgacctcacggagcaggagatcatccagaatgaccggcagctacagtatgagcgggacatggtggtcaacctcttccatgagctggagaagatgaccgaggtcctggaccacgaggagcgggtcatctcgaacctcagcaaggtcctggagatggtggaggagtgcgagcggcggatgcagcccgactgcagcaaccccctcaccctggacgagtgtgcccgcatcttcgaaaccctgcaggacaagtactatgaggagtacaggatgtccgaccgtgtggaccttgctgtggccatcgtctatccactcatgaaggagtacttcaaggagtgggatcccctcaaagactgcacttatggcaccgagatcatctctaagtggaaaagcctcctagagaatgaccagctcttgtcccatggcggacaggacctctcagcagatgcctttcacaggttgatatgggaagtctggatgccttttgttcgaaatattgtcacccagtggcagccaaggaactgtgacccgatggtggactttttggatagttgggtgcacattattcctgtgtggatcttagataacatactggaccaactcatcttccccaagctgcaaaaggaggtggaaaactggaacccgctcacagacactgttcccatccactcttggatccacccatggctgccccttatgcaggcacggctggagccactctattcccccatccgtagtaagctgtccagcgccctgcagaagtggcaccccagcgactcctctgccaagctcatcctccagccctggaaggatgtcttcactcctggctcctgggaagcattcatggtcaaaaacatagtgcccaagctggggatgtgtcttggtgagctagtcattaacccccaccagcagcacatggatgcattctattgggtgattgactgggaagggatgatctctgtctctagcctggtgggacttcttgaaaagcacttcttccccaagtggcttcaggtgctgtgctcttggctcagtaacagcccaaattatgaggagatcaccaagtggtacctgggttggaagtcgatgttctcagaccaagtgctggcacatccatctgtcaaggacaaatttaatgaggcacttgatatcatgaaccgggcggtgtcctccaacgttggtgcctacatgcagcccaggagcacgggagaacattgcctatctcacccacacggagcggaggaaggacttccagtacgaggccatgcaggagaggcgggaggctgagaacatggctcaaaggggcattggcgtggccgctagctctgtgcccatgaactttaaggacctcattgagaccaaggctgaggagcacaacattgtcttcatgcccgtcattgggaagcgacacgaagggaagcagctctacacctttggccgcattgtgatctacatcgaccggggagtggtctttgtccagggcgagaagacgtgggtgcccacctcactgcagagcctgatcgacatggccaagtgaactgtggcaggtccagaaccagtcagagacttgcccctaagagggatgtactgtaaataaacagtatttttagatcaccttcaaaagggtaacttctttactcaggagctactccacatcaggccaggtcatgagggaaggatgtaaaacgggacaatgccacggtagggcaggaatctttataccaagtcctcatgtggggtatcgtcctcaaaacaggacagccaagttgatgttctttcctggcaaaggagttctctggtagttcctccatagcagccttccctttagtctctggtggcagcttctacctcagccaacactgagtacctcacaacgagttcagtcagtagcagaaggatcttctctcttgttcctgatgatttcaaggtcctcacagtcctgataatctggttcttcccgaaactccccaaatatcctatggagagctggttctagcttttgcacagggaaccagtggacagaggtatcattaaatatgtccatgtattgtgaagtctgaggaaactcaagctcctccagtccttttaaaatctgagcagaaaaattcaagtataaaaacttcagatagtcacagtaatccccactcttttgggataaatttccactttacttgtcatccccactttactttttaaaaaaataacaaatagggtattttgatttaaatgcttttgcccaatgaattggggcgccccaaggacagtggatatcatggactgtgatactaagaataaaggaaataaggaaaaaacttagagatgcatttaagagtcatagctttctggaacacagacccatggagagagctgacagtacacttgcgccacttaggccatgagtttcctcctacggctgtaaagaaagatagaattcttctcagtttcacacccttttccatcccagcccctttattcagatagatacctttgcaatgtagggataatttttctgcagaatccttgccaacaacctagaaattaaaaaaaaccaaaaaaacaaaaaaaaaaaccatgattaggaggtatgaggatagtttcattcaacttttaaaacacataaaagggcaagatgattgaagcatagtaagaattcaggaaaaaactcaagatgtggagtaaaccagttaaatagttgaaaatgtgggccaggcgcaggtaatcccagcacttcaggagactgaggcgggcggatcatttgaggtcaggagttcaagaccagcatggccaacatggtaaaaccccatctctactaaaaatacaaaaatcagccgggcgtcctggtgtgcatctgtaatcccagctactcattaggctgaggtaggagtatcgcttgaacccaggagacagaggttgcagtgagctgagaccataccactgcactccagccggggggacagagtgagactccatctcaaaaaaaaaa

SEQ ID NO: 60606 - DNA, 5361 bp, Homo sapiens
cccacgcgtccgcttctgcacagggtatcgcctctctccgtttggtacatcccctcctcccccacgcccggactggggtggtagacgccgcctccgctcatcgcccctccccatcggtttccgcgcgaaaagccggggcgcctgcgctgccgccgccgcgtctgctgaagcctccgagatgccggcgcgtaccgccccagcccgggtgcccacactggccgtcccggccatctcgctgcccgacgatgtccgcaggcggctcaaagatttggaaagagacagcttaacagaaaaggaatgtgtgaaggagaaattgaatctcttgcacgaatttctgcaaacagaaataaagaatcagttatgtgacttggaaaccaaattacgtaaagaagaattatccgaggagggctacctggctaaagtcaaatcccttttaaataaagatttgtccttggagaacggtgctcatgcttacaaccgggaagtgaatggacgtctagaaaacgggaaccaagcaagaagtgaagcccgtagagtgggaatggcagatgccaacagcccccccaaacccctttccaaacctcgcacgcccaggaggagcaagtccgatggagaggctaagcctgaaccttcacctagccccaggattacaaggaaaagcaccaggcaaaccaccatcacatctcattttgcaaagggcccctgccaaacggaaaacctcaggaagagtctgaaagagccaaatcggatgagtccatcaaggaagaagacaaagaccaggatgagaagagacgtagagttacatccagagaacgagttgctagaccgcttcctgcagaagaacctgaaagagcaaaatcaggaacgcgcactgaaaaggaagaagaaagagatgaaaaagaagaaaagagactccgaagtcaaaccaaagaaccaacacccaaacagaaactgaaggaggagccggacagagaagccagggcaggcgtgcaggctgacgaggacgaagatggagacgagaaagatgagaagaagcacagaagtcaacccaaagatctagctgccaaacggaggcccgaagaaaaagaacctgaaaaagtaaatccacagatttctgatgaaaaagacgaggatgaaaaggaggagaagagacgcaaaacgacccccaaagaaccaacggagaaaaaaatggctcgcgccaaaacagtcatgaactccaagacccaccctcccaagtgcattcagtgcgggcagtacctggacgaccctgacctcaaatatgggcagcacccaccagacgcggtggatgagccacagatgctgacaaatgagaagctgtccatctttgatgccaacgagtctggctttgagagttatgaggcgcttccccagcacaaactgacctgcttcagtgtgtactgtaagcacggtcacctgtgtcccatcgacaccggcctcatcgagaagaatatcgaactcttcttttctggttcagcaaaaccaatctatgatgatgacccgtctcttgaaggtggtgttaatggcaaaaatcttggccccataaatgaatggtggatcactggctttgatggaggtgaaaaggccctcatcggcttcagcacctcatttgccgaatacattctgatggatcccagtcccgagtatgcgcccatatttgggctgatgcaggagaagatctacatcagcaagattgtggtggagttcctgcagagcaattccgactcgacctatgaggacctgatcaacaagatcgagaccacggttcctccttctggcctcaacttgaaccgcttcacagaggactccctcctgcgacacgcgcagtttgtggtggagcaggtggagagttatgacgaggccggggacagtgatgagcagcccatcttcctgacgccctgcatgcgggacctgatcaagctggctggggtcacgctgggacagaggcgagcccaggcgaggcggcagaccatcaggcattctaccagggagaaggacaggggacccacgaaagccaccaccaccaagctggtctaccagatcttcgatactttcttcgcagagcaaattgaaaaggatgacagagaagacaaggagaacgcctttaagcgccggcgatgtggcgtctgtgaggtgtgtcagcagcctgagtgtgggaaatgtaaagcctgcaaggacatggttaaatttggtggcagtggacggagcaagcaggcttgccaagagcggaggtgtcccaatatggccatgaaggaggcagatgacgatgaggaagtcgatgataacatcccagagatgccgtcacccaaaaaaatgcaccaggggaagaagaagaaacagaacaagaatcgcatctcttgggtcggagaagccgtcaagactgatgggaagaagagttactataagaaggtgtgcattgatgcggaaaccctggaagtgggggactgtgtctctgttattccagatgattcctcaaaaccgctgtatctagcaagggtcacggcgctgtgggaggacagcagcaacgggcagatgtttcacgcccactggttctgcgctgggacagacacagtcctcggggccacgtcggaccctctggagctgttcttggtggatgaatgtgaggacatgcagctttcatatatccacagcaaagtgaaagtcatctacaaagccccctccgaaaactgggccatggagggaggcatggatcccgagtccctgctggagggggacgacgggaagacctacttctaccagctgtggtatgatcaagactacgcgagattcgagtcccctccaaaaacccagccaacagaggacaacaagttcaaattctgtgtgagctgtgcccgtctggctgagatgaggcaaaaagaaatccccagggtcctggagcagctcgaggacctggatagccgggtcctctactactcagccaccaagaacggcatcctgtaccgagttggtgatggtgtgtacctgccccctgaggccttcacgttcaacatcaagctgtccagtcccgtgaaacgcccacggaaggagcccgtggatgaggacctgtacccagagcactaccggaaatactccgactacatcaaaggcagcaacctggatgcccctgagccctaccgaattggccggatcaaagagatcttctgtcccaagaagagcaacggcaggcccaatgagactgacatcaaaatccgggtcaacaagttctacaggcctgagaacacccacaagtccactccagcgagctaccacgcagacatcaacctgctctactggagcgacgaggaggccgtggtggacttcaaggctgtgcagggccgctgcaccgtggagtatggggaggacctgcccgagtgcgtccaggtgtactccatgggcggccccaaccgcttctacttcctcgaggcctataatgcaaagagcaaaagctttgaagatcctcccaaccatgcccgtagccctggaaacaaagggaagggcaagggaaaagggaagggcaagcccaagtcccaagcctgtgagccgagcgagccagagatagagatcaagctgcccaagctgcggaccctggatgtgttttctggctgcggggggttgtcggagggattccaccaagcaggcatctctgacacgctgtgggccatcgagatgtgggaccctgcggcccaggcgttccggctgaacaaccccggctccacagtgttcacagaggactgcaacatcctgctgaagctggtcatggctggggagaccaccaactcccgcggccagcggctgccccagaagggagacgtggagatgctgtgcggcgggccgccctgccagggcttcagcggcatgaaccgcttcaattcgcgcacctactccaagttcaaaaactctctggtggtttccttcctcagctactgcgactactaccggccccggttcttcctcctggagaatgtcaggaactttgtctccttcaagcgctccatggtcctgaagctcaccctccgctgcctggtccgcatgggctatcagtgcaccttcggcgtgctgcaggccggtcagtacggcgtggcccagactaggaggcgggccatcatcctggccgcggcccctggagagaagctccctctgttcccggagccactgcacgtgtttgctccccgggcctgccagctgagcgtggtggtggatgacaagaagtttgtgagcaacataaccaggttgagctcgggtcctttccggaccatcacggtgcgagacacgatgtccgacctgccggaggtgcggaatggagcctcggcactggagatctcctacaacggggagcctcagtcctggttccagaggcagctccggggcgcacagtaccagcccatcctcagggaccacatctgtaaggacatgagtgcattggtggctgcccgcatgcggcacatccccttggccccagggtcagactggcgcgatctgcccaacatcgaggtgcggctctcagacggcaccatggccaggaagctgcggtatacccaccatgacaggaagaacggccgcagcagctctggggccctccgtggggtctgctcctgcgtggaagccggcaaagcctgcgaccccgcagccaggcagttcaacaccctcatcccctggtgcctgccccacaccgggaaccggcacaaccactgggctggcctctatggaaggctcgagtgggacggcttcttcagcacaaccgtcaccaaccccgagcccatgggcaagcagggccgcgtgctccacccagagcagcaccgtgtggtgagcgtgcgggagtgtgcccgctcccagggcttccctgacacctaccggctcttcggcaacatcctggacaagcaccggcaggtgggcaatgccgtgccaccgcccctggccaaagccattggcttggagatcaagctttgtatgttggccaaagcccgagagagtgcctcagctaaaataaaggaggaggaagctgctaaggactagttctgccctcccgtcacccctgtttctggcaccaggaatccccaacatgcactgatgttgtgtttttaacatgtcaatctgtccgttcacatgtgtggtacatggtgtttgtggccttggctgacatgaagctgttgtgtgaggttcgcttatcaactaatgatttagtgatcaaattgtgcagtactttgtgcattctggattttaaaagttttttattatgcattatatcaaatctaccactgtatgagtggaaattaagactttatgtagtttttatatgttgtaatatttcttcaaataaatctctcctataaaccaaaaaaaaaa

SEQ ID NO: 60607 - DNA, 1734 bp, Homo sapiens
ggcacgaggggccgcagctcctccggctctgcagggtcacggaggaagccagctcccctagtccaggccgagcttgcacttgcgtcttgtctgctgctgctgaaccaagatttagctgtgcgccctccttgcagtctcctggaaccagcaggaggaaacatgggggatactggcctgagaaagcggagagaggatgagaagtcgatccagagccaagagcctaagaccaccagtctccaaaaggagctgggcctcatcagtggcatctccatcatcgtgggcaccatcattggctctgggatcttcgtttcccccaagtctgtgctcagcaacacggaagctgtggggccctgcctcatcatatgggcggcttgcggggtcctcgcgacgctgggtgccctgtgctttgcggagcttggcacaatgatcaccaagtcagggggagagtatccctacctgatggaggcctacgggcccatccccgcctacctcttctcctgggccagcctgatcgtcattaagcccacgtccttcgccatcatctgcctcagcttctccgagtatgtgtgtgcgcccttctatgtgggctgcaagcctcctcaaatcgttgtgaaatgcctggccgccgccgccatcttgttcatctcgacagtgaactcactgagcgtgcggctgggaagctacgtccagaacatcttcaccgcggccaagctggtgatcgtggccatcatcatcatcagcgggctggtgctcctggcccaaggaaacacaaagaattttgataattctttcgagggcgcccagctgtctgtgggagccatcagcctggcgttttacaatggactctgggcctatgatggatggaatcaactcaattacatcacagaagaacttagaaacccttacagaaacctgcctttggccattatcatcgggatccccctggtgacggcgtgctacatcctcatgaacgtgtcctacttcaccgtgatgactgccaccgaactcctgcagtcccaggcggtggctgtgacatttggtgaccgtgttctctatcctgcttcttggatcgttccactttttgtggcattttcaaccatcggtgctgctaacgggacctgcttcacagcgggcagactcatttacgtggcgggccgggagggtcacatgctcaaagtgctttcttacatcagccgtcaggcgcctcactccagcccccgccatcatcttttatggtatcatagcaacgatttatatcatccctggtgacataaactcgttagtcaattatttcagctttgctgcatggctgttttatggcctgacgattctaggactcatcgtgatgagatttacaaggaaagagctggaaaggcctatcaaggtgcccgtagtcattcccgtcttgatgacactcatctctgtgtttttggttctggctccaatcatcagcaagcccacctggggagtacctctactgtgtgctgtttatattaaggcggccttttattttacttcctgtttgtccactacaagtttggatgggctcagaaaatctcaaagccgattaccatgcaccttcagatgctaatggaagtggtcccaccggaggaagaccctgagtaacaagctccgtctcttgtagccaagtcagctgaatttattttcttaagcaatatttgtggttatttcttcctttttttcctacgaataaaatatactcagatgtttaaa

SEQ ID NO: 60608 - DNA, 884 bp, Homo sapiens
ggcacgagcctgcagggcctcagagaagcatgggaaagcccttcaggtgttaggggaaggtgattttgagttgttccttcactttgttgaatgtctctgaaatccagttctggggcttggcaggaatgttgccgcttgcagtggctgccgttcagcttatctgggatgtgtcccaagatgctggagttgtctggggccatccagactggggctgggatttccacacccatggagccacgactaggactgggagtgacagaacgagtttgggggtgctgccagaggggcactctagattgttcttgggatagcacaggttcccagatacagttctaagccattgaggggctaggagcagaatcgtcttagtggaggtgattgctaactctgaggtgtacttgccatgagccagttgctgttaggggatgagctgattcctgtcactcccactttagaggggatgctgacacagctagtgagaggtggggcagggacttgaacctctattctttagctatagaacttctgtccttaaccactatgctatgcctaaaatctgaggagacttctggtaggactctttctcccacagcccaaaggaaaaaggaagccccaagaaatgttttatcttagggaaactttcttggaaccacttccttccctcaggcctgcactggtttttgtagtgactctaaggatgtctgtcatgcaaggatgtgttacctatggccccatgtcaggagaatgattaggttcctgtgaagtttaaaaaaaatcctgttagatactagagatacacagtaactgccatatattactttctacatgcaaggcacttgtacagaggttgaaaagatgtctccatttaagcgtccatttaagcc

SEQ ID NO: 60609 - DNA, 2054 bp, Homo sapiens
  misc_feature (1)...(2054): n = a,t,c or g
cggccgcgtcgacccgcaccatggggtcccgccacttcgaggggatttatgaccacgtggggcacttcggcagattccagagagtcctctatttcatatgtgccttccagaacatctcttgtggtattcactacttggcttctgtgttcatgggagtcacccctcatcatgtctgcaggcccccaggcaatgtgagtcaggttgttttccataatcactctaattggagtttggaggacaccggggccctgttgtcttcaggccagaaagattatgttacggtgcagttgcagaatggtgagatctgggagctctcaaggtgtagcaggaataagagggagaacacatcgagtttgggctatgaatacactggcagtaagaaagagtttccttgtgtggatggctacatatatgaccagaacacatggaaaagcactgcggtgacccagtggaacctggtctgtgaccgaaaatggcttgcaatgctgatccagcccctatttatgtttggagtcctactgggatcggtgacttttggctacttttctgacaggctaggacgccgggtggtcttgtgggccacaagcagtagcatgtttttgtttggaatagcagcggcgtttgcagttgattattacaccttcatggctgctcgcttttttcttgccatggttgcaagtggctatcttgtggtggggtttgtctatgtgatggaattcattggcatgaagtctcggacatgggcgtctgtccatttgcattccttttttgcagttggaaccctgctggtggctttgacaggatacttggtcaggacctggtggctttaccagatgatcctctccacagtgactgtcccctttatcctgtgctgttgggtgctcccagagacacctttttggcttctctcagagggacgatatgaagaagcacaaaaaaatagttgacatcatggccaagtggaacagggcaagctcctgtaaactgtcagaacttttatcactggacctacaaggtcctgttagtaatagccccactgaagttcagaagcacaacctatcatatctgttttataactggagcattacgaaaaggacacttaccgtttggctaatctggttcactggaagtttgggattctactcgttttccttgaattctgttaacttaggaggcaatgaatacttaaacctcttcctcctgggtgtagtggaaattcccgcctacaccttcgtgtgcatcgccatggacaaggtcgggaggagaacagtcctggcctactctcttttctgccagtgcactggcctgtggtgtcgttatggtgatcccccagaaacattatattttgggtgtggtgacagctatgggttgggaaaattttgnccatcggggcagcatttgggcctcatttatctttatacagctgagctgtatccaaccattgtaagatcgctggctgtgggaagcggcagcatggtgtgtcgcctggccagcatcctggcgccgttctctgtggacctcagcagcatttggatcttcataccacagttgtttgttgggactatggccctcctgagtggagtgttaacactaaagcttccagaaacccttgggaaacggctagcaactacttgggaggaggctgcaaaactggagtcagagaatgaaagcaagtcaagcaaattacttctcacaactaataatagtgggctggaaaaaacggaagcgattacccccagggattctggtcttggtgaataaatgtgccatgcctgctgtctagcacctgaaatattatttaccctaatgcctttgtattagaggaatcttattctcatctcccatatgttgtttgtatgactttttaataaattttgtaagaaaattttaaagcaaatatgttataaaagaaataaaaactaagatgaaaattctcagttttaaaaactgctttcttattgctgcaaaatatttttcaacatttgtttttctatgtagttgattctcaacctttccccaccacccccctaccaagctcgtgccgaattctgcgc

SEQ ID NO: 60610 - DNA, 2604 bp, Homo sapiens
ggaattcgtgctccgcctccggtcttacgtttcgcccccggcagcgccgacagcggacccaagatggcgaccgagttggagtacgagtctgtgctgtgtgtgaagccagacgtcagcgtctaccggattccgccccgggcctccaaccgcggttacagggcctctgactggaaattagaccagcctgattggactggtcgcctccgaatcacttcaaaagggaagactgcctatatcaaactcgaggataaagtttcaggggagctctttgctcaggcaccagtagaacaatatcctggtattgctgtggagacggtgacagattctagccgctactttgtaatccggatccaggatggtactggtgggtaaagcaggaatctgagatttccaaggaatctcaagaaatggatgctcgtcctaagttggatctgggcttcaaggaaggacaaaccatcaagttgtgtatcgggaacattacaaacaagaaaggaggtgcttctaagcccaggactgcaaggggtgggggtctgagcttactcccacccccgccaggaggcaaagtcactattcccccaccatcctcctcaagttgccatcaaccaatcatgtcaccccaccatccattccgaaatctaaccatggaggcagtgatgcagatatccttttagatttggattctcctgctcctgtcacgacaccagcaccaactccagtttctgtaagcaatgacttgtggggagacttcagcactgcctccagctctgttccaaaccaggcaccacagccatccaactgggtccagttctgaatggcattggcaggacattaaggacagacttgaggaataaaaatgaccttgagggcaccaatctgtgagggaagttaggaacccatttcctccccagaaccagaatgactggacaatctttttcatagcttctccatcacattcaagctggtttatgtcactcccctgtgttgttacttgtacagccaagaaagtatctgttatctcctgcgtagtaccaaggtagggggactagttggatcttattatagttttgggctggactatgcagggcttaaaaggccagcgtctgtttgagggggaatgacctctaacatctgtaaaatttgtctcatcttttaatttctttaacttatttcaaaatcatctcatgacccttgtgtgcctctttgtgaagccctatttagcaatttcaggggagtcaaaaaccttgcaacttccttctccactaacccaggactaaaaatggacaggctgacctcagtgtttacaaattcagaattttgataggggtagatatggagaaagacctatttcctgggtctctgctgtgtagtctccttcaggcttattgtgctcagtgaacatccagtgctgggtgcagctccatcaccctcttgtgtgtttacatgtctctttctatgataagagggttgtgttggtggcacctccactactcttttctgtttgttgagtttgaattgtgtaacatctttgatcagtgggtgtatctgtaatgaaggaggttcaagaggctgtgctttccaagtgatagtctataggagtgtttaatttcttgcagctccatctggttgctgcatttgaagcatggcattaatttgtatttgccctgttctttgacctaaagttgaagggtttagagtttttaacctgatctgtagagcagagaggttgaaagcacttaactcttgtttagtatcctcattgccttgctgcctgggtatctggcccctttccataaacatttcttttcagttcatgtagttctttaatagaaagctgctattatgtatattgtcatttgtgaaggaagttggagagtcacagctttactgtgacaggttttgcccaaggctttgatacctgtcacccagggtatcttaaaagcaagttgttctcccactactttcctttccctctgccctgccattcctattacaatgctgtgaaaaaagttctgcttcttaggtgaatgggtactttctattttgtttctaaacgagcaattttgaggatgaaatgggaagatatcattgcttcctttttgcacctattgggtatgtacactctggccgaagggagtccttatgtttagtttcaaaatatattactttcctggattctcttcttcactttttctgactttgggtccattttcttttcattgcctccttttccaggcagctctattcttgcagagccatagcaggacatgttaaaattccaatagaaaacactaaaaggaaagtctgtggaatcactagtgactaaatactgggaacctattttctcaatcttcctccatgttgtgttctttgtattcttgagatgataatatattatgtatttgaattcctgaaaaatggaaaatgtttaagatatatgtatataaatgattatgctgtattggtgcaataatggtaattaaaaatatgaaaaaaagtgtctcttttatcttttaatttgcttatttgattaccttttaaatttaattgaccaaatataagtggaccagtagttaataaaggatatttatatcactctttattaag

SEQ ID NO: 60611 - DNA, 4446 bp, Homo sapiens
cgaccggctggagttacgggccgacgacttcgttggcgttcctggctcctcgggattttccttttcctcctaagctgctgattcatccccaggctgttgtcaggctcagctgtggggctgggagcatgggctctcaggctgctgctgagtggaggaactgggcctcctgggaggggtcctccagcctctctggatgctccatggggtgcttcaaggatgaccgcatcgtcttctggacttggatgttctccacctacttcatggagaaatgggctccccggcaggacgacatgcttttctatgtgcgccggaagctggcgtactccggcagcgaaagcggtgcagacgggaggaaggcagctgagcctgaggtggaggtggaggtgtaccggcgggactccaagaagctgccaggcctgggagaccctgacatcgactgggaggagagcgtctgcctgaatctcatcctgcagaagctggactacatggtgacctgtgcggtgtgcacacgtgctgacggcggggacattcacatccataagaagaaatctcagcaagtgttcgcgtcccccagtaaacaccccatggacagcaagggggaggagtccaagatcagctaccccaacatcttcttcatgattgacagcttccgaggaaggtgttcagcgacatgaccgtagggaaaggagagatggtctgtgtggagctggtggctagtgacaaaaccaacacgttccagggggtcatctttcagggctccatccgctacgaggcgctcaagaaggtgtatgacaaccgggtgagcgtggccgcccgcatggcacagaaagatgtcgtttggcttctccaagtacagcaacatggagttttgttcgccatgaagggcccccagggcaagggccacgccgagatggcggtcagccgagtgtctacaggtgacacatccccctgtgggactgaagaggactccagcccagcttcgcccatgcacgagcgggtgacctccttcagcacaccccccaccccagaacggaacaaccgtcctgccttcttctccccatccctcaagaggaaggtgccgcggaaccggatcgctgagatgaagaagtcgcactcggccaacgacagcgaggagttcttccgggaggacgacggtggagccgatctgcacaatgcaaccaacctgcggtctcggtccctgtcgggcacaggacggtccctggtcgggtcctggctgaagctgaacagagcagatggaaacttccttctctatgcacacttaacctacgtcacgttgccgctgcatcggattttaacagacatcctggaagttcggcagaagcccatcctgatgacctagccgcgtgcggagcctgcgcagagccccggccgggcccagccctcggagtgctgccaagtgcctacctgtccaccgccaccggggtctgcgatggcacgccagtgctggagccgcagccaggcgaggccactcgactcccggggccggggccgactccacgaacaccagcccaaactgaagtgcctcttccctcccctgctggcgctgctccgccctgtgccccccgcccatcgccccccacccatctctggagagccctctgcacccaaagaggactagagatgccgagcggccatgagagagagcggaaggagcagctgatgcccagagcggggccagagcggcgggtctatgttcacgtccccccagcagcaggcggaaccacccagccagggcactcagtgcattggactgtccacatgttcttgaggaaagccggtggaagattctggaatgccgtgcggatgaacttcagcacccgagtcagtcccagctcatcctccccagtttaccactttgttctaataggagatgggaacacgagaagtttgatggctttgccctgggctgggaatacctcacccacgcccagttccagaaaggcctccagctgagcagacggccccgatcccgccagaacggccttttgcttccagccaaagaacaccgccaacacgcacacctccaacctgggacatcccacgctgggcctcgcacggaggaacctgcagaatttggattctgagggtagtcgggaggcctcggtagccaggcagaacaggatatctgccaaagggtgtctgatgtggggtggggctggcatcctcccaggaaggttctaggtgggaccccgtcttctgggggcgggggtgtcttttcatcttccctggtttcctagaactcacttcctttgacggcgtgtgttggtcccatctctcagaccagctcactgaggcagaggagttgctcagaggctcacatgggcacccccattggttcgtgtgagcagctgcccagccccaggcctgccctcggcctggtccagcatgaaggcgtttccatctgcaaggatgcacggtaccctccccgagagcaggcctgtcccctacccaactgggaataaactggaagctgggtctctttgttgctatgtttttttgtttgaagttcccaggaatatttgaggggttccggtgatgtgtttagggatcttctctgtgggggaaaaggaagaggagggtcttgttctcccatctgtttattctttgggctctgggaacaggggactactttggggctttctccagacttttgtatgttgttattaaaagcgagctattgcatttcattctgcctcagtttgcccacctgtgaaatggggctgataccacctacctcactgaagtcccagggttcaagtgtgtggctgggtcagggcgtggtcacccgtcattctgcataggtcgggttggatgttagactcctgggatgccctcctcccccctcgccctttgtaataacctaatctgagaccgtgcttggtggggggatgtgaactttctctctcccccagcagtgtctgctcaggcctgacagctcagctctgcacgatttcatgttcctaaacccatgtcttagggcagcacagagccaggtcatgtcatgccccaaagtgtggggacagagcctcagggagccccgagcatggtccagccccatttgagtgctctccggggatgccaaatgctgcttccaagtttgagtccatgtggctaaaatacacccatttcttcaggaactcttcccctggttgttctggggatcttgggagaaacacagccctgacagctcgtccgtgggaagatgaggcagtccaggttgtgaggagcacagcggcccgccctctgttctcagaggtgaggggcgggagaaggttgtctcctctggggccagcatttggccaagctcggaggcttggccagcactgctggatggctcagagcaagctgggctccccgtctgtaagatggcaaaaatgctgcccccctcacagggtgaccatgaggaccagtcacagtgatgtgtgaaagggctcgctggtcacagaaacgtgtacaaatcatgctattttagagatcagccctcaatttgtaaggcatgtgaacagggcacgcggtgggctggtggtttcatagccgacacacagcgcctaccatgtgcagctgcctgtccgaccccatcttacagacgagaaaaccagcacacaggcaccaaggaactgtccggaactaacagcaggggccggcgatgggagtcaaacccaggcacgcggcctggcctgcatgctgagccacatggtgctgtccggacagatggacagacactcggtggagtctgcctttctcaggccctaaatccctctccaaagggtacttgcgatgccggatttaaaacttgctcagagccacttagccacttgagaaccagacagtaaggtgttactcccaggtttgtttttccaaagtaacagatgacatgtggaataaagtaatagagtaacaagtggcagggccagaaccagggtccccaaagtcctggtgttggcacatttgtacttcttgtaagaccatctttaatttttctgggaacacacctgccttttgtgtaatgcggggaagactaatgcatggtgacacctagttttcctcaacaggacacttgatcccaaaacccctttaagaccttaggtttcctcagcggaaaactgtactttaatcccaaaccccctttaagacatattggggctgggcgcagtggctgcacgcctgtaatcccagcactttgggaggctgagatgggtggatcacctgagatcaggagttcaagaccagcctgactaacatgctgaaaccccatgtctactaaagatagaaaaattagccggacatggtggcaggcacctgtaatcccagctactcggaaggctgaggaaggagaatcacttgaacctagtaggcagaggttgcagtgagccgagatcacgccattgcattctagcctgggcaacgagagcgaaactctgtctc

SEQ ID NO: 60612 - DNA, 3941 bp, Homo sapiens
ttttttttttttcaagtatatttactctttattgcattccttcatttgcattaaacaatattttttcaatacagttttggacaaaacacaaagacattaagctcatttaacaagagacataagttaacacaatgtgtgctgctttcatgaggaggaaagaggcaagatcttagaggaatccaggatactggccaccaggaatcacaggatctcacaatacaatccacttctttaaaagccacaaaataagctagggaagaaaacccaaaacaaagaagatatgacatccaagtctccaccaaaagtatacaaatggcaagatttggagatgatctgctttctcacatgaggacaaataacagaggagccacacccaagtgccactgtggccacaagcctcatgggtggcgtgtgaggtaagcaccttaggatggcttctaattgcttgtccttgcattttaagcagcagttgggagagagaggcacactccataagtctcatcaccaaatatgacctaattaaattcctgctaagtcagtcagttgtaagacaaatcaccctcaaaaggactcaacgggtgcttccttttggaagaagtgtgtggagggtaaaggaaatgtgttcaatgtattggaatggacaataaaggactgagggagagggctagaaaatgattgatttttctggagaatagtgttttagacactagatagtacagatcatttaaaataaaggataaattctaagtaagtcattaagctaaggaaaaagcagtgatactagtaagccttaatattatactaaggaattgacccacttggagttggacactaattagtgctgagaggtttgtaaattactttaataactcctttctgtttgggggtgtatgctttttccatacctatctttcacatgtttttaacaacatcttctaagtggtaataatgagcatatctcttaccacagagcaaattagttatacttaaggggaagtcacaacccaacacggtagtcatctgactttctattaagaaagatcttcttgactgcaacttgaaaacatctctgacaatgattgagaacagcattttagagattcaatgccttgtttcttcaggcaaagagaataccagtcttgtgggagacctttaaccaaatacccagtgacttttagtgttagctcaggacagctgtcagaggatctctggcccacacctcgatttactaagccagatttgcatgtagaaagtctgccttctaatcggccaactgttgtcatgcaacattcatgacactgactgagagttttcaagggtgatggtgctagtagagaggttgaaacgtgtagtgtccacaagtactggatggttcccacccagagggactgagcaagaaggaatcactttagcctgcatgggaaggtaagcgcagcattctaaaccaaattgacaccttccacgagacactaagctatctcagtatgcataaggaagggagttttattgcactaatcatgcagagcgagcacatgttgaaggtagagaacgttccacttagtccagtatcttgagtaagacagtgaagatcctaggccatcttcaccttggtcacttcccttggtcactgtgtgtttcaaatagttcattttcaatcaaaatcaagggggctagctccttcttctcttaagagggccaagaattttctcacacggtattcaggatccatctgtagggacatctcgatcagcattagtaacttcttgattcctatccagactttcttccctttgacttgctgtgcaattgtggtgcgttccttatccttgaagttgcccaaaagctccaaagcttccaacagctgctctcctgtggcaatgttgggcacgtggatggtggtgctgaaagcgttaagcatttccatctcctgaaggacatctttgcggctagtggtcccaatgataagaagcttgcggccctgaggaggtgcctttttcagtaaaacgagaagagcctgtaatacaagatttgaaaatcgagggccaatagggacgtaatcaagcaatctctcaatgtcatccacaaccacacaactgagctgggatttgtacgcatcatcaaagatcttcttcatggcctgacatttggctgtttcagaaaagccaatcattttatcaggagaacagatcttgatgaacgggaagttggattcctctgcaatttttgcagctaaagcagtcttcccactgtgaggagggccttccagaagcacgctgaccaatggtgtgcggtcactgttcttagtctgctgcaccagcagctccccatcatctagaactcgagtaactgggtcaccccatttgatgataccgttcataatgtaacttgcataatcttcttggtttgtgccaaaggctggtttgatatcattctccaaagaagcaaggaagtctcctctcgtcacttgcaggctttctgctttctccatgtccacttccactttagtactggcctttatgtgtctattcatagcagtggactgggctgctcgcaccagaccctccaattcagcaccactgaaattcttggtctccacggccagttctttaatgtctacatcagcagagagtaactgatgccctctcattcttgctgtgtggatgtgaagaatctgtagtcggcctttctcatctggcaagcctatctccattttaacttccagtcttccaggtctaagaagagcctcatctatcagatctggtctattggtcattccaatgactaggatgttgtttagctgctccacgccatcaattttggacagcaactggttgacaacagtgtcatgaactcccgtgctaccagccatgctccctctctgcttgcagatggcatcaatttcatcaaagatgatgatgtgcaaaccactgttagcaccaagcctcctttgctcctcttcagcatcagcaaaaagtttgcgaatgttagcctctgattctcccacatatttgttaaggatttctggcccattgaccactttgggctctcttgcattcaacatcttgccaatctgtcgagccaagagagtcttaccacaacctgggggtccatataacaggatgcctttaacatgtttacaacccatctgctccacaatctctggaggaaatactcgggaagcaaatgctcgtcggaaaatatctgaaaacccccttgtctagacctcctattcccattttttcaaagttccagtcaggattgataattgattggcgattttccttggttttagctttgccaataagattaagtgacgaattttctgctttttcaaatgcaacttgactgtttccaacaaccagtcctacttcaatcttctgccttttccctgtcgcaggctctcccttcaggatgctaggatccatggattcaatgtccttcaccagtaagccaaaaagcttttcattgaagctaaagacaagctgttgtcccactgagtaggcctggttgttgaattgctgaataaattctgctgccatcttgtcggtgtcataagggttggagtcaatgctttttttctgcaggaaatcaatctcgatggtcattgtgccaatacactgtttggctttgtcaaatgtatataaggagacttctatttcttgcccaatagaaagcccagcccattttctctgaggtaaactgaatgcaatgctccctggaaccaccgatggatgtgtcttcagtgtaaatgtgtacctgtgattgggagaggtcctcacaatcacatgctggccagactggaaatccttttcattcacaactgcacaattggttaaagataattcatctgtaggacatcttgccgcttgcatgctccggcccgccatcttcgcggacacgtccggctcggcggctgcagctctgcgctcggcaaaacgaaa

SEQ ID NO: 60613 - DNA, 3670 bp, Homo sapiens
cgggcgcgcgtcccgtccaggtccggagtaaccgccgccgccgccgccaaagctcgccaacatggcggacctggaggctgtgctggccgatgtcagttacctgatggccatggagaagagcaaggcgaccccggccgcccgcgccagcaagaggatcgtcctgccggagcccagtatccggagtgtgatgcagaagtaccttgcagagagaaatgaaataacctttgacaagattttcaatcagaaaattggtttcttgctatttaaagatttttgtttgaatgaaattaatgaagctgtacctcaggtgaagttttatgaagagataaaggaatatgaaaaacttgataatgaggaagaccgcctttgcagaagtcgacaaatttatgatgcctacatcatgaaggaacttctttcctgttcacatcctttctcaaagcaagctgtagaacacgtacaaagtcatttatccaagaaacaagtgacatcaactctttttcagccatacatagaagaaatttgtgaaagccttcgaggtgacatttttcaaaaatttatggaaagtgacaagttcactagattttgtcagtggaaaaacgttgaattaaatatccatttgaccatgaatgagttcagtgtgcataggattattggacgaggaggattcggggaagtttatggttgcaggaaagcagacactggaaaaatgtatgcaatgaaatgcttaaataagaagaggatcaaaatgaaacaaggagaaacattagccttaaatgaaagaatcatgttgtctcttgtcagcacaggagactgtcctttcattgtatgtatgacctatgccttccataccccagataaactctgcttcatcctggatctgatgaacgggggcgatttgcactaccacctttcacaacacggtgtgttctctgagaaggagatgcggttttatgccactgaaatcattctgggtctggaacacatgcacaatcggtttgttgtctacagagatttgaagccagcaaatattctcttggatgaacatggacacgcaagaatatccagatcttggtcttgcctgcgatttttccaaaaagaagcctcatgcgagtgttggcacccatgggtacatggctcccgaggtgctgcagaaggggacggcctatgacagcagtgccgactggttctccctgggctgcatgcttttcaaacttctgagaggtcacagccctttcagacaacataaaaccaaagacaagcatgaaattgaccgaatgacactcaccgtgaatgtggaacttccagacaccttctctcctgaactgaagtcccttttggagggcttgcttcagcgagacgttagcaagcggctgggctgtcacggaggcggctcacaggaagtaaaagagcacagctttttcaaaggtgttgactggcagcatgtctacttacaaaagtacccaccacccttgattcctccccggggagaagtcaatgctgctgatgcctttgatattggctcatttgatgaagaggataccaaagggattaagctacttgattgcgaccaagaactctacaagaacttccctttggtcatctctgaacgctggcagcaagaagtaacggaaacagtttatgaagcagtaaatgcagacacagataaaatcgaggccaggaagagagctaaaaataagcaacttggccacgaagaagattacgctctggggaaggactgtattatgcacgggtacatgctgaaactgggaaacccatttctgactcagtggcagcgtcgctatttttacctctttccaaatagacttgaatggagaggagagggagagtcccggcaaaatttactgacaatggaacagattctctctgtggaagaaactcaaattaaagacaaaaaatgcattttgttcagaataaaaggagggaaacaatttgtcttgcaatgtgagagtgatccagagtttgtgcagtggaagaaagagttgaacgaaaccttcaaggaggcccagcggctattgcgtcgtgccccgaagttcctcaacaaacctcggtcaggtactgtggagctcccaaagccatccctctgtcacagaaacagcaacggcctctagcacccagaaacagggagggtcctcgaggaggacacaccagggtctcagccttttggggtgaacgaggatgaggcatctgatctattcgctaccgggactcctccaggctcccgagaggagtcgggacccttcggcttggggtcagctcagctccctgccttgtcacatttgtctgcattagaaactactgaagaaataaaagttctttttctttgctacacactttggtacctatgaacctagaacttgaagtgactcctacttatcacgtaaatttttatgtctgatatcaaacacatcttagactccccagaatggaatttaaagatgttcagtgttgggtaacagattgccctaagcattgccacatattctgtctagtcactgctgattttctatgtctttgctccatactgctgggggatgggagagccacagtgtgtttcttttgtgcacttcgcaactgacttcttgtcctggggttaaaagttgaagatattttctgatgatattaaaagttgaagatatttctgcacttgggccctcctctgggagccgtacccacatgactgccctgcctctgaccagtctgttccggggccccctcagccaggtgggaatgacggacacgtactatccaagtgtatgggattaactaatcattgaaggcattcatccgtccatcactggaaagatttacagtgattctgaaggacaggccgtggagttttaggtttcaggggcaagagcagttttcaaaagtctttgagtccagtgtgcacgagtcgacaagcagtacctggcatgcaggagcactcatgggtgagtccgtctcaggtctcgacaattagcagttgtgtgacagtcattctggttccttctgcctgaccctgggagacatatcagtaatggatgtacaaaagcaggtctgttttatgtcttagtataatttcagatgaattgtattgaaaaaatgctgaggaatgaatgtgtcaaaatgggttaactgtgtatattgactttcatgtcgtcatgcatctgtcatgaatgaatgatactttgcactgggctgtacgacagtgaggaccttagggcatgaagcctttttcctggtcccagcagcatctgccctgtgaagtttgttttctcccactgcctccaggccccactgatacccccaaatagatgctgggttatgagaaccagcgaaatcccccatgtcatcagtcttaaaaaaaaaattttacaaatccacgtatttgtcccattcttggagtagttttagtgtatgtctttacattaactactaacagtataaataacttgacatcgtaattgtctgcatcctgtccttgatatttttagcagttccaaatctttgtttttgtatttgtttgctgtgttcatgggcaaagtaagtactttttaatgcagttattttgagagtttggaagataattaccaaaagggtccattatttcataagagttactttgcaaaaaaaaaaaaggggggttttttttttgggcaattccaccaag

SEQ ID NO: 60614 - DNA, 2933 bp, Homo sapiens
cggccgcgtcgacctctgtcagaaatggggtcggagccattcacctgtgtcaagcagtggaaatgctgtgggaagcaaagtcagcagtcgaaccttgcaggaggcagcaggaggagaaagaacatggcgggcgcatcagagctcgggaccggcccaggagcagcgggtggagatggagatgattcgctatacccgatcgcggttttaatcgacgagctccgcaatgaagacgtgcagctccgactcaacagtattaagaagttatcaacaattgccctagcacttggagtagaaaggacccgaagtgaattgttgccatttcttacagatacaatttatgatgaagatgaggtactattagctcttgctgagcagctgggaaatttcactggcctagtgggaggtcctgactttgcccactgtctgctgcctcctttggaaaatctggcaactgtggaagagactgttgttcgtgacaaggctgtggagtccctgagacagatctcccaggagcatactcctgttgctctggaagcttattttgtacctctggtgaaacgcttagcaagtggggattggttcacctctcgcacatctgcatgtggtttgttcagcgtttgctatcccagggcatcaaatgctgttaaagcagaaatcagacagcaattccgttccttgtgctcagatgacacaccaatggtacgacgtgctgctgcttccaaattgggtgaatttgcaaaagttttggaattagacagtgtgaaaagtgaaattgttccactgttcactagtctagcttcagatgaacaggattcagtgcgcctccttgctgtggaagcttgtgtcagtattgcccagttattgtctcaggatgaccttgagactttggtgatgcctacacttcgacaagcagcagaagataaatcttggcgcgttcgctatatggtggctgacagattttcagagctccagaaagccatgggtcctaaaatcaccctaaatgacctcatccccgcctttcagaacctacttaaagactgtgaagctgaagtccgggcagctgctgcccacaaagtaaaagaacttggtgagaacttgcccattgaagatagagagaccataattatgaatcaaattctgccttatataaaggaattagtatccgataccaatcaacatgtcaaatcggctctagcttctgtaattatgggattgtctactattttgggcaaagaaaataccattgaacatcttctacctcttttcttagctcagttaaaggatgagtgtcctgacgttcgtttgaatatcatctccaatttggattgtgtaaatgaagtgattggaatccgtcagctctctcagtctctccttcctgccatagtggagctggcagaagatgccaaatggagggtccgcctggccatcattgagtatatgccgctgctggcaggccagctgggtgtggaattctttgatgaaaagctgaattctttatgtatggcttggctcgtggaccatgtatacgccatccgagaagctgccaccaacaacctcatgaaactaagtccagaagtttggtaccagagtggtcccaaaatactattgtccccaaagtgttagtaatggcaaatgatcctaattacttgcatagaatgaccactttattctgcattaatgcactgtctgaggcctgtggtcaggaaataactactaagcaaatgctgcccatcgtattaaaaatggcaggagaccaagtagcaaatgttcgcttcaatgtggccaaatctctacaaaagattggaccaattctagataccaatgctttacagggagaagtgaagccagtactacagaagttaggtcaagatgaagacatggatgtcaaatactttgcacaggaagctataagtgttcttgcattggcataatgaggagcaggagggaaaaggcctttactagattcttgtcacaaatttctagtcaatgtgttcttaactgggtggagaaagaatggaaaaccttcaagatctcatccaagcaaatggcaacaacttagaagaaatcatttagtgacttaattctttctaaagatgaaatgggattgttttttactcgtcttccttgttaaatcattatttaagccgttcttattgaccaattcctgacacttgattgtctcctaatgctttatccatcaccacctgggctcctgcatcctcactgtggaatcaggcaccagccacataatgttccagacaaagcctggaagggtgtggacccagacgtggagtggagtgattctcttgacgtttacatatatctctgtgtctctccatcattccaaagctaaatgtacatgtttagaataacttattttataaactcttcgggagacatgttgagatttgaccgtaatgaaagccacattttcctgaattatgatggtctgcattagtctcatgtgaaaggggaatgtggaagctcagggttaatgtagtggttgttttggtttttatttgctcaattttgtctgtactcatgtcattcagaaacctgaagtgtggctgcatcttgctgctaatgtgtgatgttgacgcctaactgaatttgaacagctcaccactgtgcctacatttaaaaatacttctctctcttttctaaaaagctttaactgtagtgcctcctaataagcagtatgtttgtttcattgtgagattgcagttctgtatttcgaatgagtctaagaaccacagggataatactgtgcagatttcctgttctttacctggctctgcttccagcagtattgacacctagtccttgctgcattgtacagtagcttttcaaactgcagttttattgctaagtttttagtatgggtgatactggagtcttatcatttgaagtggttgcttttctacttttacagt

SEQ ID NO: 60615 - DNA, 3490 bp, Homo sapiens
ggtgggtctgcacctggattttggagtcccagtgctgctgcagctctgagcattcccacgtcaccagagaagccggtgggcaatgagatcatgtctgctttcaggttgtggcctggcctgctgatcatgttgggttctctctgccatagaggttcaccgtgtggcctttcaacacacgtagaaataggacacagagctctggagtttcttcagcttcacaatgggcgtgttaactacagagagctgttactagaacaccaggatgcgtatcaggctggaatcgtgtttcctgattgtttttaccctagcatctgcaaaggaggaaaattccatgatgtgtctgagagcactcactggactccgtttcttaatgcaagcgttcattatatccgagagaactatccccttccctggggagaaggacacagagaaactggtagctttcttgtttggaattacttctcacatggcggcagatgtcagctggcatagtctgggccttgaacaaggattccttaggaccatgggagctattgattttcacggctcctattcagaggctcattcggctggtgattttggaggagatgtgttgagccagtttgaatttaattttaattaccttgcacgacgctggtatgtgccagtcaaagatctactgggaatttatgagaaactgtatggtcgaaaagtcatcaccgaaaatgtaatcgttgattgttcacatatccagttcttagaaatgtatggtgagatgctagctgtttccaagttatatcccacttactctacaaagtccccgtttttggtggaacaattccaagagtattttcttggaggactggatgatatggcattttggtccactaatatttaccatctaacaatcttcatgttggagaatgggaccagtgactgcaacctgcctgagaaccctctgttcattgcatgtggcggccagcaaaaccacacccagggctcaaaaatgcagaaaaatgattttcacagaaatttgactacatccctaactgaaagtgttgacaggaatataaactatactgaaagaggagtgttctttagtgtaaattcctggaccccggattccatgtcctttatctacaaggctttggaaaggaacataaggacaatgttcataggtggctctcagttgtcacaaaagcacgtctccagccccttagcatcttacttcttgtcatttccttatgcgaggcttggctgggcaatgacctcagctgacctcaaccaggatgggcacggtgacctcgtggtgggcgcaccaggctacagccgccccggccacatccacatcgggcgcgtgtacctcatctacggcaatgacctgggcctgccacctgttgacctggacctggacaaggaggcccacaggatccttgaaggcttccagccctcaggtcggtttggctcggccttggctgtgttggactttaacgtggacggcgtgcctgacctggccgtgggagctccctcggtgggctccgagcagctcacctacaaaggtgccgtgtatgtctactttggttccaaacaaggaggaatgtcttcttcccctaacatcaccatttcttgccaggacatctactgtaacttgggctggactctcttggctgcagatgtgaatggagacagtgaacccgatctggtcatcggctccccttttgcaccaggtggagggaagcagaagggaattgtggctgcgttttattctggccccagcctgagcgacaaagaaaaactgaacgtggaggcagccaactggacggtgagaggcgaggaagacttctcctggtttggatattcccttcacggtgtcactgtggacaacagaaccttgctgttggttgggagcccgacctggaagaatgccagcaggctgggccatttgttacacatccgagatgagaaaaagagccttgggagggtgtatggctacttcccaccaaacggccaaagctggtttaccatttctggagacaaggcaatggggaaactgggtacttccctttccagtggccacgtactgatgaatgggactctgaaacaagtgctgctggttggagcccctacgtacgatgacgtgtctaaggtggcattcctgaccgtgaccctacaccaaggcggagccactcgcatgtacgcactcacatctgacgcacagcctctgctgctcagcaccttcagcggagaccgccgcttctcccgatttggtggcgttctgcacttgagtgacctggatgatgatggcttagatgaaatcatcatggcagcccccctgaggatagcagatgtaacctctggactgattgggggagaagacggccgagtatatgtatataatggcaaagagaccacccttggtgacatgactggcaaatgcaaatcatggataactccatgtccagaagaaaaggcccaatatgtattgatttctcctgaagccagctcaaggtttgggagctccctcatcaccgtgaggtccaaggcaaagaaccaagtcgtcattgctgctggaaggagttctttgggagcccgactctccggggcacttcacgtctatagccttggctcagattgaagatttcactgcatttccccactctgcccacctctctcatgctgaatcacatccatggtgagcattttgatggacaaagtggcacatccagtggagcggtggtagatcctgatagacatggggctcctgggagtagagagacacactaacagccacaccctctggaaatctgatacagtaaatatatgactgcaccagaaatatgtgaaatagcagacattctgcttactcatgtctccttccacagtttacttcctcgctccctttgcatctaaacctttcttctttcccaacttattgcctgtagtcagacctgctgtacaacctatttcctcttcctcttgaatgtttttccagtggctggaaaggtccctctgtggttatctgttagaacagtcccctgtacaccaattccctcccctaaaaacatcccttttttaaaaaaagaattggttccagcccataaagaaagaacaagatccatgccctttgcagggacatgggatgggagctggaggcccattatcccttcataaactattgcaggaacagaaaacccaaacactcccatattcctcacttgtaagtgggagctagatgagaacacgtggacacatagagggaaacaacacacactggggcctatgagagggcggaaggtgggaggagggagagatcaggaaaaataactaatggatacttagggtgatgaaataatctgtgtaacaaacccccatgacacacctttatgtatgtaacaaaccagcacttcctgcgcatgtacccctgaacttaaaagttaaaaaaaagttgaacttaaaaataacaggattggcccatgccaatcaaagtataatagaaagcatagtatacaga

SEQ ID NO: 60616 - DNA, 1761 bp, Homo sapiens
  misc_feature (1)...(1761): n = a,t,c or g
ttttttttttttggaaaacaaaaggaaaacttatttattcttaggaggtgggaatgtggggagtggggcagaaacaggttgttgcccttggaagaaggttccaaggggcagaggttggggatgtctcagtaaagaggggcaggtcatgaatagagcctccacccccagcagggggttcctggggcccgcccaagcactgggctaaaacgtggaaactgggcattgacaaagtacagcgggatgtgggcaattcggcctgtggaccagcccacactgagcagggcccctttgttgaaggaaggatggaaagtgatgagctggggctgggctcctggctccccctggataatgccacagggaaggagctcaaacacagggctgtttcgagtgcgaaaaaggaggatgactggtttaccatcctgtacccttggctttcctttcataagcacagccagacgttccccactggggtcccagaccatggagtgagcctctcccccaagcctctcctcaccatctggtgtctgtattgttgtctcagacagatctgccacaatcgttgctgactttgcacctccaacgcacccctttccctcaccacaacgttctggaaaagacagggagtaaatcagtggctctcccaatacagtgaacagcagtcggctgccatctgggctccagcagccagtctgacagcgccctgatagagtaggccacctctcacaagtccacatctgggcctcccagactcgaaagacagctgaaggagtggtagccaggattttgctgccgtctggggaccagagcaggttggtcaccccacctcctcgaaaccagggaagggggacacaggtctctgttgagacatcccatacccggatagcagcatccacgggtgaagctgagagcagccgccccccactgggggcccaggccaagctggtaacaggtgtatgcccagggtgagacagcacttgggcacagccagaagagggtcgggtagacaaggaggtagggtccagggtccagataagaatgcagctctggcaggccacagccaagacagaggcactaaggggcttccaggccagagacgccacatttcgctgcagccggtgcttcagggaggggactatggtgctgctggcattatacacacggactgagtcatctagcagggccactgcaaacttgttggtgtgggggtgccatgcaaagacacgcaagcagcagctggaccaatttgtgacttgggcaaattcagcgatcagatcttcgctcctgagagacagatgggggaacagggacccatggagggaagaggcccatcgacagagtgccagggcccagccggatgccgtcttcacccactcaaacacctcttcttctgagtttgcaatttcatttagcaccccaaaaaggcccacatcacgccaaatgttgatgcatctcttccacacttgctcccggtgatggatgaaggcagttcttgtgccatggtccagccttccaggggtctttaggggatcctttgtcagttgtaggacaggaagattgatccacccagagagcacatcttgccggttcgcaggacgtctgcagtcggcaaactcctggccggaacggcacagaccgcactcccgcaactcggttcccgggctagattcgtatgcggacgggtaccgcaagggacaaacggcgaggcggaactctctctctctcttntntntctctctctcctcgtggcgaattcctaaagcg

SEQ ID NO: 60617 - DNA, 5210 bp, Homo sapiens
tttttttttttttttttttttttttttttttttttttttttttttttttttttttttttttttttttttttttaaccgtcaatctttaccaatttattttatacaaaacagtagcaatgtagaatatgggaatcgtcttccgctgccacgcacgcaagttgtgaacattccaagccaatgtatacaatttggaggggaaggctaaacaatagcatcaaccacgctactgaacataggaatttttcatttaaaaagattaaaaattagatagcaatgtcttcttaatattgctctcgtcattgaagactgaggaaaaataaaaagtgactttataagttttttaaaaaaagaggcaatggggaaaaaaacaagaggctgctacaacactgccatacagtcaaaccatcatacttcaatatttgcatactcgatagcagcattatttttactgaaccgtgtgcaactacatgtagaaacacatcaaagcaaaatatcatggcagttatcaatcaagatccaaaaaggaaaaaaacaaacaaaaaaataactctaggatgaacacactataagaacatttatggagaaagaatcagtatctacattcttggactgttccattctgccccaataaaagtgtcaattcaactgtcagctgtggatttttggcggatttgagtttttccagttcttatgatactgcatgcttggaacaaagggggtcataataaatccttctacacaatgaacttcataggcagacagctgaaaataaatttactacttgtaaacacacacaaaaaaaaaatacaagattttttgtatctttaaacaatcagtgcttccaaaagcccattatcttctatatcgacctctctcccctcggtctctgtctcgatcacataatcgctctctttctctttctctatcacgtcctctatctcgctctctgtctcgtctgttatctctagggcggtctcgctctcgttcccggtctctttcacggggtctacttctccggccactgacaacagcttgtgtgcgacgaaggaaatcatccaccctcatatcataatcatgtactcgtttatctctgtatcttgcttcatgtggtactggatgatgtcctgagtaagggggatgagcttgaggaggtggagcatggtgctgatagtaaggatggtgtggaggttgttccattcctgggtaagggggcattccttgccaaggtggtggtggtcccatgttatgaaattccctcacataatcattgtaggacccatttaaaaacacatctcggcgaactcctgaaaatcgtctgtccacttcctggtatcgtggatcctttaaataccctggtctctggtgaaactcagggggatagtcaatccttggtttctttctgctgttatgaatatcataatcttctggtcgacgccttcccacatcccggactggttctcgacgggatggacgtcctcgtgatcggggctgagaatgcattcttctcttgtgacgcattttatgaatgacctgatacaagtcaatactttcatcggggggaaacagaagacaaagctgggttccacattcaagttcaatttcctgtccatcacgtccgatctttactggtttatgttcattccaaggattggtgagatgagccgacttagtgaagggtaattcacgcctgcaaatccagtcaattttaaagacacctcccagcattttagcactcattcctgctggaagcacccagtgtataggagatcctccgtgatgtgattctgaagaaagtcttgcaaacccttgaaattttccactctctctgacagaaaatatcggacgcgtggggtcggaagatcctagaggtcccaaggtagctgacttgcgaagctgaggctccagccgagggctccaggcctctgaccggcccagcagtgagcgcggctgcccgacgcttcagggccgggagcagggagcgtgagtcgccatggcgacgccggcgggtctggagcgctgggttcaggacgagctgcactcggtgttggggctgagcgagcggcacgtcgcccagtttctgatcggtaccgcacagcgctgcacctctgccgaggagttcgtgcagcgcctacgagacactgataccttggatctcagtgggccggcccgggacttcgccctgagactctggaacaaggtaccacgaaaggcagtggtagaaaagccagctcgggcagcagagcgagaggcccgggccccggctggagaagaaccgatcttataggttactggaagacagtgaagagagcagtgaggagactgtgagtagggctggaagcagcctccagaagaaacgtaaaaagcggaaacacctcaggaagaagcgtgaggaagaagaggaggaagaggcttctgagaaagggaagaagaaaacaggggggagtaaacagcagacagagaagccagagtcggaagatgagtgggaacggacagagcgtgaacgccttcaggacctggaggagcgtgatgcctttgctgagcgggttcgacagcgggacaaggatcggactcgaaatgtcctggaacggtcagacaagaaggcttatgaagaggctcagaagcgcctcaagatggccgaggaagaccggaaggccatggtccctgagctgcggaagaaatctcgccgagagtacctggctaagcgggagcgagagaagcttgaggacctggaggcggagctggctgatgaggagttcctttttggggacgtggagctgagccggcacgagcggcaggagctcaaatataagcggcgagtgcgggatctcgcccgggagtaccgggcagctggggagcaggagaagctggaggccaccaatcgctaccacatgcccaaggaaacccgaggacagccagcccgagctgtggatctagtggaggaggaatcaggagcccctggggaggagcagcggcgctgggaggaggcgcggcttggggcagcgtccctgaagtttggggcccgagatgctgcctctcaggagcccaagtatcaactggtgctggaggaggaggagaccattgagtttgtccgggccactcagctccagggtgatgaggagccgtcagctccacccacttcaactcaggcccagcagaaagagtccatccaggccgtccgccgcagcctcccggtgttcccatttcgagaggagctcctggctgctattgcaaatcaccaagtcctcatcattgaaggcgagacaggctcagggaagaccacccagatcccgcagtatctctttgaggagggttatacaaacaagggtatgaagattgcctgcacccaaccccggagagtggctgccatgagtgtggccgcccgagtggcccgggagatgggtgtgaagcttgggaatgaggttggctacagcatccgctttgaggactgcacatcagagcgaactgtcctccgctacatgacagatgggatgcttctccgggagttcctctctgagcctgacctggcgagttacagcgtggtgatggtggatgaggcacacgaaaggaccctacacacagacattctctttggattgatcaaggatgttgctcgcttccgacctgagctcaaggtcctggtggcttcagccacaatggacactgcccgtttttccaccttctttgatgacgcccctgtgtttcgaatccccggacgcaggtttcctgtggacatcttctacaccaaggctccagaggctgactacttggaagcttgtgtagtatctgtgttgcagatccatgtgacccagccccctggggatatcctggtgttcctgacaggacaggaggagattgaggctgcctgtgagatgctccaggatcgctgccgccgcctgggctccaaaatccgggagctcctggtgctgcccatttatgccaatctgccctctgacatgcaggcccgtatcttccagcccacaccacctggggcacgaaaggtggttgtggcaacgaacattgctgagacatcactcaccattgagggcatcatttatgtgctggatccagggttctgtaagcagaagagctacaacccccgcacaggcatggaatcgctcactgtcacaccctgcagcaaggcctcagccaatcagcgagctggcagggcaggtcgggtggctgcagggaagtgcttccgcctgtataccgcctgggcctatcagcacgagcttgaggaaaccacagtgcctgagatccagaggaccagcttgggcaatgtcgtgttgctgctcaagagcttagggatccatgacctaatgcactttgatttcctggaccctccaccatatgagacactgctgctggctttggagcagctgtatgctctgggagccctcaaccaccttggggagctcaccacgtctggtcgaaagatggcagagctgccggtggaccccatgctgtccaaaatgatcttagcctctgagaagtacagctgttcagaggagatcctgacagtggctgccatgctctctgtcaacaactccatcttctaccgaccaaaggacaaggtcgtccatgctgacaatgcccgtgtcaacttctttctccctggcggtgaccacctggttctgctaaatgtttacacacagtgggctgagagtggttactcttcccagtggtgctatgagaactttgtacagttcagatcgatgcgccgagcccgggatgtgcgggaacagctggaagggctcttggaacgtgtggaagttggtctcagttcctgccagggggactatatccgtgtacgcaaggccatcactgctggttacttttaccacacggcacggttgactcggagtggctaccgcacagtgaaacagcagcagacagtcttcattcatcccaactcctccctctttgagcaacagccacgctggctgctctaccacgaacttgtcttgaccaccaaagagttcatgagacaggtactggagattgagagcagttggcttctggaggtggctccccattattataaggccaaggagctagaagatccccatgctaagaaaatgcccaaaaaaataggcaaaacacgagaagagctagggtaagagaaggacgtaaacagaacctgacaccagctccttttccttctatacattatttaatacctattaaataaaattatttttggaaaaaaaaaa

SEQ ID NO: 60618 - DNA, 668 bp, Homo sapiens
cggcacgagcggcacgagggattgttgtgtccactaaccggactcagaagggacttccctgctcggctggctttcggtttctctgctcacctccggataaatcacggggtctcccgcgccgctcatggcgcctcccgtccgtctcgagcgtccctttccttcccggcgctttcctgggttgcttctggcggccctggtgttgctgctgtcctccttctccgatcaatgcaatgtcccggaatggcttccatttgccaggcctaccaacctaactgatgactttgagtttcccattgggacatatctgaactatgaatgccgccctggttattccggaagaccgttttctatcatctgcctaaaaaactcagtctggacaagtgctaaggacaagtgcaaacgtaaatcatgtcgtaatcctccagatcctgtgaatggcatggcacatgtgatcaaagacatccagttcggatcccaaattaaatattcttgtcctaaaggataccgactcattggttcctcgtctgccacatgcatcatctcaggcaacactgtcatttgggataataaaacacctgtttgtgacagtgagttgaaatatgcattcctatttcttaaaaagatacattctaatttttctctggaataataaaaatcttttttcgaaa

SEQ ID NO: 60619 - DNA, 6730 bp, Homo sapiens
tttcgtgaagaaggcggctcccggaagggggagagacaaactgccgtaacctctgccgttcaggaacccggttacttatttattcgttaccctttttcttcttcctcccccaaaaaccttttccttttcccttctttttttttcctttttgggagctgaaaaatttccggtaagggaaagaagggctcctttcgctccttatttccccgcctccttcccttccccaccttcccctcctccggctttttcctcccaactcggggaggtccttcccggtggccgccctgacgaggtctgagcacctaggcggaggcggcgcaggctttttgtagtgaggtttgcgcctgcgcagcgcgcctgcctccgccatgcacgggggtggccccccctcgggggacagcgcatgcccgctgcgcaccatcaagagagtccagttcggagtcctgagtccggatgaactgaagcgaatgtctgtgacggagggtggcatcaaatacccagagacgactgagggaggccgccccaagcttggggggctgatggacccgaggcagggggtgattgagcggactggccgctgccaaacatgtgcaggaaacatgacagagtgtcctggccactttggccacattgaactggccaagcctgtgtttcacgtgggcttcctggtgaagacaatgaaagttttgcgctgtgtctgcttcttctgctccaaactgcttgtggactctaacaacccaaagatcaaggatatcctggctaagtccaagggacagcccaagaagcggctcacacatgtctacgacctttgcaagggcaaaaacatatgcgagggtggggaggagatggacaacaagttcggtgtggaacaacctgagggtgacgaggatctgaccaaagaaaagggccatggtggctgtgggcggtaccagcccaggatccggcgttctggcctagagctgtatgcggaatggaagcacgttaatgaggactctcaggagaagaagatcctgctgagtccagagcgagtgcatgagatcttcaaacgcatctcagatgaggagtgttttgtgctgggcatggagccccgctatgcacggccagagtggatgattgtcacagtgctgcctgtgcccccgctctccgtgcggcctgctgttgtgatgcagggctctgcccgtaaccaggatgacctgactcacaaactggctgacatcgtgaagatcaacaatcagctgcggcgcaatgagcagaacggcgcagcggcccatgtcattgcagaggatgtgaagctcctccagttccatgtggccaccatggtggacaacgagctgcctggcttgccccgtgccatgcagaagtctgggcgtcccctcaagtccctaaagcagtggttaaagggcaaggaaggccgggtgcgagggaacttgatgggcaaaagagtggacttctcgggccgcactgtcatcaccgccgaccccaacctctccattgaccaggttggcgtgccccgctccattgctgccaacatgacctttgcggagattgtcacccccttcaacattgacagacttcaagaactagtgcgcagggggaacagccagtacccaggcgccaagtacatcatccgagacaatggtgatcgcattgacttgcgtttccaccccaagcccagtgaccttcacctgcagaccggctataaggtgaaacggcacatgtgtgatggggacattgttatcttcaaccggcagccaactctgcacaaaatgtccatgatggggcatcgggtccgcattctcccatggtctacctttcgcttgaatcttagcgtgacaactccgtacaatgcagactttgacggggatgagatgaacttgcacctgccacagtctctggagacgcgagcagagatccaggagctggccatggttcctcgcatgattgtcaccccccagagcaatcggcctgtcatgggtattgtgcaggacacactcacagcagtgcgcaaattcaccaagagagacgtcttcctggagcggggtgaagtgatgaacctcctgatgttcctgtcgacgtgggatgggaaggtcccacagccggccatcctaaagccccggcccctgtggacaggcaagcaaatcttctccctcatcatacctggtcacatcaattgtatccgtacccacagcacccatcccgatgatgaagacagtggcccttacaagcacatctctcctggggacaccaaggtggtggtggagaatggggagctgatcatgggcatcctgtgtaagaagtctctgggcacgtcagctggctccctggtccacatctcctacctagagatgggtcatgacatcactcgcctcttctactccaacattcagactgtcattaacaactggctcctcatcgagggtcatactattggcattgggggctccattgctgattctaagacttaccaggacattcagaacactattaagaaggccaagcaggacgtaatagaggtcatcgagaaggcacacaacaatgagctggagcccaccccagggaacactctgcggcagacgtttgagaatcaggtgaaccgcattcttaacgatgcccgagacaagactggctcctctgctcagaaatccctgtctgaatacaacaacttcaagtctatggtcgtgtccggagctaaaggttccaagattaacatctcccaggtcattgctgtcgttggacagcagaacgtcgagggcaagcggattccatttggcttcaagcaccggactctgcctcacttcatcaaggatgactacgggcctgagagccgtggctttgtggagaactcctacctagccggcctcacacccactgagttctttttccacgccatggggggtcgtgaggggctcattgacacggctgtcaagactgctgagactggatacatccagcggcggctgatcaagtccatggagtcagtgatggtgaagtacgacgcgactgtgcggaactccatcaaccaggtggtgcagctgcgctacggcgaagacggcctggcaggcgagagcgttgagttccagaacctggctacgcttaagccttccaacaaggcttttgagaagaagttccgctttgattataccaatgagagggccctgcggcgcactctgcaggaggacctggtgaaggacgtgctgagcaacgcacacatccaaaacgagttggagcgggaatttgagcggatgcgggaggatcgggaggtgctcagggtcatcttcccaactggagacagcaaggtcgtcctcccctgtaacctgctgcggatgatctggaatgctcagaaaatcttccacatcaacccacgccttccctccgacctgcaccccatcaaagtggtggagggagtcaaggaattgagcaagaagctggtgattgtgaatggggatgacccactaagtcgacaggcccaggaaaatgccacgctgctcttcaacatccacctgcggtccacgttgtgttccccgccgcatggcagaggagtgttcggctcagtggggaggccttcgactggctgcttggggagattgagtccaagttcaaccaagccattgcgcatcccggggaaatggtgggggctctggctgcgcagtcccttggagaacctgccacccagatgaccttgaataccttccactatgctggtgtgtctgccaagaatgtgacgctgggtgtgccccgacttaaggagctcatcaacatttccaagaagccaaagactccttcgcttactgtcttcctgttgggccagtccgctcgagatgctgagagagccaaggatattctgtgccgtctggagcatacaacgttgaggaaggtgactgccaacacagccatctactatgaccccaacccccagagcacggtggtggcagaggatcaggaatgggtgaatgtctactatgaaatgcctgactttgatgtggcccgaatctccccctggctgttgcgggtggagctggatcggaagcacatgactgaccggaagctcaccatggagcagattgctgaaaagatcaatgctggttttggtgacgacttgaactgcatctttaatgatgacaatgcagagaagctggtgctccgtattcgcatcatgaacagcgatgagaacaagatgcaagaggaggaagaggtggtggacaagatggatgatgatgtcttcctgcgctgcatcgagtccaacatgctgacagatatgaccctgcagggcatcgagcagatcagcaaggtgtacatgcacttgccacagacagacaacaagaagaagatcatcatcacggaggatggggaattcaaggccctgcaggagtggatcctggagacggacggcgtgagcttgatgcgggtgctgagtgagaaggacgtggaccccgtacgcaccacgtccaatgacattgtggagatcttcacggtgctgggcattgaagccgtgcggaaggccctggagcgggagctgtaccacgtcatctcctttgatggctcctatgtcaattaccgacacttggctctcttgtgtgataccatgacctgtcgtggccacttgatggccatcacccgacacggagtcaaccgccaggacacaggaccactcatgaagtgttcctttgaggaaacggtggacgtgcttatggaagcagccgcacacggtgagagtgaccccatgaagggggtctctgagaatatcatgctgggccagctggctccggccggcactggctgctttgacctcctgcttgatgcagagaagtgcaagtatggcatggagatccccaccaatatccccggcctgggggctgctggacccaccggcatgttctttggttcagcacccagtcccatgggtggaatctctcctgccatgacaccttggaaccagggtgcaacccctgcctatggcgcctggtcccccagtgttgggagtggaatgaccccaggggcagccggcttctctcccagtgctgcgtcagatgccagcggcttcagcccaggttactcccctgcctggtctcccacacccgggctccccgggggtccccaggttccctcaagcccctacatcccttcaccaggtggcgccatgtctcccagctactcgccaacgtcacctgccttacgagccccgctctcctgggggctacacaccccagagtccctcttattcccccacttcaccctcctactcccctacctctccatcctattctccaaccagtcccaactatagtcccacatcacccagctattcgccaacgtcacccagctactcaccgacctctcccagctactcacccacctctcccagctactcgcccacctctcccagctactcgcccacctctcccagctactcacccacttcccctagctactcgcccacttcccctagctactcgccaacgtctcccagctactcgccgacatctcccagctactcgccaacttcacccagctattctcccacttctcccagctactcacctacctctccaacctactcgcccacctcccccagctactcacccacttccccaagttactcacccaccagcccgaactattctccaaccagtcccaattacaccccaacatcacccagctacagcccgacatcacccagctattcccctactagtcccaactacacacctaccagccctaactacagcccaacctctccaagctactctccaacatcacccagctattccccgacctcaccaagttactccccttccagcccacgatacacaccacagtctccaacctataccccaagctcacccagctacagccccagctcgcccagctacagcccaacctcacccaagtacaccccaaccagtccttcttacagtcccagctccccagagtataccccaacctctcccaagtactcacctaccagtcccaaatattcacccacctctcccaagtactcgcctaccagtcccacctattcacccaccaccccaaaatactccccaacatctcctacttattccccaacctctccagtctacaccccaacctctcccaagtactcacctactagccccacttactcgcccacttcccccaagtactcgcccaccagccccacctactcgcccacctcccccaaaggctcaacctactctcccacttcccctggttactcgcccaccagccccacctacagtctcacaagcccggctatcagcccggatgacagtgacgaggagaactgagggcacgtggggtgcggcagcgggctagggcccagggcagcttgcccgtgctgctgtgcagttcttgcctccctcacggggcgtcacccccagcccagctccgttgtacataaatgccttgtggcagagctcccggtgaacttctggatcccgtttctgatgcagactcttgtcttgttctccacttgtgctgttagaactcactggcccagtggtgttctcactcctaccccacccaccccctgcctgtccccaaattgaagatccttccttgcctgtggcttgatgcggggcgggtaaagggtattttaacttaggggtagttcctgctgtgagtggttacagctgatcctcgggaagaacaaagctaaagctgccttttgtctgttattttatttttttgaagtttaaataaagtttactaattttgaccaaaaaaaaaa

SEQ ID NO: 60620 - DNA, 1240 bp, Homo sapiens
ctgatttagtatgctaacaacacgttggcacagctccacaagtgtaaaggccgtgtatgtcctgtttgccactctgtctccaaggcctagcacaataggaactaacagagagtgggaactcagtaaatatttgttgagcaaatccatgtattcaaactgggtaactctctttgtctgaagcatgaattggaagggtaatatgcttgtttctctttcttttacagttgtcaaatttaaaagttttgaatcactccccaatgtctgatgcctctgtcaattttgactacaaatctccatccccatttgactgcagcactgatcaagaagagaaaattgaagatgttgctagtcactgtctgcctcagaaggacctgtatactgctgaagaggaagctgctaccctttttcctaggaaaatgacatcccataatgggatggaggacagtggaggaggaggtactggagtgaagaagaaacggaagaaaaaggagccaggagaccaagagggtgcagcaaagggaagcaaggacagagagcccaagccaaagaggaaacgagaaccgaaagagccaaaggaacccagaaaggccaaggagccgaagaaggccaaggagcacaaggagccgaagcaaaaagatggggcaaagaaggcacggaagccccgggaggcctcgggcaccaaggaggccaaagagaagaggagctgcactgactctgcagccaggacgaattccaggaaggccaatatggagcaaggaccaacccctgtggataaaaagaagaatggaataaggaaaagtgaaactactgaggagagtttatagctggatcagggtctgacgaacccatctttgcggagtcctgaggagtccactgagtctacagacagccagaaacgacgctcgggaaggcaagtaaagcgcagaaaatacaatgaggacctggacttcaaagtggtggatgatgatggggaaacaattgctgttcttggagctggtcgaacatctgcactctcagcctctacactggcctggcaggcggaggagcctccagaagatgatgccaacatcattgagaagatcctggcatctaagactgtccaggaggttcccccaggagaccccccgttcgacttggagctgttttacgttaagtataaaaatttgtacgtctatttaaaggattctctggatttgggttttatatgaataaaactttttttctcttgtgaaaaaaaaaa

SEQ ID NO: 60621 - DNA, 7428 bp, Homo sapiens
gcggtgcctctgagagccgccgccacctcgtccctcagttcccggcagacagccgcccgggccggcgtccctcaccgccaccagggccggagtgacgagtgagaggggcggccgggacgcgacccccgggccaggagaagcggaggcccgacggcggcggccctccgaggtacggcttcttgggggcggcgaggacctcgacgcccttcgccgacaccgcggctggtcccgctcgcccgccccttcctgatcctgccgctgccctccacgcctccaatcccccacctccaccccctctcctttctctcttctcttccttcctctcctcctcctcccctccagccgctgggagccgcgggtcggacgagccgccgcctccttctctgcgtccatgtatgaggggaagaagacgaagaacatgttcctgacccgggctctggagaagatattggccgacaaggaagtgaagaaggcgcatcactcccagctgcgcaaagcttgcgaggtggcgttagaggaaataaaagcggaaactgaaaaacagagtcctcctcatggagaagcaaaagctggatcaagcacccttccaccagtgaaatcaaagacaaattttattgaagcagacaagtacttcttgccttttgagttggcatgccagtccaaatgtcctcgcatagttagtacatctctagattgcttacagaaacttattgcttatgggcacttgactggcaatgctccagatagtacaacaccaggcaaaaaattaattgatagaattattgaaccaatatgtggctgctttcagggccctcagacagatgaaggagttcagctgcagataataaaggctttacttactgcagtaacatcacaacacatagaaattcatgaagggactgtactgcaagctgtgagaacatgttacaatatctacttagcaagcaaaaatctcatcaatcagacaacagccaaagctactctcactcagatgctaaatgttatctttgcacgcatggaaaaccaagcattacaggaagcaaaacaaatggaaaaagaaaggcatcggcagcatcatcatctgttaccgtctccagtaagccatcacgagcctgaatcacctcaacttagatatttgccacctcagactgttgatcatatatcccaagaacacgaaggggaccttgacctccatacaaatgatgtagataaaagtcttcaggatgacacagagcctgaaaatggatctgatatttccagtgcagaaaatgaacagactgaagctgatcaggcaactgcagctgaaacattatctaaaaatgaagtgttatatgacggagaaaaccatgattgtgaggaaaagccacaagacattgtacagaacattgtagaagaaatggtgaacattgttgttggagatatgggagaagggactactataaatgcaagtgcagatggcaacattggaactatagaggatggtagtgacagtgaaaatattcaagcaaatggaattccaggaacaccaatttctgttgcatatacaccatccttacctgatgatagattgtcagtctcttccaatgatactcaggaatctggaaattcttcaggaccttcacctggtgctaagttttcccacattttacaaaaggatgcctttctagtattcaggtcattgtgtaaactgtcaatgaaaccactgtcagatggaccaccagatccaaagtctcatgaactacgatccaagattctttcattgcagttacttctatccattctgcagaatgcaggacctattttcaggacaaatgagatgtttattaatgctattaagcagtatctttgtgttgcactctcaaaaaatggagtctcatctgttccagaggtttttgagctttctctttctatatttcttactttgttgtcaaatttcaagacacatctgaagatgcaaattgaggtgttctttaaagaaattttcttatacattttggaaacttctaccagctcatttgatcacaaatggatggttattcagacactgacgaggatttgtgcagatgctcagagtgtagtggatatttatgtaaactatgactgtgacttaaatgcagccaatatatttgaaagactagtaaatgatctatcaaaaattgctcaaggaaggggcagtcaagaacttggtatgagtaatgttcaggaattgagcctgaggaaaaaaggtttagaatgcttagtgtcgattttgaagtgtatggttgaatggagtaaggatcagtatgtgaatcccaactcccagacaactcttggtcaggaaaaaccctcagagcaagagatgagtgaaatcaaacaccctgagacaataaacagatacggaagtttaaattccctggagtcaacatcatcatcaggaataggcagctacagtacacagatgtctggcactgataatccagaacaatttgaggtcctaaagcaacaaaaaaaaataatagaacaagggatagatttatttaataagaaaccaaagagaggaatacagtacctccaagaacaagggatgcttggcaccacacctgaagatattgcccaattcttacatcaagaggaaagattagactctactcaagtgggtgaggttcccggggggataatggataaatttaaccaaagaagtcatgtatgcatatgtggaccaacatgacttttcaggaaaagacttcgtttcagcccttcgtatgtttctagaaggatttcgtcttccaggggaagctcagaaaatcgatcgattaatggaaaaatttgctgcaagatacctagaatgcaaccaaggacaaactctctttgctagtgcggatacagcttatgttttggcttattcaattatcatgttgaccacagaccttcacagtccacaggtgaaaaataaaatgacaaaggaacaatacattaagatgaatagaggtatcaatgacagtaaagaccttcctgaagagtatctatcagccatctataatgaaatagctgggaaaaagatatcaatgaaagaaacaaaagaactaacaatccctacaaaatcaagtaaacagaatgtagccagtgaaaaacaaagaagacttctgtataacttagaaatggagcagatggccaagacagctaaagcactcatggaggccgtgagccatgttcaggcaccctttacaagtgcaacacatttggagcatgtgaggcccatgtttaagttggcttggacgccttttctggctgcattcagtgtgggtctacaagattgtgatgatactgaagtagcctctctttgcctggaaggtataagatgtgcaatcagaattgcatgcattttcagcattcagctggagagagatgcatatgtccaggcactagcaagatttaccttactcacagtgagttccggtattactgaaatgaaacagaagaacattgacacaataaaaacacttatcacagtggctcatacagatggaaattatttaggaaattcatggcatgagattctgaagtgcatcagtcagttggagctggcacagcttataggaactggagtgaaacctcgatacatttctggaacagtgcgaggcagagaaggatctcttactggaacaaaagatcaggctcctgatgaatttgtgggtttagggctagttggaggaaatgtggactggaaacagatagcaagtattcaggaatccattggagaaaccagttctcagagtgttgttgttgctgtagatagaatattcacaggatctacaaggctagatggaaatgccattgtggattttgtccgttggctctgtgctgtgtctatggatgaattactttccacgacacacccaagaatgtttagtctacaaaaaatagtagaaatatcatattacaacatgggaagaataagattacagtggtctcgaatttgggaagttattggagatcattttaataaggttgggtgtaatcctaatgaagatgtagctatttttgcagtagactccttgaggcagttgtcaatgaagttcttagagaaaggggagcttgctaacttcagattccagaaggatttcttaagaccttttgaacatataatgaaacggaacaggtctccaacaattcgagatatggttgtacggtgtatagcacagatggttaattctcaagctgctaacattcgatctggatggaagaacattttctctgtatttcatctagctgcatctgatcaagatgaaagcatagtggaacttgcattccaaacaaccgggcacattgtcacccttgtatttgaaaaacactttccagcgaccattgattctttccaggatgcagtgaagtgtttgtctgaatttgcgtgcaatgcagctttcccagacacaagtatggaagcaattcgacttattcgccattgtgcaaaatatgtgtctgatagacctcaggctttcaaggaatacacaagcgatgatatgaacgtagcacctgaagacagggtgtgggtgagaggatggttcccaattctctttgagttatcctgtatcatcaatagatgcaaattagatgtaagaaccaggggtttaacagtaatgtttgaaataatgaaaacatatggccacacttatgagaaacactggtggcaggatttatttagaattgttttcagaatctttgacaatatgaaattgccagaacaacagacagagaaagctgaatggatgacaacaacttgcaatcatgcactttatgcaatctgtgatgtattcactcagtatttagaagtactcagtgatgtacttttggatgacatttttgctcagctctactggtgtgtgcagcaagacaatgagcagttagcgcgatctggtacaaactgtttagagaatgttgttattctgaatggtgaaaaatttaccctagaaatctgggataaaacttgcaactgcacactggatatcttcaaaaccacaatcccacatgcgctgttgacctggcgacccaattctggagaaactgcccccccacctccatctcctgtaagtgaaaagccattggatacaatatcacagaagtctgtagatattcatgattctattcaaccaaggtctgtggataacagaccacaagcaccactggtttctgcgtctgctgttaatgaagaagtcagcaaaattaaatctacagcaaaatttccagaacaaaaattgtttgctgccctgttgattaaatgtgttgtgcagctggaactcatccagactatcgacaacattgtcttcttcccagccacaagtaagaaagaagatgcagaaaacttagctgcagcacagagagatgcggtggactttgatgttcgcgttgatactcaagaccaaggaatgtaccgctttttaacatcacaacaactttttaagctactggactgcttattagagtcacatagatttgcaaaagcgtttaattccaacaacgaacagaggactgccctgtggaaagcaggattcaaaggcaaatccaagcccaaccttctgaagcaggagaccagcagcctggcctgtgggctgcgcattctcttccggatgtacatggatgagagccgcgttagtgcctgggaggaggtccagcagaggcttttgaatgtctgcagtgaagcactaagttacttcctcactctaacatcagaaagtcatcgagaagcctggactaacttactgcttttgtttctaactaaagttctaaagataagtgataataggtttaaagctcatgcatcattctactaccctctcttatgtgaaattatgcaatttgacttgattcctgaacttcgtgctgttcttagaagattttttctgcgaatcggagtagtttttcagatatcacaaccacctgaacaggaacttggaataaacaagcaatgatgggaacttaatatttttgttggcatttacatccctctgctctttaaaaggacgctggagctgaggtttcctacctgaaaaatgatttctctggattgcagtgtctgagttactggtaaagatgcttagaagtcttactcaaacttgcaacactccagtcccttttagtgctggtggattttgtgtgttatattggcctcatgttgagcagaaagcctgtttaaacagtgtcagctcatgctcacgggtccttccctgtcttccacggcaggaaaagccccacgtttttggcaggtgtggaagtgaaacttacccaaagaactatagatgtaaagattgaacttctacaagaagtacaactcaggagagctgtattttgaaggataaaatgtttataattggggagtggggagagaagaagaaattattgttcatggtaaaagatatttagcaactatggtattcttattctgaagatttttgcacactcaggctatctgagatactggtaatcatcctgtgaaaaatgtacagagatgcaggtctgtaatataaaaatcttaaaacattatatagttcttcctgcactgttttctttattttcttattcatttgctaaatacccataatattttgtcaaatgcactaaacatttgggtggaactttcttttttattttatagggatttttagttttgccctttttggtaggtggtgattttgaggctgtaacatgcccagaagctgttgtggccgacacttcaacaatagggaaaaaaaggtagaaaatatccctactgacagtaactacctgtcacatatttctcttaggacttttaaagatgagccattaaaatagaatgatcctttatggaccaaaacttgaatcactgcaaaatgaatccagattgctgtcattttcttttcttttgggtggtggggcttgatgtagattttactctatgtacagaatttaacgttgaatatattaaaataacaaatctggcatggtttgcggaggttagatttactggaaatgtattcatactgtgaattgtgctctgatggttaaaagacaagattgtcaagcattccgtattaacagtggatgtagaaaattttttcagatggacaaaatgtatatggtacagatgtaaagttttctatgtaaaaaattctgtacaactttctgtacaatattgattcccatctggcatattctaatcaggttataggtcaataaagtttttgaattatttcatcagtgcaatcaaaacctgtataacccacccccatgtttcattgattctggtctattaaggctgaacaactatggaaaagacattttcagccagaactacaaattcaatattgtttggttctggtattttctttccagcttctagcattagatcctccttacactgtacttaccataggatacttatttttaaggcaatttttaaaatttttatttatcttg

SEQ ID NO: 60622 - DNA, 1720 bp, Homo sapiens
tttttttttatacaaaaaaatttttatgggagtacagtttcaaatttagagcttccacgcttacaaatgtgattggatatttaggatacataatttattcttaaaatacacaacttatatacagatattaaaaactcagtctccaaaatgctcaataaagatgtctgggtgacacttatagaattgacctagcaaattttttcttctctttggcagaaagttttgaatcctcatcaagagtttttagtaaattcaacagctcatctttggttgtcttctctgtattgttggaatagtcacgttgatcaattctctggcaataaatatatcctgcatctctatttggatctcttccgttctgtatggccataaggcttaaccacttacaattttatgtgagagttccaggaatcttaaaaacatctttctgatgatccatttaaaaagagtaccagaagatctgttttgcctttggataaatttttattgtcaacaatagcttttgagaatatccttttcacaaccattcggttgtcactttctttctgtaatttaaactcagaaggatttgctgcaacagccatgaaatacagtagtcttctaaattcttctctattttggaaatctaaaagctttagaaggagctgggtagcttctaaagctatttccgtcttcccattcactaagagttctgcaattccattatgaacgtcagataagtgatttaacagaggttccctactactgtaatatctgccaatggcatcaaacagaagttctttcactaagtctgttcggtctggttgctcaggaaagcttctgcttatttccaccaccatttggtctggaaggtattctaaacagtcaattgctgccgagagccactcatcttcctgagagtcactataagccttgagaatccctcgatccagatagttactgctgttgaccatggtggactgcctcttaggttgaggaattttaggtacagcctcttgctgtttcagtaaggagtcaagaagtggaaggtctacaagttgtagtagacgcccaattgtttcttcttgccacacttcattaataacttgtggagacaaggttgtagagatatttacatgaggggagttggcaggctttaaactcagattttcccacaggtcctctaaactggctgatctgatatcggatgacttaaataatgcatctgcatacctggcaggtgaatatagtttgttctctttgcctaactgactgtcttggttaggtattgtggtgaatctataaaggctgcaactactatcttcaaatgtaggttttttgtcttttccaaagactttggttggaactgcttcaaatactttgtagtccataagcgcttgacacactctcaccactttggctcgaggaatatctacatcaccaaaatacttattctgaattaggtgagaaaaaatgacatccacagcttctgaaccaacaaagcagtcattatgtcgttttaaacggtgccttcgttttttcacttccacttgtgtttgaagagtgtttatgatgctgctccatacatacgtggctccaaatggcttctgagctacactgaaacccggaggcctgtgcgcggggctgtggagagccgagaggttcagcgcagcagccttctcctgcacggtggccatggcccttgctccccggacgccaactcctcctcgtgccgaattcg

SEQ ID NO: 60623 - DNA, 2485 bp, Homo sapiens
ttttttttttttcacagttctgacatttttattcactgatcataaatatagtctcatgagcattaaggtgatcatgaatgatgtactagcacctggaacatgaccatcatggagcactcactgattccccatcactggccaaagaagtcggggcatcttcctttcaccaagtgttcaactttggagggaccctccttctggtgcagcaattttattcttggcttgttctcaacaattaaaaaatcataaaagactgagtgtttgcaataaaatatcaaagaggataagaagattttctgttcttcttaaagtctaaagtaaaaaggggaggtagggaagaaggaaaggaaaggggaaagatgtcagggatctgccacgtttcttccttcctccagagcattttacaaaaacaaaaccggggaggtatttattaatgctgtttggagatgggttgcgtctctctgatgagccactcgagagcttcctggcggccctgtttctgcaattccttcccaatcacatccctgcaggtcaggtggtaattgttgagccagtcgcactctttgtctgtaagagaatccacatctatcattttggtctgaattggaaccaatgttagaggttcaaaggtcaggcttccccggttattaaaattatacttggtcttcacaggaaccacaaggacaacattctcaatgcgaattccaaaagccccatcttcatagtacccgggctcatcagtgacaatcatgcctgcctccaagggctcatcagagaatgttttgtaactgatgccgcaaggaccctcatggacattcaaaaaagacccaacaccatgtccagtcccgtgcaagtaatctaggcctgaatcccataaagctgaacgggcaaaggagtcaagaaggtgacctttggttccagtcgggaaaacggctgcactcacagctatgtggcccttgaggacatatgtgaagcattccttctcgtaggctgtaggggtcccaaaatgcattgtccgcgtcacatctgtggtgccatccttgtattgagcacccgagtcaataaggtacacctcatccagggacaaggtcctattcgtctcagggactggcgcgtagtgaatgatggcgccgttgggtcccgtactggaaattgttgggaagctcaggtccacaaagtctgcctgttgcctgcgaaactcctcagctttgtcagcagctgagatctctgtcacaccacctttgggaacctctttctccagccagttaaagagttcacagagagcaacagcatctttaatgtgagcccgcctcatgccttctgactcaagctgaattcttcacaagctttggcgatgcagatgggggtgtaaggcatacagcagcggtggtccttggggatggtctcgctcacagcatagctggccttgtcactgacccacaccttctcccttggggagaggtcagcacacagggccttgagctcgctcaggatggacttgtagggatgcacctggatcctgtattcggcttccagacccaagtcaagaagcaggtgctccttcacactgggggcgtctatgcggtcaccatcaatgaagagcatgatcgtctctagtcctatgattgcgtaggagaaaaatactggattgtgctccacatctgatcctcggagattaaatagccacgcaatctcatccaaggcagtgaccacaaaccacatgacgttcctctcagccattttcaaccgaaggtctgcaaccttgtccttccaggagatgcctgtgtaatccaggcccagtgtgaggagaggcttgcaagggcgctcaggacggtctgtccagattttgtcaacgaggttctccttgacaggaatgaggtgatggccggcacttctcagaactttggccattttcttccaataatctgtaggaatgatcaaggggtccacaccaaccctggatccttcaggaagcacactcaccagccagtcttcctgagttggtgtgtccttcagacccatcttcataagtgtccagttgctgtccatttgcttggcagcctggagaaagtagcgcccgtcagtccacatggctgcatgctcttctgtgatgatggctgtgcccgcagagccatcgaatccagagacaaaagcccgccgacagtcacatggagcaatatactcactctgatgagcatctcccgatgggatgatgtaggcctggatcggttcggtcacatactcagagttcctcatggcttgtctcagctgccgaagcagctctgaagtcacctttggaggcattctgccgtctgtttccacacctgtgtctcctgagtgtgtcacctcgttaggttcaattattcttaaatttctcagttgaaaatcctggtgattcacccttactcgcggtggctttttggaggctgccattcggcggtgacgtgccccagcccacgtcaggggagcgcagaccagcacgaaa

SEQ ID NO: 60624 - DNA, 1513 bp, Homo sapiens
ttttttttttttctcaaagatctatatattttcagccacaaagcttaaaatctcaaatgtcaacgagtaggatttcaggcaaaataaaagaaaagtagaaaataaaaatcagaatgtagatccatgttgggagagcaggttaactttccaggtaattcatactgagattgtttacacagctcctgcgggtccggctttctgtggctttctttagctaaggccagaaattcaaaaaaatcccaatggtttaatggatccctcctcacccatccatccacccaatgagaaagaagaatttgtggagggcagggggatatcacaagagaaaatggcacaccagggtgtaatgtctcaaataaaaggcttactttacacttaatactagtatattactgttcataataatatatcgtaaaattatcatgttataaaaatatataataagatcttataagaaactctgaatggattgatgcttgataattctcttaagtagaacacaatgaaataatagtggctggctaagttccatcaatttttttttaattctttttgactttttctcgtggtcttctgttatcctttctgcaggtcgcttcttcaaccccttacattttcctggtttgtagtttgcttaggtcttgcttctgcatatgaatccttccataagttgtaccaaaagtatcatgggaaatatttttcttcttctttggcttgagagcttttggcattttcatagataatttataaaggtcatccgatgccaggtgtgtcctcctcagaaccagatccaatgagggtcccatctcttccaattcaatccgtggtgttctgcaaccagatttcttcaacagcaacttatagcttcgaaagtaaatcttcccattcagtgcagtgaagtgcagaacatactctaatccagccaggcggatatttgatactgtggggcctctgaagaaatcaataagaagactttttagtcttctataatcttctgttacatcgaaatcatcgccagcaaatatcagcatgggttttgttccctcaggacatttactgttcttaatgtcttttagagagacaaaattctcaatacctaattcaatcatatccagcacatggtagtcatacatacgacctattactagattatttggccgcttcttattatgggagccaaacatgaataaagaacaatctgacttctttgaaaagaattccagtgatgtctgatcctcaaaaggtcttgtaatatttttctttttatatagtacaccgtatggttttttcagtgcatacacatctttaagtacttttgtcactgttgcatttgcatttccccctttaatcagcatggcatttttaatattttcattgagtttcggttctctcttctcaaggaatctcttggctcttttcgttttgggctttactactcgatccagagtgtccatcgctaccgctacctgcaactcttaaccagggggcatgcacgtgccctcggcgattacgt

SEQ ID NO: 60625 - DNA, 3196 bp, Homo sapiens
gcggccgcgctggggatgttgctgtggttccccgcctgtcaggcgttcaacctggacgtggaaaagctcacagtgtacagcggccccaagggcagctacttcggctacgccgtggacttccacatacccgacgcccgcacagcgagtgtcttggtgggggcgcccaaagccaacaccagccagcccgatatcgtggaagggggagccgtctattactgtccttggcccgcggaggggtctgcgcagtgcaggcagataccgtttgacaccaccaacaacagaaagatcagagttaatggaaccaaagaacctatcgagttcaaatccaatcagtggtttgggagcaacagtgaaagcttcacaaagggaaaagttgtgggcctgttgctcctttattattcacttggaggaactttttaaaaccgacaccagaaaaaggaccagttggcacctgctatgtagcaattcagaacttcagcgcttatgccgagttctctccttgcggaaacagcaatgctgatccggaaggccagggttactgccaagcaggatttagtctggatttttataagaatggagaccttattgtgggaggacctgggagtttctactggcaaggacaagtgatcactgccagtgttgcagatatcattgcaaattactcattcaaggatatcctcaggaaactggcaggagaaaagcagacggaagtggctccagcttcctatgatgacagttaccttggatactcagttgctgctggggagtttactggggattctcagcaagaattggttgctggaattccaagaggagcacagaattttggatatgtttccatcattaactcctacgatatgacgtttattcagaatttcacgggagaacagatggcatcttattttggatataccgttgtcgtatcagatgttaacagtgatggactggatgatgtcctggttggggcacctctctttatggaacgtgaatttgagagcaaccccagagaagtagggcaaatctacctgtatttgcaagtgagctctctcctcttcagagacccccagatcctcactggcaccgagacgtttgggagattcggtagtgctatggcacacttaggagacctgaaccaagatggctacaatgacattgccatcggagtgccttttgcaggcaaggatcaaagaggcaaagtgctcatttataatgggaacaaagatggcttaaacaccaagcccttccccaagttctgccaaggagtgtgggcctcacatgctgtcccttccggatttggctttactttaagaggagattcagacatagacaagaatgattacccagatttgattgtgggtgcatttggaacaggaaaagtcgctgtttacagagcaagaccggttgtgactgtagatgcccagcttctgctgcacccaatgattatcaatcttgaaaataaaacttgccaggttccagactctatgacatctgctgcctgcttttctttaagagtatgtgcatctgtcacaggccagagcattgcaaacacaatagtcttgatggcagaggtgcaattagattccctgaaacagaaaggagctattaaacggacgctcttccttgataaccatcaggctcatcgcgtcttccctcttgtgataaaaaggcagaaatcccaccagtgccaggatttcatcgtttaccttcgagatgaaactgaattccgagataaattatctccaatcaacattagtttgaattacagtttggacgaatccacctttaaagaaggcctggaagtgaaaccaatattgaactactacagagaaaacattgttagtgaacaggctcacattctggtggactgtggagaagacaatctgtgtgttcctgacttgaagctgtcggctagaccagataagcatcaggtaatcattggagatgaaaatcaccttatgctcataataaatgcaagaaatgaaggggaaggagcatatgaagctgaactctttgtaatgataccagaagaggcagattatgttggaatcgaacgcaacaacaagggatttcgaccactgagctgtgagtacaagatggaaaatgtaaccaggatggtggtgtgtgaccttgggaaccctatggtgtctggaacaaattattccctgggcctccgatttgcagttccacgtcttgagaaaacaaacatgagcattaacttcgatctccaaatcagaagttccaacaaggacaatccagacagcaattttgtgagcctgcaaatcaacatcactgctgtagcgcaggtggaaataagaggagtgtcacaccctccgcagattgttctgcccattcataactgggaaccagaagaggagccccacaaagaggaggaggttggaccattggtggaacatatttatgagctgcacaatattggaccaagtaccatcagtgacaccatcctggaggtgggctggcctttctctgcccgggatgaatttcttctctatattttccatattcaaactctgggacctctgcagtgccaaccaaatcctaatatcaatccacaggatataaagcctgctgcctccccagaggacacccctgagctcagcgcctttttgcgaaactctactattcctcatcttgtcaggaagagggatgtacatgtggtcgaattccacagacagagccctgcaaaaatactgaattgtacaaatatcgagtgtttacaaatctcctgtgcagtgggacgactcgaaggaggagaaagcgcagtcctgaaagtcaggtcacgattatgggcccacaccttcctccagagaaaaaatgatccctatgctcttgcatccctggtgtcctttgaagttaagaagatgccttatacagatcagccagcaaaactcccagaaggaagcatagcaattaagacatcagttatttgggcaactccgaatgtttccttctcaatcccattatgggtaataatactagcaatacttcttggattgttggttctcgccattttaaccttagctttatggaagtgtggattctttgacagagccagacctcctcaggaggacatgaccgacagggaacagctgacaaatgacaagacccctgaggcatgacaagaaaaaaaaagaagaccaaagacctcaaacactggtcctgttcaaaaaaaaggggg

SEQ ID NO: 60626 - DNA, 9754 bp, Homo sapiens
gcggccgccttagcgcccggtgcttgggtcggcgccgggagctgaggagcgagcatacttcaaaagcacaaccaggacatggagcggggacagaggcggcgactaggggaaggtgaagccgtcgctgcaggaggaggagcaggaggaggtgacgcaggagaaacgcaccgcccggagcccgtctgagctcagcgagagccccagcctgaggggagaaggggaagagggccgtcgccggccaaggaggaggaggaggcgggcgcggcgaggagcgagttccggcgccggtgtgcagccttttggttgagacgcccgcagccccgagcccggccgccgcagcctttcgatacactttgttgccggtcacccccgggcctgggatgcacccagggtaggtctcgtcccgggaccgagccccaccgtcgcctggtgcctcccgcctccgtgtgccctggttgtgagaagacgtctgtgtcgtgcggttatgcaatggtctctgcaagatggtttattcttgaattggacctttttaagactgacaaatgctggtacttcatcttctataagtggactataatttcttttctcaagacaactacataagcagacaaaattgcaaagatctgccctgtgtcgagtatgacagccacgactcgtggctctccggtcggagggaatgacaaccagggccaggctcctgatggacagtctcagccccccctccaacagaatcagacttcatcgcctgattcttccaatgaaaattccccggcaactcccccagatgagcaaggtcaaggtgatgccccaccacagcttgaagatgaggaacctgcatttccacatactgacttggccaagttggatgacatgatcaacaggcctcgatgggtggttccagttttgccgaaaggggaattagaagtgcttttagaagctgctattgatcttagtaaaaagggccttgatgttaaaagtgaagcatgtcagcgatttttccgtgatgggctaacaatatcattcactaaaattcttacagatgaagcagtgagtggctggaagtttgaaattcataggtgtctggtggagctatggtgtggcccaagttgtccccaagactggtttcgcacttttagaacttcttgccatggccttaaatcctcattgcaaattccatatctacaatggtacacgtccatgtgaatcagtttcctcaagtgttcagttgcctgaagatgaactctttgctcgttctccagatcctcgatcaccaaagggttggctagtggatcttctcaacaaatttggcactttaaatgggttccagattttgcatgatcgttttattaatggatcagcattaaacgttcaaataattgcagcccttattaaaccatttgggcaatgctatgagtttctcactcttcatacagtgaaagaagtactttcttccaataatagaaatggttccacagtttttagaaaacttaactgatgaagagctgaaaaaagaagcaaagaatgaagccaaaaatgatgctctttcaatgattattaaatctttgaagaatttagcttcaagggttccaggacaagaagaaactgttaaaaacttagaaatatttaggttaaaaatgatacttagattattgcaaatttcttctttcaatggaaagatgaatgcactgaatgaagttaataaggtgatatctagtgtatcatactatactcatcgacatggtaatcctgaggaggaagagtggctcacagctgaacgaatggcagaatggatacagcagaacaatatcttatccatagtgttgcgagatagtcttcatcagccacagtatgtagaaaagttagagaagattcttcgttttgtcatcaaagaaaaagctctgaccttacaggatcttgataatatctgggcagcacaggcagggaaacatgaagccattgtgaagaatgtacatgatctcctggcaaaattggcatgggcttttttctcctgaacaacttgatcatctttttgattgttttaaggccagttggacaaatgcgagtaaaaagcaacgtgaaaagctacttgagctgatacgtcgtcttgcagaagatgataaagatggtgtgatggcacacagagtgttgaaccttctgtggaatctggctcacagtgatgatgtgcctgtagatatcatggacctggctctcagtgcccacataaaaatactagattacagttgctcccaggaccgtgatacacaaaagatccaatggatagatcgctttatagaagaacttcgcacaaatgacaaatgggttattcccgcactgaaacaaattagagaaatttgtagtttgtttggtgaagcgcctcaaaatttgagtcaaactcagcgaagtccccatgtgttttatcgccatgacttaatcaatcaacttcaacacaatcatgccctagttactttggtagcagaaaaccttgtaacttacatggaaagcatgagactatatgctagagaccatgaagattatgacccacaaactgtgaggctgggaagtagatatagtcatgttcaagaagttcaagaacggcttaacttccttagatttttattgaaggatggtcagctgtggctatgtgctcctcaggcaaaacaaatatggaaatgcttagctgagaatgcagtttacctttgtgatcgtgaagcctgttttaagtggtattccaagttgatgggggatgaaccagacttagatcctgatattaataaggacttctttgaaagtaatgtgcttcagcttgatccttctctgttaactgaaaatggaatgaagtgttttgagcgattcttcaaagctgtgaattgtcgagaaggaaaactagtagcaaaaaggagagcctatatgatggatgacttggagttaataggattagattacctttggagggtcgtgattcagagtaatgatgatattgccagcagagctatagatctcctcaaagagatatacacgaaccttggtccaagactacaagtcaatcaggtggtgatccatgaagacttcattcagtcttgttttgatcgtctgaaggcttcctatgacacattgtgtgttttggatggtgacaaagacagtgttaattgtgcaagacaggaagctgttcgaatggttcgagtattaactgttttaagggaatatataaatgaatgtgacagtgattatcatgaggaaagaacaattctccctatgtcgagagcattccgcggtaaacacctctcttttgtagttcgatttccaaaccagggcagacaggttgatgacttggaggtatggtctcatacaaatgatacaattggttcagtacgacgatgtattctcaatcgtattaaagccaacgtagcccatacaaaaattgagctctttgtgggcggggagctgatagatcctgcagatgatagaaagttgattggacaattaaacttaaaagataaatcgcttattacagccaaacttacacagataagttccaatatgccttcaagccctgatagctcttctgattcctccactggatctcctggaaaccatggtaatcattacagtgatggtcccaatccagaagtggaaagctgtttgcctggagtgataatgtcactgcatcccagatacatctcttttctttggcaagttgcagacttaggtagcagcctaaatatgccaccccttagagatggagcaagagtacttatgaaacttatgccgccagatagcacaacgatagaaaaattaagagctatttgtttagaccatgccaaacttggagaaagcagccttagtccatctcttgactcacttttctttggtccttcagcctcacaagtgctatatctaacagaggtagtctatgccttgttaatgcctgctggtgcacctctggctgatgattcctctgattttcagtttcacttcttgaaaagtggtggcctaccccttgtactgagtatgctaaccagaaataacttcctaccgaatgcagatatggaaactcgaaggggtgcctacctcaatgctcttaaaatagccaagcttttgctaactgccattggctatggtcatgttcgagctgtggcagaagcttgtcagccaggtgtagaaggtgtgaatcccatgacacagatcaaccaagttacccatgatcaagcagtggtgctacaaagtgcccttcagagcattcctaatccatcatccgagtgcatgcttagaaatgtgtcagttcgtcttgctcagcagatatctgatgaggcttcaagatatatgcctgatatttgtgtaattagagctatacaaaaaattatctgggcatcaggatgtgggtcgttacagctagtatttagcccaaatgaagaaatcactaaaatttatgagaagaccaatgcaggcaatgagccagacttggaagacgaacaggtttgctgtgaagcattggaagtgatgaccttatgttttgccttgattccaacagccttagatgctcttagtaaagaaaaggcttggcagacattcatcattgacttactattgcactgtcacagcaaaactgttcgtcaggtggcacaggagcagttctttttaatgtgcaccagatgttgcatgggacaccggcctctacttttcttcattactctactctttactgttttggggagcacagcaagagagagagctaaacactcaggcgactactttactcttttaagacacctttttaattacgcttacaatagtaatattaatgtacccaatgctgaagttcttctcaataatgaaattgattggcttaaaagaattagggatgatgttaaaagaacaggagaaacgggtattgaagagacgatcttagagggccaccttggagtgacaaaggagttactggcctttcaaacttctgagaaaaaatttcatattggttgtgaaaaaggaggtgctaatctcattaaagaattaattgatgatttcatatttcctgcatccaatgtttacctacagtatatgagaaatggagagcttccagctgaacaggctattccggtctgtggttcaccacctacaattaatgctggttttgaattacttgtagcattagctgttggctgtgtgaggaatctcaaacaaatagtagattctttgactgaaatgtattacattggcacagcaataactacttgtgaagcacttactgagtgggaatatctgccacctgttggaccccgcccacccaaaggattcgtggggctgaaaaatgccggtgctacttgttacatgaattctgtgattcagcaactctacatgattccttccattaggaacggtattcttgccattgaaggcacaggtagtgatgtagatgatgatatgtctggggatgagaagcaggacaatgagagcaatgttgatcccagggatgatgtatttggatatcctcaacaatttgaagataaaccagcattaagtaaaactgaagatagaaaagagtacaacattggtgtcctaagacaccttcaggtcatctttggtcatttagctgcttctcgactgcaatactatgtgcccagaggattttggaaacagttcaggctttggggtgagcctgttaatctgcgtgaacaacacgatgctttagaattttttaattcattggtggatagtttagatgaagctttaaaagctttaggacatccagctatgctaagtaaagtcttaggaggttcctttgctgatcagaagatctgccaaggctgcccacataggtacgaatgtgaagaatcttttacgaccctaaacgtagacattagaaatcaccaaaatcttcttgattctttggaacagtatgtcaaaggagatttactagaaggtgcaaatgcatatcattgtgaaaaatgcaataaaaaggttgataccgtaaagcgcttgctgattaaaaaattacctcctgttcttgctatacaactaaagcgatttgactatgactgggaaagagaatgtgcaatcaagttcaatgattattttgaatttcctcgagagctggacatggaaccttacacagttgcaggtgtcgcaaagctggaaggggataatgtaaacccagagagtcagttgatacaacagagtgagcagtctgaaagtgagacagcaggaagcacaaaatacagacttgtgggtgtgctcgtacacagtggtcaagcgagtggggggcattattattcttacatcatccaaaggaatggtggagatggtgagagaaatcgctggtataaatttgatgatggtgatgtaacagaatgtaaaatggatgatgacgaagaaatgaaaaaccagtgttttggtggagagtacatgggagaagtgtttgatcacatgatgaagcgtatgtcatacaggcgccagaaaaggtggtggaatgcttatatacttttttatgaacgaatggacacaatagaccaagatgatgagttgataagatatatatcagagcttgctatcaccaccagacctcatcagattattatgccatcagccattgagagaagtgtacggaaacagaacgtacaattcatgcataaccgaatgcagtacagtatggagtattttcagtttatgaaaaaactgcttacatgtaatggcgtttacttaaaccctcctcccgggcaagatcacctgttgcctgaagcagaagaaatcactatgatcagtattcaacttgctgctaggttcctctttactacaggatttcacacaaagaaagtagtccgtggctctgccagtgattggtatgatgcattgtgtattctccttcgtcacagcaagaatgtacgtttttggtttgctcataacgtcctttttaatgtttcaaatcgcttctccgaataccttctggagtgccctagtgcagaagtgaggggtgcgtttgcaaaacttatagtctttattgcacatttttccttgcaagatgggccatgtccttcaccttttgcctctcctggaccttctagtcaggcttatgacaacttaagcttgagtgatcacttactaagagcagtactaaatctcttgagaagggaagtttcagagcatgggcgtcatttacagcagtatttcaacctgtttgtaatgtatgccaatttaggtgtggcagagaagacacagcttctgaaattgagtgtacctgctacttttatgcttgtgtctttagatgaaggtccaggtcctccaatcaaataccagtatgctgaattaggcaaattatactcagtagtgtcacagctgatccgctgttgcaatgtctcttcaagaatgcagtcttcaatcaatggtaatcctcctcttcccaatccttttggtgatcctaatttatcacaacctataatgccaattcagcagaatgtggcagacattttatttgtgagaacaagttatgtgaagaaaatcattgaagactgcagtaattcagaggaaaccgtcaaattgcttcgtttttgctgctgggagaatcctcagttctcatctactgtcctcagtgaacttctctggcaggttgcatattcctatacctatgaactgcggccctatttggatctgcttttgcaaatcttactgattgaggactcctggcaaactcacagaattcataatgcactgaaaggaattccagatgaccgagatgggctgtttgacacaatccagcgctctaagaatcactatcaaaaaagagcataccagtgtataaaatgtatggtagctctatttagtaactgtcctgttgcttaccaaatcctgcagggcaatggagatcttaaaagaaagtggacctgggcagtggaatggcttggagatgaacttgaaagaagaccatatactggcaatcctcagtacacttacaacaattggtctcccccagtgcaaagcaatgaaacgtccaatggttatttcttggagagatcacatagtgctaggatgacacttgcaaaagcttgtgaactctgtccagaggaggagccagatgaccaagatgctccagatgaacatgagtcgcctccacctgaagatgccccattgtacccccattcacctggatctcagtatcaacagaataaccatgtgcatggacagccatatacaggcccagcagcacatcacatgaacaaccctcagagaactggccaacgagcacaagaaaattatgaaggcagtgaagaagtatccccacctcaaaccaaggatcaatgaaatgcacataattaactggttccatcaagactgtgcacccaggccttacagtccaacctttttctgtgtctggctaatatttaaaactagaaaaactattcctaatcaacatggagtggagagtttattcactgtcttatctgcagaaatttgctgtcaatatgtaacccgcctgcagtggaaagtgtatagtgttttgtaataaatggcctgatgctaatgtgtaaatggcaaaggtgtatatagtatattaatgttgactgttaattcttaagcaagaaacttttttcttgatgagactcacagatctacacaaactacaaaagttaattttcttgttacacccactgcactctgcaaccagtgttgcgcctgcctcatggcagttggatcagctcctttacaaaaaagaaaaaaaaaaaaccaacagcaacaaaacagagcccatccatgtcagccacaccaatagtttcatgttaattctttgccactggagtcaattttgctatgagcaatgtaaggctggtaacctttaaattatttggttgatgtggaaaattggtgatgtaacactgtttctagatttttttcattgcctttttattctgatattaggttaatcactttgaagctatagttatgctgtaacatttagcatggcttcacaccaagttagtgtagccaatgaggaaaaagttaccataatgacagcagttgtccgagaagtgacagctgtattactcagagcttttacttcttacacctagaatattaaaatataaaacaaggggagaaatgtgacagtctattttcagttgcacatatgttccttatatataatgtttgacagttcaatctctgggtggaataaagaacacttacgtatcagtaatgggaatttttaaagatttaaaacaaatatgcaaaaatttgctatgccaagatgctggagcataatataagactgtatttggtgtgcttgttttgtttctttggtagagtttattaggtgaatcttctaaaactttccttctgttggatcccagtgacgtggaagtcatcagaaccccacggtacttggagtacctctctgcaccaagatagctggctgattttctgctcagtcacaattttacttgaaagcaagaattgtcctagctccttttccattattccaaaacgtttaacgttcaaagcagggtctcattaaaaaagaaactactggttgatataattgagatattacaatttcagaataaacatttgattaaaaataaggaaatcctcagttcatactgtatttaaaagagaattggtaacttgaatgtgtgtaattttttggaacctgtctaaaaaccaaatacccctgcaaacagatacagcccaccctattctatttaaatattttgctgttttattttatagaaattattttgctgaattcacaaatagaatttgatttaag

SEQ ID NO: 60627 - DNA, 1554 bp, Homo sapiens
ccgcacgtccgaggatacccacgcgtacgggcgatggtccccggataccgggtctatcacagtctcgggcagggagtctgaatcttttaggggagtgggcccaagccgggtgcaaaaaacggggaagggccttccctggctccgtcccggccactttgaccgaatcagcctgttctttcccgaccccgtctcctatcccctagaactgccacgtggggatgagatttgctgggctggtagcggcggctgctgcgggaggtcccgcccacgtgaagccagcctaactgagctctggactttggggacagctgtcagtggcctaggccgcaggacaccatgaagcaactgccagtcttggaacctggagacaagcccaggaaagcaacatggtacaccttgactgtccctggagacagcccctgtgctcgagttggccacagctgttcatatttacccccagttggtaatgccaagagagggaaggtcttcattgttgggggagcaaatccaaacagaagcttctcagacgtgcacaccatggatctgggaaaacaccagtgggacttagatacctgcaagggcctcttgccccggtatgaacatgctagcttcattccctcctgcacacctgaccgtatctgggtatttggaggtgccaaccaatcaggaaatcgaaattgtctacaagtcctgaatcctgaaaccaggacgtggaccacgccagaagtgaccagccccccaccatccccaagaacattccacacatcatcggcagccattggaaaccagctatatgtctttgggggcggagagagaggtgcccagcccgtgcaggacacgaagctgcatgtgtttgacgcaaacactctgacctggtcacagccagagacacttggaaatcctccatctccccggcatggtcatgtgatggtggcagcagggacaaagctcttcatccacggaggcttggcgggggacagattctatgatgacctccactgcattgatataagtgacatgaaatggcagaagctaaatcccactggggctgctccagcaggctgtgctgcccactcagctgtggccatgggaaaacatgtgtacatctttggtggaatgactcctgcaggagcactggacacaatgtacccagtatcacacagaagagcagcattgggacccttgccttaaatttggatactccttcctacccccctgggacgattgggacccattcccatgtggtatcattcccatgggcaagtgacgtgtgcttctgagaaagaagattcccaactctctcactctgaaccatgaagctgagaaagaggattcagctgacaaagtaatgagccacagtggtgactcacatgaggaaagccagactgctacactgctctgtttggtgtttggtgggatgaatacagaaggggaaatctatgacgattgtattgtgactgtagtggactaataaaacccacatttttattacctgtcagttactttcagaatagttaagtaaaacattagctgttttatacctccaaaaaaaaa

SEQ ID NO: 60628 - DNA, 2006 bp, Homo sapiens
ctgtggcatctcctgtcacattgggaaatgaagaattccaggacatgggcttggagggcgccggtggagctatttcttctctgtgctgccctgggctgtctcagtttgcctggctccagaggtgaaaggccacattcctttgggtcaaatgcagtcaacaagagctttgctaagagcagacagatgcggagtgtggatgttaccctgatgcccattgattgtgagctgtctagttggtcctcttggaccacatgtgacccctgtcagaagaaaaggtacaggtatgcctacttgctccagccctctcagttccatggggaaccgtgcaacttctctgacaaggaagtcgaagactgtgttaccaacagaccatgcggaagtcaagtgcgatgtgaaggctttgtgtgtgcacagacaggaaggtgtgtaaaccgcagacttctttgcaatggggacaatgactgtggagaccagtcagattgaagcaaactgtagaaggatttataaaaaatgtcagcatgaaatggaccaatactggggaattggcagtctggccagtgggataaatttgttcacaaacagttttgagggcccagttcttgatcacaggtattatgcaggtggatgctccccgcattacatcctgaacacgaggtttaggaagccctacaatgtggaaagctacacgccacagacccaaggcaaatacgaattcatattaaaagagtatgaatcatactcagattttgaacgcaatgtcacagagaaaatggcaagcaagtctggtttcagttttggttttaaaatacctggaatatttgaacttggcatcagtagtcaaagtgatcgaggcaaacactatattaggagaaccaaacgattctctcatactaaaagcgtatttctgcatgcacgctctgaccttgaagtagcacattacaagctgaaacccagaagcctcatgctccattacgagttccttcagagagttaagcggctgcccctggagtacagctacggggaatacagagatctcttccgtgattttgggacccactacatcacagaggctgtgcttgggggcatttatgaatacaccctcgttatgaacaaagaggccatggagagaggagattatactcttaacaacgtccatgcctgtgccaaaaatgattttaaaattggtggtgccattgaagaggtctacgtcagtctgggtgtgtctgtaggcaaatgcagaggtattctgaatgaaataaaagacagaaacaagagggacaccatggtggaggacttggtggtcctggtacgaggaggggcaagtgagcacatcaccaccctggcataccaggagctgccgacggcggacctgatgcaggagtggggagacgctgtgcagtacaacccagccatcatcaaagttaaggtggagcctctgtatgaactagtgacagccacagattttgcctattccagcacagtgaggcagaacatgaagcaggcactggaggagttccagaaggaagttagttcctgccactgtgctccctgccaaggaaatggagtccctgtcctgaaaggatcacgctgtgactgcatctgtcctgttggatcccaaggcctagcctgtgaggtctcctatcggaagaatacccccattgatgggaagtggaattgctggtcaaattggtcttcatgctctggaagacgtaagacaagacaaaggcagtgtaacaatccacctcctcaaaatgggggtagcccctgttcaggccctgcttcagaaacacttgactgctcctagcagatgatacagcagtgggctacatacaatgagagccctgagccctcaagaactcacgccagctcagccctacaccagtttccacctggagttcatgcaagggcaaaaggcagtgccatgcaagctgtttaaaataaagatgttaccttgtaaaatgcaagttgatttaaataaatactgagttaaaggcttaaaaaaaaaa

SEQ ID NO: 60629 - DNA, 3145 bp, Homo sapiens
ggcacgagtggttatgcagcacagcaacttcccagtctcctgaaggagagagagtttcaccttgggacccttaataaagtgtttgcatctcagtggttgaatcataggcaagtggtgtgtggcacaaaatgcaacacgctatttgtcgtagatgtccagacaagccagatcaccaagatccccattctgaaagaccgggagcctggaggtgtgacccagcagggctgtggtatccatgccatcgagctgaatccttctagaacactgctagccactggaggagacaaccccaacagtcttgccatctatcgactacctacgctggatcctgtgtgtgtaggagatgatggacacaaggactggatcttttccatcgcatggatcagcgacactatggcagtgtctggctcacgtgatggttctatgggactctgggaggtgacagatgatgttttgaccaaaagtgatgcgagacacaatgtgtcacgggtccctgtgtatgcacacatcactcacaaggccttaaaggacatccccaaagaagacacaaaccctgacaactgcaaggttcgggctctggccttcaacaacaagaacaaggaactgggagcagtgtctctggatggctactttcatctctggaaggctgaaaatacactatctaagctcctctccaccaaactgccatattgccgtgagaatgtgtgtctggcttatggtagtgaatggtcagtttatgcagtgggctcccaagctcatgtctccttcttggatccacggcagccatcatacaacgtcaagtctgtctgttccagggagcgaggcagtggaatccggtcagtgagtttctacgagcacatcatcactgtgggaacagggcagggctccctgctgttctatgacatccgagctcagagatttctggaagagaggctctcagcttgttatgggtccaagcccagactagcaggggagaatctgaaactaaccactgggcaaaggctggctgaatcatgatgaaacctggaggaattacttttcagacattgacttcttccccaatgctgtttacacccactgctacgactcgtctggaacgaaactctttgtggcaggaggtcccctcccttcagggctccatggaaactatgctgggctctggagttaatgacaactccccaaatgcagagatttacactaacttccattctcagtttccttgtttcttttgattttttttttcctaattgtgtgaggctcttgtgttttagtgggaacaccaaagtttgcctatagtttaggcacttaataggaagaagctctgtacagaaatctgaaagttgttttgctttttgttttcccctttggtaatcaaaattttactatcttttattatttctggcttttcaaccaaacattgttgctaatccctatttttctttaagtgacacacattctcctgtctctggcttcttcaggctgaaatgacatagtctttctcacccttacttcactcttgagaggtagggctcctttataattacatggttgctctcagactttctgtgaaagtttgggagctgtgtgtgtctgtgtgtgtgtgagagagagatcttgtctgcgtgtgtgtgtgtgatcttgtgtgcctgtaggtactgtgtgtcactgaaattacctggagtgaggattacttgtaattaaaatatttataaaagaaacaactttattcacagagtccagctttgggactagtctgtatcttgttttttaagtctaacaacactgataataggaagtaaaaacagaaaggaaaagaaattaccactgggaaaatctttttagttagattgtaggcttcctggggcctcccatgccaggactgcaaagtgatccagccctacctgtcttcccacctgtgtgtcccccgtgtgggaagttggtgtcacttccccttcccaccctcacatctgcttagccagtagccacacccctaaaacatcagactcaccatccaggtgcagctccagaggctacaaaaggcttcatgggacttgaatccccatcctagcttctctctccttcccctcaagacctgatctggttttaaggggcctggagctgggagtctcaagtctgctaagattcacatccatagcccccatggctttgaggagaatcctctctgccattcttccaatctccccagtgggttttgctattattttctaaattgggttaagtctaagaaggtgggggtgagcagggggtttatctgtgtgtagtgagtgcttcatgtgtggaatattcattttcttactgcagtgggacttggggttgaagccacccctcctactctgttggcttagccctgagatggtgacaggctggcctgcagtcagcatcattgtgcatgtgacagcatcaatgtgattagtaatttgtctgttcctcccttgaactgtctgtttagtctgaggtttttaaacttgcaggcagctgactgtgatgtccacttgttccctgatttttacacatcatgtcaaagataacagctgttcccacccaccagttcctctaagcacatactctgcttttctgtcaacatcccattttggggaaaggaaaagtcatatttattcctgcaccccagttttttaacttgttctcccagttgtccccctcttctctgggtgtaagaagggaaattggaaaaaaaattatatatatattctccttttaatggtggggggctactggagaggagagacagcaagtccaccctaacttgttacacagcacataccacaggttctggaattctcatcttcgaacctagagaaataggtgctataaacagggaattaagcaaaatgctggatgctatagatcttttaattgtcttaattttttttctattattaaactacaggctgtagatttcttagttctcacagaacttctatcattttaaactgacttgtatatttaaaaaaaaaatcttcagtaggatgttttgtactattgctagaccctcttctgtaatgggtaatgcgtttgattgtttgagattttctgtttttaaaaatgtagcacttgactttttgccaaggaaaaaaataaaaattattccagtgcaaaaaaaaaa

SEQ ID NO: 60630 - DNA, 3042 bp, Homo sapiens
gcgtggacgcgtgggctagaccataatgcatcattactttccccagggataaccaggtatgtaagctcttgttcagcttcctttgcttccttgcacgcctgagaatgtaactttcgtttctcactcagctcctgtggggaaactcatttgtggagaccagccctctggcttggtgagtgaatctggtttacaccggctcctgccctgccttcactcttctcccctgattcaagactcctctgctttggactgaagcactgcaggagtttgtgaccaagaacttcaagagtcaagacagaaggaagccaagggagcagtgcaatggatttctcagtaaaggtagacatagagaaggaggtgacctgccccatctgcctggagctcctgacagaacctctgagcctagattgtggccacagcttctgccaagcctgcatcactgcaaagatcaaggagtcagtgatcatctcaagaggggaaagcagctgtcctgtgtgtcagaccagattccagcctgggaacctccgacctaatcggcatctggccaacatagttgagagagtcaaagaggtcaagatgagcccacaggaggggcagaagagagatgtctgtgagcaccacggaaaaaaactccagatcttctgtaaggaggatggaaaagtcatttgctgggtttgtgaactgtctcaggaacaccaaggtcaccaaacattccgcataaacgaggtggtcaaggaatgtcaggaaaagctgcaggtagccctgcagaggctgataaaggagaatcaagaggctgagaagctggaagatgacatcagacaagagagaaccgcctggaagaattatatccagatcgagagacagaagattctgaaagggttcaatgaaatgagagtcatcttggacaatgaggagcagagagagctgcaaaagctggaggaaggtgaggtgaatgtgctggataacctggcagcagctacagaccagctggtccagcagaggcaggatgccagcacgctcatctcagatctccagcggaggttgaggggatcgtcagtagagatgctgcaggatgtgattgacgtcatgaaaaggagtgaaagctggacattgaagaagccaaaatctgtttccaagaaactaaagagtgtattccgagtaccagatctgagtgggatgctgcaagttcttaaagagctgacagatgtccagtactactgggtggacgtgatgctgaatccaggcagtgccacttcgaatgttgctatttctgtggatcagagacaagtgaaaactgtacgcacctgcacatttaagaattcaaatccatgtgatttttctgcttttggtgtcttcggctgccaatatttctcttcggggaaatattactgggaagtagatgtgtctggaaagattgcctggatcctgggcgtacacagtaaaataagtagtctgaataaaaggaagagctctgggtttgcttttgatccaagtgtaaattattcaaaagtttactccagatatagacctcaatatggctactgggttataggattacagaatacatgtgaatataatgcttttgaggactcctcctcttctgatcccaaggttttgactctctttatggctgtgcctccctgtcgtattggggttttcctagactatgaggcaggcattgtctcatttttcaatgtcacaaaccacggagcactcatctacaagttctctggatgtcgcttttctcgacctgcttatccgtatttcaatccttggaactgcctagtccccatgactgtgtgcccaccgagctcctgagtgttctcattcctttacccacttctgcatagtagcccttgtgctgagactcagattctgcacctgagttcatctctactgagaccatctcttcctttctttccccttcttttacttagaatgtctttgtattcatttgctagggcttccatagcaaagcatcatagattgctgatttaaactgtaattgtattgccgtactgtgggctggaaatcccaaatctagattccagcagagttggttctttctgaggtctgcaaggaagggctctgttccatgcctctctccttggcttgtagaaggcatcttgtccctatgactcttcacattgtctttatgtacatctctgtgcccaagttttccctttttattaagacaccagtcatactggctcagggcccaccgctaatgccttaatgaaatcattttaacattatattctctacaaagaccttatttccaaataagataatatttggaggtattgggaataaaaactccaacatataaatttgaggaaggcacgatttcactcataacaatcttaccctttcttgcaagagatgcttgtacataattttcctaataccttggtttcactagtagtaaacattattattttttttatatttgcaaaggaaacatatctaatccttcctatagaaagaacagtattgctgtaattccttttcttttcttcctcatttcctctgccccttaaaagattgaagaaagagaaacttgtcaactcatatccacgttatctagcaaagtacataagaatctatcactaagtaatgtatccttcagaatgtgttggtttaccagtgacaccccatattcatcacaaaattaaagcaagaagtccatagtaatttatttgctaatagtggatttttaatgctcagagtttctgaggtcaaattttatcttttcacttacaagctctatgatcttaaataatttacttaatgtattttggtgtattttcctcaaattaatattggtgttcaagactatatctaattcctctgatcactttgagaaacaaacttttattaaatgtaaggcacttttctatgaattttaaatataaaaataaatattgttctgattattactgaaaagatgtcagccatttcaatgtcttgggaaacaattttttgtttttgttctgttttctttttgcttcaataaaacaatagctggctctaaaaaaaaaa

SEQ ID NO: 60631 - DNA, 1645 bp, Homo sapiens
ggcacgagaggggggatcgctgggagcggttgcggcgtgcggggagctgagttatagctgtgacttctgccctgccaggccgcacacaagctggctgacccggtttgtaaaaatggaatttcaagcagtagtgatggcagtaggtggaggatctcggatgacagacctaacttccagcattcccaaacctctgcttccagttgggaacaaacctttaatttggtacccattgaacctgcttgagcgtgttggatttgaagaagtcattgtggttacaaccagggatgttcaaaaggctctatgtgcagaattcaagatgaaaatgaagccagatattgtgtgtattcctgatgacgctgacatgggaactgcagattctttgcgctacatatatccaaaacttaagacagatgtgctggtgctgagctgtgatctgataacagacgttgccttacatgaggttgtggacctgtttagagcttatgatgcatcacttgctatgttgatgagaaaaggccaagatagcatagaacctgttcccggtcaaaaggggaaaaaaaaagcagtggagcagcgtgacttcattggagtggacagcacaggaaagaggctgctcttcatggctaatgaagcagacttggatgaagagctggtcattaagggatccatcctacagaagcatcctagaatacgtttccacacgggtcttgtggatgcccacctctactgtttgaaaaaatacatcgtggatttcctaatggaaaatggggtcaataacttctatccggagtgaactgattccatatttagtgagaaaacagttttcctcagcttcctcacaacagggacaagaagaaaaagaggaggatctaaagaaaaaggagctgaagtccttagatatctacagttttataaaagaagccaatacactgaacctggctccctatgatgcctgctggaatgcctgtcgaggagacaggtgggaagacttgtccagatcacaggtgcgctgctatgtccacatcatgaaagaggggctctgctctcgagtgagcacactgggactctacatggaagcaaacagacaggtgcccaaattgctgtctgctctctgtccagaagaaccaccagtccattcgtcagcccagattgtcagcaaacacctggttggagttgacagcctcattgggccagagacacagattggagagaagtcatccattaagcgctcagtcattggctcatcctgtctcataaaagatagagtgactattaccaattgccttctcatgaactcagtcactgtggaggaaggaagcaatatccaaggcagtgtcatctgcaacaatgctgtgatcgagaagggtgcagacatcaaggactgcttgattggaagtggccagaggattgaagccaaagctaaacgagtgaatgaggtgatcgtggggaatgaccagctcatggagatctgagttctgagcaagtcagactccttccttttggcctccaaagccacagatgttggccggcccacctgtttaactctgtatttatttcccaataaagaagggcttccaaaggcatgctggagacttgtggagcagtccaaagctccatgtcaggtgggctccaggtgtacacagtg

SEQ ID NO: 60632 - DNA, 6302 bp, Homo sapiens; identical to SEQ ID NO: 60596
  misc_feature (1)...(6302): n = a,t,c or g

SEQ ID NO: 60633 - DNA, 1683 bp, Homo sapiens
ttttttttttttagacccgagttttataagaaatttatttttttcacagatacagaacataaatccaagaaaaattattattatttttcacaattatgactaaatcatgttatttctagttatttacaagtactacaatgttctatgcatttcttcatcctagacattaataaaacacatccctttggtcttagatacttctctttggtgctgtgttttctcctttctgaattttaatcttctgtgatgtgaagggaaattacgtgaacctttcacatatctatttttttccttgtgcacagttgataatttcctcccttagattccctatgttgctcaaaaggcaaatcctctaagaagtcatctgcagcccatagcattcgtctcagagcaggaagaattataacatccctttacagggtccagctcccactcagaggaataattgctaaccaccgagatgtcagaaagagcaaatccaagttttctttggacttcctctagcttggacctcacaggctcacatctctctatttctataaggccaccttttggtatcaaatccatgctatccacatgagtgagcaaagccacatgtaccacaccagcgtttaccaactcccttcgaattcttttgatctttactatcatctgagaggagaagtattgaatagagctggcatcaaatacaaatgccacacaatgaattctgtccttcagcgatggggaatcaatgtagtcatgatgatttaatttgattgattccatgggattaaactggtatctatcacgaatgttaccgttcaagatatagaatatgtcatccctgcacaggccgccttctttctcactcagccccagtgagtcacacagaataaacggcaggtatttgccatctttcccgtctctaatagagtatgtcctatacttctcagatatcccagttgtattagtgcccaccaaagcctgatgcgttacatgcccttggaaaacagacctcactgagttgaaaaagctggacttcccagctccaattggacccagcagcagaattcgtatttgttgaaccagggatccatatggttcataagttctcaaggcagacagtaagctcttcctgagctcaatgaccccttttatctttctttcatccagtgaatcttcgcatcgaaaaacttcataatcctgaatagagatagtacaattttgagcaagtccaagattttccattgtctttaagtccataatcacttttctatttcttccatctatctggaaattagttggggagttatattttgtaacatcacaacaaaacagtgtttctggtgtacatagtcctagtttccattctgaaattttagtatcttgaagtgcaaaaaggatgatggaagcatactttccttcctggtaactctcttctgcatatgctccaataatatgatcttcactataaatcactgttagagtaggcccttgattacaacatctgtcaagcaaaactccattacggaatccatggacactacccttatagagaaggctaagccgcttccctccaaaatgattttgcaggatcttttcgtgcaaccatgtcaaacgagttgtcactgccatacttcttgatctgttgtactgtctgtagtatcagctagagctgagggtagctgctctgtctggata

SEQ ID NO: 60634 - DNA, 6309 bp, Homo sapiens; identical to SEQ ID NO: 60546

SEQ ID NO: 60635 - DNA, 3029 bp, Homo sapiens
  misc_feature (1)...(3029): n = a,t,c or g
ttttttgttttttttttgatgctcaacaggatctcacgtttattgagaagtgattaatggtaaaaagaaaggcaatgccctttcctcattggctgaacaagaaactgaagaaacattcacggacacgttttaacagtatttttctcttccaaaatgcatttctgtaaacgagtttttaccactgttctcagctttgaaatcaaattaatcctgacttaatcagtataatgtacaagaacagaacatttcttaggactcctagtactttactttgagtaacaaaaggtcagagaaaatgaaccacccttaaagacacaaccttgggtaacactgttatattctcctagacaaaaattcttcataaaaatgttcttccagttcggaaggataaaatcaaattcccactttctggggtggatgcccaaaaccttcacaactcaagtgttctccaagtgcaaatgtcaaaatgggaggaggaaagggtttaaaaattagagaaaactgtatgcacttacggacttaaaaatccgaaaaacatagtaaaaagacaaaaaaacatagcattatgctctgaaatcacaaccaaagccaaaataaaagggacatttttcacctaaactacctagagggattttttggttagttttttctttttcttttttttttcattttccagttaagtcctatgtcttttgtgaaattccaatacttaaactgcaagtctgcaatcgtctctgaagtcagtgaaattaagaaaaaagtcctaattctcttgaaggtcattttttcctcttaggatatgcagatgcaaccgttgctgcagtctgtgtagaactgccttttatttcccacgaccttgacgttcctttttaacactttcttcttcctcttggcgtttctcatagtgtgagaagtcatcaaaaatggaagtggtgtgcttgtagctggctataattttcaacacctgcttagccttttccagaggcacttcctgagtgtccctagagttggtcactggtttattctcgttgttctctaggcgaatgtgtcgcagttggctattgggaacgtccttcacaaaaatccacctgacatcaaaacgacccttccatttgtcctgggaccacacacctgcacatgtgttgtagtccacagcagatttcatttctgccacgccacagaagtgtccactgccgttgacactgaaaagtaagtaaacggggcctttcccgttcatggaacgataagcagcatccagtctcttgttaccatgctctgtgctgcaccaaatattatacttaatggaacggtgaatatcgtcctcagagtagctcttaatgatgaaaacccggccatgtttcagattccagtcaaaatctttggggttatagttattaatggaccgaagcttctccaacactgggtggggttctgaaggagtagatccagaaccagcctgagactgtcctactccattaccatccaccccattatgaccgaacccactgccacggttccgaggtgctacccagcgggttggctgagctgcctgttgctggactgaaagctgggcaggctgtggtggaggtggaggcaatggctgtgtctgttgccctactgatgcctgagccactggtgggctattgttagcctgctgacctacaggctgaggagacccctgggttggctgacctatattctgaaccaaagcctgtgagggggcttttgcaacgggacccttgttatcccaagttccaatatccatgttatgctttatcgggggtggcggaagacttgaccctgcaatgccattcttggtcttcagtttaggttgctgttttgcaggcttgctagcaatatcagcccaagatgctggttttggaggagcaatggtggctggaggcaaactattggaagccacgatgttactagtaatggacccgctaccaacagcagaacctacaacttttggaacattgcttgcaacttctgtgctacccaacttcagtgctgccatcccttggtctatagtattcatgccaggagccttattgagggtctcattggcaaaagctgactgtccatcaatcatggctccacctaaggagctaggtgcataagcataattgctactatatccagagctctgagtagactgtccctgagaactgttatttccccatgctgagaagtcaatcccactgggaaagaaattaaaaccatgctgaccaagaaatggagtgctacctagggctcctggttgcccaaacattgcatctggtaggaagtggggctctccgttgctcagctgtccataagaagttaagtagggcatggctgtgtcaccccccgtagaccaagcagcttcacccaaagaataggagaagccaatggagggactgtagtaactgggtaagtaggaatctgacatggcagtatatgcattattgggccttgcctgtggactcaagtaaggttcaaaatcatcatcgtttaatccatccttttgatgtacagatccattttgtactttgtttccttgaccttttggtctctgctccaagaggctgctggccgacatggctctcagatcctcacgggcggcgacggcggcgaactctcctcagcgcggcggcggcggcagatgagccccggctgcgggagcaggcggaggcttttgtccctgacactcgggggcctcggcggacgcagcggagacacagcgcgcggctcaggctccggctccgactcggcgacgctctagcccaagagctcaatgcccgtctctatgcttttacgcgcgcgcccgccccccaccgcctaaagcagagcgccgaacagcggaggcgggcggcgcgcgcggcgcgagcgctgactctcacattcactcacccacgcggaaggggcccggcgcgaagaaccccgggaagggagaggccggccgctgcgccctctggcggattggaggagcggaagctgtgctcacggnnctcccgccctcaccggcccaggattaaggcctagggggt

SEQ ID NO: 60636 - DNA, 2852 bp, Homo sapiens
ttttttttttttccaggaaaaacgacgttttattttcataaatactcctgctctcactcacacactgaccccacttctgaccacggacagatggatggacagacgtaagacacccataggaggccccagcagaggccaatgaatgaaggagacacaccgagaactctaggtgccccacagcccctcgctggggccatgggcctctggcattacccttgagcccccacagtccctcagggggcccaatggcaaagggaaacccccaggagtacgggccaggtgaggttcccccagcctggccccctgaggctgtgaccacagggccaatccggaagaaaagcagagtcaaaccacacaccagagtgcaaatagctgggggtgtaggcgtcaccccccagtcactgggttcctatggaggaggcctaagctggtccccagctccagcatggcccccgagttatggctgggccttcccataaggcataagagacaggtggggaagaccccaccccagctggggttggggctgggcctgaggtcctggcccttccccaacagctgtgcttcctccccatgacccaagttcttccaaggctacacagcccctccctctccaggtcccggtgatggagaccccagcggcacaaacccaggcccagcctcctactgggtttggctcagcaggggcggggccggagcaggagggggaagagtcacttgaggcctacaggggtgtggggagaagcaccaggcctgggggtgaatggccatgggcaacaaagggtgtccttggccaccaatgcctccctccaggctggacagtgaccggtccctctgccccttcctctccccagcccctctgttctagaggctaccccaggtttcaggtggggggaactggtccacatcccccatctcgttgtaggtctggtcacccatggtgaaggtgagcttgtagcggaggcgaaccttctccttctgggggttggcaagcagcaggacctgggtgattgctgaggggtggacgatggggttaaaagctggcagctccgtgcccgagggtggctgcagcttcaccttcataaccttggggacagctgactggaacacgatgttgcggatgggctggggggcggtgctcagcatggaaaccaccaccaccagcacgtcggagcgccctggcagtgggtcccgggcaaaatggaagaggatgcggaagccgtgctggtcatacacagtcacgggcaggatgttgctgggtttgatggactccaggggcacagtgatgctggccagtgagagctcggttggtacgggctgctgcggaggcctggggggctctggggacacggtgtggagaaggctggtggcgctggagctgggggagctgcagctgctgctcttattctgcaggtcccggagtgtgagccggggggttggctgctgcttctcccaccgcacttgctgggattccgggggcagcgactgctgcaggagggtcttccccaggaggtctaggtcgtccagaccgctgcttgctggcagggatgtctgcgctgggggtcggctttccatactgggggcctgggccagagcaggggctgggggctcagtggcatccgacgactggaagctgttccatccggtaccatccaggcttgggcctgaagggggtgtggggtcactgaggcccagagacatgagctcgtcgtcaagcagggaaactgaggcactgggctgctcagggctggcctgctcgccagggcgggtgggcatagctgggtaggtggtgcccgcaggcgggagatccaggcctgagagatccagcagggccgaggtgctcccagggatggagccggctgtggcatcaccgttgacctcctcaccccgcaccagctgcttatacaggttgatcacctgggtgaggttgtcattggcctgcaggatctccgctaaggcctcaatcattgtcctctgtgtcaactcgcccagtcggaaagagcgtgggccgcatccgctcacagcgctggtaacagttccttcgatgaggtcctcgctgctgccagctgctgcgccgccctggctgtggctcatcaccatctccgtgagcagtttcacattgttgttcacctcctcgatggcattcaccctcttcgagatcttctccatccgcttctggtcctcctgcaccatctctttgatgagcttattggctgcgcggaggtcttcgggatgggagctcttcagcaggcgggccagcatcttggatttctcctcatcttcaaagatcacattcttcggccgtggaggaggaaggggaaaggtagtgtcatctggaagcttggggtcggactttacaatccccctgcttctttagcatctggtaggcctctgcgattttaacctcctcgggcaggcccactgtccagctgtagaggagctccaagatcttgttcttcaccttctccgatgtccgagagcccagatacttgggagacacgaccttgatgagctcgttgagaaagcggaacttgcccacttcgtcgtggaaccgcttgccgcagctcttcatgcatgtttccagcaccgtcaaggcctggatcgcctcccactcctgtggggactggatcttgtgggccagcagccgggtggcgagtggaggcccctcaaagtcctcgttgagctgctcgcagaagccgttgatgctggcccagtcgagctccttgttcagggggttcgtggctctattcgccgtcccaggggtcatggcccagggatccgacaggtgggcggcgcccgctcccaccgctggaccgcgccggggccggggtcctccatcgctccagacgaaa

SEQ ID NO: 60637 - DNA, 3468 bp, Homo sapiens
ccgacgatttcgtccctgttccgcgagcatacgtcatcgttctcgctttccggtagctaaggcgatcagcgggacttcccactgagacgagcggatgtcatattgtatcagggcgaacctctgaggagcgctggctgcgcttaagcaacggtgcggcaggcgccggggttttctgaaacagaaacgtttaggggtggggaaacgtgttccgaggaactctcgttttgaagtgcgagatacacctgtcttgccctgttccaagatggtggcagagcttctctgagtctctcgcttcctccagtccgtcggagaagcgctctttgattggccagtggacagcgccgtggcatgacgcgctggggcgctggccaatcggttgagagctgagctggacttggcggtgggagccggagcctgcttgttgcagctgtgggtgaggacggctccggccagttcccttttagactatggcgacatacctggagttcatccagcagaatgaagaacgggatggtgtgcgttttagttggaacgtgtggccttccagccggctggaggctacaagaatggttgtacccctggcttgtctccttactcctttgaaagaacgtccagacctacctcctgtacaatatgaacctgtgctttgcagcaggccaacttgtaaagctgttctcaacccactttgtcaggttgattatcgagcaaaactttgggcctgtaatttctgttttcaaagaaatcagtttcctccagcttatggaggcatatctgaggtgaatcaacctgccgaattgatgccccagttttctacaattgagtacgtgatacagcgaggtgctcagtcccctctgatctttctctatgtggttgacacatgcctggaggaagatgaccttcaagcactcaaagagtccctgcagatgtccctgagtcttcttcctccagatgctctggtgggtctgatcacatttggaaggatggtgcaggttcatgagctaagctgtgaaggaatctccaaaagttatgtcttccgagggaccaaggatttaactgcaaagcaaatacaggatatgttgggcctgaccaagccagccatgcccatgcagcaagcacgacctgcacaaccacaggagcacccttttgcttcaagcagatttctgcagccctgttcacaagattgatatgaacctcactgatcttcttggggagctacagagggacccatggccagtaactcaggggaagagacctttgcgatccactggtgtggctttgtccatttgctgttggcttgctggagggcacttttccaaacacagggagccaggatcatgctgtttactggaggtccccctacccaagggcctggcatggtggttggagatgaattaaagattcctattcgttcttggcatgatattgagaaagataatgcacgattcatgaaaaaggcaaccaagcactatgagatgcttgctaatcgaacagctgcaaatggtcactgcattgatatttatgcttgtgcccttgatcaaactggacttttggagatgaagtgttgtgcaaatcttactggaggctacatggtaatgggagattctttcaacacttctctcttcaagcagacattccaaagaatctttactaaagattttaatggagatttccgaatggcatttggtgctactttggacgtaaagacctctcgggaactgaagattgcaggagccattggtccatgcatatctctgaatgtgaaaggaccgtgtgtgtcagaaaatgagcttggtgttggtggcacgagtcagtggaaaatctgtggcctagatcctacatctacacttggcatctattttgaagttgtcaatcagcacaacaccccgatcccccaaggaggcagaggagccatccagtttgtcacgcattatcagcactccagcacccagagacgcatccgcgtgaccaccatcgcccgaaattgggcagatgtacagagtcagctcaggcacatagaagcagcatttgaccaggaggctgcggcagtgttgatggcacggcttggggtgttccgagcggagtcagaggaggggcccgatgtgctccggtggctggaccgacaactcatccgactgtgtcaaaagtttggacagtataacaaagaagaccccacttcttttaggttatcagattccttttctctatatcctcagtttatgttccatctgagaagatctccatttcttcaagtgtttaacaacagtcctgatgagtcgtcatattacagacatcattttgcccggcaggacctgacccagtccctcatcatgatccagcccattctctactcttactcctttcatgggccaccagagccagtactcttggatagcagcagcattctagctgacagaattttgctgatggatactttctttcaaattgtcatttatcttggtgagaccatagcccagtggcgtaaagctggctaccaggacatgcccgagtatgaaaacttcaagcaccttctgcaggcaccactggatgatgctcaagaaattctgcaagcacgcttcccgatgccacgttacatcaacacggagcatggaggcagtcaggctcgattccttttgtccaaagtgaacccatctcagacacacaataacctgtatgcttggggacaggaaactggagcacccatcctaactgatgatgttagcctgcaggtgttcatggaccatttgaagaagctggctgtctccagtgcctgttaagctgaggatacaaccaggaaatgcaacggtgtcagattgtgttcaaaatgtctagaaaggcttgataacattcctgttacttttctagcagattttaacaaataatcaaggacattttatatgtaactctttagattataatttatttgtattcctgtctttgtcctttttcttgcactataaaattataaggtcataaatgttttggtacttgtagatgtttatgtgctttttgtatcctaacttttagaatctaaataaaatcagaggtaatgtattttggcagcttgtttaggtgagaatcttaatgatcataaaaggaaataaatctagatgcagaaagtactggctaaaatattgctaatacaaatgtgatttcctgaggtctctgtgtgagtgtgtatgtgttttaagtgacttccttaagaggtgtttccctgaaccctaattccccataattaaagtaatgtatatgccaggatcaaaatgaaacaaatataccttatccctaaagagctcataacaaataagttacctccactctataaactcagacctactttttgaagataactgcttttaacctctccttacaagatttttgttgttgatgtatttaattttagcccatgtctcaattctcattttcaaagaaatcaatatattaatatacctttggtcaaaaaaaaaaaaa

SEQ ID NO: 60638 - DNA, 1082 bp, Homo sapiens
ttttttttttttcatccaacaagaagccataactttatttatgatagaaacagtacaaatttcaaaccaagctgcagttactcctttgagacaccaaaaaaagttgcttccatatggttacattgttaattccataatcgcatttacaatatcattactgttgttcttcagggctcggactgcctttgctctcgacacatttgcttgtgacatgaccaattctatgtccttaacttctacacctgtttcatcgacctcttcctcttcactctcctcttgtacagttggagtctgtgtgttttcttgaatgtttgagacagcttcaccttgaactttgaatttctcagcagctgctagttgtgcttgctgggataaatcttcgatcttggcttccccaaaaactatgtaagtatctgaagcagggctcttgtagacatctggttttgtgatgacaaagaggatattcttagatttccggatagtgactctagtaactcctgtaacctgccgaagacccagtttggacatagccttccgtgccttcttttcactccgactctgttttgctttactgactggttcttcatcgatttcagctgctgccgccagctgggcttgttgtgtggttgcctgggtggaatcctgttcttcaagctctggtactgattcatcactgtcagattctgttccagaccctgagatgagaaacaactgtctcagcctggggctgcggcaactcctgctctgtagcagggacggtttctgtggcttcgccgggcatttccttttctggatcctgtgaagcagttcccaaaacaagacgcactcctcttccgccctcaacactgcaactgctcccatctctgcaggctcggattctgggcccgccccgcagcccttctaccctgcttttgccaggacaccaaccgcagaccccattttgtccggaggcccaggggcgagtaggaaccctgtggcccagtaaagcctccaactctccttaactctcagtccccggggcggcttagcccgaaagaaaggcggatggctgcggatagacagtagcggcacagaaagtactt

SEQ ID NO: 60639 - DNA, 2949 bp, Homo sapiens
cggacgcgtgggggagtgctcctcaggagccagccccacccttagaaaagatgttttccatgaggatcgtctgcctggtcctaagtgtggtgggcacagcatggactgcagatagtggtgaaggtgactttctagctgaaggaggaggcgtgcgtggcccaagggttgtggaaagacatcaatctgcctgcaaagattcagactggcccttctgctctgatgaagactggaactacaaatgcccttctggctgcaggatgaaagggttgattgatgaagtcaatcaagattttacaaacagaataaataagctcaaaaattcactatttgaatatcagaagaacaataaggattctcattcgttgaccactaatataatggaaattttgagaggcgatttttcctcagccaataaccgtgataatacctacaaccgagtgtcagaggatctgagaagcagaattgaagtcctgaagcgcaaagtcatagaaaaagtacagcatatccagcttctgcagaaaaatgttagagctcagttggttgatatgaaacgactggaggtggacattgatattaagatccgatcttgtcgagggtcatgcagtagggctttagctcgtgaagtagatctgaaggactatgaagatcagcagaagcaacttgaacaggtcattgccaaagacttacttccctctagagataggcaacacttaccactgataaaaatgaaaccagttccagacttggttcccggaaattttaagagccagcttcagaaggtacccccagagtggaaggcattaacagacatgccgcagatgagaatggagttagagagacctggtggaaatgagattactcgaggaggctccacctcttatggaaccggatcagagacggaaagccccaggaaccctagcagtgctggaagctggaactctgggagctctggacctggaagtactggaaaccgaaaccctgggagctctgggactggagggactgcaacctggaaacctgggagctctggacctggaagtactggaagctggaactctgggagctctggaactggaagtactggaaaccaaaaccctgggagccctagacctggtagtaccggaacctggaatcctggcagctctgaacgcggaagtgctgggcactggacctctgagagctctgtatctggtagtactggacaatggcactctgaatctggaagttttaggccagatagcccaggctctgggaacgcgaggcctaacaacccagactggggcacatttgaagaggtgtcaggaaatgtaagtccagggacaaggagagagtaccacacagaaaaactggtcacttctaaaggagataaagagctcaggactggtaaagagaaggtcacctctggtagcacaaccaccacgcgtcgttcatgctctaaaaccgttactaagactgttattggtcctgatggtcacaaagaagttaccaaagaagtggtgacctccgaagatggttctgactgtcccgaggcaatggatttaggcacattgtctggcataggtactctggatgggttccgccataggcaccctgatgaagctgccttcttcgacactgcctcaactggaaaaacattcccaggtttcttctcacctatgttaggagagtttgtcagtgagactgagtctaggggctcagaatctggcatcttcacaaatacaaaggaatccagttctcatcaccctgggatagctgaattcccttcccgtggtaaatcttcaagttacagcaaacaatttactagtagcacgagttacaacagaggagactccacatttgaaagcaagagctataaaatggcagatgaggccggaagtgaagccgatcatgaaggaacacatagcaccaagagaggccatgctaaatctcgccctgtcagagactgtgatgatgtcctccaaacacatccttcaggtacccaaagtggcattttcaatatcaagctaccgggatccagtaagattttttctgtttattgcgatcaagagaccagtttgggaggatggcttttgatccatcaaagaatggatggatcactgaattttaaccggacctgggcaagactacaagagaggtttcggcagcctgaatgacgagggggaaggagaattctgggctagggcaatgacttacctccacttacttaacccaaagggggcttctgttcttaggggttggaattaggagggactggggctgggaatgaagcttatggcagaatatcacttccgggtaggctctgaggctgaaggctatgccctccaagtttcctcctatgaaggcactgcgggtaatgctctgattgagggttccgtagaggaaggggcagagtacacctctcacaacaacatgcagttcagcacctttgacagggattgcagaccagtgggaagagaactgtgcagaagtctatgggggaggctggtggtataataactgccaagcagccaatctcaatggaatctactaccctgggggctcctatgacccaaggaataacagtccttatgagattgagaatggagtggtctgggtttcctttagaggggcagattattccctcagggctgttcgcatgaaaattaggccccttgtgacccaataggctgaagaagtgggaatgggagcactctgtcttctttgctagagaagtggagagaaaatacaaaaggtaaagcagttgagattctctacaacctaaaaaattcctaggtgctattttcttatccctttgtactgtagctaaaatgtacctgagacatattagtctttgaaaaataaagttatgttaaggttttttttatctttaaatagctctgtggggttttaaccatttttattaaaggtttacccaaggggccattcagtaccatcagggaaagtgggcag

SEQ ID NO: 60640 - DNA, 3156 bp, Homo sapiens
gcgcggcggttgggccgttggctgttcggccctgggatccgccgccactccgcgatcagaccgctctgtgccgcgagccgccgtgagcactcggattcaagccggcgccaacgagtccgggggcatcgcccgcagcggccaagctcatggccggctgagcgggacgccgcctccgcctcagccaccgccgccgccggcgcctcctcctcctcagccggcggcggcccgggcccagcaaccatggctgaagactactgggacgggcgcctgcggcgaacaggaggagaaggaggtcgcgcggcctcatcccgggccgccgccccaggcgccgccgcgccggccccgcggctctgaggttgctcgcgcgcccccgccgatcgccatggatcggatgaagaagatcaaacggcagctgtcaatgacactccgaggtggccgaggcatagacaagaccaatggtgcccctgagcagataggcctggatgagagtggtggtggtggcggcagtgaccctggagaggcccccacacgtgctgctcctggggaacttcgttctgcacggggcccactcagctctgcaccagagattgtgcacgaggacttgaagatggggtctgatggggagagtgaccaggcttcagccacgtcctcggatgaggtgcagtctccagtgagagtgcgtatgcgcaaccatcccccacgcaagatctccactgaggacatcaacaagcgcctatcactaccagctgacatccggctgcctgagggctacctggagaagctgaccctcaatagccccatctttgacaagcccctcagccgccgcctccgtcgtgtcagcctatctgagattggctttgggaaactggagacctacattaagctggacaaactgggcgagggtacctatgccaccgtctacaaaggcaaaagcaagctcacagacaaccttgtggcactcaaggagatcagactggaacatgaagagggggcaccctgcaccgccatccgggaagtgtccctgctcaaggacctcaaacacgccaacatcgttacgctacatgacattatccacacggagaagtccctcacccttgtctttgagtacctggacaaggacctgaagcagtacctggatgactgtgggaacatcatcaacatgcacaacgtgaaactgttcctgttccagctgctccgtggcctggcctactgccaccggcagaaggtgctacaccgagacctcaagccccagaacctgctcatcaacgagaggggagagctcaagctggctgactttggcctggcccgagccaagtcaatcccaacaaagacatactccaatgaggtggtgacactgtggtaccggccccctgacatcctgcttgggtccacggactactccactcagattgacatgtggggtgtgggctgcatcttctatgagatggccacaggccgtcccctctttccgggctccacggtggaggaacagctacacttcatcttccgtatcttaggaaccccaactgaggagacgtggccaggcatcctgtccaacgaggagttcaagacatacaactaccccaagtaccgagccgaggcccttttgagccacgcaccccgacttgatagcgacggggccgacctcctcaccaagctgttgcagtttgagggtcgaaatcggatctccgcagaggatgccatgaaacatccattcttcctcagtctgggggagcggatccacaaacttcctgacactacttccatatttgcactaaaggagattcagctacaaaaggaggccagccttcggtcttcgtcgatgcctgactcagccatctgctctgctttcccccacaggcaggccagctttccgcgtggtggacaccgagttctaagccacagaccgaggccccagcaggcagcggctggagggatgccacacccctcacagggcagcccccaactacatcttccctgcttactctctgcctacctgcctgagccatgttcacctgcccacttgtcccctgctgcctgcccaaacaccccaccattggcctgtcaacccacccattggcctgtctgctgggtgctaacaaagctctcatcactccttcacttggtctgtctgtctctgtcttggtagttgccggtggacagcatggccgtgccagcctcccacactgaggccaggtctaccccccatcataccagcccccaggaccactaccccacggccagccaggggtccagagctagcccaggctggggatctcgactcagacaagatggtgacaatgccttgagtctgaggcatcctctgcctgctttcctgcctgccccacctgcctcatattgtgtgggcctttttttgtttgtttcattcattgttttttttttttaaataatttaaaaggaaatttttgttttttttaaaggcaatatttttgtatacagactggctgggccccaccccctgcggggggccctcccacagtattttgggcaaggaacccctgctcccaccctttcagagacggggacacagcccctatttggaaccctgatcatcacaagaacctgggaattggctatgggaaagcatgccacagccactcgccttcctacccccgcccgccatccccaagttgcaagggggatctggggactaccaagagactctgggaaatggacaaggtggggggccccactctttctctactgcagtaccgtagctggggcctcccttccttctcagggtctcccccagccccagtcccctttgctccccatccccaactcggttgcttgtttggggttaggggccccttgccaaggaactgaccaagcttcagcgaggagccaataatgtgcatatgtgcacaagcagggttgggggaggggggtgtgaggggttgtgccccaggtgttgccccctatctcctggggagggtgaggcagggcagggacagtctccagggtcagtccctggatgggtggttacctccccttcctccaccctaagccctggggccctgaaatggggtgggagggcaggggtgggagccctcctagtgggtttggggggttgggttcctgaatgcaccataatcgctgtatgaaatattaaaaagtctaaagtgaaaaaaaaaa

SEQ ID NO: 60641 - DNA, 5470 bp, Homo sapiens
  misc_feature (1)...(5470): n = a,t,c or g
tttcgtgggctgtaggcgccaaggccatgtccgactcgtgggtcccgaactccgcctcgggccaggacccagggggccgccggagggcctgggccgagctgctggcgggaagggtcaagagggaaaaatataatcctgaaagggcacagaaattaaaggaatcagctgtgcgcctcctgcgaagccatcaggacctgaatgcccttttgcttgaggtagaaggtccactgtgtaaaaaattgtctctcagcaaagtgattgactgtgacagttctgaggcctatgctaatcattctagttcatttataggctctgctttgcaggatcaagcctcaaggctgggggttcccgtgggtattctctcagccgggatggttgcctctagcgtgggacagatctgcacggctccagcggagaccagtcaccctgtgctgctgactgtggagcagagaaagaagctgtcttccctgttagagtttgctcagtatttattggcacacagtatgttctcccgtctttccttctgtcaagaattatggaaaatacagagttctttgttgcttgaagcggtgtggcatcttcacgtacaaggcattgtgagcctgcaagagctgctggaaagccatcccgacatgcatgctgtgggatcgtggctcttcaggaatctgtgctgcctttgtgaacagatggaagcatcctgccagcatgctgacgtcgccagggccatgctttctgattttgttcaaatgtttgttttgaggggatttcagaaaaactcagatctgagaagaactgtggagcctgaaaaaatgccgcaggtcacggttgatgtactgcagagaatgctgatttttgcacttgacgctttggctgctggagtacaggaggagtcctccactcacaagatcgtgaggtgctggttcggagtgttcagtggacacacgcttggcagtgtaatttccacagatcctctgaagaggttcttcagtcataccctgactcagatactcactcacagccctgtgctgaaagcatctgatgctgttcagatgcagagagagtggagctttgcgcggacacaccctctgctcacctcactgtaccgcaggctctttgtgatgctgagtgcagaggagttggttggccatttgcaagaagttctggaaacgcaggaggttcactggcagagagtgctctcctttgtgtctgccctggttgtctgctttccagaagcgcagcagctgcttgaagactgggtggcgcgtttgatggcccaggcattcgagagctgccagctggacagcatggtcactgcgttcctggttgtgcgccaggcagcactggagggcccctctgcgttcctgtcatatgcagactggttcaaggcctcctttgggagcacacgaggctaccatggctgcagcaagaaggccctggtcttcctgtttacgttcttgtcagaactcgtgccttttgagtctccccggtacctgcaggtgcacattctccacccacccctggttcccggcaagtaccgctccctcctcacagactacatctcattggccaagacacggctggccgacctcaaggtttctatagaaaacatgggactctacgaggatttgtcatcagctggggacattactgagccccacagccaagctcttcaggatgttgaaaaggccatcatggtgtttgagcatacggggaacatcccagtcaccgtcatggaggccagcatattcaggaggccttactacgtgtcccacttcctccccgccctgctcacacctcgagtgctccccaaagtccctgactcccgtgtggcgtttatagagtctctgaagagagcagataaaatccccccatctctgtactccacctactgccaggcctgctctgctgctgaagagaagccagaagatgcagccctgggagtgagggcagaacccaactctgctgaggagcccctgggacagctcacagctgcactgggagagctgagagcctccatgacagaccccagccagcgtgatgttatatcggcacaggtggcagtgatttctgaaagactgagggctgtcctgggccacaatgaggatgacagcagcgttgagatatcaaagattcagctcagcatcaacacgccgagactggagccacgggaacacatggctgtggacctcctgctgacgtctttctgtcagaacctgatggctgcctccagtgtcgctcccccggagaggcagggtccctgggctgccctcttcgtgaggaccatgtgtggacgtgtgctccctgcagtgctcacccggctctgccagctgctccgtcaccagggcccgagcctgagtgccccacatgtgctggggttggctgccctggccgtgcacctgggtgagtccaggtctgcgctcccagaggtggatgtgggtcctcctgcacctggtgctggccttcctgtccctgcgctctttgacagcctcctgacctgtaggacgagggattccttgttcttctgcctgaaattttgtacagcagcaatttcttactctctctgcaagttttcttcccagtcacgagatactttgtgcagctgcttatctccaggccttattaaaaagtttcagttcctcatgttcagattgttctcagaggcccgacagcctctttctgaggaggacgtagccagcctttcctggagacccttgcaccttccttctgcagactggcagagagctgccctctctctctggacacacagaaccttccgagaggtgttgaaagaggaagatgttcacttaacttaccaagactggttacacctggagctggaaattcaacctgaagctgatgctctttcagatactgaacggcaggacttccaccagtgggcgatccatgagcactttctccctgagtcctcggcttcagggggctgtgacggagacctgcaggctgcgtgtaccattcttgtcaacgcactgatggatttccaccaaagctcaaggagttatgaccactcagaaaattctgatttggtctttggtggccgcacaggaaatgaggatattatttccagattgcaggagatggtagctgacctggagctgcagcaagacctcatagtgcctctcggccacaccccttcccaggagcacttcctctttgagattttccgcagacggctccaggctctgacaagcgggtggagcgtggctgccagccttcagagacagagggagctgctaatgtacaaacggatcctcctccgcctgccttcgtctgtcctctgcggcagcagcttccaggcagaacagcccatcactgccagatgcgagcagttcttccacttggtcaactctgagatgagaaacttctgctcccacggaggtgccctgacacaggacatcactgcccacttcttcaggggcctcctgaacgcctgtctgcggagcagagacccctccctgatggtcgacttcatactggccaagtgccagacgaaatgccccttaattttgacctctgctctggtgtggtggccgagcctggagcctgtgctgctctgccggtggaggagacactgccagagcccgctgccccgggaactgcagaagctacaagaaggccggcagtttgccagcgatttcctctcccctgaggctgcctccccagcacccaacccggactggctctcagctgctgcactgcactttgcgattcaacaagtcagggaagaaaacatcaggaagcagctaaagaagctggactgcgagagagaggagctattggttttccttttcttcttctccttgatgggcctgctctcgtcacatctgacctcaaatagcaccacagacctgccaaaggctttccacgtttgtgcagcaatcctcgagtgtttagagaagaggaagatatcctggctggcactctttcagttgacagagagtgacctcaggctggggcggctcctcctccgtgtggccccggatcagcacaccaggctgctgcctttcgctttttacagtcttctctcctacttccatgaagacgcggccatcagggaagaggccttcctgcatgttgctgtggacatgtacttgaagctggtccagctcttcgtggctggggatacaagcacagtttcacctccagctggcaggagcctggagctcaagggtcaggcagggcaaccccgtggaactgataacaaaagctcgtctttttctgctgcagttaatacctcggtgcccgaaaaagagcttctcacacgtggcagagctgctggctgatcgtggggactgcgacccagaggtgagcgccgccctccagagcagacagcaggctgcccctgacgctgacctgtcccaggagcctcatctcttctgacgggacctgccactgcacaccagcccagctcccgtgtaaataatttattacaagcataacatggagctcttgttgcactaaaaagtggattacaaatctcctcgactgctttagtggggaaaggaatcaattatttatgaactgtccggccccgagtcactcagcgtttgcgggaaaataaaccactggtcccagagcagaggaaggctacttgagccggacaccaagcccgcctccagcaccaagggcgggcagcaccctccgaccctcccatgcgggtgcacacgaagggtgaggctgacacagccactgcggagtccaggctgctagaggtgctcatcctcactgccgtcctcaggtgggttcgggcttcaccgcctggccctctgtggtcacagaggggctcggtggcccaggtggtggttccgcctccaggggcagggccttgtcctgggtctgtgtcagcgggtgcaccatggacatgtgtacattgaggttgtgggccttctcaaaccgccggccacactggtcacaggcaaagtccagctcagtctcagccttgtgtttggtcatgtggtacttgagggatgcccgctgcctgcactggaacccacagacctcacacctgggggacagaggcagataaaaaggtgcgagggccacagccctggggggggtcctgactcacacttactgcaaaggcttggctcccgaatgtcgcatttggtggacgagaaggtgcttccgctgcttgaaggtttgtccacattcgtcacagatatagttccgcacctctgagaggggagagtccagtgagtccaggcccctgatgctccaacctcccggggggacgacgatgacaatgtgaaaccatcacagctgggaagacatttctgcacatggttcaccatgcagtgggcccaagcaaggggcctatgagggcctcgtttattaagatctttaaactgctttatacactgtcacgtggcttcatcagctgtgtgcatttcaggatggtttttaaagaaacctcagaaagctatttccttaaccacaaaananaaaaaaaaaa

SEQ ID NO: 60642 - DNA, 1147 bp, Homo sapiens
ttttttttcaaggtttacatatacctttttaaagtaacatttaaaattacttcctttaatataaaagaaacacacaagacacaaagaaggcccaataaagctgtgagtcccagtttggtagctgaggaggagtctaagaaaacaagccattcctcagtatccctgggaaagaaggggtgagaggacacagatatcaccaggccctgggtgactgcattgctggggccatgcagggcctagctctccaccaagggaaagtgctgattttccttgtcatggtcctggccttgctcccatgctcgtcctccagttttcagaagtcgtccagttccaagaatggctccttcctttagttcactaacattttcacttaggggtgaaggccgcttaccctgtcgtagtgtcagggtgccaggggagttgtcatcctggcaggatgggtgaggggggatctccctagtaccttgctgctgtttggtttccatctattgcgcatagaacctgaagatctgggagtctcagggtcccttgagggcttgtcggagctctggctggccacaggggtttctgtgggctgtcttgcttcctccttggaaaacacctgtttggaggggaactcagtctggttccaaggtggcatctgttcctcaacagataactgggtacccagaggcaagtccaattcagaagataaaggtgcctctgggggcagaacaggctctgggggaagatttgatttagagtcttcagtttcaaatacttcactcagctgtttcaccagtgggcttggggggtctccactgctggtcttcataggtgtccgtgcaataccaagagtaggagagcggggatctgagtcctgggcatgtttaagaccctccagttgctcccctgctggtaggcctggctgtggagagctctccacctggatgggagtgcgcaggatgccagcactaggtgaacgggggtccgccactcgagccagatgcttgttgtgcggcggaggccgcgctggtgtgactgggacgctcttggctgagcccatctcaaccaggagttgcagggtgggggcaagggccagcccgggacgaggagggaatgccgggccccaattccacctctggatgcacaacagctcgctcgtgcc

SEQ ID NO: 60643 - DNA, 5530 bp, Homo sapiens
cgccggccgaggaggaggggtgggggtagcggcggcgcccgcggcccggagcgggggttgggggagtagagaaagcggggcgcgcggaggaacgctgggtccccggcgccgcgggagctgggaggaccgagccggccgagcgagcagcgcggcagcacagtccccgcgtggcgcagcgcggcggggacgcggggaccgcccggatctccttccactgcgccccgcgctctgcggtcctcggccgcctcttcttccttcactcactgcccgggcgggagcggcgcccaagtcgggtgcgccatgtctggggccgggtagccccgccgcccgccggcccgccagctcgccctccgagccacccgccagcgggccggccggccgggaagcgcgggacaggcagatgcagtgagtgaggggggggccatggcggaggagcggcccccccggctggtggattacttcgtggtagctgggcttgcagggaacggagcacccatccctgaggaaacgtgggttcctgaacccagtgggcccctgcgccctccccggccagctgagcccatcacagatgtggcagtcatcgctagggcactgggcgaggaagtgccccagggctacacatgcatccaggcttctgctgggggccaccccttggaactcagtgctggacttctgggtggaactcaacccgtcatctgctaccgcaggggccgtgacaagccccccctcgttgagctgggggtgttgtatgaggggaaggaacgtcccaagcctggcttccaagtgcttgacacgacaccctacagccactcagcaaacctggcccctccaggccccgggcacccccgcacctacctcacttaccggcgggcagcagagggggcagggctgcatgccctgggcatcactgacctctgcctggtgctgcccagtaagggcgagggcactcctcatacttactgccggctgccccgcaacctcaaccctggcatgtggggcccagcagtgtacctgtgctataaggtgggcctggcgaaggccaacacgctggtgtacgaggcagttctacgaggcgttcccaagggccaggctatcagagcgacaggcacgggcactgggcctgctgagcgccgtggagcggggtcgggcactggggggcagagctgtgcgcagccggcgtgccatcgctgtgctgtcccgctggcctgccttccctgccttccgcgccttcctcaccttcctttaccgctactccgtctcaggcccccaccgcctacccttggaagcgcacatctcccacttcattcacaacgttcccttcccttccccacagagaccccgcatcctagtgcagatgtctccctatgacaacttgctcctctgtcagcctgtatcctcacccctgcccctcagtggtgccagcttcctgcagctgctgcagagcctgggccctgagctggctatcacactgctgctggctgtgctcacagagcacaagctgctagtccactcgctgcggccagacctgctcaccagcgtctgtgaggccctcgtctcgatgatcttcccactgcactggcagtgcccctacattcctctgtgcccgctggtgctggcagatgtgctgagtgccccagtgcccttcattgtgggtatccactccagctactttgatctgcatgacccgcctgctgatgtcatctgtgtagaccttgataccaacacgctcttccagactgaggaaaagaagctcctctcccctcggaccctgccccgcagaccctacaaggttctgctggccacactgacaaacctgtaccagcagctggaccagacatacactggacctgaggaggaagcatccctggagttcctactgacagactacgaggcagtgtgtggccgcagggcccggctggagcgcgaagtccaaggagccttcctccgcttcatggcctgtctgctcaagggctaccgggtcttcctgcgcccactcacccaggccccctccgagggagctcgtgatgttgacaaccttttcttcctgcagggcttcctcaaatcccgggaacgctccagccacaaactttactctcagctgctgcacacacagatgttctcacagttcattgaggagtgctcttttggctctgctcgccatgctgcccttgaattctttgactcttgtgttgaaaaggtccacccagagcaggagaagcctgagccgacacccttagtggagctagaggagctgtcaggaagtgagctcactgtctttatcacacctcccgaggagcctgccttaccagagggcagtgaatccactccccagtactgctatgatggattcccagagctacgggctgagttgtttgagtctcttcaagagcaacctggggccctgcctgtgccaggcccctcccgtagcgcccccagcagtcctgctcctcgccgtaccaaacaggagatgaaagttgcacagcggatggcacagaagtcagcagctgtgcctgagctgtgggcccggtgcctgctggggcactgctatgggctgtggttcctgtgtctgcctgcctatgtgcggtcggcaccctcccgagtgcaggcactgcacacagcctaccatgtgctgcgccagatggagagcggcaaggtggtgctccctgatgaggtgtgttaccgggtactgatgcagctctgctcacactatgggcagcctgtgctgtctgtgcgggtcatgctggaggtccgtcaggcaggcattgtgcccaacaccatcacctatggctactacaataaggctgtgttggaaagcaagtggccgtctggcacaccaggtgggcgtctgcgctgggccaagctccggaatgttgtcctgggggctgctcagttccgccagcccttgagagaacggcaacagcagcagcagcagcaacagcagcagcagcagcagcagcagcaggagcaggtgtcagcacatcaagaggcaggcagctcccaggcagagccctatttggagcgcccttcccctactcgccctcttcagcgccagactacttgggctgggcgaagtctgagagacccagcctcaccccctggacgcctggtgaagagtggtagcctgggcagtgcccgaggggcacagcccactgtggaggccggtgtggcccacatgatagaggccttgggggtcctggaaccccggggatcacctgtgccctggcacgatggaaggctctcagacctgagcctgacaggggaggagccgctccctggaggcagcccagggggctcaggctcagccctgagtgcccagtccactgaggccctggaagggctaagtgggcggggacccaaggctggtgggcgacaggatgaggcaggcaccccccgactgagggctgggtgcccgcctccaacagctgctcactccttcccgccactcccctgcctcccgcattcccccacctgagctgcctcctgacctgccacccccagcccgccgcagccccatggacagtcttctgcacccccgggagcgccctggatccactgcctccgagagctcagcctctctgggcagtgagtgggacctctcagaatcttctctcagcaacctgagtcttcgccgttcctcagagcgcctcagtgacacccctggatccttccagtcaccttccctggaaattctgctgtccagctgctccctgtgccgtgcctgtgattcgctggtgtatgatgaggaaatcatggctggctgggcacctgatgactctaacctcaacacaacctgccccttctgcgcctgcccctttgtgcccctgctcagtgtccagacccttgattcccggcccagtgtccccagccccaaatctgctggtgccagtggcagcaaagatgctcctgtccctggtggtcctggccctgtgctcagtgaccgaaggctctgccttgctctggatgagccccagctctgcaacgggcacatggggggagcctcccggcgggttgagagtggggcatgggcatacctgagccccctggtgctgcgtaaggagctggagtcgctggtagagaacgagggcagtgaggtgctggcgttgcctgaactgccctctgcccaccccatcatcttctggaaccttttgtggtatttccaacggctacgcctgcccagtattctaccaggcctggtgctggcctcctgtgatgggccttcgcactcccaggccccatctccttggctaacccctgatccagcctctgttcaggtacggctgctgtgggatgtactgacccctgaccccaatagctgcccacctctctatgtgctctggagggtccacagccagatcccccagcgggtggtatggccaggccctgtacctgcatcccttagtttggcactgttggagtcagtgctgcgccatgttggactcaatgaagtgcacaaggctgtggggctcctgctggaaactctagggcccccacccactggcctgcacctgcagaggggaatctaccgtgagatattattcctgacaatggctgctctgggcaaggaccacgtggacatagtggccttcgataagaagtacaagtctgcctttaacaagctggccagcagcatgggcaaggaggagctgaggcaccggcgggcgcagatgcccactcccaaggccattgactgccgaaaatgttttggagcacctccagaatgctagagaccttaagcttccctctccagcctagggtggggaagtgaggaagaagggattctagagttaaactgcttccctgttgccttcatggagttgggaacaggctgggaaggatgcccagtcaaaggctccaagcgaggacaacaggaagagggatccactgttaccaaaagtcctgattcccccatcaccaacctacccagtttgttcgtgctgatgttgggggagatctggggggagttggtacagctctgttcttcccttgtcctataccgggaactcccctccagggtacccacagatctgcattgccctggtcattttagaagtttttgttttaaaaaacaactggaaagatgcagagctactgagcctttgccctgaatgggaggtagggatgtcattctccaccaataatggtccctcttccctgacgttgctgaaggagcccaaggctctccatgcctttctacctaagtgtttgtattttattttaaattatttattctggagccacagcccccttgcttatgaggttcttatggagagtgagaaagggaagggaaatagggcaccatggtccggtggtttgtagttccttcaaagtcaggcactgggagctagaggagtctcaagctccccttaggaagaactggtgccccctccagtcctaatttttcttgcctgccccgccttggggaatgcctcacccacccaggtcctgacctgtgcaataaggattgttccctgcgaagttttgttggatgtaaatatagtaaaagctgcttctgtctttttcaaaaaaaaaa

SEQ ID NO: 60644 - DNA, 4241 bp, Homo sapiens
tttcgtccagaaggaaggtggggatgccgggagcggggcgagcgggcgggggttgtcagtccgatctcgcgagagaggacggaagcctgtgggagcccgtggcctttaaagtgccgttcagccttttcctccaggggtgctttgtaaacacggctgtgctcagggctcgcgggtgaccgaaaggatcatgaactagtgacctggaaagggtactagatggaaacttgagaaaggactgcttattgataacagctaaggtattcctggaagcagagtaaataaagctcatggcccaccagctagaaagtattcttgccatgagaaaaagaatgtgataagttattcaacttatgaaattcaagttacatgtgaattctgccaggcaatacaaggacctgtggaatatgagtgatgacaaaccctttctatgtactgcgcctggatgtggccagcgttttaccaacgaggatcatttggctgtccataaacataaacatgagatgacactgaaatttggtccagcacgtaatgacagtgtcattgtggctgatcagaccccaacaccaacaagattcttgaaaaactgtgaagaagtgggtttgtttaatgagttggcgagtccatttgagaatgaattcaagaaagcttcagaagatgacattaaaaaaatgcctctagatttatcccctcttgcaacacctatcataagaagcaaaattgaggagccttctgttgtagaaacaactcaccaggatagtcctttacctcacccagagtctactaccagtgatgagaaggaagtaccattggcacaaactgcacagcccacatcagctattgttcgtccagcatcattacaggttcccaatgtgctgcttacaagttctgactcaagtgtaattattcagcaggcagtaccttcaccaacctcaagtactgtaatcacccaggcaccatcctctaacaggccaattgtccctgtaccagggcccatttcctcttctgttacatcttcctaatgggacaaaccatgcctgttggctattcctggcatcaattacaagttctaatgtgcatgttccagctgcagtcccactcgttcgaccagtcaccatggtgcctagtgttccaggaatcccaggtccttcctctccccaaccagtacagtcagaagcaaaaatgagattaaaagctgctttgacccagcaacatcctccagttaccaatggtgatactgtcaaaggtcatggtagcggattggttaggactcagtcagaggaatctcgaccgcagtcattacaacagccagccacatccactacagaaactccggcttctccagctcacacaactccacagacccaaagtacaagtggtcgtcggagaagagcagctaacgaagatcctgatgaaaaaaggagaaagtttttagagcgaaatagagcagcagcttcaagatgccgacaaaaaaggaaagtctgggttcagtctttagagaagaaagctgaagacttgagttcattaaatggtcagctgcagagtgaagtcaccctgctgagaaatgaagtggcacagctgaaacagcttcttctggctcataaagattgccctgtaaccgccatgcagaagaaatctggctatcatactgctgataaagatgatagttcagaagacatttcagtgccgagtagtccacatacagaagctatacagcatagttcggtcagcacatccaatggagtcagttcaacctccaaggcagaagctgtagccacttcagtcctcacccagatggcggaccagagtacagagcctgctctttcacagatcgttatggctccttcctcccagtcacagccctcaggaagttgattaaaaacctgcaggacaacagttttagatactcattagtgacttcaaagggaaatcaaggaaagaccagtttccatttatgcgaaatctgtggttgtaaatttttttttttacttgaaattaaatttggctctaaagttggtgtagcagcagttgatcagactgaaaaacggtttttagtctctggaaaaagactgattttgctttttttataaatattattagatttattaatttttctgtgctcaatgtgtaaattgtattataattcattgtgatttatttcacttttaatttgctggtgttttaataaatggggggtgttacttgaatctttcttcccacttccatttcttttgaccaccccttaaccctcaactgtgacggtagtaggtattatccatttataccaaagttttgcatagtccctgttgactttgtaatgttaacggagtcataaaagcactaggcaagagaaagatagaaatttgcttttaatctttttgccttttattttgcacattatgcaaaagggaaaacattaaaggacacttttttttaagtgagtaaaacatggtaaagacatacagtgcttttatgcacattgttaagctaaatcaaggtcatttataatcattttccttttttatttaagattttaagtaaacaaattttagaattttcagcatttcaaaaatgattttatttttcaagtcttaaattcaatattttacacctatgttttgaggctaaaaatatgaaattatataatgtatgatacagggttatcaaatatctaataatttttgaaattagctcttgtttttggtttttttgttgttgtttttacagatttcaggttacaaactgcaaagtttatgcataattaagtatggtatggttgccagaaaagcctaaaattactacttagaaaatttaagactgtttacccccattgtcttgtacttgcgagctaacttgtactattcttgtgaaagcactgtcatcttttagtagcaaattttgataatgtttctcgtggaaaaaaaaatcagtatctatctttagaacaatgtaattataatgtgggaagtgtgcatgaatgagagagagtgtgtgtgtatctgtgtgtgtgtgcgcgtgtgtgtgtgtcttttaatagtttatgccagcaatctttgcttgaatgtttaacgatgccttcagtgtgatgctggccaatagatgattgcagtttaaaatgtcattattgtgcaggcttggataactaacattccatgatgtagcttgtttctgatgagatgattgtaggtacatttttctcattatccaatcatctgtgggatacttagttttctaatgtgccattatctatttttattctgcagttatgttcaaaatacagtacatattttaaaatagaataaattgttaaacataaaattttaaaagtagtagatgtgcgtaagaaaactttgtaaaatagttatgagtcctacccagtagcaacttctggcattcaagcaggattccactatgtaaatatctgtaatgcatttataataagttgtgtagtttgtcctgcatccatactacactatttgctaaagtctcagtgccatctcctaatgagactgacattttaaaagtctgtatggaatatccttgataattcaaggaaatatccctcctgcctaagttccaaactgggaaacattcaaattatataaatgacatttcaggactttaagtatgaagataatgggaattttattgttttgctttttaaaatgagagcatttttatttgataattttttttaaatttttaatttttaactaatttcattattttaaagtaatcagtttttcaaatcatgattttgatatcattattctaaggagttatctcaaaggcacaaaatatgaattctgcaagaaggctattttttattgtagtttgaatgggttaggaaaagcctcaatttttcactcttaagtccttcagtacatttttctttcatcttattacttatgcaagttaaggttctttggtaacagaattcttgcaactgtaaaataaaactacatagatgtaagaagtcatgtaaacggttaacaagcttaccaaggttagcaaaactttcattgtaaatcagtctgtactgagcaaataaaaatcattattagttgtataaacacaaattccattttgactttcaggatgtcatactacttctgtacctagcattttcagtccttatatttgcaatgttacacaaactgtactattttcttttatgtgcagtttgcatgagtaaaccatcagagaataaattctatctttaaattatgttcataaaaaaaaaa

SEQ ID NO: 60645 - DNA, 3844 bp, Homo sapiens
cggacggcaagcggcgggagattttcaaaatgggagcccagaggcaccgcccaggcctcggaaggtgtcagggagaactttccgtggtttcagcgtcgtcgcctggagcggcggtttagagagccgagcctgatgggcgccaaggccggctggctgcttggagcgctgcctcgaagggactgcgtgaaggaagctaatccggagaacccaggccagagcctggaaatatggcgacctgcatcggggagaagatcgaggattttaaagttggaaatctgcttggtaaaggatcatttgctggtgtctacagagctgagtccattcacactggtttggaagttgcaatcaaaatgatagataagaaagccatgtacaaagcaggaatggtacagagagtccaaaatgaggtgaaaatacattgccaattgaaacatccttctatcttggagctttataactattttgaagatagcaattatgtgtatctggtattagaaatgtgccataatggagaaatgaacaggtatctaaagaatagagtgaaacccttctcagaaaatgaagctcgacacttcatgcaccagatcatcacagggatgttgtatcttcattctcatggtatactacaccgggacctcacactttctaacctcctactgactcgtaatatgaacatcaagattgctgattttgggctggcaactcaactgaaaatgccacatgaaaagcactatacattatgtggaactcctaactacatttcaccagaaattgccactcgaagtgcacatggccttgaatctgatgtttggtccctgggctgtatgttttatacattacttatcgggagaccacccttcgacactgacacagtcaagaacacattaaataaagtagtattggcagattatgaaatgccaacttttttgtcaatagaggccaaggaccttattcaccagttacttcgtagaaatccagcagatcgtttaagtctgtcttcagtattggaccatccttttatgtcccgaaattcttcaacaaaaagtaaagatttaggaactgtggaagactcaattgatagtgggcatgccacaatttctactgcaattacagcttcttccagtaccagtataagtggtagtttatttgacaaaagaagacttttgattggtcagccactcccaaataaaatgactgtatttccaaagaataaaagttcaactgatttttcttcttcaggagatggaaacagtttttatactcagtggggaaatcaagaaaccagtaatagtggaaggggaagagtaattcaagatgcagaagaaaggccacattctcgataccttcgtagagcttattcctctgatagatctggcacttctaatagtcagtctcaagcaaaaacatatacaatggaacgatgtcactcagcagaaatgctttcagtgtccaaaagatcaggaggaggtgaaaatgaagagaggtactcacccacagacaacaatgccaacatttttaacttctttaaagaaaagacatccagtagttctggatcttttgaaagacctgataacaatcaagcactctccaatcatctttgtccaggaaaaactccttttccatttgcagacccgacacctcagactgaaaccgtacaacagtggtttgggaatctgcaaataaatgctcatttaagaaaaactactgaatatgacagcatcagcccaaaccgggacttccagggccatccagatttgcagaaggacacatcaaaaaatgcctggactgatacaaaagtcaaaaagaactctgatgcttctgataatgcacattctgtaaaacagcaaaataccatgaaatatatgactgcacttcacagtaaacctgagataatccaacaagaatgtgtttttggctcagatcctctttctgaacagagcaagactaggggtatggagccaccatggggttatcagaatcgtacattaagaagcattacatctccgttggttgctcacaggttaaaaccaatcagacagaaaaccaaaaaggctgtggtgagcatacttgattcagaggaggtgtgtgtggagcttgtaaaggagtatgcatctcaagaatatgtgaaagaagttcttcagatatctagtgatggaaatacgatcactatttattatccaaatggtgggtagaggttttcctcttgctggatagaccaccctcacctacttgacaacatcagtagggtacagcttttgacaatttaccagaaaaatactggcgaaaatatcaatatgcttccaggtttgtacagcttgtaagatctaaatctcccaaaatcacttattttacaagatatgctaaatgcattttgatggagaattctcctggtgctgattttgaggtttggttttatgatggggtaaaaatacacaaaacagaagatttcattcaggtgattgaaaagacagggaagtcttacactttaaaaagtgaaagtgaagttaatagcttgaaagaggagataaaaatgtatatggaccatgctaatgagggtcatcgtatttgtttagcactggaatccataatttcagaagaggaaaggaaaactaggagtgctccctttttcccaataatcataggaagaaaacctggtagtactagttcacctaaggccttatcacctcctccttctgtggattcaaattacccaacgagagagagagcatctttcaacagaatggtcatgcatagtgctgcttctccaacacaggcaccaatccttaatccctctatggttacaaatgaaggacttggtcttacaactacagcttctggaacagacatctcttctaatagtctaaaagattgtcttcctaaatcagcacaacttttgaaatctgtttttgtgaaaaatgttggttgggctacacagttaactagtggagctgtgtgggttcagtttaatgatgggtcccagttggttgtgcaggcaggagtgtcttctatcagttatacctcaccaaatggtcaaaacaactagggtatggagaaaatgaaaaattaccagactacatcaaacagaaattacagtgtctgtcttccatccttttgatgttttctaatccgactcctaattttcattgattaaaactcctttcagacatataagtttaataaataacttttttgttgactttcaagtaaagtgattttttttaattttaacataaagtcttcagaaagcctttctatggaaaggaattttaacctataatgtaaagggatgtattctgaggggaacaaggcaggaatggaaacttgaggtcacttactaaatatagtggatataaaatagaacacccgaccttgccccctagacccataaccccccgaaccttacctatgttcatatatttgtattgaacaattcttttaaaagcaaaaatgtaaatgatgtgtagtttatttgtgcttttattgttttccctgcgtctcagacatgttgagaatcatggacaaaacctgctggaattttggaatttttgaagatgtaaataatgtgtatttatgttataagtaacatatgtaaacatgtatatttgttttatatttatttttgtaacaccagtgtctgatgaaacatttttgcaaatgcattttataaaaaaataaatatagtgataagttacattatcttttgattcatttaattaaatacttatttttaaataacttaccagtaaactcactttttaaattttgttgcctgttgaggagccaattaaattttaaatattaattttgcaaatgttaaatacattgtttctctattatctgaaaa

SEQ ID NO: 60646 - DNA, 2846 bp, Homo sapiens
aataggaatcctttctcaaggaatgagttgtgacctgtttactgtctctttagaagaaaaactccactggaaaccattcaccatgtgtgattgtcttctgttatcatttgtcttacaggcggctattgcagacggctaatttatgcttaacttaggaagagataaggcaagagctagatttttttcatgtgatcttttccaagcttcaacttaacttaactacatttctctgtatgatgatgtctcttacttctacaggttccttgagcaccaaagatgattcattacttctgtataggtgacagctgcttataaaagcatcttagcagataagcctattaaaattgtgcttttgtaacaatgttgtggttgctagaataaataccattaacaaatgccttttgagtatgcttgatagtgcttttgttttggattcactttttatgctttaaccttcatttgcctctagaaacccaaaacacaataaagtacagaataagaccttagtaataacattcagaattttcttaaattgcatgtctgagtgttctaaaaatttttcaacatttccctttcacaagtgacttattcccccagttaagttattcacggtttcaccccacagcgtgaggggcagatagaaaaaaaaaaaaaggaaacatcactaccgaattgaaagtagggtataatactaagttcacaggaaatcaagaaaaaatgacatacctgaaatctctcttttggtaaaatctatttcaggtgcataccacccctttcccggaaaagaacagataacctcttggttattttaatggggcaggatcagaagaggaggtgtgggatgctaactcatgttagatcacacaagcataataaataccaagctatgcttgataaaatgaacgtaaggcaaaagtgttacagtctctgattttaatgagtcaatctcaaggcaaagctataaccttttccatgtgaaccttaaaacggaaatcctacgtgtttggctcagctaccatagacatgtcttgccccagagttccagtgtatttttcacctttagtttcttggctcctctccgcctctacaccagcctcatatccacacgggatgctctctgctgagtattgtcttgagttagttctccctctcatgttctggctgatgctactcatggtcatagtatcacctgagggggaaggagtatgctatgaaggtgaaaaatgctaccatagcattttgtttgtttataaaatgtcaggccctggttccatttttcccccctcttatatctaaattttgaaaccactggcctctaacagtctgtagtaggcttaagttcaaggtgccatttgcttctctggtgcctgtttgtgagccaaatagaggaagagtatgctagagagagcgctgaccaggaagatcacatcaaaccaacggtgatagaagttgaactgcagttctccaaggacttcagtgattatggtgcggtattctaaaggcatactcattcggatcagcagcacagaggagacaaagtacatgccctgtaagtcaaatgaattaatccagaagtgactcattatctgtgctaatagcaggacaatgacattggaggacttactgctagagatggcataaaagaacttggtaagagtgatcagcaatcctctgatggatgtgacgatgattattccaacaagaatgaaggaaatgtgttgggaccaaaacttcacatcaaattggattcccagataattcacagtgatctcaatgcctcttgtgacaggatccgttttcccaactcgatcaaaaacaatattgatggtagccatgaaaattttccaaacacagtaaatagagaaaaagtaaccaagaaaattaaaatatttccccttgaaggttttggagtattctattctctccttggtagcatatagatcagctgtttccagaaaaagctgcctgcttaattcttccaaagcatccacttcctgttgaataagagtaagattttcacttcctgatgctgaagtggtaacactttttatcattccccagaaacctgatggtttgttatgcacttcccccttctggaacattgttctccgtgccattgccatccttttctttttgcttatgatcatatccatggtttgcagcagtcgccgttccagggctagaatatccgtgtcagtcacattcctgaggaagtaagacatgtaagtgtatgggcagttgacagcaccaaatccagaaagaagagccatgagagtcactccaatcacaccaacccggctgatgagctgttctatggataagatcccatgttttgggctgagaatgggaaagggatctcctagtttccagaagaaatacataaaggtcagccataagagacaggaaaaaagcagtcgttgtttattgcagtagtcggatattgctcacaataaaataggccaattgtaaaaaaggcaccattggaaaaccaggatcagcagaattacacacaggttcattttccagtgaaaataacgggagctgctattcaatactcctaagatttcaaagatgatgagctcaaacatggtgcaagaaaatgcaaacgtcacggagaagatcacctgtacaacatactgacgtatctcatagtctttaaacaattggcgcatgaagaaaagccacccaaatccaaaaaatagtatctgggaggtaatcatgatgctggagtcgatgaggaaactcatggcgaagtgtaaggaaggctcctgcctccacttcccactccccgaggccacagcacgctcgacaggccccctcacacggtctgccttctcccaggtgct

SEQ ID NO: 60647 - DNA, 1869 bp, Homo sapiens
  misc_feature (1)...(1869): n = a,t,c or g
cggccgccgcccccgcctgggccgcgctccccctctcccgctccctccctccctgctccaactcctcctccttctccatgcctctgttcctcctgctcttacttgtcctgctcctgctgctcgaggacgctggagcccagcaaggtgatggatgtggacacactgtactaggccctgagagtggaacccttacatccataaactacccacagacctatcccaacagcactgtttgtgaatgggagatccgtgtaaagatgggagagagagttcgcatcaaatttggtgactttgacattgaagattctgattcttgtcactttaattacttgagaatttataatggaattggagtcagcagaactgaaataggcaaatactgtggtctggggttgcaaatgaaccattcaattgaatcaaaaggcaatgaaatcacattgctgttcatgagtggaatccatgtttctggacgcggatttttggcctcatactctgttatagataaacaagtttttctagatctaattacttgtttggacactgcatccaattttttggaacctgagttcagtaagtactgccccagctggttgtctgcttccttttgctgagatatctggaacaattcccacatgggatatagagattcctcgccattgtgccatggcctggtgtgccatgccaggagtagtgtccaaacacgttgggcggcccaaatcagtgttgtaattagtaaaggtattccctattatgaaagttctttggctaacaacgtcacatctgtggtgggacacttatctacaagtctttttacatttaagacaagtggatgttatggaacactggggatggagtctggtgtgatcgcggatcctcaaataacagcatcatctgtgctggagtggactgaccacacagggcaagagaacagttggaaacccaaaaaagccaggctgaaaaaacctggaccgccttgggctgcttttgccactgatgaataccagtggttacaaatagatttgaataaggaaaagaaaataacaggcattataaccactggatccaccatggtggagcacaattactatgtgtctgcctacagaatcctgtacagtgatgatgggcagaaatggactgtgtacagagagcctggtgtggagcaagataagatatttcaaggaaacaaagattatcaccaggatgtgcgtaataactttttgccaccaattattgcacgttttattagagtgaatcctacccaatggcagcagaaaattgccatgaaaatggagctgctcggatgtcagtttattcctaaaggtcgtcctccaaaacttactcaacctccacctcctcggaacagcaatgacctcaaaaacactacagcccctccaaaaatagccaaaggtcgtgccccaaaatttacgcaaccactacaacctcgcagtagcaatgaatttcctgcacagacagaacaaacaactgccagtcctgatatcagaaatactaccgtaactccaaatgtaaccaaagatgtagcgctggctgcagttcttgtccctgtgctggtcatggtcctcactactctcattctcatattagtgtgtgcttggcactggagaaacagaaagaaaaaaactgaaggcacctatgacttaccttactgggaccgggcaagttggtggaaaggaatgaagcagtttcttcctgcaaaagcagtgtaccatgaggaaaccccagttcgctatagcagcagcgaagttaatcacctgagtccaatataagtcaccacagtgctgcaggctgactctgcagagtatgctcaaccactggtaggaggaattgttggtacacttcatcanagattac

SEQ ID NO: 60648 - DNA, 2759 bp, Homo sapiens
gtccggaattgccgggtcgacgatttcgtgttgaaggcgagagcttgcttggcccgtgtcgcttctgtcccaagaaccggacggagagtgagggcacgagggtcgctgtcgggggctgtcgtcttccacgtacacgtcgtcgtgaggagcgcagtccggactcttcccgcaacccctccggctccctttccgcacgcctcgaggcggcggcggccaccgagacagcgcgcgatgctggaccagttgatgggcacctcccgggacggagatacaactcgtcaacgaatcaaattcagtgatgacagagtatgcaagagtcaccttctcaactgttgtcctcatgatgtcctttctggaactagaatggatcttggagaatgtctgaaagtccatgacctggctttaagagcggattatgaaattgcatccaaagaacaagattttttctttgaacttgatgccatggatcatctgcagtcattcattgcagattgtgatcgtagaacagaagtggccaagaaaagattagcagaaactcaagaagagattagtgctgaagtagcagcaaaggcagaacgtgttcatgagttaaatgaagaaattggtaaattgttagccaaggtggaacaactaggagctgaagggaatgtggaggaatcccagaaagtaatggatgaagtagagaaagcacgggcaaagaaaagagaagcagaggaagtttatcggaattctatgccagcttccagttttcagcagcagaaacttcgagtctgtgaagtctgctctgcctatttaggacttcatgataatgacagacgactggctgatcattttgggggtaaactgcacctgggatttattgaaataagagagaagcttgaagaattaaagagagtcgtagctgagaagcaggagaaaagaaaccaggaacggctgaaacgaagagaagagagagagagagaagaaagggagaagctgaggaggtcccgatcacacagcaagaatccaaaaagatccaggtccagagagcatcgcagacatcgatctcgctccatgtcacgtgaacgcaagaggagaactcgatccaaatctcgggagaaacgccatcgccacaggtcccgctccagcagccgtagccgcagccgtagccaccagagaagtcggcacagttctagagataggagcagagaacgatccaagaggagatcctcaaaagaaagattcagagaccaagacttagcatcatgtgacagagacaggagttcaagagacagatcacctcgtgacagagatcggaaagataagaagcggtcctatgagagtgctaatggcagatcagaagacaggaggagctctgaagagcgcgaagcaggggagatctaactagctgtgtacatttcttcagtccttaagcttcctacggagttacgtactattgtttagttcacagctgttcagggtgacagtgagcagatccagacaccagatccagctaggctagatgtacagtatctaacttgatctgaactgaacctgttttccttgatgatgcctaaaactacatccatagtttctggtgaacctgtaatacagttctgaaagtacagttttatataataagatgctgatctctttattctttcaagtaagagtgctagtgaacaaattgtgttacttgccttgggattttttgaacgtttgtaaaatgctgtcttcctagtccaaacagctgcagctttgggcatttttctttttaattattcttcctctgactttgtatcccttaatacctacactctccaattgtaagagaaagggggcagggaagcaatatagcttccattctaaggctgtattcccgttatgaattactagctgattacagttcagagcattgatcctggaatgtgtgctggagaaatttaaaatactggggttttttgtttaatggtgcctatttagagttggaagttgaacagctgttgcattacatacttttgcttttttattgaaattttgaaatcaaacgtcttgatttttctgttctgttgaattgctatgttcaggatgttctagggggtgggggcagggactcttttcgtaataagcacttgttttattttgtgtgtgtggagtataaaggctacacccttattgtaaaaaaataataataataaaatgaaagaaacaatcaccaccaccattattaaactgtaacttgtctagtaaattgtcactagaactatttgctgtgggcatttcctctattctgttacgtcattaacagtgccttactgtgcaaggcaccaaaggacataaatacgtacttgcaaagattccagatgagctgttcatgtgggccccttgctgactatattccagccacttcagggttgtttgtaatgaccgttatagagaagggctcgacctgcagaagaaactggggtgtttttattctcattcaacaaacccaaataaaaacagtatatgtaaccaacataatgagacttaagtttctgccttgaagagttgtatatccgttagtaacttaaactgtaattggcaggtatcacttgtgattctggaaattctgaggaacacagattccttaagtaatgaaattagtatctgtgggtatcattaactaaggtcacctttcaagaactgttaatgtcctttgtccccaagtttgacagatttgatgtcagaggcatgtgggcctctgtgaaggtgctgagagaatgggaaactaaggccat

SEQ ID NO: 60649 - DNA, 1734 bp, Homo sapiens; identical to SEQ ID NO: 60607

SEQ ID NO: 60650 - DNA, 4344 bp, Homo sapiens
tttcgtgcctgtcggctgacgtgtctgcagttcctccgcgtctactgcgagtcaggccgtgatggcggacgcctgggaagagattaggcggttggcggccgacttccagcgggcgcagttcgccgaggccacgcagaggttgtccgagcggaactgcattgagattgttaataaattgattgctcagaaacagctagaagtagttcatacactcgatggaaaggaatatattactccagcccaaattagtaaagaaatgagagatgagctacatgtccgaggtggtcgagtaaacattgttgatctacaacaggtaattaatgtggacctgattcatattgaaaatagaattggtgacattattaaatcagaaaagcatgttcagttagtgttgggacaactgatagatgagaattatttggatcggttggcagaagaggtcaatgataaattgcaagaaagtggtcaggtcaccatatcagaactgtgtaaaacttatgatcttcctgggaactttctgacacaggcactaactcagcgacttggtagaattatcagtggacatattgatcttgataatagaggagtaatttttacggaagcttttgtagctcgacataaagcacgtatccgtggactattcagtgctattacccggcctacagctgtgaattctttgatttcaaaatatggatttcaggagcagcttctttactctgtgcttgaggaacttgttaatagcggacgcttacgaggcactgtggttggtgggagacaggataaagctgtgtttgtccctgacatctactccaggacacagagtacttgggtggattcctttttcaggcagaatggctatctagaatttgatgctttgtccagacttggaatcccagatgctgtaagctacataaagaaaagatataagactacacaactcttgtttttgaaagcagcttgtgttggtcaaggacttgtggatcaagtggaagcatcagtagaagaagccatcagctctggaacatgggttgatattgcacctctgctacccacttctttatcagttgaagatgctgccatattgcttcagcaggtgatgagggcattcagcaaacaggcctcaactgtagtctttagcgacactgttgtagtcagtgaaaaattttataaatgactgtacagaactgttccgtgagctgatgcaccagaaagctgaaaaggaaatgaaaaataatcctgtgcatttaatcactgaagaagatctgaaacaaatctccactttagaaagcgttagtacaagtaaaaaggataaaaaagatgagcgaagaaggaaagcaacagagggcagtggaagcatgagaggaggaggtgggggcaatgccagagagtacaaaattaaaaaagtcaagaagaaaggaagaaaagatgatgatagtgatgatgaatctcaatcatcccacactggaaagaagaagccagagatcagttttatgttccaggatgagattgaagattttttaagaaaacacatacaagatgcccctgaggagtttatttcggaacttgctgagtacttaataaaacctcttaataaaacttatctcgaggtggtacgttcagtattcatgtcttcaacaacttctgcttctgggacgggcagaaaacgcacaatcaaggacttgcaagaagaagtttcaaacctgtacaataacattaggttatttgaaaaagggatgaagttttttgcagatgacacacaggctgctcttaccaaacacttgctgaagtcagtgtgtactgatatcactaacctcattttcaacttcttagcttcggatttaatgatggcagtagacgatcctgcagccattacaagtgaaataagaaagaaaattttaagtaaattatcagaagaaaccaaagtagctcttacaaaactccataactctctgaatgaaaagagcatagaagattttatttcttgtctggattctgcagcagaagcttgtgatattatggtgaaaaggggagacaaaaaaagggaaagacagatactgttccaacatcgacaagcactggctgaacagctaaaggtcacagaagaccctgctcttattctgcacctcacatcagtcctgttgtttcagttttcaacccacagcatgctccatgcacctggaagatgtgtcccacagatcattgcttttcttaatagtaaaattccagaggatcagcatgctcttttggtaaagtatcaaggtttggttgtaaagcagctagtcagtcaaagtaagaagactgggcagggagattatcccttgaataatgaattagacaaagaacaagaagatgttgccagtactactcgtaaagagcttcaagaactttcttcatccattaaagaccttgttctcaaatctaggaaatcatctgtgacggaagagtaatgatcttaatttacatttgtcatatagtaagcattttcccccaaggttgaaggtgagtggtcacaaaaaagtagtcactatacaactcccctctccctgcaaaaaccacctcatacacacacaattcagttaaaacagtagtattgtattaaatgtaaatcttaaaaagatgtgaatttttgtaaattgggttcttcatggaagtttttttccacctgattttcacacaaatactatatgaaatttttcacattattttcacataattttaaaaattacatatttcaggtttgttctctttccaaatgttgaatgaaaaacaaattttccaatccatttatccctggggaaggattcatttgttgcgagtgccagtatacttaaatgtatactttatatacatttaagcagaaatttaaaatgtggtcttttttttttaaaagaaacacttctgtgtcagaaatgaaaataaatcatgttttttatttttaaatagaaagcacttcaaaactaaaatacagaaatttacaaaaaagaaaaattattactaagcccttgctcttatttttggcagaataaacattgattttggttggggctgcaaggatgcctttacaggtgcacaagaacgctagagtggcccatgcattgctgtgttctcttctaaaacaagctactaacaagagagagaacacatgcaatttattaccagtaagcataagtcatatttaacattggaataactaagcattttatacaaagatttttctttgacccagtttgcatttgtacattttatttttttagttcaacagctgctctgtcacataatactttgtaaatactagtgtgaaaaacagataggatgccttttccagtggtaggagcatctgtaagtgcatttaaatcattagaagcttttttcccaaaacctagaaacccttattaaaaaatagacatttttttctaaagattattagttaaaaataactaaaagagttccttagagtaatcatttcaaccaaatgaatttcaagcaacaacttacttactatttatcaaaaagggatttaattattttgaatataattataaattaaatttcaaatatttaaaaatactattttatataattccttatgacattttaaactttatattttaaaatatttgaatacgaaaagatcagtctacctctactccattctagacaaagtattaatccttagtgaaagtaattaattaaattgccaacttggcattattattaaacttgataggaacgcaacattaaatttaaaaatgttttcccgtgggtaattttctattatatattttcatatgggcaaagggaaaaaatgataaatcctctgtaatcacaaaccccaatttcgttttgtttattcagcttctaaaatattgaacacccagacttttaattcaacctttaagaaccttatcatttatgtttcagtagatatcaaagtaatccatgtttgtgtcaaatgatcatagaaaataaatagaagagacagtgaagcaagtaaaaagaaaagcattgttttaatttgtttgcattaatttttttcatttgtcaaaatgcttcttttgttgccacgagtaaagaacagtttttattgttttgtaagtaaaattacgtagctgattttgtatgtaaagattaatttccataataaaaattattgtatgtttactgtgatcttaatgggcagggttaagaaagttatttaaaataaagttacctattctactaaattttatagtactttgaagcttctattaattaacacaaagattaattggtgcatatattttatatatatacattttgaattctcattttgaacattattaaaggattttatttttcttacac

SEQ ID NO: 60651 - DNA, 2209 bp, Homo sapiens
  misc_feature (1)...(2209): n = a,t,c or g
gagaagggagaagcaggatcccctggtgctccggggcaggaatggaaacacggggaagaanccctggaatccccaggatttccctggaaaccgaggattaatgggcccaaaagggagaaattgggcctcccaggacagcaaggaaaaaaaggagccccagggatgccctggtttaatgggaagcaatggctcaccaggccagcctggaacaccgggatctaagggaagcaaaggtgaacctggaattcaagggatgcctggggcttctgggctcaagggagaaccaggagcaacgggttccccaggagaaccaggatacatgggtttacccgggattcaaggaaaaaagggggacaaaggaaatcaaggtgaaaaaggtattcagggtcaaaagggagaaaatggaagacagggaattccagggcaacagggaattcaaggccatcatggtgcaaaaggagagagaggtgaaaagggagaacctggtgtccgaggtgccattggatcaaaaggagaatctggggtggatggcttgatggggcccgcaggtcctaaggggcaacctggggatccaggtcctcagggacccccaggtttggatgggaagcccggaagagagttttcagaacaatttattcgacaagtttgcacagatgtaataagagcccagctaccagtcttacttcagagtggaagaattagaaattgtgatcattgcctgtcccaacatggctccccgggtattcctgggccacctggtccgataggcccagagggtcccagaggattacctggtttgccaggaagagatggtgttcctggattagtgggtgtccctggacgtccaggtgtcagaggattaaaaggcctaccaggaagaaatggggaaaaagggagccaagggtttgggtatcctggagaacaaggtcctcctggtcccccaggtccagagggccctcctggaataagcaaagaaggtcctccaggagacccaggtctccctggcaaagatggagaccatggaaaacctggaatccaagggcaaccaggccccccaggcatctgcgacccatcactatgttttagtgtaattgccagaagagatccgttcagaaaaggaccaaactattagtgtctgatgcctcattcagcagcctaggcatggtgctttttctgtggtcttttgcatctcaggaagataaccaacagtaatcccttgaaaagaaacttaagtacctcggcgtttttattttttttttcttatggaaaaaaatataaaagatcacatatactgattttaaaggctcctcagtcatttggagcccttggattagcagcattaattaaatctcaagggtttcttgtaaagtccatttatgttaatcaaagttgaatataaaaatccaccattgcctgttagccagtcagttttagtcactgtgaaatatttcacattcagcctccatgcagtagagatttgagtttaatttcatgtccatgtgactttcatgtttcctatctcatagctcatgctactacataagccaaaacatgtatctcatcattggaagtaagatcagggctgatattcacctgggatagacagtattggtgaactactcatttactacagtgtctcagccttgataaagggcagtggattgcctgttgttcggtgttgtgaatagcacctctgaataagattagagtgtttcttaattcatttcaaactctaaaattagattaatggtggtgctaagaaagagtattaattactttgggaatggtcaaaattaacattaaaaacattttagacaaaaagtttcattgtacattcaaagaaaatgtaagtttggaagtactaaaagactattttatacttgttgattaatcggaatgtttgttgtatgccttcattttccatttcacttatatgtgtatgtccatatatgttaattttcattgtagcaaagctaatggaaataaagctaatgctctagttgaaagaaaaggaaaactccctgaaatcctagaatgtcttgttatttttagctgactgtaaaatattatgaacagtctttgtgtattgtgcttaatgcttttgtaagaaacagaatttgaaatatttcatccttgtcatgctcaaaattttgttacatgcttgttattcagagtataataaagttttgtacaggcctgaaaaaaaaaa

SEQ ID NO: 60652 - DNA, 1982 bp, Homo sapiens
tttttttttttttttttgctagtttatatgaaagaccatttttaatatgaaaagagaaaaacaatttgaaggccccacaatttgttgtgtaacaacataatttcaagtaaagtgaatgtgattaaaacatcttgatttcacaaagccattcagaggaggcttcgacaaacgcaaagcgtacccaaaccctggagggtcacatcccggctgctacaaacctcggcggggcggcccccgtcttgcggctcgggacagcgcagactatgcaggggccgcaggggaccacgcagattggcacgcccgttccccatccccgcagcgcgtctgcaccggagactctgcggggattgtagccggagggcgggccgggctccgaggcgctgctcaggcattggggtttgtcctcatgagctccacgtcggcgtgcaccatctccctcaccagctcatcgaaagcgacccggggcttccagttcagcttctgtttcgctttggtgcagtcgccctgcagaaagtcctcggcggcagcgtgcgaccctctttctaacgcggccgtggatgtttcttcccgggccgcagccaagcgcggttcttcctgggcggtggctttgggcttttcgtacccacagtcaagtcagttcacgtcgcctcccgcacacacgcgttcataaaacgaaactggagtttcacgaagcaattcttaggcttagcgtccaggaacgctgtagacggtctattctattctacccctattctactcggttcgattctgttcctaagaaaatgccgatctcgacccacttgtacttccacgagcggagctgcagccagcagctctgcaggaccccgcactgcccgccaccgtcccctctggcagtgccttcctcctcccgctttccccaactgctccactcgaggaaaccggaggacaggttcagctcactgaaaggggtcccaacagaggtgaagatccaagaaatgacgaagctgggccacgagctgatgctgtgtgcgccagatgaccaggagctcctcaagggctgtgcctgcgcccagaagcagctacacttcatggaccagttgctcgataccatccggagcctgaccattgggtgctccagttgctcgagcctgatggagcacttcgaggacaccaagggtcaagaacgaggccttgctgggggagctcttctctaagcccccaacctgcagatgctcctgaatccagagtgcgacccgtgggcccctggacatgcagcccctcctcaacaagcagagtgatgactggcagtgggccagtgcctctgccaagtccgaggaggaggagaagctggcggagcttgccaggcagctgcaggagagtgctgccaagttgcacgcgcttagaacggagtactttgcacagcatgagcaaggggctgctgcgggcgcagccgacatcagcaccctagaccagaagctgcgtctggtcacttccgacttccaccagctaatcttggcttttctccaagtctacgacgacgagctgggcgagtgctgccagcgcccaggccctgacctccacccgtgcggccccatcatccaggccacgcaccagaatctgacttcctacagccaactgctgcaagtggtcatggcagttgctgacacctctgcgaaggccgtggagaccgtgaagaagcagcaaggcgagcagatctgctggggtggcagcagctccgtcatgagtctagctaccaagatgaatgaactaatggagaaatagaaagtcttcagtgatggcctacgccaaagcacaggatggggcgggcaggaagccctctcccaagatcgagttggccgaggatggatgattgtggcagcagaagccgttgcagccccacgttgtgctctaggcagggacctttggcccctttggggagggagagacagacgggcggtttgacttggacacaaaaaaagccttggtttctaaaaaaaaaa

SEQ ID NO: 60653 - DNA, 3060 bp, Homo sapiens
tttcgtgcagaacccgcggccggctgagtcctctccagccgcgagaggcgggctccagccgcggctcgcgcgctcgctctgagcccccgcgcccaggtgggatggaagaagcctgtcaggtgcagacaactaagcgaggggatcctcatgagttaagaaacatatttctacagtatgccagtactgaggttgatggagagcgttacatgaccccagaagactttgttcagcgctatcttggactgtataatgatccaaatagtaacccaaagatcgtgcagctcttggcaggagtagctgatcaaaccaaggatgggttgatctcctatcaagagtttttggcatttgaatctgttttatgtgctccagattccatgttcatagtggctttccagttgtttgacaagagtggaaatggagaggtgacatttgaaaatgtcaaagaaatttttggacagactattattcatcatcatatcccttttaactgggattgtgaatttatccgactgcattttgggcataaccggaagaagcatcttaactacacagaattcacgcagtttctccaggagctgcaattggaacatgcaagacaagcctttgcactcaaagacaaaagcaaaagtggcatgatttctggtctggatttcagtgacatcatggttaccattagatctcacatgcttactccttttgtggaggagaacttagtttcagcagctggaggaagtatctcacaccaggttagcttctcctacttcaatgcatttaactcgttactgaataacatggagcttgttcgtaagatatatagcactctagctggcacaaggaaagatgctgaagtcacaaaggaggaatttgcccagagtgccatacgctatggacaagccacaccactagaaattgatattctatatcagcttgcagacttatataatgcttcagggcgcttgactttggcagatattgagagaatagccccattggctgagggggccttaccttacaacctggcagaacttcagagacagcagtctcctgggttaggcaggcctatctggctccagattgccgagtctgcttacagattcactctgggctcagttgctggagctgtgggagccactgcagtgtatcctatagatctggtgaagacccgaatgcaaaaccagcgtggctctggctctgttgttggggagctaatgtacaaaaacagctttgactgttttaagaaagtcttgcgttatgagggcttctttggactctacaggggtctgataccacaacttataggggttgctccagaaaaggccattaaactgactgttaatgattttgttcgggacaaatttaccagaagagatggctctgttccacttccagcagaagttcttgctggaggctgtgctggaggctctcaggtcatttttaccaacccattggagatagtgaagattcgtctgcaagtagctggagagatcaccacgggacccagagtcagcgccctgaatgtgctccgggacttgggaatttttggtctgtataagggtgccaaagcgtgtttcctccgagacattcccttctctgcaatctattttcctgtttatgctcattgcaaactacttctggctgatgaaaatggacacgtgggaggtttaaatcttcttgcagctggagccatggcagggtgtcccagctgcatctctggtgacccctgctgatgtcatcaagacaagactgcaggtggctgcccgcgctggccagacgacatacagtggtgtcatcgactgtttcaggaagattctcccgggaagaagggccctcagcattttggaaagggactgcagctcgagtgtttcgatcctctccccagtttgggtgttaccttggtcacttatgaacttctccagcgggggttttacattgattttggaggcctcaaacccgctggttcagaaccaacacctaagtcacgcattgcagaccttcctcctgccaaccctgatcacatcggtggatacagactcgccacagccacgtttgcaggcatcgaaaacaaatttggcctttatctcccgaaatttaagtctcctagtgttgctgtggttcagccaaaggcagcagtggcagccactcagtgatgagacaactgttgagtgtggcaaaatggcgccttgaagaaagaggcctaggagagcagccctgtaatgtatccagtcagctgcatggtactgactgagctgaggagtcaaactcttctttctgtatgacatatacatatacttgtttataaaataatcatttgcccagggaaaaaaccacaacgctgtttcaagctttagtcttatgtgttgaaatgtttttgtaagccttggcatgaattagtgttctagactctgctttgcacagcttgcacttacagtgattgtacatattgtacatctttgtacagagacatcttggcacctcatcccaacaaatcacatttgtagaaatgtaatgcggttctgagtggcttgaaatgtacagaatgttttgaaagtgttttattaagaatcacacaaaaataaatgtattaaaattaaattcattctcttattggtgacttatggaaataaagcatcaatattggatgtatttaattcctagtttgttttccattctggaataaaaaggtatttgctgataaaaggcataacgagacatagtgctgctaccactgaataagtgatactttggaaagatgcatgccagtggatgccagaggaccaggctaatgacttgtgtgtgctgatgtgtttccatttgtatttaatgtgtgtagaccctcctctgttcatcaatcaaaaagcatttcctaggcagctcctcgcctgtcagtgtgcatatggaaacagggacatctccatcattactggcttagttttgctttcctttgacacagtaaggcaaaggccaagctttcaaaagagtaaaggatactttcacaatttcccttcatatggatatgattccagtcaaaaataaaatgcacaccaaaatgtaaaaaaaaaa

SEQ ID NO: 60654 - DNA, 2952 bp, Homo sapiens
ctgctgggccctgaaattttactcagcagtttgaaatcaagacatagcttttctcattcaccctcccacttggggctaatgcacagacatgaacatctattgaggaaaaccacaaaaaacttcaaaacagctacaacgggaaaaagagagttttgtcccacagtcagcaggccactagtttattaacttccagtcaccttgatttttgctaaaatgaagactctgcagtctacacttctcctgttactgcttgtgcctctgataaagccagcaccaccaacccagcaggactcacgcattatctatgattatggaacagataattttgaagaatccatatttagccaagattatgaggataaatacctggatggaaaaaatattaaggaaaaagaaactgtgataatacccaatgagaaaagtcttcaattacaaaaagatgaggcaataacaccattacctcccaagaaagaaaatgatgaaatgcccacgtgtctgctgtgtgtttgtttaagtggctctgtatactgtgaagaagttgacattgatgctgtaccacccttaccaaaggaatcagcctatctttacgcacgattcaacaaaattaaaaagctgactggccaaagattttgcagacatacctaacttaagaagactcgattttacaggaaatttgatagaagatatagaagatggtactttttcaaaactttctctggtagaagaactttcacttgctgaaaatcaactactaaaacttccagttcttcctcccaagctcactttatttaatgcaaaatacaacaaaatcaagagtaggggaatcaaagcaaatgcattcaaaaaactgaataacctcaccttcctctacttggaccataatgccctggaatccgtgcctcttaatttaccagaaagtctacgtgtaattcatcttcagttcaacaacatagcttcaattacagatgacacattctgcaaggctaatgacaccagttacatccgggaccgcattgaagagatacgcctggagggcaatccaatcgtcctgggaaagcatccaaacagttttatttgcttaaaaagattaccgatagggtcatacttttaacctctattggtacaacatataaatgaaagtacacctacactaatagtctgtctcaacaatgagtaaaggaacttaagtattggtttaatattaaccttgtatctcattttgaaggaatttaatattttaagcaaggatgttcaaaatcttacatataataagtaaaaagtaagactgaatgtctacgttcgaaacaaagtaatatgaaaatatttaaacagcattacaaaatcctagtttatactagactaccatttaaaaatcatgtttttatataaatgcccaaatttgagatgcattattcctattactaatgatgtaagtacgaggataaatccaagaaactttcaactctttgcctttcctggcctttactggatcccaaaagcatttaaggtacatgttccaaaaactttgaaaagctaaatgtttcccatgatcgctcattcttcttttatgattcatacgttattccttataaagtaagaactttgttttcctcctatcaaggcagctattttattaaatttttcacttagtctgagaaatagcagatagtctcatatttaggaaaactttccaaataaaataaatgttattctctgataaagagctaatacagaaatgttcaagttattttactttctggtaatgtcttcagtaaaatattttctttatctaaatattaacattctaagtctaccaaaaaaagttttaaactcaagcaggccaaaaccaatatgcttataagaaataatgaaaagttcatccatttctgataaagttctctatggcaaagtctttcaaatacgagataactgcaaaatattttccttttatactacagaaatgagaatctcatcaataaattagttcaagcataagatgaaaacagaatattctgtggtgccagtgcacactaccttcccacccatacacatccatgttcactgtaacaaactgaatattcacaataaagcttctgagtaacactttctgattactcatgataaactgacatggctaactgcaagaattaaatcttctatctgagagtaataatttatgatgactcagtggtgccagagtaaagtttctaaaataacattcctctcacttgtaccccactaaaagtattagactacacattacattgaagttaaacacaaaattatcagtgttttagaaacatgagtccggactgtgtaagtaaaagtacaaacattatttccaccataaagtatgtattgaaatcaagttgtctctgtgtacagaatacatacttattcccatttttaagcatttgcttctgttttccctacctagaatgtcagatgtttttcagttatctccccatttgtcaaagttgacctcaagataacatttttcattaaagcatctgagatctaagaacacaattattattctaacaatgattattagctcattcacttattttgataactaatgatcacagctattatactactttctcgttattttgtgtgcatgcctcatttccctgacttaaacctcactgagagcgcaaaatgcagctttatactttttactttcaattgcctagcacaatagtgagtacatttgaattgaatatataataaatattgcaaaataaaatccgtctaaatagaagggttctgttttatttggaaaaattgaatctttaaactatcataatcttgaatgactgtcatctttctagttttcagaaaaataatgtattcctatattatttttatgataaaacttatggagcaaaacaccatcaaataactctcaaattaagaaaaaattcaaaagtcagtagttttagataagag

SEQ ID NO: 60655 - DNA, 1343 bp, Homo sapiens
cggacgcgtgggcgcggctgctcaagatgaaccgactcttcgggaaagcgaaacccaaggctccgccgcccagcctgactgactgcattggcacggtggacagtagagcagaatccattgacaagaagatttctcgattggatgctgagctagtgaagtataaggatcagatcaagaagatgagagagggtcctgcaaagaatatggtcaagcagaaagccttgcgagttttaaagcaaaagaggatgtatgagcagcagcgggacaatcttgcccaacagtcattcaacatggaacaagccaattataccatccagtctttgaaggacaccaagaccacggttgatgctatgaaactgggagtaaaggaaatgaagaaggcatacaagcaagtgaagatcgaccagattgaggatttacaagaccagctagaggatatgatggaagatgcaaatgaaatccaagaagcactgagtcgcagttatggcaccccagaactggatgaagatgatttagaagcagagttggatgcactaggtgatgagcttctggctgatgaagacagttcttatttggatgaggcagcatctgcacctgcaattccagaaggtgttcccactgatacaaaaaacaaggatggagttctggtggatgaatttggattgccacagatccctgcttcatagatttgcatcattcaagcatatcttgtaaaacaaacacatattatgggactaggaaatatttatctttccaaatttgccataacagatttaggtttctttcctttctttgaaggaaagtttaattacattgctcttttattttttccattaagagactcattgcttgggaaatgctttcttcgtactaaaatttgattcctttttttcttatgaaaaacgaactcagtttaaaagtatttttagctcgtatgacttgttttcattcattaataataatttgaaataaaactaaggaaatggaatcttaaaagtctatgacagtgtaactctacagtctcaaaatgacctgataaattgataagacaaagatgagattattggggctgttcatattatgattcagaatcattttctattgtggtattataggttggttaaagtgatggcctttttgatgggttttgttgtgtcttgtgaacaagtcgttactgtgtccattattggaatggaattatcactactgtatcatgagtgggtattttgattctatggttccctcagtattacatcttgacttgtaatcaattatgaatatttcttgatatttaatgtataggacatttatttatactcaataaatatttttcaaaaaaaaaa

SEQ ID NO: 60656 - DNA, 3730 bp, Homo sapiens
ttttttttttttagcaacacttttcttgtttgtaaacgcgagtgaaccagaaagtgtgaatgcggagtaggaatatttttcgtgttctcttttatctgcttgccttttttagagagtagcagtggttcctatttcggaaaaggacgttctaattcaaagctctctcccaatatatttacacgaatacgcatttagaaagggaggcagcttttgaggttgcaatcctactgagaaggatggaagaaggagccaggcaccgaaacaacaccgaaaagaaacacccaggtgggggcgagtcggacgccagccccgaggctggttccggagggggcggagtagccctgaagaaagagatcggattggtcagtgcctgtggtatcatcgtagggaacatcatcggctctggaatctttgtctcgccaaagggagtgctggagaatgctggttctgtgggccttgctctcatcgtctggattgtgacgggcttcatcacagttgtgggagccctctgctatgctgaactcggggtcaacatccccaaatctggaggtgactacttttatgttaaggacatcttcggaggactggctgggttcctgaggctgtggattgctgtgctggtgatctaccccaccaaccaggctgtcatcgccctcaccttctccaactacgtgctgcagccgctcttccccacctgcttccccccagagtctggccttcggctcctggctgccatctgcttattgctcctcacatgggtcaactgttccagtgtgcggagggccacccgggttcaagacatcttcacagctgggaagctcctggccttggccctgattatcatcatggggattgtacagatatgcaaaggagagtacttctggctggagcccaagaatgcatttgagaattttcaggaacctgacatcggcctcgtcgcactggctttccttcagggctcctttgcctatggaggctggaactttctgaattacgtgactgaggagcttgttgatccctacaagaaccttcccagagccatcttcatctccatcccactggtcacatttgtgtatgtctttgccaatgtcggcttatgtcactgcaatgtccccccaggagcttgctggcatcagaacgccgtcgctgtgacttttggagagaagctcctaggagtcatggcctggatcatgcccatttctgttgccctgtccacatttggaggagttaatgggtctctcttcacctcctctcggctgttcttcgctggagcccgagagggccaccttcccagtgtgttggccatgatccacgtgaagcgctgcaccccaatcccagccctgctcttcacatgcatctccaccctgctgatgctggtcaccagcgacatgtacacactcatcaactacgtgggcttcatcaactacctcttctatggggtcacggttgctggacagatagtccttcgctggaagaagcctgatatcccccgccccatcaagatcaacctgctgttccccatcatctacttgctgttctgggccttcctgctggtcttcagcctgtggtcagagccggtggtgtgtggcattggcctggccatcatgctgacaggagtgcctgtctatttcctgggtgtttactggcaacacaagcccaagtgtttcagtgacttcattgagctgctaaccctggtgagccagaagatgtgtgtggtcgtgtaccccgaggtggagcggggctcagggacagaggaggctaatgaggacatggaggagcagcagcagcccatgtaccaacccactcccacgaaggacaaggacgtggcggggcagccccagccctgaggaccaccattccctggctactctctccttcctcccccttttatcctacctccctgccttggtcccgccaacacatgcgagtacacacacacccctctctctgcttttgtcaggcagtggtaggactttggtgtgggtggtgtgagaaattgtaaacaaaaactgacattcatacccaaagaaccagcctctcaccccagggtccatgtcccaggccccactccagtgctgcccacactcccagctgctggaggagaggggagatgccaaggtgccctgcaggacctccctccgggccacaccctcagctgcctcttcaggaaccggagctcattactgccttccctcccagggaggccccttcagagaggagaggccacaggagctgcattgtggggggacaggctcaagcaattctgtccccatcaaggggtcagctggagagacccaagaccctatctgttcaccagggacccaaaatccaaggggatgcttccctctgccctctttcctgcccctccccatcatacctgcacccaccccagccagggctccctgtccagaattcggttctcctcaggacgccaactcccagagctaaggaccaaggagaagaacagcctctccacccccaagccaggcggttgaggaacatattgagaaaggttcagattgcagaaacccagccctgcccctgcctcctgcatccagcccccaacatggtgccaaagcttccagaagccaaaaagcttctgatttttaaggtagtgggcatctctctcctaatgacgaagctgctcagcaactccacctgcccgccgcaggaaggagcagtcccctgctatccctgcagccactcccagcacacccgcacacagccagcaccaccgcccccaccgtgcacttctcctctctgggccttggcttgggaccaggtacgaaggatccccaagcccttcaggcctgagatcagagccagatcagccttaagtcacctcccatccaagaacttggcctaaaaatactcccctatttctaaccctcaggacggatctgatattaaatgccttccctgggaggaagggtgctttccccctccctagaggtgcccattccataccctgggagactgaggagagcattggctgaagcccagttcctttcccatccatccccaactccaataatcccccactcctcgcaggtctcagtgtcatgctgtcttggggcagggtgaaagggtagtggcagcagggcgcccactctggagatcctcaaaaaaggccctcctctgtggctggcagcctctgacctttccctgggcttcaaaggaaggctatggagtttgctgtgggccctgcaaccttcccagccactcctgctgcactaaggacttaggatccttttatcacaaatcgggattctctcccccaccccgaattctgtctgcttaaactggaatacacaggagcccttcctggcctggatggtgtctcccagcttccccgcccagcttgcccaccccatagttggtgagatgccaagtttggtctgagttgtgaccccttcagagtagatgcccggcaggctggggttggcccctggagggtcaggggaccatcttcttattccctcttttctcattcctccaacttcctcccctccttcaattatttttttgtaaagttgatgccttactttttggataaatatttttgaagctggtatttctatttcttttggattttttttaatgtaaggttgttttgggggatggagttagaaccttaatgataatttctttcgtttggtgtaggttttagagatttgttttgtggagaggttttttttcttttgatgtaataaaatttaaaatggaaatg

SEQ ID NO: 60657 - DNA, 4082 bp, Homo sapiens
ctcaggcccgagaggcgccgggcggcgggatttaggctgttccggaggggagggccgggcgcggcggcggcggcggtggaggagccggagcataatgctaaagaagtaaacaggtcatggcacgtttaacaaaaagacgacaggcggatacaaaagctatccagcatctttgggcagccattgagattatacggaaccagaagcagattgccaacattgaccgtattacaaagtatatgtctcgagtccacggtatgcaccctaaagagaccacccgtcagctgagcttagctgtgaaagatggtcttattgtcgaaactctaacagtgggctgcaaaggttcaaaagctggtattgaacaagaaggatattggttgccaggagatgagattgactgggaaacagaaaatcatgactggtattgttttgaatgccatttgcctggagaggtgttgatatgtgacctgtgttttcgtgtgtatcattccaagtgtttgtctgatgagttcaggcttagagacagcagtagtccctggcagtgcccagtttgcaggagcattaagaagaagaatacaaacaaacaggagatgggcacatacctcagattcattgtctcccgcatgaaggagagggctatagatcttaataaaaaggggaaggacaataaacacccgatgtacaggaggctggtgcactcagctgtggacgttcccaccattcaagagaaagtgaatgaagggaaataccgaagttatgaagagttcaaagctgatgcccaattgcttctccacaataccgtgattttctatggagcagacagtgagcaagctgacattgcgaggatgctatataaagacacatgtcatgagcttggatgaactgcagctttgcaagaattgcttttacttggcaaatgctcgtcctgacaactggttctgttatccttgtatacctaatcatgagctggattgggctaaaatgaaaggttttgggttttggccagccaaagtcatgcagaaagaagacaatcaagtcgacgttcgcttctttggccaccaccaccagagggcctggattccttctgaaaacattcaagatatcacagtcaacattcatcggctgcacgtgaagcgcagtatgggttggaaaaaggcctgtgatgagctggagctgcatcagcgtttcctacgagaagggagattttggaaatctaagaatgaggaccgaggtgaggaagaggcagaatccagtatctcctccaccagtaatgagcagctaaaggtcactcaagaaccaagagcaaagaaaggacgacgtaatcaaagtgtggagcccaaaaaggaagaaccagagcctgaaacagaagcagtaagttctagccaggaaatacccacgatgcctcagcccatcgaaaaagtctccgtgtcaactcagacaaagaagttaagtgcctcttcaccaagaatgctgcatcggagcacccagaccacaaacgacggcgtgtgtcagagcatgtgccatgacaaatacaccaagatcttcaatgacttcaaagaccggatgaagtcggaccacaagcgggagacagagcgtgttgtccgagaagctctggagaagctgcgttctgaaatggaagaagaaaagagacaagctgtaaataaagctgtagccaacatgcagggtgagatggacagaaaatgtaagcaagtaaaggaaaagtgtaaggaggaatttgtagaagagatcaagaagctggcaacacagcacaagcaactgatttctcagaccaagaagaagcagtggtgctacaactgtgaggaggaggccatgtaccactgctgctggaacacatcctactgctccatcaagtgccagcaggagcactggcacgcggagcacaagcgcacctgccgccggaaaagatgaagctggcccttcccggagtcaccccgatgattactcttttcagacacagcggtttttgtttccaagaagccaaaattgtttagaatttgcttcccattttgcaccagcctttaaacacttttcgtgaagaaattttgcacagtagtttaaatcttttgttaatgctcctccgaagtttttcagggggtaaaagtaacatcagtggagggtattattttaaataaattttaattgagaatttgttgcattttcagcaaattttaaaacatttttaggttttacagagattttaacctttaaacaacagatctttaaaaaacaggtgaatacaagtgagtttaacaaagaaacatttagaatagatctgaatgtaagaactacagaactgtttcagaaataaaacatactaccttgatgtgacatttttttcttaaccttgttgagctggttttgttcagcttaatttactgttcaaaggcattatctgttggtcacaccagtgggtatatgattgaatttagggaacagggttgacacagcagggctagtcctgcatattttttcttaaatatttcccaattgtgtttttcattatttcttttcaatatataacttttataacaaattattagctttgatcttgtagtttaaaattgcagggaactggggtaatcttttactgagctggatcttagagaaaatgaatatttaaattttaaagtttgcacatttcatctttgtcctaacatgagtgcttgtaacaaaataaacaacaaaaacaaagccaaaaactacctttatccatatgtgaaattatagatgaggcatacgaatttgtttaatgcttcccttcccttcccacatatcatctcactgcctattatctggtgtcacctcatgtatcgtaagttaatactaaaagaagagaaagcacttaagtttcacagaagccgttatgtttgtagtaatgggtcattgcctactaatgaactccatcactgtacacagaatgaagaataatgcatgttaattttcttgtattaaagatgccgtgatttgtaaaaagtctgtattttgcggaatgtctggattaagaagcattaccaataggaatggatcgatagttgaataatgattttttatacatagatatataaaatacagccaggaaaacttaaattacttttcttttaaaatatctcacaatttatgtggtatttttaaagactgatcttagaccaagtcaaattcccatttatcatttagttattttttgaggttagagaataatttgtacatatttatttagacctttgatatttattaaagcaattactcacaatggaagtgaaagaatcaggagaaaagccttttaaaaagtattctccaggtttgtcagggtcactctaaagataaaaatgtaactaagtcttctgtgaaatatcatccatctaatcttgatgctgttgcagatggtggtgacacaagttaattgacaaactactgccaaatggtgcacaatattttgtaaaaagtacccagtagccccatttcatacaatgtacctaaattatgcagtaacttggcatcatcgttccctccttgttgctgtgtaattagtcagtgttgccacagtgtgtggcgctgatggagatgtcagaaccgagaacacttaaccttctttgattgtttttcaagttttaagacttcgatccacccctatgagagcaagtaattgtggaaatatttttggtgtaaaatcattccagagtatgtaatatttaactgatagctgcatgaaagtgagattcgtgttactttggcttttctgtctctgttgacacggttgcacatttccaagttactacagcgtgaaaactgtgtgtttaaaaaaaaacaaaattaaaaaaagagattgtggcctggttttgtaaaagttttaggtaaaattacaattgattgttttaggaatcattattaaaaattttctgcaaatcataaagctatatcgaggtgttgagcttagccactatgcacattgtaattattcattgtggctgtccagttctatgatgcattctggcattttgtaagctgctctgactagcaatatatagattcatttaatgtgttaacattggttaataaatgtattt

SEQ ID NO: 60658 - DNA, 4687 bp, Homo sapiens
cgacgccccgggccgcccgcccgtccgcttgccaaccatggagctggaggacggtgtggtgtatcaggaggagcccggcggctccggggccgtgatgtcggagcgggtgtccggcctggccggctccatctaccgcgagttcgagcggcttatcgtgcgctatgacgaggaggtggtcaaagagctgatcccgctggtggtggctgtgctggagaacctggactcggtgttcgcgcaggaccaggagcaccaggtggagctggagctgctgcgggacgacaacgagcagctcatcacccagtacgagcgagagaaggcgctgcgcaagcacgctgaggagaaattcattgaatttgaagactctcaagaacaggaaaaaaaggacttacagacccgagtggaatctttagaatctcaaacaagacaacttgagctgaaagcgaaaaactatgctgaccagattagcatacttgaagaaagagaagcagaactgaagaaggaatataatgcattacatcaaagacacactgagatgatccataattatatggaacatttagaaagaacaaaacttcatcagctctcagggagtgatcaactagaatccacagctcatagtagaattagaaaagaacgccctatatcattaggaattttcccattacctgctggagatggattgcttacacctgatgctcagaaaggaggagagacccctggatctgagcaatggaaatttcaggaattaagtcaaccacgttctcataccagcctgaaggatgagctttctgatgttagccaaggcggatctaaagctaccactccagcatcaacagctaattcagatgtggcaacaattcctactgatactcccttaaaggaagaaaacgaaggatttgtgaaggttacagatgcgccaaataaatcagagataagcaaacacattgaagtacaggtagcccaggaaactagaaatgtatctactggctctgctgaaaatgaagaaaagtcagaagttcaagcaatcatcgaatctactcctgagctggatatggacaaagatctcagtggatataaaggttcaagcactcccaccaaaggcatagagaacaaagcttttgatcgcaatacagaatctctctttgaagaactgtcttcagctggctcaggcctaataggagatgtggatgaaggagcagatttactaggaatgggtcgggaagttgagaatcttatattagaaaatacacaactgttggaaaccaaaaatgctttgaacatagtgaagaatgatttgatagcaaaagtggatgaactgacctgtgagaaagatgtgctgcaaggggaattggaggctgtgaagcaagccaaactgaaactagaggaaaagaacagagaattggaggaagagcttaggaaagctcgggcagaagctgaagatgcaaggcaaaaagcaaaagatgacgatgatagtgatattcccacagcccagaggaaacggtttactagagtagaaatggcccgtgttctcatggagcgaaaccagtataaagagagattgatggagcttcaggaagctgttcgatggacagagatgattcgggcatcacgagaaaatccagccatgcaggaaaaaaaaaggtcaagcatttggcagttttttagccgacttttcagctcctcaagtaacacgactaagaagcctgaaccacctgttaatctgaagtacaatgcacccacgtctcatgttactccgtccgtcaagaaaagaagcagcaccttatctcagctccctggggataagtccaaagcctttgatttccttagtgaagaaactgaagctagtttagcctcacgcagagaacaaaagagagagcagtatcgtcaggtaaaagcacatgttcagaaggaagacggtagagtgcaggcttttggctggagtctgcctcagaagtacaaacaggtaaccaatggtcaaggtgaaaataagatgaaaaatttacctgtgcctgtctatctcagacctctggatgaaaaagatacatcaatgaagctgtggtgtgctgttggagtcaatttatctggtgggaagaccagagatggtggttctgttgttggagcaagtgtattttacaaggatgttgctggtttggatacagaaggcagtaaacagcgaagtgcctctcagagtagtttagataagttagatcaggaacttaaggaacagcagaaggagttaaaaaatcaagaagaattatccagtctagtttggatctgtaccagcactcattcggctacaaaagttcttattattgatgctgttcaacctggcaacatcctagacagtttcactgtttgcaactctcatgttctgtgcattgcaagtgtgccaggtgcacgagaaacagactaccctgcaggagaagatctttcagaatctggtcaggtagacaaagcatctttatgtggaagtatgacaagcaacagctcagcagagacagacagcctgttaggaggcatcacagtggttggttgttctgcagaaggtgtgacgggagctgccacttcccctagtacaaatggtgcttctccagtgatggataaaccaccagaaatggaagcagaaaatagtgaggttgatgaaaatgttccaacagcagaagaaagcaactgaagctacagaagggaatgcggggtcagctgaagacacagttggacatctcccaaactggcgtctacacagagcatgtctttacagatcctttgggaagttcagatcccagaagacctctccccagtgtatcagtcgagcaatgactcagatgcatataaagatcaaatatcagtactgccaaatgaacaagacttggtgagagaagaagcccagaaaatgagtagtcttttaccaactatgtggcttggagctcaaaatggctgtttgtatgtccattcatctgtagcccagtggaggaaatgtctccattccattaaacttaaagattcgattctcagtattgtacacgtgaagggaatcgtgttagtagccctggctgacggcacccttgcaatctttcacagaggagtggatgggcagtgggatttgtcaaactatcacctcttagaccttggacggcctcatcattccatccgttgcatgactgtggtacatgacaaagtctggtgtggctataggaacaaaatctatgtggtgcagccaaaggccatgaaaatagagaaatcttttgatgcacatcccaggaaggagagccaagtgcgacagcttgcgtgggtgggggatggcgtgtgggtctccattcgcttggattctacgctccgtctctatcatgcacacacttatcaacatctacaggatgtggacattgagccttatgtaagcaaaatgttaggtactggaaaactgggcttctcttttgtgagaattacagctcttatggtgtcttgtaatcgtttgtgggtggggacaggaaatggtgtcattatctccatcccattgacagaaaccgtaatcctccaccagggacgtttactggggctgagggcaaataaaacctcaggtgtaccaggaaatcgtcctggaagtgtaatccgtgtatatggtgatgaaaacagtgataaagtgactccagggacatttataccctattgttcaatggcacatgcacagctttgcttccatgggcaccgggatgctgtgaaattctttgtggcagtcccaggtcaagtcatcagcccacaaagtagcagtagtggcacggatctgacgggtgacaaaggcaggggccatctgcacaggagcctggtagtcagacgcccttgaagtctatgcttgtcatcagtggaggagagggctacatcgacttccgaatgggtgatgaaggtggagaatcagaacttcttggagaggatcttccacttgaaccttctgtcaccaaagcagaaaggagtcacttgatagtgtggcaagtgatgtatgggcaatgagtgagcccatgggaaacaggttggaagatgggggaagccgtctcttctgcatggtttatttttccctctatcctttttattttaatggtctttttgtggagataagtttccaccacataatgtgtgaagcatttttttcctgttaactttatattaccaaaatcccgttcttacccataaccaatacagaggaactagctgtgttactgcaccagtgttataggtaacttcagtatattatgaacaaatccaaagaatgtttacttccccgcaaactgggtgaattatagaaagccaatcccagatgtggtttactctgccacgagtctaatgtcattcacttcattttgatggggtcacttggttagctgtccacctaataatgggaattaatgggaaacactttgataaatgaaactgtacccgttaaatacaatagcctgagttttcccccagtgtattgtaaaattgacacacactaatacaagatggattatcgaggatgtatctaaatgtcccgagagggttaaaagctaactgtaaattactttaactttcactttcaaatctgacaaatcttgtttatatggtatataaaactttgttttcatcagatttgggggggttttatattaaagaaattaagactacactatttaaataaacgtttcctgtttctgactta

SEQ ID NO: 60659 - DNA, 1926 bp, Homo sapiens
tttcgtccgctgcctgccctgctccaggctccacctgtgccgccgatcgcccgggtatcgcgggggcccaggccagctgagtccgttttccgcgccggggtggcgcccctccaaccgtcctaacgccgggccggcagcaaggagtgttcctgggacctcagagaccaggctcagagcctgacatccctgcgaggggacagcctcatccgcccaggccagtgggggtctctacaagtgcccaggctcaggtgcagcccccagcaatgcatcgccggagactggccctgggtctggggttctgcctgttggcgggcacaagcctcagtgtcctgtgggtgtatcttgagaactggctgccagtctcctatgtcccctattatctcccctgcccagagatcttcaacatgaagctgcactacaagagggagaagccactccagcccgtggtatggtcacagtaccctcagcccaagctgctggagcacaggcccacacagctgctgacactcacaccctggttggcgcccatcgtctccgagggaaccttcaacccagagcttctgcagcacatctaccagccactgaacctgaccattggggtcacggtgtttgccgtggggaatccttcctggagtcagccgaggagttcttcatgcgtgggtaccgggtgcactactacatcttcactgacaaccctgcagccgttcccggggtcccgctgggtccccaccggcttctcagctccatccccatccagggtcactcccactgggaggagacatccatgcgccggatggagaccatcagccagcacattgctaagagggctcaccgggaggtggactacctcttctgccttgatgtggacatggtgtttcggaacccgtggggccctgagaccttgggagacctggtggctgccattcacccaagctactacgccgttccccgccagcagttcccctatgagcgcaggcgtgtttccactgcctttgtggcagacagcgaaggggacttctattatggtggggcagtcttcggggggcaggtggccagggtatatgagtttactaggggctgccacatggccatcctggcggacaaggccaatggcatcatggctgcctggcgggaggaaagccacctgaaccgtcacttcatctcaaacaagccgtccaaggtgctgtcccccgagtacctctgggacgacaggaagccccagccacccagcctgaagctgatccgcttttctacactggacaaggatatcagctgcctgaggagctgaccacggagctgggggttgccatggatggggacccaaagacctgcagccaccagtgcttcactagcgtgcagaccagccctgtcccgcctccctgtcagtcaggcgaattcaaccggaaaagggacgtggaaaggccactgtgaactgcagagggctgtgcacacagtagcacacaggatctcacagtaacgcggcatgggaacagtgagacagggggaggggaggcgcagttacaaaggcagggcccggcaggcttgccacgttctgcagccgtgcctttgcggggcaggctctgaagcctcagcccgactcagagtgcctgaaccctgccgcgccagtcccccgtttattgcatattgcccttaacgtagcatttctaataccctggtgtgaaggcgccctagaccccttttctctggtcacaggggtcctgggtcctttgatgtctcccaaccacatgtagccaattcctcactcaggcccccagagtgagcctttgaaatggaacaggtctaggctccctcggtttcctgcaccccaaagtgagccgcactctcaggggactagccacctccttcttaagagggtttggggcagtttataataaagggggcgtgtgctcaaccctaaaaaaaaaa

SEQ ID NO: 60660 - DNA, 4224 bp, Homo sapiens
gatgattacgccaaggttggcacgagggtctcctggaatgcctggagtttgaccctgaagagttctaccaccttttagaagcagctgagggccacgccaaagagggacaagggattaaatgtgacattccccgctacatcgttagccagctgggcctcacccgggatcccctagaagaaatggcccagttgagcagctgtgacagtcctgacactccagagacagatgattctattgagggccatggggcatctctgccatctaaaaagacaccctctgaagaggacttcgagaccattaagctcatcagcaatggcgcctatggggctgtatttctggtgcggcacaagtccacccggcagcgctttgccatgaagaagatcaacaagcagaacctgatcctacggaaccagatccagcaggccttcgtggagcgtgacatactgactttcgctgagaacccctttgtggtcagcatgttctgctcctttgataccaagcgccacttgtgcatggtgatgggagtaccgttgaagggggagactgtgccactctgctgaagaatattggggccctgcctgtggacatggtgcgtctatactttgcggaaactgtgctggccctggagtacttacacaactatggcatcgtgcaccgtgacctcaagcctgacaacctcctaattacatccatggggcacatcaagctcacggactttggactgtccaaaatgggcctcatgagtctgacaacgaacttgtatgagggtcatattgaaaaggatgcccgggaattcctggacaagcaggtatgcgggaccccagaatacattgcgcctgaggtgatcctgcgccagggctatgggaagccagtggactggtgggccatgggcattatcctgtatgagttcctggtgggctgcgtccctttttttggagatactccggaggagctctttgggcaggtgatcagtgatgagattgtgtggcctgagggtgatgaggcactgcccccagacgcccaggacctcacctccaaactgctccaccagaaccctctggagagacttggcacaggcagtgcctatgaggtgaagcagcacccattctttactggtctggactggacaggacttctccgccagaaggctgaatttattcctcagttggagtcagaggatgatactagctattttgacacccgctcagagcgataccaccacatggactcggaggatgaggaagaagtgagtgaggatggctgccttgagatccgccagttctcttcctgctctccaaggttcaacaaggtgtacagcagcatggagcggctctcactgctcgaggagcgccggacaccacccccgaccaagcgcagcctgagtgaggagaaggaggaccattcagatggcctggcagggctcaaaggccgagaccggagctgggtgattggctcccctgagatattacggaagcggctgtcggtgtctgagtcgtcccacacagagagtgactcaagccctccaatgacagtgcgacgccgctgctcaggcctcctggatgcgcctcggttcccggagggccctgaggaggccagcagcaccctcaggaggcaaccacaggagggtatatgggtcctgacacccccatctggagagggggtatctgggcctgtcactgaacactcaggggagcagcggccaaagctggatgaggaagctgttggccggagcagtggttccagtccagctatggagacccgaggccgtgggacctcacagctggctgagggagccacagccaaggccatcagtgacctggctgtgcgtagggcccgccaccggctgctctctggggactcaacagagaagcgcactgctcgccctgtcaacaaagtgatcaagtccgcctcagccacagccctctcactcctcattccttcggaacaccacacctgctccccgttggccagccccatgtccccacattctcagtcgtccaacccatcatcccgggactcttctccaagcagggacttcttgccagcccttggcagcatgaggcctcccatcatcatccaccgagctggcaagaagtatggcttcaccctgcgggccattcgcgtctacatgggtgactccgatgtctacaccgtgcaccatatggtgtggcacgtggaggatggaggtccggccagtgaggcagggcttcgtcaaggtgacctcatcacccatgtcaatggggaacctgtgcatggcctggtgcacacggaggtggtggagctgatcctgaagagtggaaacaaggtggccatttcaacaactcccctggagaacacatccattaaagtggggccagctcggaagggcagctacaaggccaagatggcccgaaggagcaagaggagccgcggcaaggatgggcaagaaagcagaaaaaggagctccctgttccgcaagatcaccaagcaagcatccctgctccacaccagccgcagcctttcttcccttaaccgctccttgtcatcaggggagagtgggccaggctctcccacacacagccacagcctttccccccgatctcccactcaaggctaccgggtgacccccgatgctgtgcattcagtgggagggaattcatcacagagcagctcccccagctccagcgtgcccagttccccagccggctctgggcacacacggcccagctccctccacggtctggcacccaagctccaacgccagtaccgctctccacggcgcaagtcagcaggcagcatcccactgtcaccactggcccacaccccttctcccccacccccaacagcttcacctcagcggtccccatcgcccctgtctggccatgtagcccaggcctttcccacaaagcttcacttgtcacctcccctgggcaggcaactctcacggcccaagagtgcggagccaccccgttcaccactactcaagagggtgcagtcggctgagaaactggcagcagcacttgccgcctctgagaagaagctagccacttctcgcaagcacagccttgacctgccccactctgaactaaagaaggaactgccgcccagggaagtgagccctctggaggtagttggagccaggagtgtgctgtctggcaagggggccctgccagggaagggggtgctgcagcctgctccctcacgggccctaggcaccctccggcaggaccgagccgaacgacgggagtcgctgcagaagcaagaagccattcgtgaggtggactcctcagaggacgacaccgaggaagggcctgagaacagccagggtgcacaggagctgagcttggcacctcacccagaagtgagccagagtgtggcccctaaaggagcaggagagagtggggaagaggatcctttcccgtccagagaccctaggagcctgggcccaatggtcccaagcctattgacagggatcacactggggcctcccagaatggaaagtcccagtggtccccacaggaggctcgggagcccacaagccattgaggaggctgccagctcctcctcagcaggccccaacctaggtcagtctggagccacagaccccatccctcctgaaggttgctggaaggcccagcacctccacacccaggcactaacagcactttctcccagcacttcgggactcacccccaccagcagttgctctcctcccagctccacctctgggaagctgagcatgtggtcctggaaatcccttattgagggcccagacagggcatccccaagcagaaaggcaaccatggcaggtgggctagccaacctccaggatttggaaaacacaactccagcccagcctaagaacctgtctcccagggagcaggggaagacacagccacctagtgcccccagactggcccatccatcttatgaggatcccagccagggctggctatgggagtctgagtgtgcacaagccagtgaaagaggatccagccctgagcatcacccaagtgcctgatgcctcaggtgacagaaggcaggacgttccatgccgaggctgccccctcacccagaagtctgagcccagcctcaggaggggccaagaaccagggggccatcaaaagcatcgggatttggcattggttccagatgagcttttaaagcaaacatagcagttgtttgccatttcttgcactcagacctgtgtaatatatgctcctggaaaccataaaaaaaaaaaaa

SEQ ID NO: 60661 - DNA, 4491 bp, Homo sapiens
ttttttttttttgaagtttttgctataaaacatttaatgttaacctacaatacaatgtaaacttttatgaaaaaaatttaaagtacactagatttcttcagtaaattatcacatgactattcaggcgcagtacaagttggggcactgcatcctttgtggatggatttccgttgctgtgttcctcacaagtcctaaaaaaaccagttgtagagcggagctccttgttcaagcaccggataatgatgcccctgattttgcattctgggggttatcgctccttctcagtcattttctgaaactctttgcttggccttggcaccattagcaattttcacaactgctcaattgaaggttctaggttctttttagcttagtttttaagagacaagtgttatcctctggccatctcttattcaaatatcatggtggaggcaagcaaggagaaagaagtatttgctagaggaaattctgcagaagtggaagaaaagaccagaagggctccactgagggtacaaatattcaactgactccaatcgagtgtctttgcttggtcacttcccatggttattcagctcaatctacaacttcagtcgtgggagtgcagaacaaaacttgaaacaagtgcttttagttgatgatttgccatttggaaacaacagctgaaatatcccagaggtgatgtggaaacaagagcaaatgcttgcagatcactggcttctcagtgtcttctccctcgcaggtctcatcaaaatcccaaaagtccttaggagtaacacagattgtactggcattaagtgacaaaatgtgcagcctgtatttgactgaggaggaaaggaaatggcacctaggcagcagcgctagggtcagcaaggagaccggcctagggtctcagtaaagcagaactgtttcaaatgggactagaccggggcatgtgcttccggtgaatcctcttgaaacctaaagtaaatgggaaggccgccctaacagttgtactgacataaagggagacccttcttaatattctggcagctgacttccttcactgaacaactattatcaaaaggcgagaggcataaagtgcacactgtagaataagaagagactgaattatgatggaaaaaaaaaatcgtaacttccccaaagaggtgtggacagtgtacctagcctcacaaaggtccttaataccctcctgtgtgctgccagggaacagctgtgaattccagatggggaggaaggctctgacttaagtggaaaaattcctctgcatggttgtcagcaggaaggtttcacgtaaggttatccttatgtggagaacatgggttatcctgctgttcacgccagatacattttattgacaacagtcagatggtgattccactcatctggccttgggacagcagaaaacgaagtggaagaacaatagctggccagggacagaattaaattttcctagagatggtgttctagacagctatgccaaggccactgggaatttctcaggctctccaagttaatttctgtggggtgccttactctgccatgtgggatttaccccaacaactgaggactgcagtggatagtaaccatataattgctaccaaaaacagtggtccttaggttttagttaagcaagagagaaagccttgagactacaactccagcaagttaggctttatgttgatctgaaccccccgccctcacagcattctaggaactacagtaacgtcagtcggttgcagtggtacaacgagcctgcaccagtctagctacggaacactttggaatacttgtcagagcgcactggcatctgttaatacatggcctgacccatgtacccattaccataaactcaaccacagacgagacatccagaggttaaaaaaaaccctattacttcaacatagcaatagagagaaaggataaaagctgcctccagaaggtggctgcatcagaaatgaaaatgtgccttccaatagattacacaggctgggagttctgtcttggctcccttcaaggcctctggttctatccttaaaacaataatacacttccactgagacaggcagggcactctcctgtggttctgctggctccaccacaggccctgctagtcctttggaaaggccccaggcttggcaattcaggaaagcccagggctggggggagcagcatgcacatgtcagaagaggaatgaagagctgctatcctttggttcagaccccataaccaccacctggtacagactccaaggaaaagctgcagttgtgtgtaaaggtgagttccaccacatacataggtgtatctttacatatacagcctttgtggggccacaaacccagatttcctcccactgctccaagtggggtgcacaggtggtaagaaaggacagcaagagttggaccaaaaagaatgacctctctgggaacgtgagagggacaatggcagaaataagcacaaaccagcccggggcacttttattacactattgtgggctaaggagcccagggcataaactcatgggtttaaagaattggctctttatcaaataaaggaaaaaaatatatatatatacctatgtcagcctcattcctttggtcattacaaaacagaaataaaagttattgaaaacttgtgggcagttcaaggaacatctctgcttctctgctctgtgctttctcttccctctcttccccagaggcaggagaagcaagtcctcaggagatgctgcaagtagctggttgatggaggtttttcacttttatttttcataaaagcaagaatgaatgagaactagtgggaatgtccccttcccagctgggacaatggatgggtcgaaggtgaagagtctctgttcactggaaggtgcgtgcacagaggccacaggaagggtgggcttgccaagcgggtacgtttgttgctaaccttgcgcgcacacacaggttgtgactcttacgggcagcatggtttctgatccttcctaaggatgcagcagtcttttaaaaaaaatattgtattataataataataataatatgaatttctctctcttgttttttttttttgacttgctgttgttttcttttttccccatttcttttagggactggggtaggaggggacaggaagaaaaaaatgtcattcgtcagttaggtcctgaacaaaaagaacttctgtgtggctgagtccggccctcctgtagcgtagggggattgggccacctcctctgaagggatgcagggcagcactccgcctgggaaaatttggcttcaatctgaaacttttctggggctttccttcaaggagaataagaagtcgtggattactgttagagactgtgaaaagtggaatcgtctctctactcgagaatcattaggtaatttgaagatgatcttgacactttcagggtcatcaggggaaggttcagggggcaggcattccaacttcctttccttttcctcctgtaaattctgccgccgtctctcctctgccaacttttgctgttgcacctcctccttcttccgccgcttacgctcccgctcctcccgtttctttctttctttctcctggtcagctctgagagaggccaggtaggcctcatcctgctgttgtctcagcacttgggtctggtttctttcttccctttctaggcgttctgacaccaggtaagtctggttagcatccatgataaatgtcagttggttaatgaggtcatcaggttgaatgaggccttctagccgtcccaccacagtcatccttcgatccttcagcataatcatggccaggaatggataggtgttctctcgtaaagcctgtgagaccctgtatccctcaggtttgtttgtagagcatgcccagaagagcatcctagtgtttattagtgaaataacttcaggtgcacagagtgtgttgcgacaaaactcatcagagtcctggtgatcatctccatgaagataaaccaaaagaaagcgaagctcccttttggcatcgttaagtgcctggctgtacgttccctggtagaagacagggtgtgccctcccatatttctcttcaaaagagtgcataaatgaaacaatgtccccaacggggtcagtgacccggctgcgagggtcaggccgtataaaacgaagagcaaacctaaatatatcaagtatcgtgtaataggtaaaccggaatggaagcattatcaagtaataaccccatccaagcagcccccttggttgaggtcttgagacaacatagctgtagatcctgtggtcagctgtattaacctgcaggggtcgtgatggaggtgggttgaaaacactaggtacgccctcttgctcattcaatctgtcctgtacagcagcctctatgttccagttatgctgttccaaggtatggcgacactgatccatagattcgatgccagtgagatcctgaaactgcagcagcttctctgtctgctcctgggttagatcccgctcctcaggcgccgccattttgcctcgtgcc

SEQ ID NO: 60662 - DNA, 1471 bp, Homo sapiens
ggcacgagcttttttcctgagcctcagagctaaaatgcccccgagctctttcctattggctggaaagacgaattgaagttcccttgcccatgttaggaggtgtacgcctcctgaactaaagatagaaacagctggcccttccaggcagctaaaagcctccagactaagaggtgttccccattcggcagccagactccttgaaataccctttcagtaatcattcaaccaacgcttccatgtctctactctgtcgtaacaaaggctgtgggcagcactttgaccctaataccaaccttcctgattcctgttgccatcaccctggggtcccaatcttccatgatgcacttaagggttggtcctgctgccgaaagcgaactgtagatttctctgagttcttaaacatcaagggctgtactatgggaccacactgtgctgagaagcttcctgaggcccctcaacctgaaggccctgctacaagcagttcacttcaggagcaaaaacctctgaatgtgattccaaagtcagcagagaccttgcgccgggagaggcccaagtcagagttgcctctgaagctgctgccgctaaatatatcccaagccctggaaatggcattggaacagaaggaattagaccaggaacctggggcaggacttgacagtctgatccggactggttccagctgccagaacccaggatgtgatgctgtttaccaaggccctgagagtgatgctactccatgtacctaccacccaggagcaccccgattccatgaggggatgaagtcttggagctgttgtggcatccagaccctggattttggggcattcttggcacaaccagggtgcagagtcggtagacatgactgggggaagcagctcccagcatcttgccgccatgattggcaccagacagattccttagtagtggtgactgtatatggccagattccacttcctgcgtttaactgggtgaaggccagtcaaactgagcttcatgtccacattgtctttgatggtaaccgtgtgttccaagccaccagatgaagctctgggggggtcataaaacgtggagccagagctctgtcttcttgatgccatctgcgggttgaaatctccctggtccaaggctgacccaggatcctgggcccaagctggagcaccctgatgcactagctaagaaggctagggcaggggttgtgttagagatggatgaggaagaatctgacgattcagatgatgatctgagctggacagaggaggaggaagaggaggaagcaatgggggaataagtgacaccaagacagttgatgtctagataggacctcaatgattcccttagaatcttagataccaggatattgttggccatgtggcatcattgagcagcaggaggctgaaggaggggagaacaaaattgtccaaaccatgctgtttttttcccttaaataaatcttgtattcttcagtttcaaa

SEQ ID NO: 60663 - DNA, 2278 bp, Homo sapiens
  misc_feature (1)...(2278): n = a,t,c or g
ttttttttttttactgattcatacgttttatttgataatagttcattttattaaataatttataaagtcagaccagtgcattgggcttgttaggggaaaccattccttcctactgtcacatagcctggcagattatatcaggtgccaaaacattcccttttattcaatttattaatgagagtgtggaattaaagtagatccttgcatgtcaggaaagctgcaacacatctggtttaagtggagcacaaaggtaagttattccacattcaccaacttccccacttgacctcccaccagttcctgtctgctttttccatcaatcaactctaagatgccctaaacccaaacagttcccattcaactgtgcacaaaggtatagatatggaagacatctcactccaactctcacctttggaattaaataaacctggaacagggaaggtgaactatggctgaaaccaagtgaagatttttaagaagctttgacagaaacattaagaataacacctgaatgcaaatccccagaaaaaagcgcttactgggtggaaaatagtccttaagcccaatgttcctaaaaaatgcctccataaggaagggttggggaaattacccctttagaacacaagctcctaagaactctggaatacaacgggaaacttggatggaataacaatcctgggccctgcctgggcccaaaatgttcccgagggcggccccggcaaaccagccctgtccttgccacattgccaactgactggcttaatcctacggcagaggttctttcagctccggcccagggttacctcccaatggtgtgtatagtatatgctctatagctcttcaattcaaaggaagtgcttggcacgtttactcttctgagttggaggggaggtatgtcacctgggatggttgttggggagaccctcaggggactgagttagggtctttggctgcctgaactggtgaatgtcgctgaaaagctccccaattcgtgctttaaccgcagtggccagctcactcagggcctcctgatagcgtaggtacttcattcttggccaaaagacccccttgtccccatagcgggcttgtttccatagccatcccaaaaagggtatcaatgaggtgctttgccgtacacccttgaaagggcgtactagtgtttcgcagatccagcaggtaggagcggaaattcttgcccattaaggaacggggatgccggccttcagaatgaaatgggatctcagaggtacgaatggcatccagagctttcatcctatacagatagttgtagcaactttgatttccctgggtttccagttgtagtagtctagcatcatcatctgcaaggagctggggctcatacttgatatcctgaaccctggagagtcgaatatcaatctcctctttcaagtccttgggggcattgtgtcccacagggacatgaggtccccttcgagatttcattgcaaagcgcatgatttgcctcttcacaaaaataaatagcagtacaaacaccaggctcccgtaggccatcaccagcacgacattcaccccggagagccagttactgccggacgccatggcctccctacctcgcgcagaattgttcgggtttaccccgctgtcctggctggtcagcccaggctccgccgaagcgacggcgcctgggtcccctggagctccccggccatttccttacgggggaagaccaagccagacccggcctgaaaacatggcggacaggcaggagagctgggaaaggcctacgggagcctggtgtttgtactnctatttatttttgtgaagaggcaaatcatgcgctttgcaatgaaatctcgaaggggacctcatgtnccctgtgggacacaatgcccccaaggacttgaaagaggagattgatattcgactctccagggttcaggatatcaagtatgagccccagctccttgcagatgatgatgctagactactacaactggaaacccagggaaatcaaaagatcccatttcattctgaaggccggcatccccgttccttaatgggcaagaatttccgctcctacctgctggatctgcgaaacactagtacgcctttcaagggtgtacgcaaagcactcattgatacccttttggatggctatgaaacagcccgctatgggacaggggtctttggccagaatgagtacctacgctatcaggaggccctgagtgagctggccactgcggttaaagcacgaattgggagctctcagcgacatcaccagtcagcagccaaagaa

SEQ ID NO: 60664 - DNA, 1418 bp, Homo sapiens
ttttgacatatttgttagttttaattttattctgcagacattatgcagttctataatataaaatgaatacaatactaaaatctatttcctttatttacatggtgtaacatttccaataacaaacatttcctaatcatgaaagatggtgttaaagcagaaatattgtcatgattgagtcaatgggagaacataaaatatgctgtatttcataatttttccgtaagaaaatgtctagtttgtttaaatgcaacaaatactgtattagattcactttataagccatacactccttcttgtctttcttttgaacacattctggaaggcagctgtgaagaacggagtagcgagtccacgccattcaacatccatcagaaaccctattttaatcatcttgggatcgattatcttcaatgataatagttcttctaggataagattcaatttctacaaatatatatcgaaaatcatattcaccacttcctgggttctctttcacttgcgcatacaccgttccttgcttccctggctcagagccctcaatgtagaatttcacacacgtgtgtttcagcccatcttttacatattcagtgaacctgacatgctgccggcgaccccgccttgtcacctccccatagcctttaacagactcaccaaagacaccgatcacctcaggatgtgatctgcatttttctaaggctctcccatatatcttgctaggactggatgaagaaaaaagttctttgaaaatcgtgtaaaacaagccacctgtaatgctgattccaaaaagcacccctattaaataggtaaaatctcttccggcttctttcactttttgtgatgttgggacggcggttccccctctctgactcctgtgcacagacacttgtttgctgctatcctcctttgcttttcgggggctcggtccctgcgtccagatggttttctgggtgactccaagaatacatctaggtcgcagcgttttcttttgatattgaagcccacatctcaaactgggctcagtcttcaagcacgctttgttaagcacgatgtatggcaaaagcaatcgctttgccgaggacctgtgcagcttctccgtatactgtacggctcgtagaaaagtacaaatcatgttcacggaaaatcgttccgcttagggacgatgctaactacaattaggaaagctttagggttcactacacatgcggccggacacgtactcaagcctatacgtttacattacatggggtgttaggcaaaaacgtcagtttccgcagcgtaaatgaaaacgaaaagtctccagggagaacctgatgtctaccttcccttctgtcttctttccattttaattaacaggctctgatcaccttctgggctgacattcacagtgtccccgccatgccttcgcaaagtcacctggg

SEQ ID NO: 60665 - DNA, 1418 bp, Homo sapiens
ttttttttttatttttttttttggacaatgcttttaatggcaagtcatcacagcaggtctgcggaggtgcagggcagcgctcaggccttgctcagtttcattcttgatgaagtagctcaccagccgctgcggcctctagatggtactcgctgagcacattgcgaggggctgctgatctggtcccccttccaggcggttcaggagggtgacacacaccacggccgcttggaggccgcaggcgctggcacatggcgggcaaacaccgatggactccatctcgatattgcgggacgccggctgcataggctgcctccagatacgcctgcttgtccttctccgtgtaggagcagagagccccatccagacggccttgcccttcatagaagtccaaggtgcacatggtgttccccaccactgtggtgaactcgctcagctctgcagaacacagcaacagctcctgcaccagcttcttgttaaggtccgttttccggatgacccgcttccccaggacaatctgctcaaactctgccttgaagcaggtatccactgcctgctctgttatgaccacagtgccgggctccagacctatcccaccagaagtgccaatgcggatgatagtgacgttggagcaccgggcatagtacagcagctttatgagctcatgcaacatgattgagatagaaggaatgcccataccatgactgacagacagcaccggtcctactttatacatggcatagcggtcagttcccgcacagatgttgggatagtctctacctgggcagtcaaggcccagctctgcaccaacgcacctgatgaaggctttcatccgggaggggcttccaccaacacacacaaacttcacatctccaaacaaggctgggaaattgtgtctgctagtggtgagattgaaatgatagagaatatcttctttcatttttgctatgtttggatttaaaagtctgacggggcaatcattgtgactttcagctttctctgcattggctcccgtggccgccattccgccaactgaggcaggacccgtcagaggagagcggctggaggcggacagacgtctgcagtgggaggcgctccaggcgttccaggcagtgtcctgccggcgagtcacccgcgaccgcgagtcacctcaccaagccctgaattgggacaggagacgagacgtgtcgacgagctgcggagttcctcgcttctctgggcccactcggcctgcgcagagagccgctacacccgcggcgccatcctcgcactgcgacaccggcgacaaacgcaatgctccagggccggacgaagggacggctctcgggaggctcgcggacggcggggcgcgggtctgtgcgccggagcactcgaatgagggaaccacttgcgaggtgaatctcatatggagtctgcgagcg

SEQ ID NO: 60666 - DNA, 1132 bp, Homo sapiens
cgatttcgtatggcgtaccagagcttgcggctggagtacctgcagatcccaccggtcagccgcgcctacaccactgcctgcgtcctcaccaccgccgccgtgcagttggaattgatcacaccttttcagttgtacttcaatcctgaattaatctttaaacactttcaaatatggagattaatcaccaacttcttattttttgggccagttggattcaattttttatttaacatgatttttctatatcgttactgtcgaatgctagaagaaggctctttccgaggtcggacagcagactttgtatttatgttcctttttggtggattcttaatgaccctttttggtctgtttgtgagcttagttttcttgggccaggcctttacaataatgctcgtctatgtgtggagccgaaggaacccctatgtccgcatgaacttcttcggccttctcaacttccaggccccctttctgccctgggtgctcatgggattttccttgttgttggggaactcaatcattgtggaccttttgggtattgcagttggacacatatattttttcttggaagatgtatttcccaatcaacctggtggaataagaattctgaaaacaccatctattttgaaagctatttttgatacaccagatgaggatccaaattacaatccactacctgaggaacggccaggaggcttcgcctggggtgagggccagcggcttggaggttaaagcagcagtgccaataatgagacccagctgggaaggactcggtgatacccactgggatcttttatcctttgttgcaaaagtgtggacacttttgacagcttggcagattttaactccagaagcactttatgaaatggtacactgactaatccagaagacatttccaacagtttgccagtggttcctcactacactggtactgaaagtgtaatttcttagagccaaaaaactggagaaacaaatatcctgccacctctaacaagtacatgagtacttgatttttatggtataaggcagagccttttcttcctcttcttgatagatgaggccatggtgtaaatggaagtttcagagaggacaaaataaaacggaattccatttttctctcactgtaaaaaaaaaa

SEQ ID NO: 60667 - DNA, 7008 bp, Homo sapiens
tttcgtgggctggcaggcgcctgcgccgttgtgctcctttcaggacgcgcattctcgctccctccctcggctgcgcgcgcccggtgggcgtgggaggaggcggggaaccggggaggggtgggtgtcgcaggagggaaggagcgaaccggagagcgtcgtcctgagaggagtgaaggcggcaaaatggcggaccgcttctcccgcttcaacgaagaccgagactttcagggtaatcactttgatcagtatgaggaaggacacttggaaattgaacaagcgtcacttgacaagcctatagaatcgcccagtttttaaagccaggataatattggacaccgcttactccagaaacatgggtggaagctgggccagggattgggaaaatctcttcaggggagaacagatcccattccaatcgttgtcaagtatgatgtcatgggcatgggtcgcatggaaatggagcttgattatgctgaagatgctaccgaacggcgccgtgtcctagaagtagaaaaagaagacacagaagagctgagacaaaagtacaaggattatgttgacaaagagaaggcaattgccaaagccttggaagacctcagagccaacttttattgtgaactgtgtgataagcaatatcagaaacatcaggaatttgataaccatatcaactcctatgatcatgcacacaagcagagattaaaagatctgaagcagagagagtttgctcgaaatgtctcttcaagatcccgcaaggatgagaaaaaacaggaaaaagcccttcggcggctccatgagttggcagagcaaagaaaacaagctgaatgtgcacctggaagtggtcccatgttcaaaccaaccacagtggctgtagatgaagaaggtggagaagatgataaagatgaatcagctacaaatagtggcacaggtgccactgcttcttgtggcctgggatctgaattctccacagataaaggaggccctttcactgcagtacaaatcactaataccactggactggcccaggctcctgggttagcctcccaaggcatcagctttggcattaagaataatctggggaccccattgcaaaaattgggagtgtcattttcttttgccaaaaaggctcctgtcaaactcgaatcaatagcatcagttttcaaggaccatgcggaggaagggacctctgaagatggaacaaaacccgatgagaagagttctgaccaaggactgcagaaggtaggagactctgatgggagcagtaatcttgatggtaaaaaagaggatgaagaccctcaggatggagggtcccttgcctcaacattatccaaattaaaaaggatgaaacgagaagaaggagctggggctacagagcctgagtattaccactacatccccccagcacactgcaaagtaaaacctaattttccctttctactttttatgagagccagtgaacaaatggatggtgataatactacacacccaaagaatgccccagagagtaaaaaaggcagttctcccaagcctaaaagctgcatcaaggcggcagcaagccaaggagcagaaaagacagttagtgaagtctctgagcagccgaaggaaaccagcatgaccgagccctcagaaccaggaagcaaagctgaggcaaagaaggccttaggaggggatgtaagtgatcagagtttagaaagtcatagtcagaaggtttcagagacccaaatgtgtgagtccaactcttctaaagaaacctctctggccaccccagcagggaaagaaagccaagaaggacccaaacatcctactggtcccttcttcccagttttgagcaaagatgaaagcactgccctccagtggccatcagaactattaattttcaccaaggcagaaccctccatttcatacagttgtaaccctttatattttgactttaaactttcaaggaacaaagatgccagaactaaaggaacagaaaaaccaaaggatataggaagctcctcaaaggaccatctccaaggcctagatcctggtgagccaaataaaagcaaggaagtgggcggagagaaaatagtacgttcctcaggaggcagaatggacgcacctgcttcagggtctgcctgtagcggcctgaacaagcaggagcctgggggtagccatgggtctgagacagaagacacagggagaagccttcccagcaagaaagaacgatctgggaagtcccaccggcacaaaaagaaaaagaagcacaaaaaatccagcaaacacaaacgtaaacacaaggctgacacagaagagaaaagctctaaggcagagtcaggggagaaatctaagaagcgcaagaaacgaaaacgaaagaagaataagtcatcagccccagcagattctgaacgaggacccaaaccagaaccccctgggagtggcagtcccgcaccaccaagaagaaggcggagagctcaagatgactcccagcggagatccctcccagctgaagaggggagcagtggcaaaaaggatgaaggtgggggtggtagcagctcccaagaccatggtgggaggaaacacaaaggtgaacttccaccttcatcctgccagcgaagagcaggcaccaaacggagcagccggtctagccatcggagccaacccagtagtggagatgaggatagtgatgatgcttcctcacaccggctgcaccagaagtctccatcccagtacagtgaggaagaagaagaggaagattcaggcagtgagcattcccgcagccgctcaaggtctggccggcgccattcctcgcatcgttcctcccggcgttcttactcaagtagctcagatgcctcttcagaccagagctgctatagtagacagcgcagttactctgatgacagctacagtgactacagtgacagatcacgaaggcactccaagcgctcccatgactcagatgactcagactatgccagctccaaacaccgatcaaaacggcacaaatattcatcttctgatgatgactatagcctcagttgcagccagtcccgaagccgatctcggagtcataccagagagcgctcaagatcccggggccgcagccgcagcagcagttgtagtcgtagtcgaagcaagcggagaagccgtagcaccacagcccacagctggcaacggagccggagctatagccgggaccgcagccgcagcaccaggagcccttcccagagatcaggctccaggaagagatcatggggtcacgagagccctgaggagaggcattctgggcgtcgggacttcattcgttctaagatctaccgctcccagtccccccactatttccgatcaggccggggagaaggtcctgggaagaaagatgatggcagaggagatgacagtaaagcaacaggtccaccttcccagaacagcaacattggcacaggaagagggtcagaaggtgactgcagtcctgaagacaagaactctgtcactgccaaactgctactggagaagatccagtcaaggaaagtggagaggaaacctagtgtgagtgaggaggtgcaggccacccctaataaagctgggcccaagctcaaggaccccccacaaggttactttgggcccaagctccccccatctcttggcaataagcctgtccttccactgatagggaagctcccagctacgcgaaagcccaataagaagtgtgaagagtctggcttggaaaggggggaagagcaagaacagtcagagacagaagaggggcccccagggagtagtgatgccctatttgggcatcagttccctttcagaggaaacaactggccccttattagacccacccccagaagagtcaaagtctggagaagttactgctgatcaccctgtggctccgctaggccccccagcacattttgactgctaccttggggacccaaccatctcccataactacctccccgaccccagtgatgggaacaccctggagtccctggatagcagcagtcagccaggccctgtggagtccagcttgctgcctatagcaccagaccttgagcatttccccagttatgcacctcccagtggggatcctagtattgagtcaacagatggggctgaggatgctatcactggcccccctggaaagccagcccatcaccttcacccctgaggagatggagaagtacagcaagctccagcaggctgctcagcaacacatccagcagcagcttctggccaagcaagtaaaggcctttccagcctcagctgccctggccccagccacaccagccctgcaacccatccacattcagcagccagctacagcctctgccacctccatcacaactgttcagcatgccatcctacaacatcatgctgccgcagctgctgccgccatcggcattcaccctcacccccatccccaaccacttgcccaggtgcatcatattccccagccccatctgacccccatttctttgtcccacctcactcactcaatcatccctggccaccctgccacctttctcgctagccatcccatccacatcattcccgcctcagccatccatcctgggcccttcacctttcaccctgtcccacatgctgccctctaccccaccctacttgctccacggcctgctgcagcagctgccactgcacttcaccttcacccactacttcaccccatcttctcaggtcaggacctgcaacatccccccagccatggcacgtgagttgggggatgggatcctaggtagggccaggggaggagacccataaatgttcccttgggggtgttgagccattaataccagcaagtagaagctgggatgggcagtgtctgacagccaaagaattgagttttggcttgcaggggtgggtttagatttgaagtttgctttcagtttactatcagggatttctttttcctgtcctcctctcaatttgtccctccctcttctgtgtttctaagctagggaacaccagtaagtgctacccacccctctgcagcaacatctccaaactgtcaagtttagataatcccctcctccctctgcttttttcctctgctcttcccttctgtaaattttaaaacattttcctcccctctggccagtgggttgtcaccagagcacttgctgtgggcccatctggtcttgccttctcagcgccacagggaaggccaagctgttctagtggtggaagtgccaccattttggggtagtatctttgaccatctttggtgacgttacgttatcccaggtgaggtggaaagcgtctcacctggaacctgatataactcaggctgcaattccatccagttcccacatcaacggagccacacatttggcactgttatcttggtatccctcatcccagaagaggcatctccatatcccagaaaagaagatcctatcatgaataaaagctgtatggcccagagaggagctcatgtgtctaaagtgaagggtatattttcttctgttgtgttgatgtttccttcttaatttataggatttttttaatgtaaaaaattgcactgaactctataaacgtaaatgctgctttttgtagctcatataaaaaaggttccatatttgtagtatactgcaataatattttttacatccagctctttaagtgatcctcgttctggtggctttgtgtaaatatgtttgccctagttgaattaagaaactctaaaggttataaaatgaaaacaaaaaataaaatatttgttttctgctagatgcaaaactgactaagcatgtatattttaccaaacttatgtattttttgaagttatgaactataaaatgttaaaacattttttgctgggacaaaatgttaagtaatttgcagtatgtagtgcccccagtattgggatttttgagctaatgggcagcagtcagctgggggcttctgagggatgctcatctttaacagtctccctcatgtacttttgctgttttacacagagaaacaggtagaccccacagaggagaaggaggggattcaacagctttattgtctggaagcagtgagatttggtgattgtctggggggattcctgggtttccctgggtaccttgttccaggcagtcagtccatttgccttcctagtacttagccccctctgacaattttttttttaatgtgccttttgggttggtagaaacggaagtagaagtaggctggaggatgagttgggacagtcttccttttgttgggaggtgagcacatttacagatattttgcttcatagtttccatgccctctgcccagctcagtttagacagtaaacgttccttgtttcttttctcccatgacactgacaagaggaattaccacctcagcctcttttgcccctcttcttgcctttcacccaggctctcagccctaattaacacactgacccaaaggtgcttgtgttgcaggtcccatctcctttgatgaggttaacaattcccactttggcattttcctaactattcgtgtggctagaattggttggttggtcacttgacaagaaaaaccatacttacctgggccaaggctctgttcctgccttcgcaaattctcaaaagagtaaagtttatgaaaagaaagtggcaggcaaacacaactcttgactgccctcccaccctcctacctgttcagtactcatctgattcagaagcatcacttcttggataactagcactggaaaaatgaaatcatctgtgtaagtgaagggactcatttttctttgctttcagcccatgtaaataaataatacagtattaacattttcgtgctgcttcccattagcttgtagattgagccatactctggctgcctctttgccttcctaggggcattttctttaacttccagaatagtgattttaaaagtaaaaataaaaataaaccttacttacaagcataacagattgtatttaactttatcacatatgatagagatatatatgctgtaaaatgagggaaaggaactttctaataaacccaatcgatttgtggaaaaaaaaaa

SEQ ID NO: 60668 - DNA, 2448 bp, Homo sapiens
cgacgggaggcaggaggggcaggctcaggagggagttggcaggatggcagagggcaaggcaggcggcgcggccggcctcttcgccaagcaggtgcagaagaagtttagcagggcccaggagaaggtgctgcagaaattggggaaagctgtagaaaccaaagatgaacgatttgaacaaagcgctagcaacttctaccaacaacaggcagaaggccacaagctgtacaaggacctgaagaacttccttagtgcagtcaaagtgatgcatgaaagttcaaaaagagtgtcagaaaccctgcaggagatctacagcagcgagtgggacggtcatgaggagctgaaggccatcgtatggaataatgatctcctttgggaagactacgaggagaaactggctgaccaggctgtaaggaccatggaaatctatgttgcccagttcagtgaaattaaggagagaattgccaagcggggtcggaaactcgtggactatgacagtgcccgacaccacctggaggcagtgcagaatgccaagaagaaagatgaggccaagactgccaaggcagaggaagagttcaacaaagcccagactgtgtttgaagatctgaaccaagaactactagaggagctgcctattctttataatagtcgtattggctgctatgtgaccatcttccaaaacatttccaacttgagggatgtcttctacagggaaatgagcaagctgaaccacaatctctacgaggtgatgagcaaactggagaagcaacattccaataaagtctttgtggtgaagggactgtcaagcagcagcaggcgctctttagtcatttctcccccagttcgaacagctacagtctccagtcctcttacctcacctactagtccctctacactttccttgaagagtgagagtgaatctgtctcagcaactgaagatctggcacctgatgcagcccaaggggaagacaattctgagatcaaggagctcttagaagaggaggaaatagagaaggaaggatctgaagcaagctcctctgaggaagatgagcctctaccagcctgcaatggccccgcccaggcccagccctctcctaccactgaaagggccaagttcccaggaggaagttctccccagctccacaactccatcaccaggcggagccctgagcccttcagggcagccttcatcatctgccacagaagtagtcctccgaacccgcaccgcaagtgaaggatctgaacaaccaaagaagagagcctctatccagaggacctcagcaccccctagtaggcctcctccacccagagccactgcaagccccaggccctcctcagggaacataccttccagccctacagcctctggagggggttcacccaccagccctagggcctccttggggactgggactgcaagtcctaggacctccctagaggtctctcctaatccagaaccaccagagaagccagtaagaactcctgaggccaaagaaaatgaaaacatccacaatcagaaccctgaagaactttgtacttcccccaccttaatgacatctcaggttgcttcagagcctggagaggcaaagaagatggaagacaaggaaaaggataataagcttatctcagctgactcctcggagggccaagaccagcttcaagtctccatggtaccagaaaacaacaacctcacagcacctgaacctcaagaagaggtatccacaagtgaaaatccacaactctgaagagaaactaccaagactcctcctgccccaaacctcgccagagaagctcttcaaccagagggtataggtcagagggatataagagccagcatccatccctgggttctcagtaggaatgctggtgctgtctaaagacctggcattaatggaggcggaggagcagccttacgggagggatggagggaggcaggctggggagaagagaacattagactcagggaatatttaattctggttttagcattattagaataagactttatacattaactaaagtggagctttaatcactataaaaagcaaaagtatctatagacacagacacttgcctatacagagacataaccacacacactcagaggatagtgaacaaatctgtctttgacttacgacccattttgcaagacttaaagccgaaagaacacattttcagattgttaaataaagtctgattctgaaaaaaaaaaaaagggggggccgttttaaaggatccctgggggggcccaagtttacgcgggcatgcgaaggtaatagttttttccttataggggggcgtattataacctacctgggaatttttggaaaggacccttactttgggggggggacatattgggacaacctccctacagaaatttaaggctctagggaaaatataaaattttaaagggtataagggggaaaactagcggcataggctggcggt

SEQ ID NO: 60669 - DNA, 2495 bp, Homo sapiens
ttttttttttttaaacaggctcccccagagaaacgaatgcattttattttaggtaacaaaagtagagtcaagtattttttcaaagttcatatacaggcacagtctcagtgaactggcgtcagggcctcgtacagtctctgtgcagccagctccaccatttctcggagggattcatcgtcttcacttccctcttcacattctacagtccgtgtctccaagttaaggttggcagttttcccgtccactgtgacgctaagaatagagtcatcctttacacttacacagtcttctccaaatatgtcctggagcatgatctccaacctcttgctgtaaacgtgcatttctaattttttagaaaccttctgtactgcaccttttcttattttgggatttgactgaacttccaatatcacagttgttactgtatctgcatacatatcattagaagggtttgccagccattctaataccaccatgcctggttcttgtattacagtaatatttttgaacactttcagagcaggtttttcttgaatttctaattcttccacatcacctgtcaatttctgcagctggtaacagagcaaattaaagggaccagtatatggaatggcttgggtctgcttcaccgtgctcatggccaggtcagtataattggacaggtcgcaaggagaaagtatgtgataattaaagtttcttttaacaagtattcctgagacccgctggccttgttctggttttttgtctgctaaaaatcccataaccttggctagtttttctcctctgaagtttaaggtcactgcttctgtattccgaggattatgaacctctatgtgaacttcatcgttatcttcatattctcgaatcagtgctgctttcaatctggccatttcattctgttctccatggactaaaatcacatgaggcggtttcaaagcacgaataaattcactggtttgctggtaatccgtgtgagctgagaaagaaatgtaatcaacagacattttcagtggtaacttctgtccagacatagtagtgatttcttcaggttcagacatgatgtgcttggcaagtgtcccttctacacagtatcccgctataatgacaccattcctcttatcagtacaccagctttcaaataattctctggataagccactttgcatcatgcctggggaggccattacaacactgggaccaatgtcatcaaaatgatccatgctcttgaggttactaatgtgtttgaaaacaaagggattattgatgttgatctgtttgcggattttgtcattcatggcatttacatatgtctggtacactgccatacacttcttggccaaagatgatgcatagtatattggaatgtcatgtagttctgggtgattctgccagtactcatctagaatcaagagcagctcctgagcccttccaagagcaaagacaggaatgagacccctgcctcctctgtttacaatatcgtggacagtgttacagaatcttgcttctcgctcttcacgtttctcatggatatgggtcccataagtagattcaatgataagaatatcaggcttaatattaggaatttcagctgccattaagtgcctatcttcttgtcttgagaaatcaccagtgtacaaaagcttcacgcctgcgatctcaatcatgaacatggcggctcctaggacgtgacctgcatggtaacaccaaaacttgattcccgcaacttccttaacttcatgaaagttgatagtttcaattttgtccatgctttcttccaaatctgtcctcggtataccagcatgtcgtctgctgatatgttactaactttgacataatcagaaagaagccatctataaatagcttttgtggcatgagtcataaatgttcttcctttgaaacttgtcttctgtagaaaccagggcagagctccacaggtgatccaaatggaaatgactaattaataggagatcaatctcagctgggtcaattaaatcaatataaggaagagcatccattccttctaggccagggtggatcccacagtcgagcattatttttcttcctttgaactcgagaataatacatgatcttcctacttcttgcccagctccacctcccctgaaactgatgaaaaagcaaaatcccgttcactctatagcaggccccttccgatcaacggtcctccaacccctcgagcctgagaagcctggcccgcaagcgcggaccaaaggcaggctgccggggtaggtgggagcgcgggcgacggaggaggccagtctccggttacccctcgcgcccctcacagcccgtggcttcattccctctctcgctggtcccttacaggggtcggatcagcagctggtcgctctcctcagcaggaatcgcagacatcccgaaagtgtgagggcgaagcgggggtgaggaacaggtcgccggggtcttcctaaattggaagcacagccaccggtaaataaaaaaggaagaaccccacgaaa

SEQ ID NO: 60670 - DNA, 3499 bp, Homo sapiens
ttttttttttttacagtctttgttgtaagtgtgttattggtagaaacagatgcttgcaatgcatactttgtgtttatataaactgctacatttcttcttaaaggttttcgttttgttttcactggagatttttagcctccaagtgaacttaacatattgcctatgcatctggattctttatagacttttagattttaaaactaaatttgagaaaccatgcatactgtataccttatttaataatccaaagaattgtttgcactttcaaaaaagttacataaaggctgtgcacaagttaaataaccctatatggatgtaaattttcccatttctgaatactttttcagtattatatattgcttgctgtctaataagttagattgtcagagacgcttcagtaaattatctctactttaaaattatatctgaatcccctttctctgagatgaacttgccaatattaaacattgtgccatatggcagtattagcccaaaagcttaaataagaaccaaacttgtagactgaatattttaaccttaaaattatatacctatatatacacctatggtatgctgcatattaaatttaacatttcaagtaacatatatatagcaaacattcagccaaatactctttcatgaaaagatactgtccttaaaataaaaagttaatgaaaagcttatttagacacaaatgtctagatataagtactaagcctatgaaacttgaagctaaagtctgctgtactattaagaaaaagaagattgattcttaacctactgaattgtgcagatacaaaagtgcttagcatgacaaaattaccaaaataaaaacattttagaggttatttggttctagcaatattaactattctgtatttctggataatttaacatttgtattttaaattttatataaatttctttttaacaagtttaaaaaagcacacgaaaaatagttcaaactatatataatctgttatttttcatcctggttagctaatcacaaataactcagcaaaacaatgcttgaacattcagttctactaaaaaacagtatttgagtagatcccatcaccttacccattgtttgctatgttagaccctaaaacaggctgccgacagatcggacaagtgcaattctctgagagccatcggtcaatacaatgaatgtgaaattcatgcatgcaaggtaattgcctgagcttgtttccagttacatagtcactaatacaaacactacagattttacctagttcactatcaatactgttatgctcatagtgcctggtggaaagattgtcaatctgctctttggttaaaccacgtattcgatcatcatcatcactttcatttagtaaaaaaaagtgagcaaggcgaagaatgggtagtgttccagtttcaactaaattgtttggatttcgcaactgcctgccacccctactgtcactgtttcgagtatgaggctgggtggtctcgttttcaccatgcatttcagtgctgtctccttgggcctgcctgtcttgagaggaaccttccctgtgctggctcctgttgttatctgtacctaagttactcagttctgagtgcatgtctggtaaatgctggccatttctttgaagttctgactcagaatcggcctccattagagaactcagttctccaaacccagtcatgatctgccttaaaattgaccgaagagccactgatgatggctcaacaagctcattctcagaaatcctacgaagaggaactgttatggtactaacataggttcgaatacctgaccgctctaaacgagaaatggttcggcgaaagcccccactattgctttcaatagtgactgtattttctgctagccctactctggatcgagttctatttgcaatactatcccgatctctattttctccaggacggatccttcctcacttgaaggtccagtgtgattgttggatgtcgtcgtacagcagttgaggatctgctggattcttctccttcttctactgttattcttgacacaagccttgaattagagaatggggtatatgcagtacctctgcgttctcgttctctatcttgctctaaaaagactcgagttctacctctcctcctaacagatcttctagtggtttgctgtactggtctactttccctttgggaattatgataaacagtgccactctgtctctgaattggtgaacggcttcgactattggaagtagatcgtaatcttattggctctaatctttggtttgtattcctcactgtaacattacttctagccccattttcccaaacatgtgctgctccaaaccgttgcccctccctttgcctgagttcactaccacctgattggtttgtgtgactactgaaattagtgcgtgaagcgttagctcgaggaatgccagctgctcccccaattccatttcttaaccttcccaatgttgagaaagatccttcagctggattttgcccccttgaagcaagcctagtccttggaatgttggaactactaccattgaaattcactgaggtttggcttcttgttcgcctagccacaggactaagttgacctttgttgcctatttgcagtatgatctctgttactatctgaaagtggaatgtctgtataatcttctccatgaatttcaaatcctctattttcatgatttacgtggatttccaaactaaaccgaaactctccattgttcgggtttgttcgactcacagctctccaagtttggttcccattttgtccacttcgagttgcatttcctgtgcgccgaaaggtgttcaaccattctagaagagaatcttcatgtgaactttctctagggacttctgagtctctgtaattcgttccatctctcaagtcaggctgagatgctagttgttccttgacgccatctaaccgctgttgcagttcttctgatgttatttctccaggggtgcctaaaagattatggtctctcataagccgataatcttcatcattgagttcattaataaactgataataggcctcttctctgtggagacgctcttgctgccatcttctctcattttcatgatgattatggtcttgaggtaaggtttcttcactgccaccatctgatctcgatctagactgattcatcctgagattcctggctttcttattttcctttcaacacgcttttaacatatgccatggtatccatccttcaattgtttgtgccttttttgagagctgaccatctctccaggtcttgggccttcgccctcctgtccggagaacgtgtgctgtgggcggccgttctctcgggtgctggaggctgtggttgggaggcgggataggcttgccgccgcgcctccggagcccgctgtgccctcgaattggccactgaggagagaagccggaagcccgtgctgcagcgtggggtcgtccagctggaggggatactcgggaggaagaacggcaggccccagcccttctttcccgacagccacgacgccc

SEQ ID NO: 60671 - DNA, 4286 bp, Homo sapiens
gtcctttttcccgggtccacccacgcgtccgcccacgcgttcgggaaaataaagctttttatattttgttggtgtggacatggataaccctattggcaactgggatggaagatttgatggagtgcagctttgtagttttgcgtgtgttgaaagtacaattctattgcacatcaatgatatcatcccagagagtgtgacgcaggaaaggaggcctcccaaacttgcctttatgtcaagaggtgttggggacaaaggttcatccagtcataataaaccaaaggctacaggatctacctcagaccctggaaatagaaacagatctgaattattttataccttaaatgggtcttctgttgactcacaaccacaatccaaatcaaaaaatacatggtacattgatgaagttgcagaagaccctgcaaaatctcttacagagatatctacagactttgaccgttcttcaccaccactccagcctcctcctgtgaactcactgaccaccgagaacagattccactctttaccattcagtctcaccaagatgcccaataccaatggaagtattggccacagtccactttctctgtcagcccagtctgtaatggaagagctaaacactgcacccgtccaagagagtccacccttggccatgcctcctgggaactcacatggtctagaagtgggctcattggctgaagttaaggagaaccctcctttctatggggtaatccgttggatcggtcagccaccaggactgaatgaagtgctcgctggactggaactggaagatgagtgtgcaggctggtacggatggaaccttcaagaaggcactcggtatttcacctgtgccctgaagaaggcgctgtttgtgaaactgaagagctgcaggcctgactctaggtttgcatcattgcagccggtttccaatcagattgagcgctgtaactctttagccatttgggaggcttacttaagtgaagtagtggaggaaaatactcccacccaaaaatgggaaaaagaaggcttggagataatgattggggaagaagaaaggcatccagggtcattacaattcttgttacttagactcaaccttattctgcttatttgcttttagttctgttctggacactgtgttacttagacccaaagaaaagaacgatgtagaatattatagtgaaacccaagagctactgaggacagaaattgttaatcctctgagaatatatggatatgtgtgtgccacaaaaattatgaaactgaggaaaatacttgaaaaggtggaggctgcatcaggatttacctctgaagaaaaagatcctgaggaattcttgaatattctgtttcatcatattttaagggtagaacctttgctaaaaataagatcagcaggtcaaaaggtacaagattgttacttctatcaaatttttatggaaaaaaatgagaaagttggcgttcccacaattcagcagttgttagaatggtcttttatcaacagtaacctgaaatttgcagaggcaccatcatgtctgattattcagatgcctcgatttggaaaagactttaaactatttaaaaaaatttttccttctctggaattaaatataacagatttacttgaagacactcccagacagtgccggatatgtggagggcttgcaatgtatgagtgtagagaatgctacgacgatccggacatctcagctggaaaaatcaagcagttttgtaaaacctgcaacactcaagtccaccttcatccgaagaggctgaatcataaatataacccagtgtcacttcccaaagacttacccgactgggactggagacacggctgcatcccttgccagaatatggagttatttgctgttctctgcatagaaacaagccactatgttgcttttgtgaagtatgggaaggacgattctgcctggctcttctttgacagcatggccgatcgggatggtggtcagaatggcttcaacattcctcaagtcaccccatgcccagaagtaggagagtacttgaagatgtctctggaagacctgcattccttggactccaggagaatccaaggctgtgcacgaagactgctttgtgatgccatatatgtgccatgtacccagagtccaacaatgagtttgtacaaataactggggtccattcgggaaaaggcaaagaaactgaaggccagaagtccctaacgttgcatcttattcggagctggcagttcctgttccacgtcccattgcccggcaatggatgtctttgtggtgatgattcttcagaaaaggatgcctctgtttaaaaacaaattgcttttgtgtccctgaagtatttaataagaagcattttgcactctagaaagtatgtttgtgttggttttttaagaagtctaaatgaagttattaatacctgaagctttaagttaagtgcattgatcatatgatatttttggaagcatacaattttaattgtggaagtttaaagcctcttttagtccattgagaatgtaaataaatgtgtcttctttatggaccaaggatatgaaatcatttttcttttgtagctaacggttgccttgaggaagaaataatttggttttattaagagtctactctcaatccagttattagagatgtactgagtttgatttgttaatcctttctatatactgctgatcttgcatgtctacaatctgctcagtttttctgtgtttctgcaatagtggtcagaaaaatacttaaattcccttaatggtgttgttttctatttgttctggttttgagataaatgagtgattctgtccccaaatgtccatttttgaagtgattttcctggaggattagggtatttagcagttgaagctcttcattcatagtagttactgtcagctaacaggttttttaaggcttttaactattaatattttatggaatggggcaaagtaaattgatgaaagaattggagtgataatagtcctttacaaacatacagtccataagaaaatgaatttggcatatagaattattacaatttcctgggagagatggatatttaaacctctattattttagacaagactgtctagaacttaagtttgatctgtcagccagtactcccattaaattcagtgtagtttcacttgatagaatcagatatgttatcgaaatgttagcagcagcttcatcctccttctgattaaagtaagtagaaatgggatgttttgtttaataacagccatagtgtgtgtttagaccacagcggatgttgtagaccaggaccatagatgatacatgtcagtgctgtggaatgtgcattctctgagtgttgttttgtggtatcattgtctttcctgaatgactttctaactgtgcagaaaggcagaaaagtcatcatatgtatatgtcatatgactttataaaatatttaatgtgacaaaaagtggaaagaatctttacaaaccctgcaattacttttttaaaggcacttttactctttggttttatcattccattttgctaatatttactagctttataaattacagtaaggtacaaaaactcatcttgtaatattttcatttttgaagtgaaaaagtacatatattttgcacaaggttttatactgctaagtgcttggttggggtggtgagatgatgattagatcaggggtgaggctgagagactctgggtttagggcctagccccgccccccatctcccctggggtaaaaatggaagggtgtgggggtaaaaagatgccataaggcccttttctagctctgacagcctagaagtccaatcaccctgtaataaatatgtgttgaatgaagaaatgggtgaatgagcttgtcaatgtgattttaaaaaattgactacctggaggaatgattaggaatctaaatgaagccagccctcggtatctgcaggtttctcatccatggattcaaccaactgcaaatggaaaatacgattttttttaaaaaaaggatggttacatccgtattgaacatgtacagacttttttcttgtcattattctctgaacaatacaagaactctttatgtagcatttacatttattaggtattataagtaatctagagattatttaattaaaatatacaggaggatgtgtgtcagttatatgcaaattctgtaccattttgtatcagggaattgagcatcttcagatgttggtatctgcagggatcctggaaccaaacccctgcagatactaagggctgacgatctaggtaagactggatttaacagttggaaaaaaaaaa

SEQ ID NO: 60672 - DNA, 890 bp, Homo sapiens
ttgatgcaatccgacgcactagtagacgtccgtgaggactggctcgacccacgcgtccgcccacgcgtccgcttgcgtccccgcgtgtgtgcgcctaatctcaggtggtccacccgagaccccttgagcaccaaccctagtcccccgcgcggccccttattcgctccgacaagatgaaagaaacaatcatgaaccaggaaaaactcgccaaactgcaggcacaagtgcgcattggtgggaaaggaactgctcgcagaaagaagaaggtggttcatagaacagccacagcagatgacaaaaaacttcagttctccttaaagaagttaggggtaaacaatatctctggtattgaagaggtgaatatgtttacaaaccaaggaacagtgatccactttaacaaccctaaagttcaggcatctctggcagcgaacactttcaccattacaggccatgctgagacaaagcagctgacagaaatgctacccagcatcttaaaccagcttggtgcggatagtctgactagtttaaggagactggccgaagctctgcccaaacaatctgtggatggaaaagcaccacttgctactggagaggatgatgatgatgaagttccagatcttgtggagaattttgatgaggcttccaagaatgaggcaaactgaattgagtcaacttctgaagataaaacctgaagaagttactgggagctgctattttatattatgactgctttttaagaaatttttgtttatggatctgataaaatctagatctctaatatttttaagcccaagccccttggacactgcagctcttttcagtttttgcttatacacaattcattctttgcagctaattaagccgaagaagcctgggagtcgacgcggccg

SEQ ID NO: 60673 - DNA, 3912 bp, Homo sapiens
tgcaggaccggccggaattccggtcgacgatttcgggcccacagctaagccgagtgcgtgaatgcttatgtgaccgtgtgaaggaggttcccaccgtgtggctgtgggggatggaaaaaggctacttggaaagatgtagaagaccttcgagtaaacagttacgtttcagaaacagagcctgctcagaatgtgtacttggtgggattctattcttagggacgcttctttcttctgagagacccgagctctgtggcgagtggcacaggcagggccccttcctttcctagttgggttctgacagctccgaggcagtggtttacacaaccaacacgaaacatttctacgatccacccgattcctcccctcattgatattcaggaagcagctctccttcccctgccttcagctcaagtttgctgagcttttgtttcatttgtgaatacttcttgctggaagtccctcacccagagaccagtgctcccaacggcagagcagcgggggagataaagaactggtgacacgtggctgtacattcagcacagctgtggtgtccccaagtgccatgacccaggagccattcagagaggagctggcctatgaccggatgcccacgctggagcggggccggcaagaccccgccagctatgccccagacgcgaagccgagcgacctgcagctgtcgaagagactgcccccctgcttcagccacaagacgtgggtcttctctgtgctgatggggagctgcctcctggtgacctcggggttttcgctgtacctggggaacgtgttcccggctgagatggattacttgcgctgtgctgcaggctcttgcatcccctcggcaattgtgagcttcaccgtctccaggaggaacgccaatgtgattcccaactttcagatattgtttgtttccacgtttgctgtgaccactacgtgtttaatttggtttggatgcaaactagtcctgaacccatcagcaataaacatcaacttcaacctcatcctgctgctcctgctggagctgctcatggcggccacggtgatcatcgctgcacggtccagcgaggaggactgcaagaaaaagaagggctccatgtctgacagcgccaacattctggacgaagtgccatttcctgctcgggtcctgaaatcttactcagtcgtcgaggtaatcgcaggcatctctgccgtcctcggggggatcattgccctgaacgtggatgactcagtttcaggcccacacctctcagtgacgttcttttggatcctagtggcctgctttccaagtgccattgccagtcatgtggcagcagagtgtcccaacaagtgtctggtggaggtcctgattgccataagcagcctcacgtctccgctgctgttcacagcctctggatatctgtcattcagcatcatgagaatcgtggagatgtttaaggattacccgccagccataaaaccatcctacgatgtgctgctgctgctgctgctgctagtgctcctgctgcaggccggcctcaacacgggcaccgccatccagtgcgtgcgcttcaaggtcagtgcaaggctgcagggtgcatcctgggacacccagaacggcccgcaggagcgcctggctggggaggtggccaggagccccctgaaggagttcgacaaggagaaagcctggagagccgtcgtggtgcaaatggcccagtgacccccagacgcggaaaccgggtggcagcgcccagcctggccccaggcatggaaacgcacaacccctaatcgccctgagctactgcttctaacacctcttttcccttgtgttaagggaaaccaggctgcaggtggggttttcacttcctagggtagtttaattttaaaataggccaatgttggctagtctgtgcctcagtgagatcagtcagctccgagtggctcccgtgtcgtaacagcaggagcatggccgcaacttcccaggccgaggaagggcccccggctcggcctcttgagagccccacccctgaactggccccagctcctcttcctgcctctctcatggcttgggctggagtgggctctctggacctgaccagactgtgggtccctgcgtctcctgcccactctgaccgggcttcctccctccacgcttagggtctgtcccgggtactcagtcagcccagtgggatcttacccacttccctgcaaggtgcacctgccccaggctcaggctgcccagcggctcttcctggacagtgagagcagggcttggcgcctctgtcctggcccgggagccgcaggggcccctcctccagagcctgggcgcaagcgacacaggctgccgctgctctcccaggtgaaatccacaccagtccacgccgggtcgcctgccctgtctccctacttagacccagtcattctagagggatccaccgccacactggccggcccacgtcctgggtgctgtcatgcccagcttggagtgccacgtggccgctgcccacgtcccgggcactgtcatgcccagcttgggagtggccacatggtcgctgcccacgtcccgggcactgtcatgaccagcttggagtgccaccgtggccgctgctgtgacagacagtattctcgggggtgggggctgcatccaaggctttgtcaaccggctggaccacgtctccctcgccccagtgaccgggggaggctgagcccctccctcctgtgtttgttcccattactcaaaatgtaggatagatcaggtcagagcccaggaaatactcacaggttcacccaggcgccctcttacctcctaggcaagtactttgtctttgatcctcaattgagaagggcccaggggaggggtcttctccatcttcgcttgttttgggggtcttagggtacagcccaggcggtcactgcccacctgccaggctgcagggacagttgggtgtgagaataacactggctttgggtagtgccatggccaggagtgggtttccctgcgtctcctcgtcccgagggcgcctgggtcctcccagctgacggcagtaaatccacagtgagttggggcgactgtgaaactggaatgctgttactttgataattactttccagcaggtgttttccttcacaatggttttgtttctttccttctgatctgagaagacatgaacgttttctcttcaccgccgtggggtgtattgactggtcccccatgggctgctggaaaggcccggagatgcatctgtggcctggggccatcaagatcaaagaaccaggaggcctgggagatgcagctggatggggcggcctgcagaccctgccagggggtttgaggaccctcccaggtttcccacttcgggaacaggagtgactctggctgccaagataccttcatggtgttcatgacaagtggaatcattattttcaaccattgaagggggatgcaggcaagacaccttcccagctgctcctagaggggacaagccaggccctctctgcagtcctcggcagctccggaaggacacagtcaggggccgggcaaacactttggccacagccccaaacaagcaccaccgtgggagaggagaggctgctgtcactggtaccggatgcagaccccaccctgtctgcaggccacccccacctccctgcagctttgaggctggcggggtctgctcctgggaatggggtgggagccacagggacgacccggggcgggctgatgtcttcttgggggcagacccagagagctcaagtttcagagtcagaattaggcacttggagcgtttttgctggcttgcactttcttattttcttattttagagcgcttaaaaaatccggaaaaatggggtttaaaagaactgtctctttcagtctacatttttgtttaatacgcttgagcaataaacgctgacttgcagacgtgaaaaaaaaaa

SEQ ID NO: 60674 - DNA, 3070 bp, Homo sapiens
tttttcacttagaaatgtttatctttatttcggaataacctataggaccatatccagataaaggtcctatcagtacttctcatgagttatcactcagttttgcatctagaggacccaccagtcaaagcagtaaaactaaatctccttatacaatactgaagtcttcagaaaagcagtgctaaatgggtgatgaaacctgacttaaccacttccctgtatggcaagatgacttattttgcattcctaaaacttctactttgattctcaatatatccgttttttttttctttttttcaaaagcattattttggtgaaaatcccaatatatgagtttaaaaaaaaatcattaacatcattaacagtactttaaatcaattactccttttgcctgcaacagggtccagcaaagccttaccacctcaagcaaacccactatacctatctatgctcaagaagtagtttggctactgaagacatgctggtctcttccaagtctttcctcaggatccacacatcagacattcatctctattctccaaagagcacaccatggctgctgtgttcctctccttctcttcttcctcttttgataccttttctttatcttttagcttctccttatttagagtgaactggattggattagctgctggtctcgtccttaaataatacatcccagtcttcaaaccctgcttccagccgtagaagtgcatactagtgagtttgccatagttaggctcagcaatgtggatgttcaaagattggctttgatcaatgaaagcacctctctcagctgccatcttgagaacagttttctgagagatttcccacacagttttataaagttgcttcaggtcatcaggaatttctggtatgctctgaatagagccattgcatgcaataatctggtttttcatctcttcatgccataggccccgctcggtaagatctttcaataagtgaggatttacaatctgaaattctcctgacaagactctgcgagtatagatgttgctggtgtaaggttcaatggactcattattccccaggatctgagcagtggaagctgtaggcatcggggcaataagtaaactgtttcttataccatactttgcaatcttctccttgagaaccttccagtcccataggtctgtaggagtaacattccacatatcatactgaagaattcctttgctaactggagagccctcataggtttcgtatgggccctgctccttggcaaggtcacagctggcttccagagcaccataataaatagtttcaaagatctgcttattcagtaactgggcttctgcactctcaaaagggtatctcatcaggataaaagcatctgccagaccttgtaccccaattccaatggggcgatggcgtttatttgataggcatgcctctggtacaggatagtagtttatatcaataattttattcaagtttcggacaacgactttagtgacttcagccaacttcttaaagtcgtatgtgtgttctgatgtgacatacatattcagggccagggaagccaaattacaaacagcaacctcatctttgctggtgtactccactatttctgtgcacaggttgctgcatttgatggttcccaggttctgctggttgctctttcgattacaggaatctttgtagagcatatacggggtgcctgtttccgtctgagactcaatgatggcataccaaagctgctgagcttttacaactttgcggacacgaccttgtttctcataacttgcatatagtttctcaaattcctctccccaaacctcatccagaccaggacactcatttggacacatcaaagaccagtcctgattagtctccactcgtttcatgaagagatccggaatccaaagagcaaagaaaagatctctggccacgctgctcttcctttcctgtgttcttctttaaatcaaggaattcaaagatgtctaaatgccaaggctccaggtaaatagcaaatgccccaggacgcttgttcccaccttgatccacatatctagctgtgttgttatatactctcagcatcggtacaaggccattggaattgccattagtcccagcaatgtagctgccagtagcccgaatacaactcacagcaacaccaattcctccagcagacttagaaatcaatgcacattgctttagagtgtcataaatgccttcaatgctgtcatctttcatactcagaagaaaacagctagaaagttgtgggcggttggtaccagcattgaagagagtgggcgaagcatgagtaaaccacctctcagaaagaagattatatgtttcaattgctgcatcaatgtcttctttgtggatcccaacagatactctcatcaacatatgttgtggtctttcagccacttttccattgatcttcaacaaataagaccgctctagcgtcttaaagccgaagtaattgtaagagaaatctcggtcatagataatagcagaattcaggcgatctttattggccagaacaatatccaatgttgacttggccaccatgggagagtgtttgccattatgtggatttatgtagttatagaggtcttccatcacatcactgaacactttctttgtttctttgtgcaagttagagacagcgatcctggctgccaggatagcatagtcagggtgcttagtagtcaaggttgcagctgtttcagcagccaaagtatctagttccactgtggtgaccccactgtacaagccttggattactttcatggtgatctgagcaggatcaacaaaatccatattgagtccataacaaagcttctggattcgagatgtaattttgtcaaacatgactcgttcttggcggccatctcgcttgatcacatgcatcgcagctagtggctgaggctctgaaggatccaagactggactgcggctctaaagcgccggcgggatcgagaaggtgacagagtgggaagggttaggttccaggcgctgctcaggggaaagaactggagttggagccagacagcactttcttcagagcagaggcgcaacaatccaaatccccttcgcgcgc

SEQ ID NO: 60675 - DNA, 3691 bp, Homo sapiens
gtcgactacaaggtggctacgagttttccagatttaggagacttcagaaaggtggggcagatagaatggagatggcaaagatctctttgggcatatatgggcctggcgaagtaatggaataatttctaattttcggagaagccctcatgccgggatggcagaagatgagcctgatgctaagagccccaagactgggggaagggcccccccaggtggtgctgaggctggggaacctaccacccttcttcagaggctccgaggtaccatttccaaggccgtgcagaacaaagtagaggggatcctgcaagatgtacagaaattttctgacaatgacaagctgtatctctaccttcagctcccctcaggacccaccactggagacaaaagctcagagccaagtacactgagcaatgaggagtacatgtatgcctataggtggatccgcaaccacctggaagagcacactgacacctgtctgccaaagcaaagtgtttatgatgcctatcggaagtactgtgagagtcttgcctgttgccgcccactcagcacagccaactttggcaagatcatcagagagatcttccctgacatcaaagctcgaaggcttggtggccggggccagtccaaatattgctacagtggcataaggaggaagaccttggtgtctatgccacccctgcctggacttgacctaaagggttctgagagtccagaaatgggcccagaagtaaccccagcacctcgagatgaactggtggaggcagcgtgtgccctgacctgtgactgggcagagcggatcctgaaacggtccttcagttccatcgttgaggtcgcccgcttcctgctacagcagcatctcatctctgcccgatctgcacatgcccatgtgcttaaggccatggggcttgctgaagaggacgaacatgcacctcgggaacggtcatctaaaccaaagaatggtttagagaacccagagggtggagcccacaagaagccagagagactggcccagcctcctaaggatctggaagcccgaactggggccggtcctctcgcacgtggagagcggaagaagagtgtagttgagagctcggccccaggagccaataacctgcaggttaatgccctagtggctcggctgcctctgctccttccccgggcccctcgctcactaattccgccaatcccagtctctccacctattctggcccccaggctttcttcaggtgccctgaaagtggctacactgcctctgtctagtagggccggggcacccccagcagctgtgcccatcattaacatgatcttaccaactgttcctgctttgcctggacctggacctgggcctgggcgagctccacctgggggactcactcagccccggggcacagagaacagagaggtaggcataggtggtgaccaaggaccacatgacaagggtgtcaagaggacagctgaagtacctgtgagtgaggccagtgggcaggctccaccagctaaagcagcaaagcaggatatagaggatacagcaagtgatgccaaaaggaaacgggggcgccctctaaaaaagtcaggtggaagtggggaaaggaattctacccctctcaagtcagcagctgccatggaatctgcccagtcctcaaggttaccatgggagacatggggctcaggaggggaaggcaactcagctggaggggcagagaggccagggccaatgggagaggctgaaaagggggcagtacttgcccaggggtcagggagatggtactgtttccaaaggaggaaggggccccggttcccagcataccaaagaagcagaagataaaattcccttggtcccctcaaaagtgagtgtcatcaagggcagcagaagccaaaaggaggcttttcctttggcaaagggagaggtagacactgcaccacagggtaataaagacttaaaggagcatgtgcttcaaagttccttatcccaggagcataaagacccaaaagcaacacccccatgatacaggtctgtggggaagagtgtttatatccctacgttaactttgcctagtagaggcccttctttgcacttgcttctcatttggctattcttttcctaaggaagtccattctcctctgtacagacagctgagtcacccagtctacttagtacctggttgctgcctctgaccttttcagcttgataccctgggctttagtgtaaccaataaatctgtagtgaccttacctgtattccctgtgctatcctgtgggaaggtaggaatgggctaagtatgatgaatgtataggttagggatcttttggttttaaatcacagaaaacctaattcaaactggcttaaaataaaaaggatttattggttcatgtaactagaaagtccataggtagtgctggctccaggtgaagacttgacccagtagttcagtatgtctctaaataccggactgacttttttctcactgttgcatcttctgtaggaccatttaagtctgggccacttaatggctgccagcattcctaagattacacttttccccatttatgtccaatcagaaaaagaaggcatctttgtaccagaaatctcagcaaaagccctaatattcacactgattaggcctgggtcacatgtccaccctgaccaatcactgtggccaggaggatgatacatgctaatttgcttattctatatcatggacaacacctttggggaaaagggtgggggtcagcctccccaaaatcacatggattccccaagtggaaactaggagcagggagttgcttgggtggccgctaacaccaggctactcttattttagcttgctaagttgagatcagctagacctgctttcttttctcctcagtcttgcatttccctcaatacaagctgtagcctctttcctcgtttctagtctcagaaggaaggagagggaagccattctcctctagggactcttcagtctcatttagatgatagtccctttttttctacctccatattagagatggagctccttccttttcctgtttcttaatttttgtcttctcattcctgcttccctctcaccctattgccagttccaccaactagagtgaaagacttcctagccatttcattaaatctattctgtatccaccaggtggcagcatcttgtcatacgtgtcaggacttaggactgcggggtttaggttagatgtcacggaaaaagctagttctgtggtcaggcggcaccaatgagaaaggaatgcagaccctccagatgtatccttgggaaaagcagtaaaccaactaatatttattgaagacctactttgtcctctacatagggtagcttctgtcagggaatcttggttcttcccaagaaacactgattttctttcagggagacttcatgtgttcatttatttccaccacagcagattttaagaaattataatatgtaatatttgatatctataaagagtatatctaacgtgaataaattatgaagcatactaatgagtacctatgacccataacacatatacattaaaacattttaaataccaaaaaaaaaaaaagggggggcccttttaagggaaccaattttaactcccgggggtgggaaaggaaaaattttttttatggggccccaaaaataaattcctgggcccgtttttaaacaccccggggagggaaaaaccctgg

SEQ ID NO: 60676 - DNA, 3361 bp, Homo sapiens
tccggtccccctccctcagacgcgctgctcctgctccagatgaggtgatggcaacgccaacttcggcaagatccagatcgggatttacgtggagatcaagcgcagtcgggatagagtcttattctgtctcccagactggagtgcaatggtgtgatgtcggttcactgcaacctctgcctcctgggctcaactgatcctccccgctcagcctcccaagtagctgggactacagatgcacaccacatccggccgaatacatcaagcaatggtaacatctttaaatgaagataatgaaagtgtaactgttgaatggatagaaaatggagatacaaaaggcaaagatgattgacctggagagcatcttttcacttaaccctggacctttgttcctgatgaagaaattgaaccaagtccaagaaacacctccacctccagcatcctcagccaaagtgaacaaaattgtaaagaatcgacggactgtaagcttctattaagaatgaccctccttcaaagagataatagagtggttggttcagcacgtgcacggcccagtcaatttcctgaacagttttcctctgcacaacagaatggtagtgttttcagatatatctccagttcaagctgcaaaaaaggaatttggacccccttcacgtagaaaatctaattgtgtgaaagaagtagaaaaactgcaagaaaaacgagagaaaaggagattgcaacagcaagaacttagagaaaaaagagcccaggacgttgatgctacaaacccaaattatgaaattatgtgtatgatcagagactttagaggaagtttggattatagaccattaacaacagcagatcctattgatgaacataggatatgtgtgtgtgtaagaaaacgaccactcaataaaaaagaaactcaaatgaaagatcttgatgtaatcacaattcctagtaaagatgttgtgatggtacatgaaccaaaacaaaaagtagatttaacaaggtacctagaaaaccaaacatttcgttttgattatgcctttgatgactcagctcctaatgaaatggtttacaggtttactgctagaccactagtggaaactatatttgaaaggggaatggctacatgctttgcttatgggcagactggaagtggaaaaactcatactatgggtggtgacttttcaggaaagaaccaagattgttctaaaggaatttatgcattagcagctcgagatgtctttttaatgctaaagaagccaaactataagaagctagaacttcaagtatatgcaaccttctttgaaatttatagtggaaaggtgtttgacttgctaaacaggaaaacaaaattaagagttctagaagatggaaaacagcaggttcaagtggtgggattacaggaacgggaggtcaaatgtgttgaagatgtactgaaactcattgacataggcaacagttgcagaacatccggtcaaacatctgcaaatgcacattcatctcggagccatgcagtgtttcagattattcttagaaggaaaggaaaactacatggcaaattttctctcattgatttggctggaaatgaaagaggagctgatacttccagtgcggacaggcaaactaggcttgaaggtgctgaaattaataaaagccttttagcactcaaggagtgcatcagagccttaggtagaaataaacctcatactcctttccgtgcaagtaaactcactcaggtgttaagagattctttcataggtgaaaactctcgtacctgcatgattgccacaatctctccaggaatggcatcctgtgaaaatactcttaatacattaagatatgcaaatagggtcaaagaattgactgtagatccaactgctgctggtgatgttcgtccaataatgcaccatccaccaaaccagatttgatgacttagagacacagtggggtgtggggagttcccctcagagagatgatctaaaacttctttgtgaacaaaatgaagaagaagtctctccacagttgtttactttccacgaagctgtttcacaaatggtagaaatggaagaacaagttgtagaagatcacagggcagtgttccaggaatctattcggtggttagaagatgaaaaggccctcttagagatgactgaagaagtagattatgatgtcgattcatatgctacacaacttgaagctattcttgagcaaaaaatagacattttaactgaactgcgggataaagtgaaatctttccgtgcagctctacaagaggaggaacaagccagcaagcaaatcaacccgaagagaccccgtgccctttaaaccggcatttgctgctaaaggatacccagaaccctcactactgtaacatacaacggttcagctgtaagggccatttgaaagtttggaattttaagtgtctgtggaaaatgttttgtccttcacctgaattacatttcaattttgtgaaacactcttttgtctacaaaatgcttctagtccaggaggcacaaccaagaactgggattaatgaagcattttgtttcatttacacaaatagtgatttacttttggagatccttgtcagttttattttctatttgatgaagtaagactgtggactcaatccagagccagatagtagggggaagccacagcatttccttttaactcagttcaatttttgtagtgagactgagcagttttaaatcctttgcgtgcatgcatacctcatcagtgattgtacataccttgcccactcctagagacagctgtgctcaccttttcctgctttgtgccttgattaaggctactgaccctaaatttctgaagcacagccaagaaaaattacattccttgtcattgtaaattacctttgtgtgtacatttttactgtatttgagacattttttgtgtgtgactagttaattttgcaggatgtgccatatcattgaacggaactaaagtctgtgacagtggatatagctgctggaccattccatcttatatgtaaagaaatctggaattattattttaaaaccatataacatgtgattataatttttcttagcattttctttgtaaagaactacaatataaactagttggtgtataataaaaagtaatgaaattctgagaagagttttatcttaggaaaatacatatatatgcagtgtgtgtgccagtgtggtattaacaagactaatagtgcagtttgatccttaccaatatcattacttaatttgaagtgttcattagcaccccaaaatataccttttctatgtactgttaaaagaaattggcttctgatgcatgaacatttacatgtacattgaaagtagtccataatagaagttagtttaagccaagg

SEQ ID NO: 60677 - DNA, 1701 bp, Homo sapiens
ttttttttttttcaaggttcacggggtttattagggagtcgggagggagaaaacccaggagtccccaggccatccacattgctccccggcatgtgacgatccagcctggctttctctggtcctttctggacagaggctggccaagcaggcagcagcctcaaggggagtgggtaggagctgggggccttctggcagccctactcagaggatgatctggttggtgaagcttcggctcagctccttgtgtggcagaacaatcgagttcaggatgagcacctcggcagggatccggactcggcagcccaggatggtgatagcaggcagcagcttcccgtccttgaagaggctctcactgtccatgcgggctcggggatcgttggggttagggtcactgggggtaccctccacgcgggcccagcgtcccacggtgctcccccagcccacgatgctatgcagaacacacgtgtgctcctgcaaagtggctccatggaggacgatgctctcccggagccgcacaccctcacccacggtcacccccttcccgatggagacgttggggcccagcacagccgagggggccaccttggcggtcgggtggatgtacacattccctcggatccatgggccccctggggtgtgcttggccagccgttctgggtgagtgtcctggtatcggctcaggtagaggcgggaggcgtagagggctgaacctgcggacttgatctgactccagataccatcagtgagatgcacgtatatctggccctgccctgccagggctgaaaacacatcctgctctaggcggatggtacctgcccctggccacaagcctggtgagtcctccaattgcccatcctgctgattacgctggaagacatcccgaagaggcttcaaggcttcaggagaaaagaggtagatgccgcagttgatgatgtcactgataaatgtgctgggtttctccacatagtgcaatacctcgtgtgtctgtggattctcaacgatgcagccgtagttgagggattgcgtcctgttagccgtagtgccaaggagtaagaaagggtgacgctggcgtcggtgggcttccaacatagcactcaaggggaagtcggagcagacatcagcattgagcacgaagaatgcctcggggctcccagccaggatctggtctcgaaaatggtaaagaccaccccctgtgcctaggggggcaaattcctgcaggtacctgactggaaggttaaactcctgctgggcggcttctaggaactgggtgaggggctcatcaggttggtagaagccaatgagcagaatctcctgcattccagggacctgggcacaggcttcaatatggtgttggatcatagggacccctgccacaggaaacaatggtttgggcacctcaaaagacaaaggtctgaagcgagttcccttttgagggcctccaatcaggatcaccgctttgagcataatggtgactgctacctaaactctgtatgttgaaccccaaatcaaaagacaggttcccttggcatctcaaacactgaacctattgacccccctccagtcctaatacggacgactgggtctaaatctctggattcggaggattgattgattgctgaccctctgaaccccacaactgactctgtccaataaaccctggcctctcattgccagggattgtgggaccaacacaggacgaaa

SEQ ID NO: 60678 - DNA, 2593 bp, Homo sapiens
gcccaggtgactgactaatccgccgccttcaggagacagaattggccaaggcctgaaggccccggagtgcaccagcggcatgtacaaagagaccgtctactccgccttcaatctgctcatgcattacccacccccctcgggagcagggcagcacccccagccgcagcccccgctgcacaaggccaatcagcccccccacggtgtcccccaactctctctctacgaacatttcaacagcccacatcccacccctgcacctgcggacatcagccagaagcaagttcacaggcctctgcagacccctgacctctctggcttctactccctgacctcaggcagcatggggcagctcccccacactgtgagctggttcacccacccatccttgatgctaggttctggtgtacctggtcacccagcagccatcccccacccggccattgtgcccccctcagggaagcaggagggtgcagcccttcgaccgcaacctgaagacacaagcagagtccaaggcagagaaggaggccaagaagccaaccatcaagaagcccctcaatgccttcatgctgtacatgaaggagatgagagccaaggtcattgcagagtgcacacttaaggagagcgctgccatcaaccagatcctgggccgcaggtggcacgcgctgtcgcgagaagagcaggccaagtactatgagctggcccgcaaggagaggcagctgcacatgcagctatacccaggctggtcagcgcgggacaactacgggaagaagaagaggcggtcgagggaaaagcaccaagaatccaccacagataactctcttcactattcctaggaggaaaaagaaatgcattcggtacttacccggagaaggccgctgccccagccccgttccttccgatgacagtgctctaggctgccccgggtccccagctccccaggactcaccctcataccatctgctgccccgcttccccacagaactgcttactagccctgcggagccggcacctacatccccaggtctctccactgctctcagcctcccaaccccagggcccccacaggccccccgcagcaccctgcagagcacacaggtacagcaacaggaatctcagagacaggtggcctagcaggcacaggacacctggccgcctccaggagcctaccccctgaaagtgacagagacccagatctcatggaaactggccaggggtcctgttaacgtcatctcagggtccagaccctgaagatttcagaggctgcagaacttctgcctgaacctggggtcatcgattcaaactgctccaagtggtgggaatcagatctgtcttgatgtgtcatctaattaagggaatcccttgtacctatggctgcctgcatctattctttgtaccatctgtcttgccagccagaagcctctgcctccctagcttttctgctataggtcagagatgggctgaactgagcctagctaccttctctacccatctcccccatcccccactgccacaccctccccattcagacacttcatggaccaagaatgagctggtttgtcaaacaacatgtgagcatggtcacaagcacaaagctcaagatgacagctcttctaaggaaatggagaagctctgtttataaaaacaaaaacaaaaccagctgctactcataagttggaccagaggaagccccttactatgatctcaggagcttgcaagaagcaggaaggggaatggaataggttaagtttaggcctatcaacctaagcaacagaaataatctgacactaccttatcaggcaaattggggaggggagggtgtatctagctctagttcaaattatttggaagtgttccctgagaaacccaccagcctaagaagctctggccccaggcttgtcactagcagctgcagtcaacagttcaaagaagtcatggcccaaatccagtgtgcacccctccccattcacagagcctttttcacaattccatttccagttcatctatggcagtccagccagctcctgggcagcttgagagggcaaacccaaaacctcatgacagccagagcctgtctttcagcattcagtccgcctggccggctccagtttccccatggggctgcgggacagaggaccattacaactagatcaaggagcccagaaaacctccagtagtggacaacaggttttcaccatagcctacgttaacccatttttgagccaagcttcaaccctcagccttgaaaaacaagtctttaatttaatttttgttttttgcctaaatccaaagaaaaagggctgtcgggccaggcgcggtggctcacgcctgtaatcccagcactttggcaggccgaggcaggtggatcacctgacgtcagtagtttgagaccagcctggccaacatggtgaaaccctgtatctactaaaaatacaaaaattagccggacgtggtggtgcgcgcatgtaatcccagctactcgggaggctgaggcggaagaatcacttgaacccgggaggcggaggttccagtgagccgagatggcgctattgcactccagtctgggtaacagggagactgcatctcaaaaaaaaaa

SEQ ID NO: 60679 - DNA, 1076 bp, Homo sapiens
ttttttttttttgagattctattcatagaatcattcttcgaatgccacattcacagcaaaatttggcccattctacagggtatttagtcccacactcatggcagaaattttggaaagtttccaggggaatgtccttcaatgcctttaatatttccaccattaagggaagatgcacagtccccatctggcctggctatgtagctctcagtatatgtttttcttttgtttgtaagcacacctggggcaggatttcttgccaaactaggtggtgtggaatttcggggtttgacattagctcctgcatgaggggctgctatccctttatgagagggagacaaggtctgaagtttgtttcccaaagagctgctacttgaagacactttacctgaaggaacacctacaacagttttgccagcgccacttggctgcggtaatcgtgaagatcctgatgatgcagttccaggagaatttgactttttaagtgcgggtggcttatacacctgtgtccgagaagttggttttcctttggtatctgtagaaaatttccctttattactaatacgtgctgcctgttctttacagaaatttatatgtctatcagctgcattttcattgaatctcctctgacaatatgggaccattgaatataatcaggatcataagaaggtggaggaggaggaggaagtttgccaccctctttgagggcctgatcaaggcctttagctgctcttatggtagcaatgaattcttcatgtttccttctccaattagatggtttctttggtggttctggcctcggtttgagaggttttactgttggaatatcagttccttcagctctctgtctgcttgaatcaaaagtcttccgttttttagttgcagtcttctggcaaatgggtccatgtttttttaatgctactggaaagaatgttcttccacaaatcttgcaaggtaacaattctccaacttggacaacacctccattctcttccagtccctccatcgcgccacctcctcgagctcagcgagactccttcagcagcgcccgccaccgcccagctctggctgtaacgaaa

SEQ ID NO: 60680 - DNA, 3092 bp, Homo sapiens
agcacctgctccacagatggtttggcactgatatgcagatgattaatttcacaactggtgaattccagctcaccgaagcttgcccttacctgggtacgcattctgaggaatccaggtttggcatcctccacttacatctgcagcctttggaaatgaaaagggttggcgtagttttcacacctgctgactatggaaaagttacctcactcatactaatccggaataacttgactgttattgacatgattggcgtggaaggatttggagcaagagagttattaaaagtgggtggaagacttcctggtgcaggaggctcactccgatttaaggtgcccgagtccacgctgatggactgccgtagacaactgaaagacagtaagcaaattttatctattacaaagaactttaaagttgagaatattggacctcttcctataactgtttcgtctctgaaaattaatgggtataactgccaaggttatggattcgaggtgctggattgtcatcagttttccctggacccaaacacatcccgcgatatcagcattgtgttcactccagactttacctcctcctgggtaattcgggacctaagtcttgtaaccgcagcggacctagaatttcgcttcactctcaatgtgactctccctcatcacctgttgcccttgtgtgcagacgtggttccaggacccagctgggaggagtcattttggaggctcacggtcttctttgtcagtttgtccctgttgggtgtgattttaatagccttccaacaagcacagtacattctcatggaattcatgaaaacaagacagaggcaaaatgctagctcctcttcacagcaaaacaatggtcctatggatgtaatcagcccccattcttacaaaagcaattgcaagaactttctcgatacatatggcccctctgataaaggcagggggaagaactgccttccagtgaacactccccaaagcaggatccagaatgctgcaaagaggagcccagccacctatggtcattctcagaagaagcacaaatgctcagtgtattacagtaaacacaaaaccagcacagctgcggccagcagcaccagcacgactactgaggaaaaacagacttcacccctgggcagctcactgcctgctgctaaagaggacatttgcactgatgccatgcgtgagaactggatcagcctcagatatgcaagtggcataaatgtcaacctgcagaagaatttaacccttcccaaaaacttactgaataaagaagaaaacacactgaaaaacacaattgttttcagtaatccttcttcagaatgtagtatgaaggagggaatacagacatgtatgtttcctaaggaaactgacattaaaacttcagagaacacagccgagttcaaggaacgggagctctgtccactgaagacctccaagaaactacctgaaaaccatttaccaagaaactcacctcagtaccaccagccagacttgccagaaatttccaggaaaaataatgggaataaccagcaagtacctgtcaagaatgaagtagatcattgtgaaaatttgaagaaggtggacacaaagccttcttcagaaaagaagattcacaaaacatctagagaagacatgttttctgagaaacaggacatacctttcgtagagcaagaagatccttataggaagaaaaagcttcaggagaaaagagaaggaaatttacaaaatttaaattggagtaaaagtcgaacatgtagaaagaacaagaaaaggggtgttgctccagtctcaaggcctcctgaacagagtgatctaaagcttgtgtgcagtgactttgagaggtctgagctgagcagtgacatcaatgtaagaagctggtgtatacaggaaagcactagggaggtttgtaaagcagatgccgaaattgcaagcagtttacctgctgcccagagagaggcagaaggttactaccagaagcctgagaagaaatgtgtggacaagttctgctccgattccagctctgactgtgggagctcctctggcagcgtgcgtgccagccggggcagctgggggagctggagcagcaccagcagctccgacggggataagaagcccatggtggacgcccagcacttcctgccggccggagacagtgtttcacaaaatgattttccttctgaagctcccatctccttgaatctttctcataacatctgcaatcccatgaccgggaatagtctcccacaatacgcagagccttcctgtcccagccttcctgccgggcccacaggtgttgaagaagataaaggtctttactcacctggagacctgtggcccactccgccagtgtgtgtgacaagcagcttaaactgcaccctggagaacggcgtgccttgtgtgattcaggagtcggccccggttcataatagtttcattgattggagtgcaacatgcgaaggccagttttccagcgcatactgtccattggaattgaacgattacaatgcctttccagaagaaaacatgaactatgccaatggcttcccctgtcctgcagatgttcagacagactttattgatcacaactctcagtctacctggaacaccccaccccaacatgcctgcctccctggggaaatgcccagtttccatcgagctctcggccctacctcaaaagcaccccgaaagcttgtctcccaatgtctggactttttggtcccatcctgggccccgccaaagcgatgtgtatgaaaattgctgccccatcaaccccaccacggaacattcggaccccacatggaaaaccaagcgggtcgtgtgcaaggaatactacccggggttcaaacccgtttcgcgcctatatgaacctggacatatggactaccacacgcgaataggaatgcaaatttcccactgtctagagactcgagttactgtgggaatgtgtgaaaataattggatttttaatacaatgtgaataaagaggcttgtgttttgattactagtgtaaactggttattgagatagattatgacattgttggatattttggcacttttatatgaaaataaattttttaatgaaaaaaaaaaaaaa

SEQ ID NO: 60681 - DNA, 2252 bp, Homo sapiens
acctctcggactcgacccgattcccggtcaccgatgattcgtgcgacccacgcgtccgagaaatgtgagagcttcttgccgccagagttccgctcttttgctgtagatccccagatcacctcgctcgacgtgttgcagcacatcctcatccgagcctttgatttgagtgggaagaagaactttggcatcagctacctgggccgggaccggctaggacaggaagtttacctctcacttctatctgactgggacctcagtacagcctttgccactgcctccaaaccttacctgcaattgcgtgtagatatttggccctcggaggacagcccattgctagaagactgggacataatcagccccaaagatgtcattggctccgacgtgttgctggctgagaaacggtcatcactgacgactgccgccctgccctttacacagtccatcctcactcaggtgggccgtaccttgtctaaggtcccaacaagtgctgagctggtcgtatggggaagatgtcaagcccttcaagccacccctgagcgatgctgagtttcacacgtacctgaaccacgagggccagctctcccgacccgaggagttgcgcctgcggatctatcatggcggtgtggagccctcgctgcgaaaggtggtgtggcggtacctgctgaacgtgtatccagatggactgacaggccgagagcggatggactacatgaaacgcaagagccgcgagtatgagcagctcaagagcgagtgggcccagcgagcgagccctgaggacctggaattcatccgcagcacggtcctcaaggatgtactgcgcactgaccgggcccacccctactatgcggggcctgaggatggcccacatctacgggcgctgcacgacctgctcaccacctatgccgttacccacccacaggtgtcctactgccagggcatgagtgaccttgcctcacccatcctcgctgtcatggaccatgagggccatgcctttgtttgcttttgtggcatcatgaaacgcctggccgccaacttccaccctgacggccgcgccatggccaccaagtttgcacacttgaagctgttgctgcgacacgctgaccctgacttttatcaatacctgcaagaggcaggcgctgatgacctcttcttctgttaccgctggctgctgctggaactcaagcgtgagttcgccttcgacgatgccctccgcatgcttgaggtcacttggagttcgctgccccctgatcctcctgaacatgaggtagagctggttggaccccccagccaagtggcagacactggttttggtggccacagggggtggcccgtgcgacagaggcacatgctgaggcctgctggtggaggaggtagtacctttgaagatgctgttgaccacctggccacagccagtcaggggcctggtggtggggggcgtctcctgagacaggccagcttggatggcctccagcaactcagggataacatgggctccaggagggaccctctggtccagctgccccacccagctgcccttatcagctccaagtccctctctgagcctttattgaactccccagacccactgctctcctccttttcccaccctgattccccatcttcctcatctccaccatccacccaggaggcctctcccactggtgatatggctgtaggatcccccttgatgcaagaggtaggctccccgaaagaccctggaaagtccctgccacctgtaccaccaatgggcctgcccccaccccaggagtttggccgggggaacccattcatgctgttcctctgcctggccatcctgctggagcaccgcgaccacatcatgcgcaatgggctggattataatgagctggccatgcactttgaccgccttgtgcgaaaacaccacctggggcgcgtcctgcgccgggctagggctctctttgctgattacctgcagtcagaggtgtgggactcagaggagggggctgaggccacagccgcatcttgatcaggctttctcaagccctccatcggccccaccagatctccattctttgccatgagggccaacacatgagaccccacctccctccctgcctgccagccctagacttgttggagcatagagcccttcctccccaggcctaagtatgtggagctctgctttggcactgccccgcagaggccacgcctatttattctgtttctgttgttttgtttttaacaactatactttgcacacatgaaaaaaaaaa

SEQ ID NO: 60682 - DNA, 1604 bp, Homo sapiens
ctgagctcggtcgcggctgcctgtctgctccggcagcaccatgtcgctcttggtcgtcagcatggcgtgtgttgggttcttcttgctgcagggggcctggccacatgagggagtccacagaaaaccttccctcctggcccacccaggtcgcctggtgaaatcagaagagacagtcatcctgcagtgttggtcagatgtcatgtttgaacacttccttctgcacagagaggggatgtttaacgacactttgcgcctcattggagaacaccatgatggggtctccaaggccaacttctccatcagtcgcatgacgcaagacctggcagggacctacagatgctacggttctgttactcactccccctatcaggtgtcagctcccagtgaccctctggacatcgtgatcataggtctatatgagaaaccttctctctcagcccagctgggccccacggttctggcaggagagaatgtgaccttgtcctgcagctcccggagctcctatgacatgtaccatctatccagggaaggggaggcccatgaacgtaggctccctgcagggcccaaggtcaacggaacattccaggctgactttcctctgggccctgccacccacggagggacctacagatgcttcggctctttccatgactctccatacgagtggtcaaagtcaagtgacccactgcttgtttctgtcacaggaaacccttcaaatagttggccttcacccactgaaccaagctccaaaacgggtaacccccgacacctgcacattctgattgggacctcagtggtcatcatcctcttcatcctcctcctcttctttctccttcatcgctggtgctccaacaataaaaaatgctgcggtaatggaccaagagtctgcaggaaacagaacagcgaatagcgaggactctgatgaacaagaccctcaggaggtgacatacacacagttgaatcactgcgttttcacacagagaaaaatcactcgcccttctcagaggcccaagacacccccaacagatatcatcgtgtacacggaacttccaaatgctgagtccagatccaaagttgtctcctgcccatgagcaccacagtcaggccttgagggcgtcttctagggagacaacagccctgtctcaaaaccgggttgccagctcccatgtaccagcagctggaatctgaaggcatgagtctgcatcttagggcatcgatcttcctcacaccacaaatctgaatgtgcctctcacttgcttacaaatgtctaaggtccccactgcctgctggagaaaaaacacactcctttgcttagcccacagttctccatttcacttgacccctgcccacctctccaacctaactggcttacttcctagtctacttgaggctgcaatcacactgaggaactcacaattccaaacatacaagaggctccctcttaacgcagcacttagacacgtgttgttccaccttccctcatgctgttccacctcccctcagactagctttcagtcttctgtcagcagtaaaacttatatattttttaaaataacttcaatgtagttttccatccttcaaataaacatgtctgcccccatggt

SEQ ID NO: 60683 - DNA, 4471 bp, Homo sapiens
ttcaaactaaaaactctaacgaatagacagtgagttttctttgacatagagatgtcgcagcctgagacatcgcagtctgcggagaaagttacttgtaggcgagtgtatttactattgtaccacgcaggcattgaacattctcattaacatgataatacaatttgctggtaaacatttaaacacacagacattagtttcagtatctcaacatatttttggtcataaccaaggaaatacatcaaaataatggacaaccattggctaatattttacaagcaaatatttaactctgcatagtttataccaataggctgtggccaataaataatgtcacccaatcctcatccacctattaactggcccacaagaagccctaacattccattttaaattatggatatggaaatggctctattggggtagtttcaacatatccttaaatgtttgggtgtttaaccttgaatacaccgaaaaaaaaaagtactaaactggactaaagaaggtgtgtttggttaactacaaatatgtcatgttcacatagtacattcctaacatgaaggcaaatatttaaatagaaaaactagcagtccaaaaaatgtgaatgtgcaaattgtgagtaaaacattgcatttaaatttgcactcatttgcaagttacagtactagctcagtataaacactaacaggaaaaatattcagcaggaaagaatggaaacggcctctcacagcagagaactggtcactgcgcactgctccacagctaagaaagttttccaggtggtctagcgctcctaacaaacaccttatgattatccttcattcaacagaggaggagactgcaggcatgcttcagtcagtggtaagaacaggaagaaaaacccaaatcagcaacattttcttccttaatttggtataaacgtccttttcattatttcaagttactaatttgctaatctcaaatgttttctgaatcaggtttggctaaatgctgtaaagaatagctatccttcatacaatactaggttttattttttttagtatgtcagcataataaggtacatggcgcattcattccaccaacctgtttagataatactcagcttgggtcatattcaaattctacacagagattctctgttttcaatacaactgcttagaaagcagaattgcctagtgatgactgtagtgtgccttttaactgaaatgtatataaaaataaaaccccaatctttatagaatgtcaagaattctgttagggatgttaaaagcattgggcaaaaccctggttttcagcgtgccatctgcaccacaggagaagagccgattgccctggatgatgtcaatctgcatgactccagccccaatgtttcgaaatatggactgcttagcatgttcacttttaaatgaatgaattaggccatggcctgtcaatctccaaacctttatgttaccttctgctgaacctgtggtaaaatattcctcatagggatccaaggccagagccttaatagctgagtcatgggcctggaacgtgtgaatgagctgcctttgcctgatgtcaaaaatgcagacgtgtcctttcctaccccccgagattaggagttgctgtttgggtgcatactgcagtaccgtggcaccatgatcgtggcacgtgaaaccatgaatgaggctgtttccgggtgatattaatgtgtcccagaggcaaacatttctattgtcattggagtgtccagatgtggcaactagacttgaagaggtaataaatgcaaagtcacttgtggctttactgtggcactgccaactcatataaggtttaggatttgatgcagtttggttaacttgccagatactcagaaaaccctctccatccgcaacaccacacttgttgccttgtgaattaaaatataatctagtaactcttgcattgccagcttgacgaaagcagacaagttgctgaggccgcgtccattcaaacattcgtacactgccgtcctgagcacctgtaagatagtattgatggactgggtgtgaagtcattctcttaacattatgtagattccttttcataagcacactagctccagtgctagtctgtccagtgcccagccatggcagagatgaaggtggatgcacctgacttgctgaataggatgttgcactgggttgataaagagttgtagtggaaccacgataatcaacatcatctgaacttttggattctctgtcatattcttctccgatccatatgtatgactgacaggccagtagagaagtaacatcaagttcttgaacatcatgtgttgaagccaaaacaatttcattacaatttgccttattaacagaaaatgccatgatcatatcagattccttatggatgactttcgcctttccacctggatagcccagatcagcttcaacctcactctgctttcttttcttagtgaaaatatatctaataaatgtctcttgaaggacctctttgtttaacaaggaaatgccaaagtcgtttgactggaaatgccaaaaaaatcccgggacttaatgggggtattttcaggttctagcattgctttattttcgaaaataggcttggtccagctcccactgaaaggtcagttggatatgtgttgatatagttagggggtggaccttcaaactgatccattttctcttgcaagatctgttcccagttctccaaggtttttaatcacagcaatacctaatggtgatgttacaggcagctcagagaattccagtccagcaataggaaagaaattcttgacattgtgaagtgctagtttaaccattgtcaaatgtagaagagcccagctataggaatttggatcttggtgctcctgtatttgtgtatctgaaaaaaaggcatcatcttcttcatcactatgaatgctttcatcagaatcatatataacaccactatcagacaaaggaagaaatggctttgcaacaaaataatcccacatactaagttcgggaggaataaatttttctttgtaagatggtctttctgcaggcaccggtggtggggtagcatcttttacaggccttccagggacgagcattctcatgttaaatctcctacggtgtttatctatgtcttcagaaaggacaggaggtgctgaaatattttctgattgtcttcgaggtttcacaacaagttttacaccgcctccaaaaacagcagcccacattcgattatttaatgggtgggctgcaagccgaaataattcactggaggaatttgtggcaagagcatgtatcaataaacttaagtaaacagcaacaacagcttcacatagcaaaatgttcagttttggctggtcttcatcttgggctgaactcaaaagattaataagtgagctcacaccaggccattgagcaggagatgaatttggtgttgcgtgttcttcaatgctttctgtccttagtcttctacgatcacttaaaagaagtccttgataagccattcctgtaaactgatttccttctgtttgactgctgtagctatgactgtcacataatgcttggtaaattgatgcagaaagtgatgctgctagtgaatgaagtgtgtgcaccttcacatcttcaatactgggatgaggtggtgttttcatctgaacaatagtataaagtatatcatggatgtgattatttaagtacaatacaggattagctatgactgtttttgttgacgcaatacttgctgaaagcagaggtagggtggtaggcagtggtagtggagactggagctgctttactgtagtttcctgttgtgattcttgtagcaaaaatttgagttccatccttactgaagccaaaccaccaccttgggccccatgaaggctacagtagctgagaaatactctcaggagatcttggtttttctgcaaccacgactttcgtctttctgcatgctctcgtttggcctgcaatcttcttctttctatttgatggcgctcataggaaccaatatctggtttgtctaccatttcttcctgatccagcagatcactctctactttggaatatgtcttactggaatactctttaataactgattcatgattacatatctcatgcaaggcagcaatttccttttcaagccagttatagagttgaaatctgagttttcctccatctacttcataacctgtagccaatgttcttaattcagtcataaggatctttaaacaagctctgaattttagttgttcagcaatcacatcaacttcagtatcaccttcaggatcatcctcttcctgaggtgttaataacatgttagggtctgaggccttctgatctgattgtttatctttttccctggcatctgtacttttcatcactaaaccaacagcttcgtcttcctcttcatctaaggcactgtcgtgatcttcaccccaatcaagattaagaggttcctcatcaacttttactattggctgactccagtcata

SEQ ID NO: 60684 - DNA, 2078 bp, Homo sapiens
cagaataagaaataactggtatttgtcaagtgacaagcttttaatgtcagaatggctcacctaaagcgactagtaaaattacacattaaaagacattaccataaaaagttctggaagcttggtgcagtaatttttttctttataatagttttggttttaatgcaaagagaagtaagtgttcaatattccaaagaggaatcaaggatggaaaggaacatgaaaaacaaaaacaagatgttggatttaatgctagaagctgtaaacaatattaaggatgccatgccaaaaatgcaaataggagcacctgtcaggcaaaacattgatgctggtgagagaccttgtttgcaaggatattatacagcagcagaattgaagcctgtccttgaccgtccacctcaggattcaaatgcacctggtgcttctggtaaagcattcaagacaaccaatttaagtgttgaagagcaaaaggaaaaggaacgtggggaagctaaacactgctttaatgctttcgcaagtgacaggatttctttgcaccgagatcttggaccagacactcgacctcctgaatgtattgaacaaaaatttaagcgctgccctcccctgcccaccaccagtgtcataatagtttttcataatgaagcgtggtccacgttgcttagaactgtccacagtgtgctctattcttcacctgcaatactgctgaaggaaatcattttggtggatgatgctagtgtagatgagtacttacatgataaactagatgaatatgtaaaacaattttctatagtaaaaatagtcagacaaagagaaagaaaaggtctgatcactgctcggttgctaggagcaacagtcgcaacagctgaaacgctcacatttttagatgctcactgtgagtgtttctatggttggctagaacctctgttggccagaatagctgagaactacacggctgtcgtaagtccagatattgcatccatagatctgaacacgtttgaattcaacaaaccttctccttatgggaagtaaccataaccgtgggaaattttgactgggagtcttttcatttggctggggagtcgcttcctgatcatgagaagcaaagaaggaaagatgaaacctacccggaaggggcacccacttttgcaggaggacttttttccatatcaaaagaatattttgagtatattggaagctatgatgaagaaatggaaatctggggaggtgaaaatatagaaatgtctttcagagtatggcaatgtggtgggcagttggagattatgccttgctctgttgttggacatgtttttcgcagcaaaagccctcatagctttccaaaaggcactcaggtgattgctagaaaccaagttcgccttgcagaagtctggatggatgaatacaaggaaatattttataggagaaatacagatgcagcaaaaattgttaaacaaaaagcatttggtgatctttcaaaaagatttgaaataaaacaccgccttcagtgtaaaaattttacatggtatctgaacaacatttatccagaggtgtatgtgccagaccttaatcctgttatatctggatacattaaaagcgttggtcagcctctatgtctggatgttggagaaaacaatcaaggaggcaaaccattaattatgtatacatgtcatggacttgggggaaaccagtactttgaatactctgctcaacatgaaattcggcacaacatccagaaggaattatgtcttcatgctgctcaaggtctcgttcagctgaaggcatgtacctacaaaggtcacaagacagttgtcactggagagcagatatgggagatccagaaggatcaacttctatacaatccattcttaaaaatgtgcctttcagcaaatggagagcatccaagtttagtgtcatgcaacccatcagatccactccaaaaatggatacttagccaaaatgattaagtgttccttaaaattaagttgaaaaaggaaatattctttctcataaaactgtgactaggcatacactgtagtttttgaaaattatgcaaaagcagctaaatgtaacttattccaagtgca

SEQ ID NO: 60685 - DNA, 1835 bp, Homo sapiens
cataattttggtgatatcaatatcaacttaacactacaattaggaaccaatagtacttaaagagttcatggcgcacagtaagcgcttcataaatattaactattagcagaacaggaaaaggtgagagaaaactagcacgcagtattttctaatcctagttttgagactattacacacttaatcccttcctcataaatgtaacccaaaaataatctgtcatcattctatataagacagatgtcttcacttattgttacttaggggaaatcaaatcataaccttttaataagacacaagaaaaactctctttgcactgatttttattaaacaagtaaggctggtagtggaacatatttttatttaatgcataaacatataagtcccttattagagaaactgtatatattgatgaatatggtcaatggtcacatctatgggttaattctttaaaaatcagaaccaataattaggatagattttatgctctcttcattacattgtgaagtgtcttgtgtagtcatattctattgttggaatgacagcttgtacaaatttcaagaaaataagaagatacatatgaactccaagttctccccctccttctgcaacagtctcaatgattttcttcatcacctcagcatgcctgcatgggtgaactgaacacatgggaggtggtggcagatgagggtgattttcaatggtcactgttttcttcacatgatcctgactgatgtcttcatacatgtgctcaactgttaaaggctgccgttgctcatcatagccaaacaaccataatcgtggagtctggtaatatttatcataagtgatgtaaaggtcataagttctggtttgcaaaatagcatcttcaccgccagcatcagttttggctttacaagcttctactattttccttgtatctagggtagcctcatctgtttccaacaatccactctcttcatattcttccatatctgcagcttctccttcatcttcatcttcttcctcttcacatagtgctgagcaatcttgaagccttatattgtccttattttccagtgtgatctctttaacggcttccgttattcctgtaatacctgtgttgtgatatgtatctacccatccgccatcaccatcatcttcttcaatgatagcttccaattcatctgaatattccatctgtttgcaccgcttatagcacggcacatttttggttaccaaaaattgtttgcctgttggtaggtatgccttcactttcaattcttcccctgtagcccattgccatgttggacagtggtggactaggtgatctccagctgccacaaactcttctggggtaattacacctgtttccttaaactttgattccttgaggaccggggtcaggtactcagccacttccagtgcctttcccttcacagtattaatcacattctgcatcctggggccggagtagcggccggccccgcgacgggatggaaagtgcagccgtgtcaggggccagggagtcagaaaatgtcctcgctgccaccgactcgcatcagcacccggctggcagcacccgaggggacgggacgcgacgcgacgggacgggcgggacgagggggcggggcggcaggcacagcgcgcgaagacggggtgcgcgatcctcgcaccccaggcagcccgcgacggaccggacccagctgtcacccagccgcgagggagggcagcggggccgaagggagacctgaggtgagaagcggacgcacacgcacccctcgccctttgggagctgtctgtcctcgctttgcttcactcgcgcccttcgtgttcccttccttctccgtgtgccgaat

SEQ ID NO: 60686 - DNA, 2025 bp, Homo sapiens
tccctagtccatgtcgtggaattcggaagaggcattgaggactttccttacctgtttttccagctcacccactgccagcagaggatctgctccgtcacccaggctggagtgcagtggtgtgatcacagctcactgcagcctcaaactcctgggctcaaccagtcctctcacctcagcctcctgagtagccgggattacagaatgctgtccagtttcaacgagtggttttggcaggacaggttctggttaccacccaatgtcacgtggacagagctagaagaccgggatggccgtgtctacccccacccccaggacttgttggcagccctgcccctggcgctggtcctcctggccatgcgccttgcctttgagagattcattggcctgcccctgagccggtggctgggtgtgagggatcagaccaggaggcaagtgaagcccaacgccacgctggagaaacacttcctcacggaagggcacaggcccaaggagccccagctgtctctcctggccgcccagtgtggcctcacgctgcagcagacccagcgatggttccggagacgccggaaccaggatcgaccccagctgaccaagaagttctgtgaggccagctggaggtttctcttctacctgtcctccttcgtgggcggcctctcggtcctgtaccacgagtcatggctgtgggcaccagtaatgtgctgggacaggtacccaaaccagctaaccttgtcctgtcctgctgcagactctgaagccatccctgtactggtggtacctcttggagctgggtttctacctctcactgctaatcaggctgccctttgatgtcaagcgcaagggtgggggaccttccagcatcaagcctcgtccccactatgacccaccgtctactgcaggatttcaaggagcaggtgatacaccacttcgtggcggtcatcctgatgaccttctcctacagtgccaacctgctgcgcattggctctctggtgctgctgttacatgattcctctgactacctgctggaggcctgtaagatggtcaactacatgcagtatcagcaagtgtgcgacgctctcttcctcatcttctcctttgtcttcttctacacccgactggtcctctttcccacccagatcctctacaccacatactacgagtccatcagcaacaggggccccttcttcggctactacttcttcaacgggcttctgatgttgctgcagctgctgcacgtgttctggtcttgcctcattctgcgcatgctctatagcttcatgaagaagggccagatggagaaggacattcgtagtgatgtagaagaatcagactccagtgaggaggcggcggcggcccaggaacctctgcagctaaagaacgggacagctggagggcccaggccagcccccactgatggccctcggagccgggtggccgggcgtctgaccaacaggcacacaacagccacatagccgggcggggctggctgtaaggggttgcccccccgccagtgccttggatatttctggggtgactggactggcgcccctgggccacctttctggagacagggagggccccacccggggtgggtgggaaggctgatgatctgtctccagccccttccttctgcccacccacccttcttccctctgggcaactggacagatctgggagccagcagctggatgctgtggctggccagagacacctccaggctgtggcctgggggctggggggagccccaggctgaaaagggtccaattaaaacaaatggagccaaattttctgcctgagaacttgggtccctatcaaagttccttcttcatccccagagacccccgagggagccaggcctctgcttacataccccacctacgggatacccactgcacttcagcctgggcaacaagagcaagactccatctaaaggaaaaagaaaaagaaaaaaaaaattcccaaaaagaaatggccaataagcacatgaaaagatattcaacattgttagtcataaaaataatgcaaatc

SEQ ID NO: 60687 - DNA, 2088 bp, Homo sapiens
aaggtgtggaaatttcttttattttccccaaataaactcttctcccttatggcatcatatatgaatgatgagaaatcctaaatttagtttattccataaagtttaagaaataggtcaggtttggcatctgtttatctccaccaatccctttgttaatcaacacgttgtggatgtgcaaatgccagcaactgttttatttaggaaaacaggcatggcaaagcaatagtcttttccctggggtcacaaactgagcatgtgacagagctgaaaacagcgaaaaaggtttactgtctgggagtcccattggggattctacttcctcaacagagcctcagggcatctgatttattataaagtactctgagtcataatgacttaattgtgacttttatttaactagcatgttcatgtaactagaatgcacctgtacatgaattttaaaatgtcatactgtgctatttttcttaattctgtaagggtaacaagtaactcagtaatgacttaaaacttgctatatattttcaatactaagataaaagttttaaccaaacttacaacaggcacattttggcagttagtgtaaacacaacattaacaagccatatgccagaagatgtttgcttccaaggccttagagaaaatgactgaacaagggcctacatccaaactaatgcttcccccttccccctgatttttgacagttgacagctcatcagttttcttctcacactggcttttttgattgcccattggtaggaatttcttccattaacactgctgatagaagtgtcttactgtaggctcaccctttgctctgcccttctgaggtccttctgcagcttatcttttgtcacttctcctttgtcaactgatctctagtttgtccctcaggaataccaaggagcgatctaagtgacttgatccgggctaagcaggcagggaagaacaggtctgtttttccacccactccttaatcagttggtgggagatggctaacttagggggcagccagaatgggaaagtcccattctgttgctgagtataggggccctttctcttcagggctgtggctacctcatcatgactgaaccaggcagctgtctctaattctctcaagttcacctggatttctgtctgccctggtttcacagttgcatggcaagcaatcatgagtgagccactagggaagggccaatgctgggatgcatagtactgcaggctttccacctccaatcccacctcttctgcaacttctcggcggatggtctcttccacactttcacctatatcacaaaaacctgccaaggcagaatacattcccttgggaaaggagctttggcgggcaagcaggcatcgggtcccatctgacaccagcgtgatcgccacaggagccatctgtggataatagattatattattggaagggcacacacgcttgctgccagccacgttccttcttggtgggctgccccacttctgcctgcaagaactgaatgagcatcatgcccagcggagaagagcttgagccgtggacagcaaggaggcatcccttgcattgaagttgaaagagtgcctttctcagctcaatgaaagaccccttgagctctgtctccatttcaggtttgtgtaaggaggcacttatggaaaaggagctatccagacctagatccagagcaaaccatgcttcctgctgctcagagcatccaatcagcacagaatcttctattctttgtgcatcctgtccaaatttacccaggagcctttccaactctaagaaacagaaaggggaagggagaaaagcaaaacacaagggtttctattaaatcactacagccatattagactcacagaaaatcatctacttcagcttaaagtgggtatacttggcttccaactgcagctaattagctatgtaaccttggtctaaccatttaacctctccaggcctgttttctcattagcagtctgaggactttagaccaaagaaggaattcttgtataacattgtattactctatggctgtatcatgaaaggaaaatatcccctagttagtaagatgcatgacagttaacttattaagtcattga

SEQ ID NO: 60688 - DNA, 1008 bp, Homo sapiens
tttcgtgccgagaccggaggatgttccctgctcaggaggaggccgacaggaccgtgtttgttgggaatttagaggcccgagttcgggaagagattctgtacgagctgttccttcagtttcttataggcggggccactaaccaaagtgactatatgcaaagacagagaaggaaagccaaagtcttttggatttgtctgctttaaacacccagaatcggtgtcttatgccatagctttgctgaatggaattcgtttatatggaagaccaattaacgtgcagtatcgatttgggagttctcgctcttctgaaccagctaaccaaagttttgagagctgtgttaagataaattcacacaactacaggaatgaagaaatggtggtgggcagatcttcctttcccatgcagtattttccaattaataatacttctttacctcaagaatattttctctttcagaagatgcagtggcatgtgtataatccagtgctgcagcttccttactatgaaatgacagctccacttcctaatagtgcatccgtgtcttcctcactgaatcatgttccagatcttgaggctggacccagctcatataaatggactcaccaacaaccaagggactctgacctttatcagatgacagctccacttcctaatagtgcatccgtgtcttcctcactgaatcatgttccagatcttgaggctggacccagctcatataaatggactcaccaacaaccaagtgactctgacctttatcagatgaataaacgaaagagacaaaagcaaacaagtgatagtgatagtagcacagacaacaacagaggcaacgaatgtagccaaaagttccgaaagtctaagaagaagaaaagatactagtattacctacaaatgaaacttacctacactgatcttagttctcttatgaaaaaaataagatgttatcccatcaaataaacaatgtcatggctaaaaaaaaagtcgacgcagccgcgaatttagtagtagtag

SEQ ID NO: 60689 - DNA, 2134 bp, Homo sapiens
gcacaacatagaataatgctgaatcacagtgagaatgtcattccctttacagtttccttttatcctctgactattccagagacagtgcctcatgctggtgctggtaacatctccctcactgccacaaagaaagagcctaagattcggagcctttctaggcattagtttctagctagaactgaacaacattttttgtgttcatcttacttattttgtggttaccttttatttatggcaaactgatactggttttccacttggagcaggattcatttttttaaaaaaactttaaaatttaaaagataaatattaagaaaataatacaagtagtactaaagagactgaagtttgggaaacaacggctatagtctgagtcatattttttagacgtgatttcaaaagaaacaataaatgtggattagaaaggaaacatccattactgtattttcgatacttgtgatgttccacagacgagctcatcacagtcttcttctacatcaggtgatttccagagttaagattcaagcaaaaatataaaagtaaaaagaaccaatttcacaccatcttgggactttataaactcgtagtaccataaatgtgcaaataatctgaaatttatccacagtcattttttttaaaacataaacttttccaatttctgcagcttttttaatttggtctatactaaatgcctcacaaaaggcaaacttcaggttgtagagttcctcctgccttggtcctcagagcaataccacatctattttctgaactcttcaggaaggattcaggactgctgggccaagacttccaatggcatatgactgttcttccactgttatggccttgaagagagaaatcccctcctcctctgaatgatagtctcatggccaacattcttctgagaggactcttcctagcaggtcttccatgctcacaggcacatcatgctgattttaaaaaaggaaagttggagagaaagaaagcagagcttctcctctgtggggaacagcttcttcatcacagtgcagttatgatatgttccctccttatccccctgaagccaaggcaatagatctgaaggatggtgtcagacatcataatcgggagccttgccctgggcttgccttagccagatctgtagtgtaacaaatgctcccacagtcacatgaaagaaaagctgccagaggttgcgcagttcatagagatacatgttgcatagacagattaagccaaaagtcaaaaaagatttgacattccgccagccggtgtagtagacaagtaaataacactggtaaaggcaggctgctgttccaaggaaaaatgcaatgatgtaattaaaatcatcaccatcactctgcaggagactttctatagcatgaaagcctcgaattaaattcagagctccacataaaagactaaggataaatcctacaatccctgacagagttgctggttccagtcgctggtgagcagaagaaatcttaccagcacctttacagtcaacagaaaatgctgatgtgactccattggctgaccccagttcgcacatggaaatttgataaggaggcctcagcttgatttccgtctgcatgtcagaaagatttatctttgttgaaagagacctgggattattatatcgctgcttggtcctctgaatgaagttatcaaattcaatgaaacagtatggtctgacagcagtatttgtcttcatcatgttataagtagtaatgaactccttctgaagctcatccaggaaagagaaggcgagaacatttgggtaattttcagtgcacaacatcatgtagctcactcccagagagctaataaaattaatgttataatgtccagttttcagtgtacatctatcaggaagttgagcaagtttcctcgaaagcattttaaaatactttctgcactcctgcattcctgtgctttgttcataatcagtagaagcagaaagtggcagtccatctctgacacgaatgactgaggcagataaaatcatagacatttcaaccaacagagaagacttggctcctgcccgtggggtaggtcttcagtcccgagggcgaaggccgaggctgtggcgagaggcagggagcgggaggggagaggccggcagggattcgaacga

SEQ ID NO: 60690 - DNA, 3384 bp, Homo sapiens
aagctcacagcaaagagaagggtcctgaaagcaagttgccagttgcccccttcacagttgaatacaagggtgtaaggcacgaatttctggtggctccaccccatccttccagtgtgcctgtgggcccttagtctgagccactccatattaatttatatcccttgctgtgcatatgttacggaatggaattttccacgtggacatgtttaggcaatcccccctttgcaagttcccttatctgcacaaagcatctcatgctgtggagccagtggcaggttctccgggacccttcccttactgtctgcctaaagcaaactggctaaattctttcacaagtttttctttttcttttttttctttttctttctttttttttttccaatttgcattagaaagcttttattgagaccaggttaaccagtggcctgaaaatattacaggctgaaggaaggctgaggaaaccagtatgaaggcagctcaaatgatgaactaaatatattccaaaggtactatttatacttaaggcagttttaaaagtgaggtcttaaccaaaaagcctttacatggcattcaaaacaaaaacaaaaacaaaaaaaacacggggggggggggggcacttaaatctcttggattgactaaaagagctaaattatgtacccaaaatctgtacagcaggggcctgttttcagcaggaaagcctatgtacaagtaagaacctcttactcttgtaacattgtcctgttttgttttgtcttataagaatatataactcctatcctcacagagttagtccataaggcctcagtgacctcacagaaatatggagttaacctctactacagaactatttacactgcactgtaaatacacatatgtgtgtccaccctcacagctaagctgtcaatgccttgagtgaaggggttacagctcattcgttttgcatctacagtgacaatgaataggcactcaatacatacttttttttgcatgaatgataaatgaaatgattttacattaccaccactatttacattaacattcctaccattagccgtctccaaaataaaaacacaaaattgctgccacatgttcagcagttttcacaatacagtgtgtctggactttttaatgtaaacaaacatgcttgatttaccaattttcagagcaaggacacaaacttagcattcttctaggaatggaaaacttgccaggaagttacttcattctttttttttttttcaaaagtgcatctcgtagtgccaactgtttttctcggaaggaacgcttattttttgaccggacattctggctataccgcatcatcataaagttcttctgttttttcttctctttatttgtcgaactggaaaatggatttgttttggttttcttcctcacaaattcttttcggtctgtctttccagccattgcagttgctagtcttgtctctttgtcagactttggctttttatgaaggcgttcaatgtcccgaagagaaagtaattcacccctgggctcttcatcactgtctatttcaatgtatttcctcttctgggatttcccgggggcagcatcaagttcttttctcatttgggccatgcggattttctggaagtcttcctgagttaaaactcggctagtgctgatggctgcagctttggccttccgctcctccatgggcatgctgttcagcttcttggagatttcttgctgttcttcatcggaagagtgttgcacatcaatccattcaccatcagcatcctcctcctcactgagactggtactttcccatccatcttcatcattttcagcattctcttctttctcaacttccagaacttctgctcctggaatgtaatctttagcatctaattctccatattcttgtactcttgcttctatggaggcctctgtaggcttaccccggaatttcttctgcagcatctgaggattcagtgttcggaagaggtgaatcaaagttctagcagacatcattacattcttatccttgtgtgttttatactgagccaggtcttggagaagttcttcagtcatggccagaggacatcgagctgttatctcctttatagcattgattcctactgtcatgacttctccagagttcttgtcggtaacaaaattgtttgccacagtcataagcaatgattgaataatctctgggggtactaggtgatgagatgcttgtgcagcaaacagaaggatcttggttacttctctttggtggggctgcagaaacctttgcaaaaagggatagaaattgaagaggaaaagctcatgaattcccaccaatctggagataaggttcatgagcatcatcttcacttcaaacctctccttacagcactcaagctgctttagtagtttttccgcaaaatcttggggatcatgaatcaagtgaatggctgaaaagttaaacacctctggttttttcttcttcctgtgtttcttgagcactttcattgccttttccaactttttcttgttttgggaacttttcttccctgtagcatattgtactagcaggtctcttgctgttggtccatcatcctcagattcggagtcactgtcctgtttttcatcttcatctttcccaagaaagaatgtcaaagcggcaactaatatcttggtgaccttagagaaacatgcagttgtgataacattgacagtttttgcatcattccagatgttccttctgtagagttcaatcattacatctaaagacatcttggctgcggttgcattgctatctcttaacatggtgtacatgaaattttgcaatactacattcactttattgttcttgtgttttgcatttatattcttgatatcagtcacaatatgtgtgtataaagtctttcgcagaagtttatcatggcaacgaaaaagttcaaagaagagttctagcaggcttgatggattgatgagattcttatttctcagcaagatcaaagctttgcaaaatgtcattcgcagatctggatccaatacggtatgattgcaggagagaagatctttcacctcttgaggaaaattacttaggtactctgggtagcagtgactaatctgtgccataaacatcaccagctctgcctagttctttgctgggtttatttggttgcaatttgaaaatctccacattggatttgtagtgattatactgctgtagaaactcctcgatgtaggccggcgggtctcgcttgattagattctgtaactgcggcaggttgctgggaagcttgttgttgtttctgttggacattttggctgcagacagacttcgcggcgagcagttttaaaaaaactcagacggccggcaccccgcaatccctgccagctgcagcttggactcgtcggacgcgtggg

SEQ ID NO: 60691 - DNA, 4393 bp, Homo sapiens
cgctccgtaatttccgggtcgacgatttcgtggcgcggctgctggccggcggctgagccgggagaaaggagctgcggccaccgttcgccctacttctgcgcctcggggcgggcgcgccggtaaaaatggcgaaatgggggtaggcggcgctggacctgaagagatggggcgcgcaggtggggcggttgtcagagccccctgacgtgggcgccgggcttttatcggcgatttgatctggcgacctcgggccggcgcctaagaggtcagactgcggagcctgcgggtcgccagcggccccgccgagagccggaggcaatggatgaacagagcgtggagagcattgctgaggttttccgatgtttcatttgtatggagaaattgcgggatgcacgcctgtgtcctcattgctccaaactgtgttgtttcagctgtattaggcgctggctgacagagcagagagctcaatgtcctcattgccgtgctccactccagctacgagaactagtaaattgtcgttgggcagaagaagtaacacaacagcttgatactcttcaactctgcagtctcaccaaacatgaagaaaatgaaaaggacaaatgtgaaaatcaccatgaaaaacttagtgtattttgctggacttgtaagaagtgtatctgccatcagtgtgcactttggggaggaatgcatggcggacatacctttaaacctttggcagaaatttatgagcaacacgtcactaaagtgaatgaagaggtagccaaacttcgtcggcgtctcatggaactgatcagcttagttcaagaagtggaaaggaatgtagaagctgtaagaaatgcaaaagatgagcgtgttcgggaaattaggaatgcagtggagatgatgattgcacggttagacacacagctgaagaataagcttataacactgatgggtcagaagacatctctaacccaagaaacagagcttttggaatccttacttcaggaggtggagcaccagttgcggtcttgtagtaagagtgagttgatatctaagagctcagagatccttatgatgtttcagcaagttcatcggaagcccatggcatcttttgttaccactcctgttccaccagactttaccagtgaattagtgccatcttacgattcagctacttttgttttagagaatttcagcactttgcgtcagagagcagatcctgtttacagtccacctcttcaagtttcaggactttgctggaggttaaaagtttacccagatggaaatggagttgtgcgaggttactacttatctgtgtttctggagctctcagctggcttgcctgaaacttctaaatatgaatatcgtgtagagatggttcaccagtcctgtaatgatcctacaaaaaatatcattcgagaatttgcatctgactttgaagttggagaatgctggggctataatagatttttccgtttggacttactcgcaaatgaaggatacttgaatccacaaaatgatacagtgattttaaggtttcaggtacgttcaccaactttctttcaaaaatcccgggaccagcattggtacattactcagttggaagctgcacagactagttatatccaacaaataaacaaccttaaagagagacttactattgagctgtctcgaactcagaagtcaagagatttgtcaccaccagataaccatcttagcccccaaaatgatgatgctctggagacacgagctaagaagtctgcatgctctgacatgcttctcgaaagggtgtccctactcagcttcctgtaagagaggccaaagaggatgaagaagatgaggagaagattcagaatgaagattatcatcacgagctttcagatggagatctggatctggatcttgtttatgaggatgaagtaaatcagctcgatggcagcagttcctctgctagttccacagcaacaagtaatacagaagaaaatgatattgatgaagaaactatgtctggagaaaatgatgtggaatataacaacatggaattagaagagggagaactcatggaagatgcagctgctgcaggacccgcaggtagtagccatggttatgtgggttccagtagtagaatatcaagaagaacacatttatgctccgctgctaccagtagtttactagacattgatccattaattttaatacatttgttggaccttaaggaccggagcagtatagaaaatttgtggggcttacagcctcgcccacctgcttcacttctgcagcccacagcatcatattctcgaaaagataaagaccaaaggaagcaacaggcaatgtggcgagtgccctctgatttaaagatgctaaaaagactcaaaactcaaatggccgaagttcgatgtatgaaaactgatgtaaagaatacactttcagaaataaaaagcagcagtgctgcttctggagacatgcagacaagccttttttctgctgaccaggcagctctggctgcatgtggaactgaaaactctggcagattgcaggatttgggaatggaactcctggcaaagtcatcagttgccaattgttacatacgaaactccacaaataagaagagtaattcgcccaagccagctcgatccagtgtagcaggtagtctatcacttcgaagagcagtggaccctggagaaaatagtcgttcaaagggagactgtcagactctgtctgaaggctccccaggaagctctcagtctgggagcaggcacagttctccccgagccttgatacatggcagtatcggtgatattctgccaaaaactgaagaccggcagtgtaaagctttggattcagatgctgttgtggttgcagttttcagtggcttgcctgcggttgagaaaaggaggaaaatggtcaccttgggggctaatgctaaaggaggtcatctggaaggactgcagatgactgatttggaaaataattctgaaactggagagttacagcctgtactacctgaaggagcttcagctgcccctgaagaaggaatgagtagcgacagtgacattgaatgtgacactgagaatgaggagcaggaagagcataccagtgtgggcgggtttcacgactccttcatggtcatgacacagcccccggatgaagatacacattccagttttcctgatggtgaacaaataggccctgaagatctcagcttcaatacagatgaaaatagtggaaggtaattgccaaatcaagagaactgacttgcaagctaccttgaccctgaattttgctgtagttggtgctcaaatttgtcatcagtcagataatcagatttggtcttatttcttcattatctcgacctgaaatagtaatttggaaactgttggaaggtggcacagtttagtctaagacagcagtagtacatgggaaaaacagtatgggaagagttctttgtaatgtaaggaaataacaatgtagttctctattaatttagcaaatttgtacattcacaaaaggcagtttgtctactacagcagaaggctggttaactgccagaaaatgtacctccaggccctgcatgccgtcagtaacccgcccggcattggtgctctactgtctttggctagagcttagttgtgtttaaataatcatctttatatttggggttttaattacagttccattagtgcctgtagattagtgaacagaaaattgctttggaagagattctgccctgtagacactatgtgaataactgaagtaacactagactgaatctcctttttggagtatgtatcttctctcacttgttcaagtacaggcacactgttcaaccgcatggtatctttctgttgtgtgacttctacaaatgtaattttaaatgaaattaagttaacatggattcattacgttcctggccctgtagacacgtgtaagattatttaaaattctttcatttttttctgcctcttactatacgactgtagtgcaacaaatattttaaagcccccttttcttctttattttcattagttgtacattgatttcagtgtcaacacatttaaagattcattcatgttgcacagtggcttacatgaacgtgaaactgtgatataaggttttctttcatactcataattagcccaaaacagttgccaaactttgccattgtgctcctgcatttgtgtttgagctgctatatatttgtggaaattacactgaaagttgactaagagactattgaaaaagcatgaataattaaatatacatgtgagagacatctcatctgctgtattttacttagtgaatattgttcactcttccgtgtctgatgtcttgctgaatgctgtgactcatagtttacttttgttcaaaatagtttgcactttttgttaataaaatcaacttgagaaaaaaaaaa

SEQ ID NO: 60692 - DNA, 3524 bp, Homo sapiens
  misc_feature (1)...(3524): n = a,t,c or g
aatttacccctgacgcggcggcggccgacgggaagctgtgtgtgcttaggtcgtggtggccccggtggtggtgggctccgggcgggctcgcgtcatcctgcccccgctgcgatgcatccgcggcgcccggacggatttgatggcttgggctaccggggtggtgcccgggacgagcagggctttggcggcgccttccctgcaaggtccttcagcaccgggtcggacctgggccactgggtgacgactcccccagatatccccggcagccgcaacctgcactggggcgagaagagcccgccctacggcgtgcccaccacctccaccccgtacgaaggccccacggaggaacccttttccagtggcggcggcggcagtgtgcaggggcagagcagtgaacagctgaatagatttgctggatttggtattggacttgcaagtctctttacagaaaatgtattggcacatccttgcattgttctacgccgccaatgtcaggttaattaccatgctctagcattaccatctcactccatttacagtcatcaatattatgtacagtttcaacaaaactcagggacctagagccctgtggaaaggaatgggaagtacatttattgtccagggagtcacacttggagcagaaggcataattagtgaatttacacctttgccaagggaggttttacataaatggagtcctaaacaaataggagaacaccttctactgaaatccctaacttacgtggtggcaatgcctttttattcagcaagtctgattgaaacagtgcagagtgagataattcgagataatactggcattttggagtgtgttaaagaaggaattggaagagtgataggcatgggagtgcctcatagcaaacgacttcttccgcttctttccttgatcttccctacggtgcttcatggagttcttcattacatcatcagctcagttattcagaagtttgtcctactaattctaaagagaaagacttacaatagccacctagctgagagcactagccctgtgcagagtatgttggatgcttattttccagaacttattgctaactttgctgccagtctttgttctgacgttatactttacccattggaaacagttttgcaccgccttcacattcaaggaacacgcacaataattgacaatacagaccttggctatgaagtgcttccaattaatacacaatatgagggaatgagagactgtatcaataccataaggcaggaggaaggagtgtttggtttttataaagggtttggtgctgttataatacagtacacactgcatgcagctgttttacagattaccaaaattatttactctacacttcttcaaaataacatttgagatttaggttccttcactgagtagtctggaagatataatctggataatttgctatgaagttatgagggataaaagtgaaatactggggaagaaaatggattggaaagtaaaattggtactaaagcccatactgattatcttgactttgttttttaaggcataggtatatattttggatcaaaatccttccaaatttgaaaactcaataaaaataacacttattaaattctagttagtgtagcactcatgctgaagtaaacatgatcgtaggcagaagcaaaattttattataaaatctaaaacaaaactttatagagttgaatctattccatctgacttcaatatttgccaaacgtttattttacctcctagattgatgttggtatagtatccttaatacagtgtagtatattaatgtccttaatacaatcaggaggtttttacctttaagcaaataaattatgtcattattgaaaaagacttaagggatgattagacttggcaatctgtaagcaggagtataaatgttttaaattgcattgtccctatgtaactatcttaatggctatatatatgtattttataaagccatttatgtatacacatgtaacttggaatttccttcatccctacacattttctacacttacatcaccttattgcataaaacaaagtcacgcgctttctgcttgaacatcaaaatatcaaaaaccaaggtacccaaaagatacaagtcagagacaacatccttgtccatatccaaacccagtgtttcagtgctagcaacttaatttctcatacatttatagagtttggtttgctttgctagttgtgtgaatcattgggctgtttttagagccactgttaagagagaatataaaataatcatgacaattactactgtttccacatttacaaattgtgtacttaaatgaacctcatttcccttttatttctgaatggcttgtctgagaggaaacaaaattaaaattcatctgggaatttgtgcctcttgtctagtatatagtcaccactaaataatggcttccgtttttattttctttcaggttttgctttaaattttgttttccaaaatagatgtacgtggagggaaaagcaattattcttatcaccttttatttaaacttctttagatgaatactgaagaaaaatccaaaccttaaaggaaatgtgcccttgtattttatgggtgaggggaaaaagtacatttgtacatttcaacatataataagcaaaaaaattactaatcagtttaataaaaacattttgtctattcctaaatgtaatttggtgggttaagcactttgtgtagtaaaatgatatgtgtctgctctatcattagacattttaaagtttcatgtcttcacgtgaataatcacagttgtatcatgaaccatttagcgctctgaagcacagtgactttgcactgatattgtccaaccaagaatgcatacgaatagaaattcattttacttgctaaatgtcacagaaatggttactttttgcaaatagtagtgttggaacaaaaaagtgatatccaaaaagtgtaaaaacagtaataagtagcaaatctctcgtgtgtgtgtgtgtgtagttactgaaacacctacattttccatttttaaattccaccaaaagggggaaaataaaattaaacaccactgatcacattttatattttatggtgactattttagattaaggtttactttgtccaaccaatagcatttaaattgttttcaattaggatagtttcagataagagtaaaccagaaaatttcaagtttgaaaaatttctagaaaagaatctgaatagaatcaagtatttactagtgaaaatctgtaggatcctttgtttagctaaaaattaaatatttcaggatattttttggaagttagcatgaaaatagttagttacataaattcattttattgtagaataattataagaccgataggctgaaccatacacaaataaggttgatcttgttttcctttttggagaaagagaatacaaattaacattaaaattgaaatgtagaaagtaaaatatgaataattttttacaaccactccaaattagttgaaacaaaatcttgaacggtcacgcacttanatttaagctagccaaata

SEQ ID NO: 60693 - DNA, 4332 bp, Homo sapiens
cctgcccccgaagtaaagttccttcactaaagtcaccagcttgcttttatttatactctctataaggaaaaaccttttcgcttccccccccgggttaaaatggccccctcaaggaattctatacaacggcctccccttttttttttttttaaagcaaataaaacatttattgttcagatttttttccattttcttcctttttacaaaaacatgcatacatacacagggtatggtgggtcctaggaaagacacacacacacgcctcactcacacacacgcctcacacacgcctcactcacacatgctcacacacattttccttcttgaccccaggcctggacccccaaaagccttgaagactttgccagagcaggcctcccctcctccatgtctgtatcttctctcccaccccttccccctcagtcaggctattcctatgtggggtgggaatcagagctatggtgggggaggccccagaaacagagaaggctccccgagtggggcagtggccgaggggtcccaggggtatgctgcgcttcttggggagatgaagggtttggcaccattggatcaggaagcacaggactcccagagcacccatctgctcccccagggcatcgccaggaggttgatgtaggggggcctctggcgagggtacggaccagatggagggctgccagtctcggctgtcagggagcttcgtctcagtgcccagtggtagagggaagcttccagagtcgtctgaggaagcaggtgagagggactacccctgcactcaggaatatgggacctcttggctccccactcccccctagcccctagagcctaggaagggccagcctgtctgaggccaagttcacatttctgtgtggagcctgaggctgtgtgcaaagtctggggtttgcagagccaggaatagtggttaagggtgagcccgacggagccggagccagtcctcctctgtgcagtcctgaggaatgggggccacagccagggcccatactggaggggagaatctgttctcgagagccctgtgggggtcgccgcccagcccgtctcctctcagggtcctctccagttcccattctagacccagggattttctcacgctccctgggataactgtcaaagcaggcaggctgttctctggttccaactacttgcccacaggatctctaaagacccaggaatgggggctattgccaggggtttagaagagaaccacggtcccaagggcatggtgggcgggcagatggttccagagccttagagattcataggttcttcctcctccaccagctgctccgagggcctatcttcagccaggatgcccacagagagggacgccagtgcggttactgcctccacttcttctttgtcagcccctggcactctaggcacccaggagtctggacaggaggccaggcgctgcatgcagccccagtatttactgtgcacccggatcacgggcctccagagagcggatggcattgaggttgggtttctgtttccagccttcttctgaaaggggatccaccctgttacccagaagagcagccacacaggcctcagaggcgtcacagatggctgtgaggtcatggccaccctccaaggccagcaccactgcgcctcctgccaggttcatcagttgctgcgtcatgtatccaaaacatttggcagaaacatggtagccacccagtggggccgggtgaccctcagcagcatcaaatccagcagacaccaggactaggtctggagagaactctcgggcgatgggcatcacgactatcctgaaagcagccaggtactcaggatcccccatgggggggtccagacctccagcccaggccacattgacattgaagccctcaccgctgccagcccctacctcatccacagccccactccccgggaagaagttgccgtcgtcatggcgatgcagggagatgtagagcacactggggtcttggtagaaggtttgctgggtgccgttgccatggtgcacgtcccagtctacaatgaggatcttgctggccttgctctgctgttgcagctgccggcaggcgatggccactgagttgaagaagcagaagcccatggctgttgaatgatctgcatggtgtcctgggggccgcaccacagcgaaaccattctttagctcacgagaagccactttgaaggcgaggtcagtgacactgccagcggcccagcgggctgcattggaggaatgaagctcattccagatggtgtcagtgtccaccccaaccccaccacagggcagcatcacaaacatccgctgtgccaggagccctgccagcttcccgttgtccagtttgaggcggctgagcgggttggtgccgtagaggagcacgtgccgctcagagtggactgactgcagctcttccagggaggccttccggcctcggagacactcacactggctccggagcccccgctcctgcagccgggaccagatgctctggatgcggccggcgtgctccgggtgcctgctgttgtcaccgcaggagcactggtgcttcagcatgaccgagtcatagatcagccctgtggtgaagggcagggtcctggcaggggtctctgagctggagaggactcgggcctggctggcaggctctggggctgacagtgaggcaggtgcggctggggaagactgagcccgggacagaggccggtgcccaccctgggccagaggaagcagcacagtgtccccggtgctgccccgggggagccgcccagccagtcgctgctgttcccagagcaacacctgagggtgctgctggagaggagcggggcctctggcctcaggctgcccatggcccagctccctgtgctccaggccatcgtccaccacctggcccggtcccccgccatctgtctccaggtcttcagccgagggtatctgccgcagccggggcttctcactcggcttggctgacctcttgatcacctggacgtgagttttgagctgctccaggcggggctgcatggggcccggcggtgggggagcggtggcactggggggcaggggctctgagcgagtccggctcagtggccagtggaggcctgacccagagagccgctcggtggtcattaaggactgggcaaagtggaagggcaagggcccaagcccgggcacagtcagcagcggggcatgagagcctgaggggtccaggaggagaatgggctgcaggcgagagggcaaggtgcccccagcctcgggctccaagccatggggcaggaagaggggagtgtgggggctccccaggattggcccccgagggcccagagtcggatgggtcctgcggtcactgtcagccctggcaggggcgggcagccccagagtgattgcgggcagcaaggacactgtcggcaaggcgaacggggccacagaagtctcctgcagccgcagccgctggcccaagagcgcctccgagcccaggatgggattggggccgtgctcgctgtcattgggggagctgcatcctgatgcgggcgtgctgctactacttggggaggagtctccgagggtctctgcgggccgccgccggaggctggggggcgcactctcctttcggagcagtggattcttcctccgctccagggacttcttgggcttatagcgcagcttcaggttgggctcagagactgtcttgcgcagagggaagtgctctggggggtcactgggcaggctgggaacaggaggcaaaaagctgctgagcatggagcgggtggctccttccgtctccaggggctccagggttctgtagggaatgccggggctgttgggatggactgttctttctagggccgcctgctgttttttcagaatcacctccgctagcttctgcttgaccacgctgctggctacagcacttcgcttgctcttgtccttgtggagaagctgccgcagctcttgttcctggggagcctcctgcaactcgggcatcggcgtgtccatggagagctgtgggcagggccggcagcccagaaagggacaaggagttgaggactgagactggtgtctagggatgctgaaggcggggaggctggggaccaagctcaaggtggccccacatgcagggagctccatctttaccctcatgggctccaccgagcgctgctgctgcaggcctgctaggaagaggtggtggtgcaggcgctggggacgctgcagggccagcaatgtgggctctggtgggggctccactgggggccgctggcccacccgcaggtccatgggctgcggctgagggcctggtgtgtctgcacagggcctggggcagcctagggacagagagacggacgcgtggg

SEQ ID NO: 60694 - DNA, 4968 bp, Homo sapiens
ctgacttagaacaacttttttgacttcctgcagggaggacccttacagtatttttggagaagttagtaaaaccgaatctgacatcatcacctagcagttcatgcagctagcaagtggtttgttcttagggtaacagaggaggaaattgttcctcgtctgataagacaacagtggagaaaggacgcatgctgtttcttagggacacggctgacttccagatatgaccatgtatttgtggcttaaactcttggcatttggctttgcctttctggacacagaagtatttgtgacagggcaaagcccaacaccttcccccactgatgcctaccttaatgcctctgaaacaaccactctgagcccttctggaagcgctgtcatttcaaccacaacaatagctactactccatctaagccaacatgtgatgaaaaatatgcaaacatcactgtggattacttatataacaaggaaactaaattatttacagcaaagctaaatgttaatgagaatgtggaatgtggaaacaatacttgcacaaacaatgaggtgcataaccttacagaatgtaaaaatgcgtctgtttccatatctcataattcatgtactgctcctgataagacattaatattagatgtgccaccaggggttgaaaaagttccagttcattgttgttcgccaagttgaacaaccagatagtactatttggttaaaatggaaaaatattgaaacctctacttgtgatacacagaatattacctacagatttcagtgtggtaatatgatatttgataataaagaaattaaattagaaaaccttgaacccgaacatgagtataagtgtgactcagaaatactctataatagccacaagtttactaacgcaagtaaaattattaaaacagattttgggagtccaggagagcctcagattattttttgtagaagtgaagctgcacatcaaggagtaattacctggaatccccctcaaagatcatttcataattttaccctctgttatataaaagagacagaaaaagattgcctcaatctggataaaaacctgatcaaatatgatttgcaaaatttaaaaccttatacgaaatatgttttatcattacatgcctacatcattgcaaaagtgcaacgtaatggaagtgctgcaatgtgtcatttcacaactaaaagtgctcctccaagccaggtctggaacatgactgtctccatgacatcagataatagtatgcatgtcaagtgtaggcctcccagggaccgtaatggcccccatgaacgttaccatttggaagttgaagctggaaatactctggttagaaatgagtcgcataagaattgcgatttccgtgtaaaagatcttcaatattcaacagactacacttttaaggcctattttcacaatggagactatcctggagaaccctttattttacatcattcaacatcttataattctaaggcactgatagcatttctggcatttctgattattgtgacatcaatagccctgcttgttgttctctacaaaatctatgatctacataagaaaagatcctgcaatttagatgaacagcaggagcttgttgaaagggatgatgaaaaacaactgatgaatgtggagccaatccatgcagatattttgttggaaacttataagaggaagattgctgatgaaggaagactttttctggctgaatttcagagcatcccgcgggtgttcagcaagtttcctataaaggaagctcgaaagccctttaaccagaataaaaaccgttatgttgacattcttccttatgattataaccgtgttgaactctctgagataaacggagatgcagggtcaaactacataaatgccagctatattgatggtttcaaagaacccaggaaatacattgctgcacaaggtcccagggatgaaactgttgatgatttctggaggatgatttgggaacagaaagccacagttattgtcatggtcactcgatgtgaagaaggaaacaggaacaagtgtgcagaatactggccgtcaatggaagagggcactcgggcttttggagagtgttgttgtaaagatctaaccaagcacaaaagatgtcctagattacatcattcagaaattgaacattgtaaataaaaaagaaaaagcaactggaagagaggtgactcacattcagttcaccagctggccagaccacggggtgcctgaggatcctcacttgctcctcaaactgagaaggagagtgaatgccttcagcaatttcttcagtggtcccattgtggtgcactgcagtgctggtgttgggcgcacaggaacctatatcggaattgatgccatgctagaaggcctggaagccgagaacaaagtggatgtttatggttatgttgtcaagctaaggcgacagagatgcctgatggttcaagtagaggcccagtacatcttgatccatcaggctttggtggaatacaatcagtttggagaaacagaagtgaatttgtctgaattacatccatatctacataacatgaagaaaagggatccacccagtgagccgtctccactagaggctgaattccagagacttccttcatataggagctggaggacacagcacattggaaatcaagaaggaaaataaaagtaaaaacaggaattctaatgtcatcccatatgactataacagagtgccacttaaacatgagctggaaatgagtaaagagagtgagcatgattcagatgaatcctctgatgatgacagtgattcagaggaaccaagcaaatacatcaatgcatcttttataatgagctactggaaaccttgaagtgatgattgctgctcagggaccactgaaggagaccattggtgacttttggcagatgatcttccaaagaaaagtcaaagttattgttatgctgacagaactgaaacatggagaccaggaaatctgtgctcagtactggggagaaggaaagcaaacatatggagatattgaagttgacctgaaagacacagacaaatcttcaacttatacccttcgtgtctttgaactgagacattccaagaggaaagactctcgaactgtgtaccagtaccaatatacaaactggagtgtggagcagcttcctgcagaacccaaggaattaatctctatgattcaggtcgtcaaacaaaaacttccccagaagaattcctctgaagggaacaagcatcacaagagtacacctctactcattcactgcagggatggatctcagcaaacgggaatattttgtgctttgttaaatctcttagaaagtgcggaaacagaagaggtagtggatatttttcaagtggtaaaagctctacgcaaagctaggccaggcatggtttccacattcgagcaatatcaattcctatatgacgtcattgccagcacctaccctgctcagaatggacaagtaaagaaaaacaaccatcaagaagataaaattgaatttgataatgaagtggacaaagtaaagcaggatgctaattgtgttaatccacttggtgccccagaaaagctccctgaagcaaaggaacaggctgaaggttctgaacccacgagtggcactgaggggccagaacattctgtcaatggtcctgcaagtccagctttaaatcaaggttcataggaaaagacataaatgaggaaactccaaacctcctgttagctgttatttctatttttgtagaagtaggaagtgaaaataggtatacagtggattaattaaatgcagcgaaccaatatttgtagaagggttatattttactactgtggaaaaatatttaagatagttttgccagaacagtttgtacagacgtatgcttattttaaaattttatctcttattcagtaaaaaacaacttctttgtaatcgttatgtgtgtatatgtatgtgtgtatgggtgtgtgtttgtgtgagagacagagaaagagagagaattctttcaagtgaatctaaaagcttttgcttttcctttgtttttatgaagaaaaaatacattttatattagaagtgttaacttagcttgaaggatctgtttttaaaaatcataaactgtgtgcagactcaataaaatcatgtacatttctgaaatgacctcaagatgtcctccttgttctactcatatatatctatcttatatagtttactattttacttctagagatagtacataaaggtggtatgtgtgtgtatgctactacaaaaaagttgttaactaaattaacattgggaaatcttatattccatatattagcatttagtccaatgtctttttaagcttatttaattaaaaaatttccagtgagcttatcatgctgtctttacatggggttttcaattttgcatgctcgattattccctgtacaatatttaaaatttattgcttgatacttttgacaacaaattaggttttgtacaattgaacttaaataaatgtcattaaaataaataaatgcaatatgtattaatattcattgtataaaaatagaagaatacaaacatatttgttaaatatttacatatgaaatttaatatagctatttttatggaatttttcattgatatgaaaaatatgatattgcatatgcatagttcccatgttaaatcccattcataactttcattaaagcatttactttgaatttctccaatgcttagaatgtttttaccaggaatggatgtcgctaatcataataaaattcaaccattatttttttcttgtttataatacattgtgttatatgttcaaatatgaaatgtgtatgcacctattgaaatatgtttaatgcatttattaacatttgcaggacacttttacaggccccaattatccaatagtctaataattgtttaagatctagaaaaaaaaaatcaagaatagtggtatttttcatgaagtaataaaaactcgttttggtgaaaaaaaaaa

SEQ ID NO: 60695 - DNA, 2142 bp, Homo sapiens
ggggcgtgcagcagagtgcgttcctcgtctgccagccgttttggctagcgcgcggcggccgtggctaaggctgctacgaagcgagcttgggaggagcagcggcctgcggggcagaggagcatcccgtctaccaggtcccaagcggcgtggcccgcgggtcatggccaaaggagaaggcgccgagagcggctccgcggcggggctgctacccaccagcatcctccaaagcactgaacgcccggcccaggtgaagaaagaaccgaaaaagaagaaacaacagttgtctgtttgcaacaagctttgctatgcacttgggggagccccctaccaggtgacgggctgtgccctgggtttcttccttcagatctacctattggatgtggctcaggtgggccctttctctgcctccatcatcctgtttgtgggccgagcctgggatgccatcacagaccccctggtgggcctctgcatcagcaaatccccctggacctgcctgggtcgccttatgccctggatcatcttctccacgcccctggccgtcattgcctacttcctcatctggttcgtgcccgacttcccacacggccagacctattggtacctgcttttctattgcctctttgaaacaatggtcacgtgtttccatgttccctactcggctctcaccatgttcatcagcaccgagcagactgagcgggattctgccaccgcctatcggatgactgtggaagtgctgggcacagtgctgggcacggcgatccagggacaaatcgtgggccaagcagacacgccttgtttccaggacctcaatagctctacagtagcttcacaaagtgccaaccatacacatggcaccacctcacacagggaaacgcaaaaggcatacctgctggcagcgggggtcattgtctgtatctatataatctgtgctgtcatcctgatcctgggcgtgcgggagcagagagaaccctatgaagcccagcagtctgagccaatcgcctacttccggggcctacggctggtcatgagccacggcccatacatcaaacttattactggcttcctcttcacctccttggctttcatgctggtggaggggaactttgtcttgttttgcacctacaccttgggcttccgcaatgaattccagaatctactcctggccatcatgctctcggccactttaaccattcccatctggcagtggttcttgacccggtttggcaagaagacagctgtatatgttgggatctcatcagcagtgccatttctcatcttggtggccctcatggagagtaacctcatcattacatatgcggtagctgtggcagctggcatcagtgtggcagctgccttcttactaccctggtccatgctgcctgatgtcattgacgacttccatctgaagcagccccacttccatggaaccgagcccatcttcttctccttctatgtcttcttcaccaagtttgcctctggagtgtcactgggcatttctaccctcagtctggactttgcagggtaccagacccgtggctgctcgcagccggaacgtgtcaagtttacactgaacatgctcgtgaccatggctcccatagttctcatcctgctgggcctgctgctcttcaaaatgtaccccattgatgaggagaggcggcggcagaataagaaggccctgcaggcactgagggacgaggccagcagctctggctgctcagaaacagactccacagagctggctagcatcctctagggcccgccacgttgcccgaagccaccatgcagaaggccacagaagggatcaggacctgtctgccggcttgctgagcagctggactgcaggtgctaggaagggaactgaagactcaaggaggtggcccaggacacttgctgtgctcactgtggggccggctgctctgtggcctcctgcctcccctctgcctgcctgtggggccaagccctggggctgccactgtgaatatgccaaggactgatcgggcctagcccggaacactaatgtagaaaccttttttttacagagcctaattaataacttaatgactgtgtacatagcaatgtgtgtgtatgtatatgtctgtgagctattaatgttattaattttcataaaagctggaaagcaaa

SEQ ID NO: 60696 - DNA, 1496 bp, Homo sapiens
cctgctgggtgcacgtttatcccagccaccgcctccagggcggccgcacaggccctgggcatcaatccagcagggctcccgactcactccctggagaccagctccccaaccacccggccctgatggcatcccgctgcggccaggtgtcctctcagccgaggtccttgtcactgcctagctgcgtccgcctgccacaccagctcacccgagatgtaggtggcctggacgtgaagggagtcgtcgagcaccacgaagtctgcgtcagcaccaaagtccagggtccccttactcttctccagccccagcaactgggcggggtgcagggatgcagcctccagggccgactccatgctgcagcctgtggcctgcaggaagtgccggacacagacgtccattggggctatgctgccactcagcgtcttggtgcctgccacgtaggccgtcagaccgtccacttccacttcctgctgtcccagcgtgtgccggccgttgcccaggcccaaggcagggatggcatcggtgaccagcaccagcccctgggggatgggcacggtgggcgatccgcagggcggcggggttggtgtgcgtgccatctgcaatcatcccatagaagatgcagcggcctgcgggcagccggtcgctggtcaggagccccacgatgcctgggtcgcggtggtggaaaggcagcatggcgttgaagaggtgggtgatgaaggtggctccgctccacacagcatcctctgccgcccgcaggtcagccactgagtgccctagggacacgcagatgccacgggccgtcagcgcccggatcacttcgtggctacggcccaactctggggccagcgtcacgatgcggacattgtccaggggcccgtaggtggccagcaagtcctggaaggcatcggcctcgaaggagcggaggtgggcctcggggtgcgcgcaccgcttctcccggctgatgaaggggccctccaggtgcagcccgaggacccctgccccatggggaccaccactcttcacagggatctgaggaacaacctcaccttgtgataaacctccggtggggaagtgaccagggtggggcagaaggaggtgacgccgtgcgacaggatcctccgggccacgagggcaacccccgaacccacgtcctccgtggcttgagagaagtcaacaccaaatccaccgttgatctgcacgtcgatgaatccgggagccaagatgcggcccccgcagtcccgccgctcgtcggccacgcgccgctcctcaaagaacagcttctctgggtccaagatgcggcctccgcgcacccacagatcctccctgagcagtttccctccgcgcaggatccggcagttagtgaactggagcacgcgggcccccgccgcgccctgctcgccgcgcatcgtgagccgtgtcgggagcgagcggctccggagccccgcggcggccaaatcccgcgcccagtgacgaaccccagccgagagcggagccgcgcc

SEQ ID NO: 60697 - DNA, 3050 bp, Homo sapiens
cggacgcgtggggctgtaagcttcggcgcctccgcttcacctatgggactcagactcgggtcagcctggcgctccctggacagtatgaactagtgcacacgctggttgctcatcagggcaactgggagaccatccctgaggaggatctggaggtccaagagaacaatgaggatgctgctcatgatttaacggaactggaggtaacgatgcaccatgctctcttacaggaagtggacgttgtggtagcaccatgccaaggcctccggcccacagtggatgttctgggtgacttggtgaatgatttcttgcctgtgataacctatgcactccacaaagatgaactctctgagagggatgagcaagagcttcaggaaatccgaaagtatttctcctttcctgtattctttttcaaagtgccgaaactgggctcggagataatagactcctcaaccaggagaatggagagcgaaagatcaccgctttatcgccagctaattgacctgggctatctgagcagcagtcactggaactgtggggctcctggccaggatactaaagctcagagcatgttggtggaacagagtgaaaagctgagacacttgagcacattttctcaccaggtgttacagactcgcctggtggatgcagccaaggccctgaacctggtgcactgccactgccttgacatctttattaaccaggcatttgacatgcagcgggacctgcagatcactcccaaacgtctggaatatactcgaaaaaaggagaatgagttgtatgaatcattgatgaatattgccaaccgaaagcaggaggaaatgaaggatatgattgttgagacacttaataccatgaaggaggaacttctggatgatgctactaacatggagtttaaagacgtcattgtccctgagaatggagaaccagtaggcaccagagagatcaaatgctgcatccgacagatccaggaactcatcatctcccgacttaatcaggcagtggctaataagctgatcagctcagtggattacctgagggaaagcttcgtcggaaccctggaacgatgtctgcagagcctggagaagtctcaggatgtctcagttcacatcaccagtaattatctcaaacagatcttaaatgctgcctatcatgttgaagtcacgtttcactcagggtcgtcagttacaaggatgctatgggagcaaatcaaacagatcatccagcgcatcacatgggtgagcccacctgccatcactctggaatggaagaggaaggtggcccaggaagccattgagagcctcagcgcctccaaattggctaagagcatttgcagccaattccggactcggctcaatagttcccacgaggcttttgcagcctccttgcggcagctggaagctggccactcaggccggttagagaaaacggaagatctatggctgagggttcggaaagatcatgctccccgcctggcccgcctttctctggaaagccgttctttacaggatgtcttgcttcatcgtaaacctaaactgggacaggaactgggccggggccagtatggtgtggtatacctgtgtgacaactggggaggacacttcccttgtgccctcaaatcagttgtccctccagatgagaagcactggaatgatctggctttggaatttcactatatgaggtctctgccgaagcatgagcgattggtggatctccatggttcagtcattgactacaactatggtggtggctccagcattgctgtgctcctcattatggagcggctacaccgggatctctacacagggctgaaggctgggctgaccctggagacacgtttgcagatagcactagatgtggtggagggaatccgcttcctgcacagccagggacttgtccatcgtgatatcaaactgaaaaatgtgctgctggataagcagaaccgtgccaagatcactgacttaggattctgcaagccagaggccatgatgtcaggcagcattgtggggacaccaatccatatggcccctgaacttttcacagggaagtacgataattccgtggatgtctacgcttttggaattcttttctggtatatctgctcaggctctgtcaagctccctgaggcatttgagaggtgtgctagcaaagaccatctctggaacaatgtgcggaggggggctcgcccagaacgtcttcctgtgtttgatgaggagtgctggcagttgatggaagcctgttgggatggcgaccccttgaagaggcctctcttgggcattgtccagcccatgctccagggcatcatgaatcggctctgcaagtccaaattctgagcagccaaacagaggactagatgattctacttgaaagcaaagaccctttcctctttcactctcctagttatttcccttccccctcaccttttggcccatggggagaatttgacatttattcactataggacacaactcccaagggaactggtgcttgctgggaaacttggaaccttcccaggcagggatgactcctggacagtgaagagttgaatgactgagcatattcagcagctcactgaagcgccaagctatccctttagcaaaaaagtgtctcagatgtgtaaaagctgaggaatgtggtgttctggcttcacaaatgaaaaggaggcagatgttaccattgtcttttcactgtatatacttctaagacagcaagcgggacactgcagtggcaatagtgttaaaaaatctcattctcatgatttttggctctagctaggaatagtttagtcaggactcagaaaatttgagcttagttctgggattatgaaaacatggggacaaaaacaataacttgtggatgtctggttcctgctgtctgcagccaggtatctcaggttgcaatggtcagaagtcccagtgagggagctagaaacagagctatctgttcctcatagtgccagtgtgtttacatttataggaccacatatccctggtttctgggggagggtttcactgttacatcaccaagaggccctgaaaagaggaaaaaaaaaa

SEQ ID NO: 60698 - DNA, 4929 bp, Homo sapiens
ggtcggcggcattcggcggcgatggagcggccctggggagctgcggacggcctctcgcgctggccccatggcctcggcctcctcctcctcctgcagctgctgccgccgtcgaccctcagccaggaccggctggacgcgccgccgccgcccgctgcgccgctgccgcgctggtctggccccatcggggtgagctgggggctgcgggcggccgcagcgcggtggcgcgtttccccgcggcggccgttggcgtcgcagcgcgccgggcgtaggacgaggagtgcggccgggtccgggacttcgtcgccaagctggccaacaacacgcaccagcatgtgtttgatgatctcagaggctcagtatccttgtcctgggttggagatagcactggggtcattctagtcttgactaccttccatgtaccactggtaattatgacttttggacagtccaagctatatcgaagtgaggattatgggaagaactttaaggatattacagatctcatcaataacacctttattcggactgaatttggcatggctattggtcctgagaactctggaaaggtggtgttaacagcagaggtgtctggaggaagtcgtggaggaagaatcttcagatcatcagattttgcgaagaattttgtgcaaacagatctcccttttcatcctctcactcagatgatgtatagccctcaaaattctgattatcttttagctctcagcactgaaaatggcctgtgggtgtccaagaattttgggggaaaatgggaagaaatccacaaagcagtatgtttggccaaatggggatcagacaacaccatcttctttacaacctatgcaaatggctcctgcaaagctgaccttggggctctggaattatggagaacttcagacttgggaaaaagcttcaaaactattggtgtgaaaatctactcatttggtcttgggggacgtttcctttttgcctctgtgatggctgataaggatacaacaagaaggatccacgtttcaacagatcaaggggacacatggagcatggcccagctcccctccgtgggacaggaacagttctattctattctggcagcaaatgatgacatggtattcatgcatgtagatgaacctggagacactgggtttggcacaatctttacctcagatgatcgaggcattgtctattccaagtctttggaccgacatctctacactaccacaggcggagagacggactttaccaacgtgacctccctccgcggcgtctacataacaagcgtgctctccgaagataattctatccagaccatgatcacttttgaccaaggaggaaggtggacgcacctgaggaagcctgaaaacagtgaatgtgatgctacagcaaaaaacaagaatgagtgcagccttcatattcatgcttcctacagcatctcccagaaactgaatgttccaatggccccactctcagagccgaatgccgtaggcattgtcattgctcatggtagcgtgggggatgccatctcagtgatggttccagatgtgtacatctcagatgatgggggttactcctggacaaagatgctggaaggaccccactattacaccatcctggattctggaggcatcattgtggccattgagcacagcagccgtcctatcaatgtgattaagttctccacagacgaaggtcaatgctggcaaacctacacgttcaccagggaccccatctatttcactggcctagcttcagaacctggagctaggtccatgaatatcagcatttggggcttcacagaatctttcctgaccagccagtgggtctcctacaccattgattttaaagatatccttgaaaggaactgtgaagagaaggactataccatatggctggcacactccacagaccctgaagattatgaagatggctgcattttgggctacaaagaacagtttctgcggctacgcaagtcatccgtgtgtcagaatggtcgagactatgttgtgaccaagcagccctccatctgcctctgttccctggaggactttctctgtgattttggctactaccgtccagaaaatgactccaagtgtgtggaacagccagaactgaagggccacgacctggagttttgtctgtacggaagagaagaacacctaacaacaaatgggtaccggaaaattccaggggacaaatgccagggtggggtaaatccagttcgagaagtaaaagacttgaaaaagaaatgcacaagcaactttttgagtccggaaaaacagaattccaagtcaaattctgttccaattatcctggccatcgtgggattgatgctggtcacagtcgtagcaggagtgctcattgtgaagaaatatgtctgtgggggaaggttcctggtgcatcgatactctgtgctgcagcagcattgcagaggcccaatggtgtggatggtgtggatgctttggacacagcctcccacactaataaaagtggttatcatgatgactcagatgaggacctcttggaatagctcttcagaggagctggacccagcatggatggtggaaccacagtacctcttacactccctgtggctccaacttcaggaaataaatttcccattgcgagggacccagctctgtttctgctgcttccatcaaagccaaaaggacctacactaaagaaatgcagggtgggggtggggaaccctgagcacttttttacaattggctctgagaaaaagggagacattttaaattctttaacttcttatttctcgtcctgtctctttgcaaagtatgggcttttttgtttttgttttttaagggaaacgaaatggaattcgaagggaccttttcactaaccccacttctgtgtgttctgcatggcgcctgccccagggcatctgccaactccagtatcagctctcacagtgtacttggtaccatccctgggctctgctggcgagacgaaacagctgtagagatgaaaacaggctgcaaaggctggcacagcctggccggcttttttccatttggggacagtcctactccaagaacactgcacaccagctcctcacacagatcccacttacggcgcgcaacgggttctaggctgcaggcagctcgaggacccgcggccccgccccggctcggcctggcagatagcagaggcagcaggccgtgccgggggggcatgttgctgtaaccagtggcccaggggatgttacggtggacagtgcacctggagggcgggccccgcagggtgaaccatgctgcagtggctgtcgggcatcgggtatactccttcgggggttactgctctggtgaagactatgagacactgcgtcagatagatgtgcacattttcaatgcagtgtccttgcgttggacaaagctgcccccggtgaagtctgccatccgtgggcaagctcctgtggtaccctacatgcgctatggacactcaaccgtcctcatcgacgacacagtcctcctttggggcgggcggaatgacaccgaaggggcctgcaatgtgctctatgcctttgacgtcaatacgcacaagtggttcacaccccgagtgtcagggacagttcctggggcccgggatggacattcagcctgtgtcctaggcaagatcatgtacatttttgggggctacgagcagcaggcggactgtttttccaatgacattcacaagctagataccagcaccatgacatggactcttatctgtacaaagggcagccctgcacgctggagggacttccactcagccacaatgctgggaagtcacatgtatgtctttgggggccgtgccgaccgctttgggccattccattccaacaatgagatttactgcaaccgcattcgagtctttgacaccagaactgaggcttggctggactgtcccccgactccagtgctgcctgaggggcgccggagccactcggcctttggctacaatggggagctgtacatctttggtggttataatgcaaggctgaaccggcacttccatgacctctggaagtttaatcctgtgtcctttacctggaaaaagattgaaccgaaggggaaggggccatgtccccgccggcgccagtgctgctgtattgttggtgacaagattgtcctctttgggggtaccagtccatctcctgaggaaggcctgggagatgaatttgaccttatagatcattctgacttacacattttggactttagccctagtctgaagactctgtgcaaactggccgtgattcagtataacctagaccagtcctgtttgcctcatgatatcaggtgggagctgaatgccatgaccaccaacagcaatatcagtcgccccatcgtctcctcccatgggtaggaggaagtttctgccacctcccctcctgagcctgctgtcatcttcactgcccctgcccatctgtcacccacctgctcctttgacccctggacttggtatacctccatgtggagttgttgggcgagaggtgttctctgtgctgtgaattcagtggggagctgtagcggggtgggggctaggttcctccccccttgggccgagggccccttccccttggtgctctgtccccatccacctcctttcagctgctcctgggcctcagctctgcccagggccagccaggttctgctgggaagggaagggaatggggagaagggagaagcaagcagtgtctgagcctcaggagcttccccctccccctttgcctatcccctcccctctgcttgagccttgagccttgactgggagctgaaaggagttgcagctgttggcatgagacctccttctccccgtcttggggaggtggggaccagcagataaatcccacccttccttgagctgtcgctgtactctgaagttcagccagctcagattttataaaaattaattaaaatctcaaaaaaaaaa

SEQ ID NO: 60699 - DNA, 1765 bp, Homo sapiens
ttttttttttttggaaacaaatcaatgtgaagagactttaatggcaaagtgcactggagagttaaaatggttacatgggtaatttaagaaaaaatttagtgggaaaaagggaaagggctgaactgccaaaataattttcttatccagttttacatttgctttctccatgtgctacaattatagacacctgatagttcctagccttagacataacttgcagcatcagccactctgctgcactttagatcacattagttagggctagagcccagccccatttacacggcatctgatgaatggttagctgtggcagttctaccataatgccattttgctccaaagaaatccagttaagtggctgtccatggcccagtagtttcacctctgttgcccccagaatagctttgggatggccaaggaacagctgtcctgatgtgggccatttaagaaaaatggcatagactaatttttctttaggcttggatgtgtaccacacatctggggtgacagtgtcattctgggatcgccaggtatgggtttcataaatagcttctccattgacttttagccaggaccccatttgcctcagtcgctcctcaaaaactacagaaatggtgccatctagtgtgggcccaatattcatcaaaagatttcctccacatgaaactgtctctacaagttgcttcaccaattcttcaattgtaagatagtcagagattccagcttccctcctatagccccaggacagtttgtctattgtcatgcagttttcccatttatgtggcaaaagatgtcctgggttataacgatcactgcaggtatagaagccaccatgcttacagatgctaccagctccccaacgatcattggtgactactgtgccccgaactgggctttcattatataacccaggccaagaagcctgtgctgttccagtattgatccggtgctcctccgtcaccatccgaccacagaacctcaggctgatagttgttcactaactcatagagctctggcaatgtcttagaaactggaaattgccgcttatggaatgaactggattcatcctcaaggaagagcggatgaaaccattcaaaaagggaatagtacagtccaaaacgcaggtcagttctgttcctaatggctacctcaagttccttgacaatgtccctcttgggcccctcatctatggcattccagttccacgaatattctgaccccccacaaggtaaagccttcatgatgtttggaagttaagacaatgtatttggcaccagaggcctgaaaaatatctgcccaactggttggcattaaaaaattttgctgtaaatagtggtccaaaatcttcatatttgaaactaggagggtaattatctttcataaattccacatacttcggtatcttttccttttgccaataccaccagaaccactcgctaccgaagctgggcacggaaaacactccccagtggatgaagatgccgaacttggcctggtcaaaccacgcgggcagctggcgggcgtccagggactcccaggtggggtcgaagcgcgtggcgctgtgggcagggcacggcggcggcggcagcagcagcaacagcaacagcagcaacgggaacgcgagcctggggagctcctggggccgcatgtcccggcgcaggccggctgtcctctctgcaggctcccgcggcctcgggagcgctgttcttccgtctctgccgctgagtatgccgccggggggggggggattaatttaattaaggat

SEQ ID NO: 60700 - DNA, 4000 bp, Homo sapiens
aggcggattgtctgtcgttgcagtagctgtaggaaggggaggccattttccgtttctgggaggagtgaggggcaacgggtcggagaaaaaggaaaaaagaagggctcagcgcctccccgccgggccgtggacagaggggcacagtttcggcaggcgggtgaggtcgctgagggcccgccggagatgttttccttgtcgagcacggtgcaaccccaggttacagttcctctgagtcatctcatcaatgccttccatacaccaaaaaacacttctgtttctctcagtggagtgtcagtttctcaaaaccagcatcgagatgtagttcctgagcatgaggctcccagcagtgagccttcacttaacttaagggaccttggattatctgaattaaaaattggacagattgatcagctggtagaaaatctacttcctggattttgtaaaggcaaaaacatttcttcccattggcatacatcccatgtctctgcacaatccttctttgaaaataaatatggtaacttagatatatttagtacattacgttcctcttgcttgtatcgacatcattcaagagctcttcaaagcatttgttcagatcttcagtactggccagttttcatacagtctcggggttttaaaacttttaaaatcaagggccacgacgtcttccagtctacctttcgagagattagctgaaacacagaatatagcgccatcattcgtgaaggggtttcttttgcgggacagaggatcagatgttgagagtttggacaaactcatgaaaaccaaaaatatacctgaagctcaccaagatgcatttaaaactggttttgcggaaggttttctgaaagctcaagcactcacacaaaaaaccaatgattccctaaggcgaacccgtctgattctcttcgttctgctgctattcggcatttatggacttctaaaaaacccatttttatctgtccgcttccggacaacaacagggcttgattctgcagtagatcctgtccagatgaaaaatgtcacctttgaacatgttaaaggggtggaggaagctaaacaagaattacaggaagttgttgaattcttgaaaaatccacaaaaatttactattcttggaggtaaacttccaaaaggaattcttttagttggacccccagggactggaaagacacttcttgcccgagctgtggcgggagaagctgatgttcctttttattatgcttctggatccgaatttgatgagatgtttgtgggtgtgggagccagccgtatcagaaatctttttagggaagcaaaggcgaatgctccttgtgttatatttattgatgaattagattctgttggtgggaagagaattgaatctccaatgcatccatattcaaggcagaccataaatcaacttcttgctgaaatggatggttttaaacccaatgaaggagttatcataataggagccacaaacttcccagaggcattagataatgccttaatacgtcctggtcgttttgacatgcaagttacagttccaaggccagatgtaaaaggtcgaacagaaattttgaaatggtatctcaataaaataaagtttgatcaatccgttgatccagaaattatagctcgaggtactgttggcttttccggagcagagttggagaatcttgtgaaccaggctgcattaaaagcagctgttgatggaaaagaaatggttaccatgaaggagctggagttttccaaagacaaaattctaatggggcctgaaagaagaagtgtggaaattgataacaaaaacaaaaccatcacagcatatcatgaatctggtcatgccattattgcatattacacaaaagatgcaatgcctatcaacaaagctacaatcatgccacgggggccaacacttggacatgtgtccctgttacctgagaatgacagatggaatgaaactagagcccagctgcttgcacaaatggatgttagtatgggaggaagagtggcagaggagcttatatttggaaccgaccatattacaacaggtgcttccagtgattttgataatgccactaaaatagcaaagcggatggttaccaaatttggaatgagtgaaaagcttggagttatgacctacagtgatacagggaaactaagtccagaaacccaatctgccatcgaacaagaaataagaatccttctaagggactcatatgaacgagcaaaacatatcttgaaaactcatgcaaaggagcataagaatctcgcagaagctttattgacctatgagactttggatgccaaagagattcaaattgttcttgaggggaaaaagttggaagtgagatgataactctcttgatatggatgcttgctggttttattgcaagaatataagtagcattgcagtagtctacttttacaacgctttcccctcattcttgatgtggtgtaattgaagggtgtgaaatgctttgtcaatcatttgtcacatttatccagtttgggttattctcattatgacacctattgcaaattagcatcccatggcaaatatattttgaaaaaataaagaactatcaggattgaaaacagctcttttgaggaatgtcaattagttattaagttgaaagtaattaatgattttatgtttggttactctactagatttgataaaaattgtgcctttagccttctatatacatcagtggaaacttaagatgcagtaattatgttccagattgaccatgaataaaatattttttaatctaaatgtagagaagttgggattaaaagcagtctcggaaacacagagccaggaatatagccttttggcatggtgccatggctcacatctgtaatcccagcacttttggaggctgaggcgggtggattgcttgaggccaggagttcgagaccagcctggccaacgtggtgaaacactgtctctactaaaatacaaaaaaatagggctgggcgcggttgctcacgcctgtaatcccagcacttttcagaggccaaggcgggcaaatcacctgaggtcaagagtttgagaccagcctggccaacatggtgaaaccccatctctactaaacatgcaaaaattacctgggcatggtggcaggtgcttataatcccagctactctgggggccaaggcaggagaattgcttgagcctgggagatggaggttgcagtgagctgagatcatgccactgcactccagcctgggcaacagagcaagactctgcctcaaaaaaaaattaaaataaatttaaatacaaaaaaaaatagccaggtgtggggtgcatgcctggaatcccagctacttgagaggctgaggcacgagaattgcttgaacccaggaggtggaggttgcagtaagccaagatcacaggagccactgcactccagcctgggtgacagagtgagactctgtctcaaaaaaaaattaaataaattattataacctttcagaaatgctgggggcattttcatgttcttttttttagcattactgtcactctccctaatgaaatgtacttcaaagaagcagtattttgttaaataaatacataacctcattctgaataatgtccctcattttgactataactgtgcttggtttcaaaagcaaaattaaacaaaaatctcagtcccctccgaagtgaactttgtgttaccctgcgtcagaaatgccaagttgtgtttacttttcattcagattttgtgaatatgaacatgctgttataggatctacagatgaatatttaactcaatagaaaaattattttagaacacattgtattggtattacaaccagattatattcttgacgttgacttcattaaaattatctacaatttcctaataatttaagctgtatatggtcttcattgaaaaaagatagatattgttacaggaagcttgttacattatattcttgaccttttggttgataatcttaaatcttaatgtaatttcaaactggcagaaatgttgccagcataata

SEQ ID NO: 60701 - DNA, 2218 bp, Homo sapiens
  misc_feature (1)...(2218): n = a,t,c or g
ttttttttttttccacggaaacagccgtttttattccacaaacagtaaactccatccactacacagtgacatacactgtgtagcacaccccatcaccttggccagtgctgccagccgacctttctgtggtgatggaaatctttttctgtgctgtccaatacagcagccaccgaccacttttgcttattgagcacctcaatatagaggtggccactacaggtgaggaaatgaatttctaagttaattcaaattcaaatgccacatttggctcgtggctcctgtactggacaacacagctgtaggccctgacctggtccagggcactttggttcaaaagccaactctgaggagagcaagtggcagaaacagcccttgggctcccctccccagagagaaacggcagctgcagctgctggaaagggcaagaatcagagtggggggacacctcgggcgcgccggataaggttggccagccgcttggccaggccacctgtgcggggctcctcgatgtggaaggttcgggtgaggagattgtagaaggagccgtagcacacggccaccacagtgcacgtgaggcagatcacgttgtagggcatgctgaagtccggtgtcggcaggttcaccagcagcggctccgtgtagagccgcacaaagtagttagagccatcagagactgggaacaggctgttgaagaggggactctcttcccagtccactggcttggctgctaccatgctgggcacaagggcgctgaggacagatgggctgacatagaagccatggttaggatctggcgtgtactcggtccacttcagcagcgcccgctcaaactggatggaaaccttggtgactgagttggccggcagctgaatcagcatctccaggaggtggggttgcagccggtcctgggcaggctggtagtggatgtaacttggtttgttctccttgcccttggaggtgatggtgagggtgtgcacatacagccgcagataccagggtacggtgtccagcagcagcaccgggaaggcccggtatgggtgggtgttgtacagcagtgtgctcagctcccccttctgcagcccatagccactcacgtaccgctgggcatgcaggaagggcactgggggggcctcattctctgggggtctcttccacttgagctggatgttgaggtttcgagagttgttgatcatggcggtgtcaagcaagtcatagatggcataggtcttccgagtgcctaggatgacgtcctgatatgtagtggtcgggggtgggtgcacctctaatgtctcgttgtcctggggacacaaaggcagggctggttgtaggtggtgatgtccacatagactcggctctctgaagccagggggcagggctccgtgagggttcgggagaacatccggaagagggaccagtctttctttccctgccccgtgatgaaggcatcaaatacaactgacagggtctgcctcagctcccaggagatgctagtacagcgtgcatttctgcaaacagggcggatatgcactgcctgggagtggtagctggtgtggaacaagcgatctgccttcagcagcacagagaggcctgccttggaactacagggcaagagcttcttccagggggtgaggttttcggtgcagaccacctcccgcggcagcacagcatagcgcagaaagtagtggtcagtgtcattggccagacccaggggtttgaaggaggcagtgggagtgactgtgttggtggagtcgatgaagttgagagaggcgcagaagatccctgagaggacattactgagctccttccaagatttatccacatcagtgacagtgtcttggaaccagacccacagctctgcacctgatggggcctgcaggaagggtggcccccagtatcgggtcctccaaaagccttgtgtgaatgacaggtgcagctcccgtagagaatacttggagatcagctgccccagggctttgggaaagagcctgtaatgggacactccttcccgctgaagctccgaatcccagcgcgtgcggaactggaatgtggcggctacgtccccggaaggcagcggggtgatgacaagttcctcccgcaggctgtcgcgtgggggttctgcaaggcaccagccgccgggccccaggagcaacaggacgagcagagcaagcggcatagccgcccccatgcccgnacgcgtgggcggacgcgtgggtcgacc

SEQ ID NO: 60702 - DNA, 2199 bp, Homo sapiens
ttttttttttttttcattaattaatatattttctgcattatagttaaccatatgtactttcttcggtgtcaccttattttccgttaagtattgatattttgttatattcaaacatgagtacatttcaacagtcttttgcaataaataccataaaataatagagattcgcataataaatattctttacaataaaaaagtttaacagacttttgtcttaaaaatagtcagaattcaactttgtgatttatacataaaatatacaaaaagcaccacaatttgtggttaaggcaaggaaaacacagaagagattagaattactcagctgttaactatccaaggggccaaaaggaccattaaggagccaagatcactttaggcagcatagttctgtgacacatatagattgatcagctataaatatcaacttgagttatccaagtgccctcaatgacaacaaaaatttggtgagaagcatggggtgaagaaggaaggtggctgagtccttcacaaatacgaaggctagagtgaagatgggcaaggtccaaccaatattatctccaatgtgaagatttacattgtaaggcgaatctaaaattacatagaaagaaaaaatacacttggcatctccagagtaagacaacaacaaaactgagggggaaagaaccttgaaggagaaagaaggagagggcagtggttaaaggaaaatttttacgttatagcaaaaaatatatcccccatgctacttaaggggcctatgctaggaagatagccctaactggagacagatttaatacatagcttatttaagcaattaaacagttgctttttaaaaaaccaatttccctgctcccacggtacccaatcaaaacaactctaaatcactgtagtctggatgtgggtgtatgttcatgtacacaactttagaaagttgcttgcagaacaaaaaggctacacaaaagcccactggctctcaataccctcaagtggatggcagaggctcttgttgaaagtgggagccaggtgcagcttcccagtccactcttgctgaagatcatccatgaggaaagagaaaaatccatgagttagaccttggcaacaggggaagagaaggtgggaaacagggaaaaattctaaagaaaacaaaaacaaaaacaaaaacaaaaaacagccacaacttgaaagctagaagttcaggaggtacaacccacctccaaaaatcatgatggtttaccctgaccccgggaggggcagctctccagcttacaatagacagtgttggagttcttacatctgcaccctgggcgatggatccagtcataacacctcctgcacagcttcaggcatcctttagcaggaggataacagagtaagcaaggtaaaaataaagacatggctcccatacacaggtatctagagcagcagtgtgattgtgaacaggagcaaggattatctgaataggaatccccttcgtcgtcattggagcagtggtagaagatgcccttgacctaagcacatgcaggttccatattccaccatgctctcagcagagcaaaggcactgccggttacaggccaaacaggatggtagggtcctgggagcagtgcattctccacacttgcacttcccacactgttcacaaatgaacttgtgctgtgtcaggtcctctttcaaggaacccttcaagtcatccacaatcagttgcttgggctgggtccggattgccctttcagacctatgaccagggactggtctggttggtggtgaccttcctaacagtccctgttcagaagaggcactgctgttgctcccagagctggctgcacttccagtgctggttgatctgctcaaaatggggcccctggcattacttgggagtactgcatgtcccaggtggcttgtgtgtctgtgctcgtagttattattcacattaattggtatgatttcatgagtcctttcatgcttttcttgtcttggtgctgtccgaggagcaggtcttttcaccaccgaaggcccttctgtgtattcattgctgcctcttatggccttgatctggtctaaggacaaaatagcagtaggctgaatctctctctcatagtctaatctcggacggctatccaaagaaggctgctggataacaactaacgaactgccactgccatgttgattttggggatccatgtgtagtgatctcgagttctg

SEQ ID NO: 60703 - DNA, 2565 bp, Homo sapiens
  misc_feature (1)...(2565): n = a,t,c or g
gtaaaaataattgttttatttttattgacatgactgattgattgattgctattctgtgcacttaattaaactgattgtgatgacttttcatttgtttacatacgttgcttcagtcttctcaggtgaaagtagtgagaaaaccgtgaaagaggggggaaacatttatccattatatgctgtttcactggaagtgttaccagcagtccacagaactaatgtgtccccacagacttctcaatcctctccacaccgaagtgcaaaaccacagcagggaagatgtgcagggagatgtggagcaaaacacagccaatttgccctcacctcaacatgcttttgaatgcaatataccactgttttacgacctaaggatctacacaccttaaaaaccctaaagtaaaataaaggaatagtgtcaacatgccatttattttttgtcatcttgaactaaaagtacagctgcaagcaagcttgctataggacaagcttcagcttgggaaacatcaactatctgcactcaggacttacctatttccagaggaatatcgatggaaggtcaggttaatacttaatttcaggttgtttgctacttttaaatcaatgcagtgtctagttataataaagagtcaaacaatgctttacattgtatatatgttcatagatttcatccaatataaaataaagacagtccttttaaacaaaagatagggaagaggtaaatgtgacactttttccgcttacaaaaagtaatgccttataataaattttaattcaaccatttaggggggtcagctgcagtgaaccttttatttcttcaaaatgctgcttctgccaacagaatttcatgttctcttctttacagatagatagataggaactccttcaattgtaattctgtttgccctagagtaggcacaaaattcagtgcaaccatggcatagtgttcttctggccagttcccacatctccatttcatgatgatcttcttatttgttaactcctttacagtgaagatgctatacagctgctctacagttgtgtcaaacagttccatcatgtgaagagccacagtgggaatccttacacccagtgccactggagatgaggcctgaacctgcagggtattcccactcagttttcttttgacagtcaattcctgggttgccatagctttcgttggtaaaatcattcccgttgtaaattctcagtgtcatctacttcattttcctcagaaagattgggtatttcaatcaatcccttgtgcttcactccagattctttaacgatgcctttccagcccagtttgatgttccactcatagaagaaaatcagctttcctttgcggctgctgcacgaagcctccccttccacctgcttcaactcgttgatctcgccgcggccagcgtcattctccacaacgatgcccaccaggagctcctggaacttccctttggacaagctggtggcatcccgctctgtcctgccagggaccagaaagtcgtgaatggaagccccagctgggatccacctgcctgggtgccagggtcacgtccaagcccagcccagatcggcccaagtcctctcaagcagcctcgaaacctgccaacctccaatgtgctcctcaaacctgctttctatcaaattcttttcatcctgctcagttctttaagatattattgtccactatgcaagtagtattctgtcttaaaaacactggcttatttaagggaggaggatctagctagctcgcccactggaaataggcaaagcctaggccacagggaaagtagcagtagtgaactaatcagaatcatgacaataccagctatcaagtgtcttcgcatatacatcgtctaatgtaatcttcccaggtaatattctcactttaggggacagaaacgagctgagagaaatgacatgtccatcgggccaaggctaggacactagaaagtcagatctagctcacgcctgtaatcccagcactttagtaggcccaggcgggcggatcacgagatctggagttcgagagcagcctgaccaacatggtgaaaccctgtctctactaaaaatacaaacatcagacggacgtagtggcacgcatctgtagtcccagctactcatgaggctgaagcaggagactcgcttgaactctggaagctgaggttgcagcgagccaagattgcccatgccctcagagctcctccggaccagccaagtcatgctcctctggggaccggcctcagcatcccctcgacggcctggagggaccacagccccggccagaggcgcagggcagaggacatcccttccggaggttctgcggcggagggctgccgacctctccccacgcgccaggtgaggcgcgtaaaggaaggggagcttgtctcactcacagagggcccggctcgcgggaggcgcctgcggggtgggcgcgaactgagatccaaatttctgccctttccactacgttccatacccccgcccctaacacagtctctcaatccagctcccttctaactcnccgaaacatccagaggggaattccncggcnctcgaatgtggttcgat

SEQ ID NO: 60704 - DNA, 1530 bp, Homo sapiens
accccatgcatggagtgtataaaaggggaagggctaagggagccacagaacctcagtggatctcagagagagccccagactgagggaagcatggatggatggagaaggatgcctcgctggggactgctgctgctgctctggggctcctgtacctttggtctcccgacagacaccaccacctttaaacggatcttcctcaagagaatgccctcaatccgagaaagcctgaaggaacgaggtgtggacatggccaggcttggtcccgagtggagccaacccatgaagaggctgacacttggcaacaccacctcctccgtgatcctcaccaactacatggacacccagtactatggcgagattggcatcggcaccccaccccagaccttcaaagtcgtctttgacactggttcgtccaatgtttgggtgccctcctccaagtgcagccgtctctacactgcctgtgtgtatcacaagctcttcgatgcttcggattcctccagctacaagcacaatggaacagaactcaccctccgctattcaacagggacagtcagtggctttctcagccaggacatcatcaccgtgggtggaatcacggtgacacagatgtttggagaggtcacggagatgcccgccttacccttcatgctggccgagtttgatggggttgtgggcatgggcttcattgaacaggccattggcagggtcacccctatcttcgacaacatcatctcccaaggggtgctaaaagaggacgtcttctctttctactacaacagagattccgagaattcccaatcgctgggaggacagattgtgctgggaggcagcgacccccagcattacgaagggaatttccactatatcaacctcatcaagactggtgtctggcagattcaaatgaagggggtgtctgtggggtcatccaccttgctctgtgaagacggctgcctggcattggtagacaccggtgcatcctacatctcaggttctaccagctccatagagaagctcatggaggccttgggagccaaggagaagaggctgtttgattatgtcgtgaagtgtaacgagggccctacacttcccccgacttttcttttcctcttgggaggcaaagatacaccgctcaccagcgcggactatttatttcaggaatcctacagtagtaaaaagctgtccacactggcaatccacgccatgtatatcccgccacccactggacccacgcttggccctgggggccacctttcatccgaaagttttacacagagtttgatcggggtaacaacccgcatggcttcgccttggcccgctgaggccctttgccaccgcagggaaggccctgccttcagccctggcccagagttggaaccctctttgaaatgcccctctgcctgggcttatgccctcaaatggagacattggatgtggagctcctgctggatgggggccctgacccctgccccagcccttccctgctttgaggacaaagagaataaagacttcatgttcccaaaaaaaaaaaaa

SEQ ID NO: 60705 - DNA, 1813 bp, Homo sapiens
ttttttttttttactggggcttctgcaatttcaaatcagcactttgcagggagacaacggggtttttgaatagtatcacctggtatgaaaagttttcccaagaaaccacaaacgattgttcattttttctccttttttgttaactttttgccacactcaagtcagtttaagtcctagcaaaaagacggtagttaggataccactgtggctgtagatgatgtgacactggttgaatttgtgctggcgtttgtgtaaacttccctcgctgtttgtgtttgattcgttagggggcaccctggcttgaattggctcgaaggattgctcctgctgcactgcaatgtggcccgcggccctggttctggtgtgtaggtaaaggtaaggctggtggaataaatgattccatcatttcggaccaaagttactggaacctggactggttgccggacccatctccaaccttctcggaatgcagaaatgtctgggacgacacagagcatactctctccacacctgtacatagtttcagcttctacatccccaaaccacactcgtaaatttggagtgaaattctgtcctgtaagttcaagcattgctacgtccccaccgccattcaactgaaggctctctaccacaggcacaggagtgactggggcaaggacagggcccattccctcataaaatgtatactctgccttatctgtgctaatgattgtccaggaagcgccatcatttatcatctctttatttggttcttttggacatggagtggcctgaaattgaattattctttcttgagaaaggcacaaatacattctttctgtatccttaaggtaaaatgcacatttatggagttgtgacacaggatcatctgcatccaataatgcggtatgcttatcaactttcataattatcaatcttgggagtgccatgccagtaactgagcacacaagtttgcatgtttgtccataatggatgtagacatctcggactgtgaattcttctccttctgattcatcatcatccaagagatgaataaaaaaggctccccactgctgtgaactggcatgaaaattacctccttctacatgcaagtatctggtactaactgtctgggatcgtagtcgattaaacagagccacctttgttcctgaggcaatgcataagtcagcatttttcaatgactgcttctttttggaaggtttggagatgacttttatccgcttgctgaggaacacaccaatgtcatcactgttgccatagaacatctttacagacaacatgaagtgctttcgcttgtctgagtcagatatatacaatgttttggctgtgcaatagttctttccttccaagtttagctgctgcatttcttggtcactatttcctatcccaataaatgcacacggttgagactcttgttcagaacaaccatcgcgttccatttgttctttttttttcttccatccgctgcccataagatatacacaaggaggtgggcaaaaaaaccttttttcatttccatatgacttctgtgcaacttttgcatgaagaataagtactgtttgatcccctcgctcttttaaataatttcgcatagcttccctagtaagtcgtttaggtggaggccgctcaccaaatttcccaggcgatggagcatgcgcaggcggctcctccgcgggcgagccctccgtgtggtccatggggagcgctccggttatccgggttttaggacgcgctttgagggacgtacgtggagactgcagccccccatctttcccctcctttgctctttcctttcctagagattcccacgaaa

SEQ ID NO: 60706 - DNA, 2038 bp, Homo sapiens
  misc_feature (1)...(2038): n = a,t,c or g
ttttttttttttaaacttttataaccttaaagggttattttaaaataatctatggactaccattttgccctcattagcttcagcatggtgtgacttctctaataatatgcttagattaagcaaggaaaagatgcaaaaccacttcggggttaatcagtgaaatatttttcccttcgttgcataccagatacccccggtgttgcacgactatttttattctgctaatttatggacaagtgttaaacaggaacaaggaattattccaacaagttatggcaacatgttgcttattttcaaagtacagtttaatgtctaggtgccagcctttgatatagctatttttgtaagaacatcctcctggactttgggttagttaaatctaaacttatttaaggattaagtaggataacgtgcattgattttgctaaaagaatcaaggtaataattacttaagctgattcctgagggtgggtatgacttccaagctggaactccatccttgatcgggtagggatttttttaaatcccatttttggtaaaactatttcccaaggaaattttaaggccctttcacttcaggaaagaaaaaaaggttgttggggggctgaggcactttaattttcttgagcagggaagggagtttcttcccaaacttcacccatctggggatactgggtgtttcttttacaggattcctcctttaatttctgttgagtagccgggatccttgggaggcatgtaggaagcccgctggatcatcacgggatacttgaaatgctcatgcaggtggtcaacatactcacacaccctattttcaaggctttgcagaaactgatatgtactcaaatataatcaggtgctgcaccagttcacagaggccaactccaccagcatgggggcaaacaggaatttcaaactttttggccatcagcaatactgagaggttcttcattgacactgcccagtcttgaactgtcaatctggaggaactgcagggccttcgcctgtaggagttgcttaaatatcactctattgtggcactgttctcctgtggcaatgccaattcctaatgggaccagtgccttggaaatggtggcgtgccccagaatgtcatcaggggaggttggctcctcaatccacaatggcttgaacttggccagcttggacatccactccaccgcctcaggcacatcccagcgctggttggcatccatcatcaaagtcttttccggtccaatcatgtctcggatgatttggcatcttcgcatgtcatcctggagatcagcacccacctttactttaaacctggtccagccatccttcagcgcctgggcacagagctgcttcaacgtgtcatctgagtaccccagccaggcgcacgatgtcgtgtaagcagggtatccttgtgccagcatttgcttctctctttcttttttaccaatttgacctttctgcagtatttctagggcatcctcctcagtcaggacatcagtgatgtacctgaaatctatgcaggataccagcatcctgggatccatgtccacaagtaacttccagacaggctttccctcctgcttggcccacaagtcccacaccgcgtttaggacggccgctgtcgccaggtgcaccacgcccttttctggaccaatccatctgagctgcccatcacttgtgagctgcctatagaagcctctgaagtcaccaacaatgtccttgaggtccttgttgagcacatggtgggcgagggcattcacagcacagacaacaacttcagtgccttttcccagagtgaaggtaattccacaccccttgattccatcttctgcatcagtttctatgacgacataggcagccgagtagtcagggtccgtgtgcatggcgtccgcgccgtggcccccaagcgacgtggggaagcgcacgtcccggaccgagagccgggagatcctgccgcgcaccatggcccctgcgccccgtggccgcggcccccgtgcggtcaggactggtggaattacnccgcactggactagtgttcatcgag

SEQ ID NO: 60707 - DNA, 1768 bp, Homo sapiens
ttttttttttttgctaaattcaatatttatctgaaagttaaagaaaagcaaacaaacatatacaaaggacatttcatttttaatcactcaaaaatgaaaaaggtttggacaatgtcaaattccactcaccataatgctatagttatacattaaatataattactatctatacatatgcaaaaatataaagttctatttcatacaataaaaccctttatagaaaccattttaaaattaagcagaacttctcaacattaatatgtgaggtgaggtctaagtccttctaaaggtttctttaaaggtttttaaacaaaatgctaaacctaaaaacattgtcctgtcagttcccaaattaaatctacttagaacaaaaacaaaaatttatagctcggtcacatactacttaaataatattgttcaggcatctctaaaatcctccatgttttcaagtatggaaatagaactcaaatattccacaatacagtactaaacagatggagtatttaggaaagactttgttgtcatatggcacaatattaatattttgttgcttcaatacgttttgaaataaatatcagatttttgtttttttttcctaaaagaccaaaattataatctacattaagataattctgactgtggttaagacttaagagtgtaaaatacaacatcaatattttatcacaaaagtaaagctggtaacaaattataaaaggagccagtactctactgagacaggctcggagattaaagctcatcatgatagaaatagtcatcatggagctgtctgccataatctgtggcttcactggtgagaaacaagtccgggttttccagaatctcttcttcagagagctttttgtcaccattcaaatccatttcatcaattagatgaagcgcctcctgcttgtgcaatgccctgattattaggtactacccaaggtaacagctcttggggatcaagcctgccatcgttatctttgtcataatcattcacgaatctgtctttctcaacaagtatccattctggatcttcatttgcagttggatcccacctgtaatcaccaagaaattcttccaaactaacaaatccatcaccatttttgtcatgttcttctaaagcttcttgaatgacaaattccgtcatataatcaacttcttcaggatgctcaaaagcaataaattcttcaagactcaaaccgggacctgaatcctggttagctttttcaaatcgcttcttgtcctttaagtgaagcttcctaaaggactcctcttctgcatcatccagagcagtgttctcatcaaagtcaatcacacgatcatacatctgaatgttatattcatcccaagtcacagtatcatcactgtttttatcatattcaacaaactgttgttttgcttcttgcatagcataatgcttaaaagacatctgaatccatgaactgagttcactttcagtgagaaagccatctgagtccaagtcgattttctttatgatcgcctgcagtcttttttgctgctcttcgtggccgagtttaacatattcatccacatcttcctggacgcccagcagcgcctcgcggtcgtagtcgctgcggcgctcgcccagcgggtagtgcagctcctcggccttgccggcgccggccgcggcggcgcacagcagcagcagccccaacgccgcggtcctcgggcccagccgcatcgcgccggcccgcggaggacaccgagggacgcgaggagggaggctggcgggggcccgggcggctgc

SEQ ID NO: 60708 - DNA, 2772 bp, Homo sapiens
ttagttagtgaaaatatatatttgccaccagaattcactgggaccccagagccagcagatgtggttggaaagatcctctgctctgtcctctggcctcctgctgcatctgggccatcagttggactggaggagctggacgggcacatagttttcctcagaggcaccatcctcatcctccttgggaggggaagccaggacagggttctcgagagttcgagggacacctgcccctggacgggtcctcacacagcgtaggcacgcgtctgctcccatgaagcccagttcacctcctccaccctgaagcaccagcgctcatcggggctgccatctggcttagtgccaacggtcagcatcacacctgcccgctgcttcttcctgcaccaccaatagccattctccatctccaggacagagatggctttctgcagcttccagatgctccagctgtcagtggcgacactgttgacggtctcgctcatgagggcgatgagcatgttgagcagcaggatgtaggtgagcagcacgtaggccagcagcagcagcagcaccatgccgcggaagtgcagctgctcctggaaggccagctcgcccatgccgatggtgaatttgaagagctccaaggaggcttccaggatacccctgtactgggccccgttgccctcgtcctcctgtccctccatgggctgcactgactctgtggcattggggcctgtaggagcttcggggcgccaagcctcctggctcaggctcaccagggctacagcgaagccgaaaaggaagactaagtagatcagaaggaagcgcagcaggtcccgcaggatgaccttctggatcatgacactgtagatgcctgtgtgctggaagccacgtgtatagtaaagcaggttcagccagcccagcaccagcgcagacacaagcaggggcaggtaccactcgatggccaggaaacacagcacctgggacaccactgtgagcagggcctggaacaggaagaggatttcaaagtagctgtctatgaacgagatccagatgaacacgtggcgccgccagaagtaccacagctggcccacgaggaggtagatcccccctagcaggataaggatgtggcccgtcagcagcatggagtttccaacctccgctttcaggtgaggggcggcctgcttcttcagggtaggctgatggtaggcaacagcggtgaagatgaacatgtagatcagattacacaggaagtttaagaagaacttggggatgagcagatcccatttcgcctgcagcagtttgttcaggggctccaaaacgaccattcggtgtcggtgcgggctcttgcaatgaaaggcaatgatctccagcactgagttctcctcacagctgtccacagaagccaggtcatacagcgacacccggacaggcccatagcaccactcggtgaactttcgggaaaggtggctcagtcctgaaaactcccgctgcaggatgtgcctgaaaatctcgatcttgccctccttggcggccagcttcagaggcgtgagatcctgcaggttgcggatgtcctcaagctgcacggtagggcagaggcgggccccagcttggaggagcccatcatacatgctggtcaccagtgcaatgttctcagctgagttgtccgagatcatcactagggcatgcaggactgtgttgccctgggagtcagtggcctgcaggctggcgggctggtgtgggttctccaggaggtagcttaccacatcccactgcttggtgcaagcggccaaagagaggggtagctcaccgaaataaaagcaagtcccttggcccttctggaagaagcggccgcaggcccgggcatgcacattggccccattctccaccaggagcttcacacactgcagactccgtgttgtcaatggcgatgtgcagagcgctgtggcctcggtaatagtcatctgtgcactgggcatttaccaggggctgaggattgccagagtcccgatcgatctgcagcagtggcagaatgcaggcattcgactccgtccttaaggttcagcacagccttcatcaggcacgtcttacctgtggagccctctgtgtattccgagtcggtgaggtacttgctggtcttgctcaggtactctggaagtccagccagatcctcggggacaccccgggagaccgcattgaagagccgatctcggtcaaatcggtttggatccggctgactggcacctgttccctttcggtagttgaggttgactcttatctgaggggcgaatttccggtcctcgccctggaactgtgactccatgggaggcagcccgctcccaaaatccagctttcctctgtccgcctcagagccatcttcttggcctccatctaatgtctccaacctgaaaactggagagctggagggtgaggtcatcctaggaggaggaggctgctcggtccagccaggacctctgtgcagatggagatgtcaagggtcctgtcttcctcccagctgcgcgtcggtgttggcctgactggagccccgcaggctgaggccagggcgtggcggctgctgggatcccggagcttctcagtagcaggggctgcgggaggaagtgaagccgggaggggctgccggcgctgacagcagaggagcggcggaacctccctccccagctctgagcactaagctccagcaagcaggttctggtctctcagtcaccctcagcccacctggccagccggcacggtggagagcgggagcttaactctcccctgtcaggacaggctagc

SEQ ID NO: 60709 - DNA, 4476 bp, Homo sapiens
  misc_feature (1)...(4476): n = a,t,c or g
aggcaccggggnnaaattcccgggtcgacgatttcgtacgcgcggcgccgctcggtgcagaccatgaattacgtggggcagttagccggccaggtgtttgtcaccgtgaaggagctctacaaggggctgaatcccgccacactctcagggtgcattgacatcattgtcatccgccagcccaatggaaacctccaatgctcccctttccacgtccgctttgggaagatgggggtcctgcgctcccgagagaaagtggttgacatagaaatcaatggggaatctgtggatttgcatatgaaattgggagataatggagaagcattttttgttcaagaaacagataatgatcaggaagttatccctatgcacctggccacctcccccatcctgtcagaaggagcttcgagaatggaatgccagctgaaaaggggctctgtggacaggatgagaggcctggaccccagcacgccagcccaagtgatcgctcccagcgagacgccgtcaagcagctctgtagtaaagaagagaagaaaaaggaggagaaagtcacagctggacagcctgaagagagatgacaacatgaacacatctgaggatgaggacatgttccccatcgagatgagctcggatgaggccatggagctgctggagagcagcagaactcttcctaatgatatacctccattccaagatgatattcctgaggaaaacctctccctggctgtgatttaccctcagtcagcctcataccctaattcggatagagagtggtcacccactcccagtccttccggttcccgaccttcaacacctaaaagtgattcagaattggtcagcaagtccacggaaaggacagggcagaagaacccagaaatgctttggctgtggggagagctgccgcaggctgctaagtcttcttctccacacaagatgaaagagtccagcccattgagcagtagaaaaatttgtgataaaagtcactttcaggccattcacagcgaatcttcagacacttttagtgaccaatcgccaactctggtcggtggggcacttttggaccagaacaagcctcagacagaaatgcagtttgtgaatgaagaagacctggagaccttaggagcagcagcgccactcttgcccatgatcgaggagctcaaacccccctctgccagtgtagtccagacagcaaacaagacggattctccttccaggaaaagagataaacgaagccgacatcttggtgctgacggcgtctacttggatgacctcacagacatggatcctgaagtggcggccctgtattttcccaaaaacggagatccttccggactcgcaaaacatgcaagcgacaacggagcccggtcagccaaccagtccccgcagtcggtgggcagctcgggcgtggacagtggcgtggagagcacctcggacgggctgagggacctcccttccatcgccatctccctctgcgggggcctcagcgaccaccgggagatcacgaaagatgcattcctggagcaagctgtgtcatatcaacagtttgtggacaaccccgctattatcgatgaccccaatctcgtggtaaagattgggagtaaatattataactggacaacagcagcacccctcctcctgggcaatgcaggccttccagaaacctttgccaaaggccactgtggaatctatcatgagggataaaatgcccaaaaagggaggaagatggtggttttcatggaggggaagaaacaccacaatcaaggaggaaagtaagccagagcagtgcttggctggcaaggcccatagcaccggagagcaaccgccgcagctcagcttggccaccagggtaaagcatgaatcatcctccagtgatgaggagcgcgcagctgccaagccatcaaacgcagggcacctccctcttctgcctaatgtcagctacaagaagactctccggctgacttccgagcagcttaaaagcttgaagttgaagaatggccccaacgacgtggttttcaagtgtcaccacgcagtaccaaggcacgtgccgctgttgagggcaccatctatctgtggaactgggatgataaaagtcatcatttctgatattgatgggacaattaccagatcagatactcttggccacattttgcccacccttgggaaggattggacccatcagggcatcgctaagctgtaccataaagtgagccagaatggatataaatttctctactgttctgcccgtgccatcgggatggcggacatgacgcggggctacctgcactgggtcaacgagaggggcacggtgctgccccaggggcccctgctgctgagtcccagcagcctcttctctgccctgcacagagaagtgattgaaaagaagccagaaaagtttaaagtccagtgtttgacagacatcaaaaacctgtttttccccaacacagaacccttttatgctgcttttggaaaccgaccagctgatgtgtattcatacaagcaagtaggagtgtctttgaatagaatatttaccgtcaaccctaaaggagagctggtacaggaacatgcaaagaccaacatctcttcgtatgtgagactctgtgaagtagtcgaccacgttttcccgttgctgaaaagaagccattcttcagactttccctgttcggataccttcagtaacttcaccttttggagagagccactgccaccttttgaaaaccaggacattcattctgcctcagcgtaaaatgtcccaagcagcctcttgccagcagtgcagagcctggttgtcacccattaaaggataggtctccccggagtgcacagctccacctgggagcctggcgcgtcatcattggcctgacagcagagagaattgagaagcatttctcccctgccccaccccggggctgacatttctaagcaagataggaagggagcactttctaggctaggagttgggtgcatttgtaccgtgaaaagcattcctcagttgtggcttaatgccagttacgacgctgcctttccggcctgctccagcaagtagctactggttcacgtgcagtttggggctgtgaaacctaggcagaaggcggctgtctgagggctgtccccgcctaggacagggtcaatcgaggaatgccagatgtgcacggtttttggcaaagtagggggcacatttccattatagcaatgttagtgccaccaccttctgaacacagtggggagggctgtgaaggctcatgtgacctggatctgaggtctctgatagaaatctggacgccaccgggtccaggcctggcctcagacttggccttgtggatgggccccttacagtatttgctgactagtctcatttttaggtgataagtttttcctttaattcctttggttaaaggatagtctatttcattggcatatctccccccaagtttttgtggctcaaggctggaatatttatgccttaatatatctatggcagacatttaagaatgcgctttatctagctcatggtaacttttgcaacgccttagattaaaatgacagtaaatattactaaggcagtattttgaatgagtttgacactgccggcttccttccatccagcgaggtggtgctgacagtgtggacttgagcacacttatgctaaatgataatgatactgacttctgttgggagctctccaaagaaactggttggttttaagaaaatagtttcaagaagttcaactatattcttttagatattatgtattgttttactctgattaggttactgtgataggcatttattcatattctttctataccactgtcattaatatattaaaaagatgtatgtgttagactatcgaaagggccttattctctctttctcatagactgaccttcttttggaatttctgagtcatttattttccttagctttttccactcaaattaagggcaagcgaaaaagtaataatttggcattctttaagcctacagaatgtgattctttcacttgtttattacactggctcgtggacagaacaatttgaaaagtgaaagaattattttggtaaaagattttgctttacttttcgaagcattatttttttaaagagtgttttactccaacgattgaaacattttcctatttaaatttcattgttagaatcacaggaggcaaaaaatggaacggttgaatgaaattttactctttctgtgaaagaaaatccacagagttgttgcctccgttgtagttggtgggccccgttagcattggatgcctttgccaaatggttcatgtggacacacaaaggcaaacagatctgccatcgatcgcagatttctgtagaaacacggatgtgcatgtgcagattcccttttgcaggtattaaaaataattaaaaatagtcctgcctgaggttgcagtgagccgagcttgcactactgcactccagcctgggtgacagagtaagactccatgtcaaaaaaaaaa

SEQ ID NO: 60710 - DNA, 3060 bp, Homo sapiens
tttcgtggaattacgcccgagtggagagtgtggaccgtgagtgtgggtatcagggagggctggatggaggcctgtgggtgggtgaactgcgtcctcctagctcagcccccaggaagctgaaagcccacgaggaaaaaatgtgggtgtcactgggcaagatggggataataggaggcccatgcaggaggcacaagagcccaaccaactgtcccatttttgccctgacctttgccctggtagtcctggcctttcccgcctacctgctgggcattgacagcgggcgactgcaggagaagctgaccagccgcaagatggacagccgctggggcgggcgcagcgagtccatcaatgtgaccctcaacgtggagcaggcagcctacacccgtgatgccctggccaaggggctctatgcccgcctcttcgacttcctcgtggaggccatcaaccgtgctatgcagaaaaccccccaggaagagtacagcatcggtgtgctggacatttacggcttcgagatcttccagaaaaatggcttcgagcagttttgcatcaacttcgtgcaatgagaagctgcagcaaatctttatcgaacttaccctgaaggccgagcaggaggagtatgtgcaggaaggcatccgctggactccaatccagtacttcaacaacaaggtcgtctgtgacctcatcgaaaacaagctgagccccccaggcatcatgagcgtcttggacgacgtgtgcgccaccatgcacgccacgggcgggggagcagaccagacactgctgcagaagctgcaggcggctgtggggacccacgagcatttcaacagctggagcgccggcttcgtcatccaccactacgctggcaaggtctcctacgacgtcagcggcttctgcgagaggaaccgagacgttctcttctccgacctcatagagctgatgcagtccagtgaccaggccttcctccggatgctcttccccgagaagctggatggagacaagaaggggcgccccagcaccgccggctccaagatcaagaaacaagccaacgacctggtggccacactgatgaggtgcacaccccactacatccgctgcatcaaacccaacgagaccaagaggccccgagactgggaggagaacagagtcaagcaccaggtggaatacctgggcctgaaggagaacatcagggtgcgcagagccggcttcgcctaccgccgccagttcgccaaattcctgcagaggtatgccattctgacccccgagacgtggccgcggtggcgtggggacgaacgccagggcgtccagcacctgcttcgggcggtcaacatggagcccgaccagtaccagatggggagcaccaaggtctttgtcaagaacccagagtcgcttttcctcctggaggaggtgcgagagcgaaagttcgatggctttgcccgaaccatccagaaggcctggcggcgccacgtggctgtccggaagtacgaggagatgcgggaggaagcttccaacatcctgctgaacaagaaggagcggaggcgcaacagcatcaatcggaacttcgtcggggactacctggggctggaggagcggcccgagctgcgtcagttcctgggcaagagggagcgggtggacttcgccgattcggtcaccaagtacgaccgccgcttcaagcccatcaagcgggacttgatcctgacgcccaagtgtgtgtatgtgattgggcgagagaaagtgaagaagggacctgagaagggccaggtgtgtgaagtcttgaagaagaaagtggacatccaggctctgcggggagtctccctcagcacgcgacaggacgacttcttcatcctccaagaggatgccgccgacagcttcctggagagcgtcttcaagaccgagtttgtcagccttctgtgcaagcgcttcgaggaggcgacgcggaggcccctgcccctcaccttcagcgacacactacagtttcgggtgaagaaggagggctggggcggtggcggcacccgcagcgtcaccttctcccgcggcttcggcgacttggcagtgctcaaggttggcggtcggaccctcacggtcagcgtgggcgatgggctgcccaagaactccaagcctacgcggaagggaatggccaagggaaaacctcggaggtcgtcccaagcccctacccgggcggcccctgcgccccccagaggcatggatcgcaatggggtgcccccctctgccagagggggccccctgcccctggagatcatgtctggagggggcacccacaggcctccccggggccctccgtccacatccctgggagccagcagacgaccccgggcacgtccgccctcagagcacaacacagaattcctcaacgtgcctgaccagggcatggccggcatgcagaggaagcgcagcgtggggcaacggccagtgcctggtgtgggccgacccaagccccagcctcggacacatggtcccaggtgccgggccctataccagtacgtgggccaagatgtggacgagctgagcttcaacgtgaacgaggtcattgagatcctcatggaagatccctcgggctggtggaagggccggcttcacggccaggagggccttttcccaggaaactacgtggagaagatctgagctgggccctgggatactgccttctctttcgcccgcctatctgcctgccggcctggtggggagccaggccctgccaatgagagcctcgtttacctgggctgcaatagcctaaaagtccagtcctttggcctccagtcctgcccaggccctgggtcaccaggtcactgctgcagcccccgcccctgggccctggtcttcctccaacatcacacctgctgcccattctccatttctgtgtgtgtcaaaggggactaacagcagaatctacctcccaactgccatgtgattaagaaatgggtcttgagtcctgtgctgttggcaaagttccaggcacagttggggaggggggggtccttaacaagcgtgactttgctcattctgtcatcactaaggcaataaacctttgccaggtgaaaaaaaaaa

SEQ ID NO: 60711 - DNA, 2175 bp, Homo sapiens
ccgagctccgggcgggcggcggctgctgcagcgggacccgggagcggggcccggcgccgcccgggccgcggggcgatgtgagccccaggtgtatcccagagggatccgggtgacttctctgcagactgtttgccatgacagcccaccaaggacggggggaataaagtgggaacccttccccatgcccctcccacggtcagctccccgatggcctgggtgagggcaggctggctgctctgacaccatggggagctgctgcagctgcctgaacagagacagcgttccagacaaccaccccaccaagttcaaggtgacaaatgtggatgatgagggggtggagctgggctctggggtgatggagctgacgcagagtgagctggtgctgcacctgcatcggcgtgaggccgtccgctggccttatctctgcttgcggcgctatggctacgactccaacctcttctcctttgagagtggccgccgatgtcagacaggccagggaatatttgcatttaagtgttcccgggctgaggaaatcttcaacctccttcaggatctgatgcactgcaacagcatcaatgtgatggaagagcctgtcatcatcacccgcaatagccaccccgctgagcttgacctccctcgagccccccagccacccaatgctctaggctacactgtctccagcttttccaatggctgccctggagagggcccacgattctcagctccccggcggctctcgacaagcagcctgcggcacccctcgcttggggaagagtccacccatgccctcattgctcctgatgagcagtcccacacctatgtcaacacaccggccagtgaagatgaccaccgcaggggccgccactgcctgcagcccctgcctgagggtcaggcacccttcctcccgcaggcccggggacctgaccaacgggacccacaggtgttcttgcagccaggccaggtgaagtttgtgttgggcccgacccctgctcggcggcacatggtgaagtgccagggcctctgtcccagcctgcatgaccccccacaccacaataataacaatgaggccccttctgagtgtccagcccagcccaagtgcacctacgagaacgtcaccggggggctgtggcgaggggctggctggagactgagcccagaggagccgggctggaatggccttgcccaccgccgggccgccctgctgcactatgagaacctgcccccactgccccctgtgtgggaaagccaagcccagcagctgggaggggaggctggggatgatggggactcgagggatgggctcacaccctcttccaatggcttccctgatggtgaggaggacgagaccccactgcagaagcccaccagcacccgggccgccatccgcagccacggcagctttcctgtgccactgacccgccgccgcggctccccaagggtcttcaactttgatttccgccggccggggcccgagcccccaaggcagcttaactacatccaggatgaagctaaagggctggggtggagaccgccctaaggggccccgagaacccctcgagcccccaagcccccatgcccaccacccaccctgcccgaagctcagactcctacgccgtgattgacctcaaaaagaccgtggccatgtccaacctgcagagagctctgccccgagacgatggcaccgccaggaaaacccggcacaacagcaccgacctgcctctgtagggacttcccggtcctcaccaccctctgccccaccatgatccagcctctgcctcacactcctgtcctctgaacccaccctccccagggttcagggttgctttgcagaaggcatggaggtgggaccagatgcttccctgtgctggctggagtccccagagatatcagccaccgagtctcctggtctgtctccaggctgggaagagaagggtgaccaggcgaggagggagccgagacgtcaactgtgaagggttcctgtgattgcgtttagcgccctcccgttctgtccatttgtcttgtctgccgactgtccgtgtgtgttttttttggttggaattttgaaacattttgtacctgttgattttatttatcagtttatttttctatttattgttttaaatgtaatttaacatatttattattaatataattatttttaaattttgaaaaaaa

SEQ ID NO: 60712 - DNA, 3197 bp, Homo sapiens
  misc_feature (1)...(3197): n = a,t,c or g
ttttttttttttgggcgcagagggcgtttattggacctgtccttcccagccgctgcttgtccaggttcagcgctctccgcgggtgaggcaaggaaaccgaggagacgcccgagccgggtcaccacaaggtccgcctggacccccggccgtcacggacggtcctctggatgcagatggtccagggatctgggggtcctgggagagtggtgtgtggactgcgggcccagctggacaaaggcaggggcttcctcagaagctctgctggtcacgcaggcgtccggcccacggccttcaacagccctgcagggcgggctgaggttaaccgcgccgaggagagtccagggcgagcggtggctcttgcagcagccgggctcaggggcagctgaggggtagctgaggagtagctgaggggcagctgggctcaggggtagctgaggggcacccgccaccagagcccaccgcacaggcagttcttgatccagcgctgctcccactgcttcaccgccgtggttctgttgggcgacttgagcatggtgacacagccgcacctggtgcaggccttgcattcctccgtggggcaagcgccaaggtgcagcctccgcaggtggtcgatcttgggctggcctggggccctggcgaggccgtcgagctgcagggtggcagcactgccaggcagcgtgggcgcccggccaaactgcagacgaaggggctgcttgggctgcaggcggctaaccaggccgtcgctggctggcagccagtccaggctggggataagcagctggctgggcagcaggcagcattcatccaccagcgcctcgtccggctcgctcgctgggccctcatcgcgacagcagatccagagcttggtgagcaggcggaagagcagggacatgctgtcctgggtatccgaggtggccgtatacacgggcaggcagctgggcttcagaaggccccagatgcggatgaccaccatcaattcccgaagcatgcccagcgaggtgccgtcccgcaggaagctgtggcccggcctcagcagggaaccagcagaggcttcatggagaggagggctccgaggtgggggagggctccgaggtgggggagggctccgaggtggggcagggctccgaggtggggcagggctggttgggtaggctggccagcaggtacagcacgaagtcgcccacccactgcaagagctgctgcagcgcctgcagtgtgttcatgtccagcacaaattcctccgtcttgaggttgatcatgaccttgtcaatgtcgacgtcggtgatcttggtgcagatctcggtcagccggtcgccggggctcttgtcaggcgtgttgagaaagtgggggcgcagcagcgacttcagggtggagctgatggcgatgaggaagagcttggtgtggtagtcgcacacgcgggtcaccgtgcagggcgacagcttgcagagcgaggccttcatggccaggatccgggtggagaggacctgctgcagggcagcggtctggcgcgtgtactcctcgtgcagcttctccaccaggctctgtaccatactgggctgcacgtgcagcaggatgtcccaccagtcgtagccggtcaccatgcagtactccagcaggaagagcaggtgccgcagcgccagccccacctccagcgggtggcccatggaaggtgagaggcggagccacgctcagcttcccgtggctgtcaatccccaccagggccagtgacgtccacgatagctgcatagcctttaagtggacggcggggcccgcggtgcgggggcgcttcatggccggctcatccacaggcctcggggccgcggagctgtagaagaccgccatggtctgcagtgagagccggtgcacgatgtggacgctgccgtcgtggaaggccagggccagcccgaggccagggtagaactgtgtgtcgctggccaccttgaggtcggtgttggtgagcgagatgggcagcttgggcagcgcccacggccgacacacggtccagatcgttggtggccgataggatccgccatttgagaattgtgggctgtttgtcgccaaccacgggggagatctgctggaagatgttgttcacggggagtccctccttgcgcagggaccagcactccacgatgctgctggtctggctggacgcgcacaaaagcacctgctccgacatgtcccgggccaggaacttgaggtgggtgatggcggggaacttgtccttgcggttgaggtcggtggtgcagcgcatgaacagggagggcaggatatccgtgtcgatacggcacttctcgctcaccacgctcacgcacaccttgtagaactgcacgggcgtacgcgctgctgccgtccgccgtggccaccacgatgttgccgccgccggtgaaggcgatgtcggccagggccacgcgggcgcgcagccggcacaggctcatcggtggacgtcgagcacctgcccgctggcgttncagcagggacacggtgaccaggccgctgaccgtcaccgcgatccagccctccatggcattgccgcacgaacagcgtgagcgacgggtgagaacttgactccgggagaacttctccccgaagctggaggcgcccgacttctccacgtgcagggccagtttcacaccatttgtgcagccaggacagggcccacaaatggggtcccccctccactaaggctgcccactgagcttctcccagctattaagccaaggtggtcccgccatgctccagcaccttgatctgccccgtcggccatctgctgaacaggaagccgggaagcctgactggtcccactccaggcaggtgatagcctcgtggtgctctgaggggatcgagtgcaggtcccaggggtgctccgtgtccaggatgtggatcatgcgggtcaggtcctggtcatcgctgcgcaggtccatggtgaaggcgatgagatttcggcaggaccaggcgcaggccaggggcaccgatgggcagtgggtgctcttggaccatttctcccactcacagacgtaggccaagtccatcatcccacctgccgctggccgccgcaaatcacacatgagggcagtcaccagctcctggtcggcccgtgcgccaagctcagcgggcgtccgcggtgcgatcttccctagcgcctcgggtctggcgccgccatcttcctcggtaacaaccagtcgcttgaggcgtgg

SEQ ID NO: 60713 - DNA, 1285 bp, Homo sapiens
ttttttcacatttctttacatttaatgtaaataccaacagtggtcacctatcaacatcatggaagagcacacttcacaggtttcataatcaaattttaaaataatcacatgtaataaaaacaaatgactaaaatacaaaaatgtaatgtatttatttactaaatggttagctataaagatacaatttctgccttggagtttaaagcagtttcattttttgccatagttactttttctgataatatgctagaatcacagtcttctctgttttatctggattgtagggattgtttacattttatatggtttgttcacttgagaaccaaattttttttttcttcatgatgatggaagctctgtaatataaaaatgtcattgtgctcatatatttgaataatacccgaccccggttttcaaagtctctgtgagcatatcttgcataagtcttgttatgtggggatccttccaaaaggttcatggtcattgaaacaggattcaaaaacttcatcaacagcctttttagctacttctttgctgatattcctaacagccaggatagaaagagtggctctgtctcgcacacaagtctggtggtgttgttttaatccaaaatgtaacctgaatatttcattgacaagtgagcagtctccactaaggttagcagctcgaacctctgagcacgccaaatgtctgatgttggtgaaccagtcgacatgggcacgacaatgatcaaatgcatgaataagctcgtgtgtgaccactctgttcatatgggcctgattatggatattattctggcacaaaactatctgagatgttgaagcatcaaaacctccactgacatttccattacagtcttcgcaagaaaagtgtctatctttgttaacagcacaacctgagtgtttcatagcatcaagcagaagtttgacatatggatttgtctccagcgtcttcaggagcctaagctggcacttctggttgctggtgaagaagctggagaagaacccttgctggggattcccctgggccagacgctcggggaagacctggcaagagacgtgttgctgctgcagctgctcccctgccgcggggccccgccggcgctcgtccggagctcccgccatgcctcccgcagacctcgccgctgcttcctcctggctcaggcggccagagcgagactgggaaaggtaacctccctcccgccaacgcgaccgcccaggccctccctccgcagggaagaagggcagcctggctgggctgaagacgttaggcgggagggggcttt

SEQ ID NO: 60714 - DNA, 2357 bp, Homo sapiens
tggacgagaccccgagggggaagcggcggctgattcagggtcgcgcctccgttggaaacttgggctgaataccgcggcgggcgcgagcgaggcgccctagacatcttctccctcccttgcctcagatttattgctaaacatgggtgcatttttggataaacccaaaactgaaaaacataatgctcatggtgctgggaatggtttacgttatggcctgagcagcatgcaaggatggagagtggaaatggaagatgcacacacagctgttgtaggtattcctcacggcttggaagactggtcattttttgcagtttatgatggtcatgctggatcccgagtggcaaattactgctcaacacatttattagaacacatcactactaacgaagactttagggcagctggaaaatcaggatctgctcttgagctttcagtggaaaatgttaagaatggtatcagaacctgggatttttgaaaattgatgaatacatgcgtaaccttttcagacctcagaaaccgggatggacaaggagttggttcaactgccagttggaagttatgatttcacctaagcatatctactttatcaactgtggtgattcacgtgctgttctgtataggaatggacaagtctgcttttctacccaggatcacaaaccttgcaatccaagggaaaaggagcgaatccaaaatgcaggaggcagcgtgatgatacaacgcgttaatggttcattagcagtatctcgtgctctgggggactatgattacaagtgtgttgatggcaagggcccaacagaacaacttgtttctccagagcctgaggtttatgaaattttaagagcagaagaggatgaatttatcatcttggcttgtgatgggatctgggatgttatgagtaatgaggagctctgtgaatatgttaaatctaggcttgaggtatctgatgacctggaaaatgtgtgcaattgggtagtggacacttgtttacacaagggaagtcgagataacatgagtattgtactagtttgcttttcaaatgctcccaaggtctcagatgaagcggtgaaaaaagattcagagttggataagcacttggaatcacgggttgaagagattatggagaagtctggcgaggaaggaatgcctgatcttgcccatgtcatgcgcatcttgtctgcagaaaatatcccaaatttgcctcctgggggaggtcttgctggcaagcgtaatgttattgaagctgtttatagtagactgaatccacatagagaaagtgatggggcctccgatgaagcagaggaaagtggatcacagggaaaattggtggaagctctcaggcaaatgagaattaatcataggggaaactaccgacaacttctggaggagatgctgactagttacaggctagctaaagtagagggagaagaaagccctgctgaaccagctgccacagctacttcttcgaacagtgatgctggaaacccagtgacaatgcaggaaagccatactgaatcagaaagtggtcttgctgaattagacagctctaatgaagatgcagggacaaagatgagtggtgaaaaaatatgactttcctttttggtaatatttttgtgatctttgatggtttttaacctaggaagtgtaatgtatgcatttatataactgttttgttatttgaatcttggaaaactagttttattatattcagatagccttgttttttaaaaaggcctttgcatacacctttatgagatagtgtaaaattgactatttatagtactatggatttaatgaaattatatgtcatttcacattgtatgccagaaattaggctaccaattatgaattaaagtcagtagttaaattaatactagatagaattagaaattttgattagagagattatgctatattatggaaaaacttgttaatgtagaattatactgcttcatattattttacctattagtacactcatagttagctttgtaataaatttatgttttctttaataattttagttcttcaaagaatgggctgatgctggcctgtaatttttctttccaaggatgataatttgtgtgttgtttgatttgtttatattttacatctctgtaggttttatttttagaagttgtgagatatttgggatgtgtgggctatttttcctttctctgtattctttatgaaaccataactttttgaaaaacctatgtattattcatacagctttgggtttgtatattctgtataggcctaacttacacacatccaaaatgtatgtcaaccaagtgtttagaatgaaattataagtgtttaagtccaaataaagcatgtgatgtggaataaaaaaaaaa

SEQ ID NO: 60715 - DNA, 3622 bp, Homo sapiens
tccaggtctcgacttcactgctctgtgtcctctgctccaggaggcccagcctgtgtggccctgtgacctgcaggtattggagagccacagctaagatgccaggaacccctgcaagcctagaaatgagccttctctgcatgatggcttcttatatgccatgcagaattctcaccatgaatttgtgatctgcaatattaaaaatgttctctttgtggctgttgaacatggaaaggtgtggataatctatttctatggagaaaacctgggattcttagtgaagatggagaacatataatgttgagggaccattgacatttatggatgtggccatagaattctgtctggaggagtggcaatgcctggacactgcacagcagaatttatataggaatgtgatgttagagaactacagaaacctggtcttcctgggtatattgctgtctctaagccagacctgatcacctgtctggagcaagaaaaagagccttgggagcctatgaggagacatgaaatggtagccaaacccccagttatgtgttctcattttacccaagacttttggccagagcagcatataaaagatcctttccaaaaagcgacactgagaagatataaaaactgtgaacataaaaatgtacatttaaaaaaagaccataaaagtgtggatgagtgtaaggtgcacagaggaggttataatggatttaaccaatgtttgccagctacccagagcaaaatatttctatttgataaatgtgtgaaagcctttcataaattttcaaattcaaacagacataagataagccatactgaaaaaaaacttttcaaatgcaaagaatgtggcaaatcgttttgcatgctttcccatctagctcaacataaaataattcataccagagtgaatttctgcaaatgtgaaaaatgtggaaaagcttttaactgcccttcaatcatcactaaacataagagaattaatactggagagaaaccctacacatgtgaagaatgtggcaaagtctttaattggtcctcacgccttactacacataaaaaaaattatactagatacaaactctacaaatgtgaagaatgtggcaaagcttttaacaagtcctcaatccttactacccataagataattcgcactggagagaaattctacaaatgtaaagaatgtgccaaagcttttaaccaatcctcaaaccttactgaacataagaaaattcatcctggagagaaaccttacaaatgtgaagaatgtggcaaagcctttaactggccctcaactcttactaaacataagagaattcatactggagagaaaccctacacatgtgaagaatgtggcaaagcttttaaccagttctcaaaccttactacacataagagaatccatactgcaggagaaattctataaatgtacagaatgtggtgaagcttttagccggtccctcaaaccttactaaacataaggaaattcatactgaaaagaaaccctacaaatgtgaagaatgtggcaaagcttttaagtggtcctcaaagcttactgaacataagttaactcatactggagagaaaccctacaaatgtgaaaaatgtggaaaagcctttaactgcccttcaatcatcactaaacataacagaattaatactggagagaaaccctacacatgtgaagaatgtggcaaagtctttaattggtcctcacgccttactacacataaaaaaaattatactagatacaaactctacaaatgtgaagaatgtggcaaagcttttaacaagtcctcaatccttactacccataagaaaattcacattgaaaagaaattctacaaatgtgaagaatgtggcaaagcttttaagtggtcctcaaagcttactgaacataagataactcatactggagagaaaccctacaaatgtgaagaatgtggcaaagcttttaaccatttctcaatccttaccaaacataagaggattcatactggagagaaaccctacaagtgtgaagaatgtggcaaagcttttacccaatcctcaaaccttactacacataagaaaattcatactggagagaaattctacaaatgtgaagaatgtggcaaagcttttacccaatcttcaaaccttactacacataaaaaaattcatactggaggaaaaccctacaaatgtgaagaatgtggcaaagcttttaaccagttctcaactcttactaaacataagataattcacactgaggagaaaccctacaaatgtgaagaatgtggcaaagcctttaagtggtcctcaacccttactaaacataagataattcatactggagagaaaccctacaaatgtgaagaatgtgggcaaagcttttaaactgtcctcaaccctttctacacataagattattcatactggagagaaaccctacaaatgtgaaaaatgtggcaaagcttttaaccgaccctcaaaccttattgaacataagaaaattcatactggagagcaaccctacaaatgtgaagaatgtggcaaagcatttaactattcctcacaccttaatacacataagagaattcatactaaagagcaaccctacaaatgtaaagaatgtggcaaagctttcaaccaatattcaaaccttactacacataacaaaattcatactggagagaaactctacaaacctgaagatgtgacagtgattttgacaacacctcaaactttttcaaacataaaataaattatactggtgagaaattctagaaatgtaaagaatgtgataaaggctttacatggttgtcacacttgattgtaggtaagataatttacattggagtaaacttctacaagtgtgaagaatgtggcaaaacttttaattaatgctcataccttattgcacaggaaagaatttttacttggaaaaaggtatatacacaaagaatgtggaaaagccattaatatgtgctcatatcttactcaacatcagagagtctgtacttaataaaaccattatagatgcaactagtgtcaaaagatctttcagaaaataaaagcctttaaagtgaagaagataattcattctgaagacaaacattacaaatattaagagggttgtagtaccattacttgcatcacagatcttattgtacacattttgtactaaagaaaaccctgaagcagttgctcaaatactgttcaacatcagaaaatttatattggaaaaaacccctggaaaatgtaataaatttgtaaaaacagttttgaaaaactacagcttataaaacatgagggtctataatgcttggttgatagtacaaagtttattcaacatcagggaatttatattggagaaaaaccctacaaatgtaatcagtttggaaaaacatttttaaaaaaaccacagcatagaaaacaccacagggttcatactaaaatatgtttttgcagatgcagtaaaaatgaaaaaaatttaatccgaaattaagtttatgtaaatatctgagaattcacagtagaaatatctaaggcgcggacacttcagacattacactaaatcagtgctaagtacagaaaacaacacaaaataaaacttggtgggattaaattatttgtatataacattaaaagg

SEQ ID NO: 60716 - DNA, 1578 bp, Homo sapiens
cgcggccgcgtcgacgccagtctagctgctgcacaggctggctggctggctggctgctaagggctgctccacgcttttgccggaggacagagactgacatggaacaggggaagggcctggctgtcctcatcctggctatcattcttcttcaaggtactttggcccagtcaatcaaaggaaaccacttggttaaggtgtatgactatcaagaagatggttcggtacttctgacttgtgatgcagaagccaaaaatatcacatggtttaaagatgggaagatgatcggcttcctaactgaagataaaaaaaaatggaatctgggaagtaatgccaaggaccctcgagggatgtatcagtgtaaaggatcacagaacaagtcaaaaccactccaagtgtattacagaatgtgtcagaactgcattgaactaaatgcagccaccatatctggctttctctttgctgaaatcgtcagcattttcgaccttgctgttggggtctacttcattgctgggacagggatggagttccgccagtccgagagcttcagacaagcagactctgttgccccaatgacccagctcctacccagcccctcaaggatccgaggaagatgacccagtacagccaccttcaaggaaacccagttgaggaggaattgaactcaggactcagagtagtcccaggtgttctcctcctattcagttcccagaatcaaagcaatgcattttggaaagctcctagcagagagactttcagccctaaatctagactcaaggttcccagagatgacaaatggagaagaaaggccatcagagcaaatttgggggtttctcaaataaaataaaaataaaaacaaatactgtgtttcagaagcgccacctattggggaaaattgtaaaagaaaaatgaaaagatcaaataaccccctggatttgaatataattttttgtgttgtaatttttatttcgtttttgtataggttataattcacatggctcaaatattcagtgaaagctctccctccaccgccatcccctgctacccagtgaccctgttgccctcttcagagcaagactgtgtcttaggaaaaaaaaaattatgcgtctaaagataccattaacttaaaaaaacaaaaaaggtcacttcacctgattgtctgagggggaaaaaattaaaaaaataataatcggaaaaggccagggaccatgacctatacctgtagtctcaactacttgggaggctgaggcaggaggatcacttaagcccagaagagcaaatctagcctgactggtgtttctggcaagactccaactctaatttaaaagatagaaaagaaagaaaatgaaaagacaggacacagactgggagaaagtatttgcaggtcatatatctaataacagtgcttctctcaagagtatatagaaagctcttagaattaataatgagaagacaattaaacgaacaaaaatgggctgaagtcttggatagacatttcaccgaagacataggaatggcaaataagcataagaaaaggtatttacaccaggtgcggtggctcaccatgtgtgcaatcccagc

SEQ ID NO: 60717 - DNA, 5825 bp, Homo sapiens
cccacgcgtccgatcgtcgagcgctgggcctgtgatcgctgaggggcgagcagttgcgaccctgggctcctggggacctgagcgttatgtctttccgcgacctccgcaatttcacagagatgatgagagccctgggataccctcgacatatttctatggaaaatttccgtacacccaattttggacttgtatctgaagtgcttctctggcttgtgaaaagatatgagccccagactgacatcccgcctgacgtggatactgaacaggaccgagttttcttcattaaggcaattgcccagttcatggccaccaaggcacatataaaactcaacactaagaagctttatcaagcagatgggtatgcggtaaaagagctgctgaagatcacatctgtcctttataatgctatgaagaccaaggggatggagggctctgaaatagtagaggaagatgtcaacaagttcaagtttgatcttggctcaaaagattgcagattttgaaggcagccaggcagcttgcgtcctgaaatcacctccaaaggagcatctctgtatgactttcgctcggcatggaagtagagtttgagggaaatgagaacagaagccattgccagacctctggaaataaacgagactgaaaaagtgatgagaattgcaataaaagagattttgacacaggttcagaagactaaagacctgctcaataatgtggcctctgatgaagctaatttagaagccaaaatcgaaaagagaaaattagaactggaaagaaatcggaagcgactagagactctgcagagtgtcaggccatgttttatggatgagtatgagaagactgaggaagaattacaaaaagcagtatgacacttatctggagaaatttcaaaatctgacttatctggaacaacagcttgaagaccatcataggatggagcaagaaaggtttgaggaagctaaaaacactctctgcctgatacagaacaagctcaaggaggaagagaagcgcctgctcaagagtggaagtaaccgatgactcggacatagacatccaggaggacgatgaatccggacagtgagttggaagaaaggcggctgcccaaagccaccagacagccatggagatgcctcatgcaaggaagacctggcaaacgcattgtgggcacgatgccaggttggagactccgatgacaatgtaagtcccccgctcccctcagtggttctgtgcactctgggtttggctgtccccatagatgggagtggctgagttgctgtcagcagccagggagccgtctatggtcagcccggccgtgcctcgatgcgtggcagggtttggcctcatgaggctctggactcttcgttgctcgtggatggctcatctcttttcaagtgaatgtgcttgctctgcttttttttgccttctcactgttctttccattctcgctttccaaagatggaagcagcaccagctctcttaggtaaatgcaagacttccagctccaagaagcaggttggttttctgttctgcctcatgtgtttgtgggtgtctgtcagccctcccggggccagccaggggcctctccctaggagtgatgcttcctctctcctgggcaaaaaggccactcaaaagagatcctgtggtgacagcgggatcactgaaggcccctgtgctaaagtggaggcgcaggcacggagcctggaggcggggaaagctcaggccgggccatcctcaggccctgggccgccacctagaaatgaaggaggacgccgagggccgggctcaggaccaacccccctccctgttctgtgctggggacggaatggtgaagcagcactgtccccagaccaggccctcgaggtgccaggcatgaggctgagacataagctgccttgagctttactgagtggataactccctggagcacttaagcaaaaggggattctaggggtcctcagtgaggtccagtcatcagggctctgccgcccattgctcaagcctacgttctttgttgcgtccctggcagtgctgctcggcccacacagcaaagggcgactcaacagagactgaccccaggctgcctccatgtgccctgaatttacagggcacagtctgtagagaagcagagagagcaactggaaaataattttcctaacaagctcgggtgtggatggtatacagcgtctctccgtcttgcccacccaagacagaagcagagggagtgtggcgtgggtgctggcaatgctgaggcagcaccgcctgcctcttctccagggtttgccttctctctcctcagagcgaatgcattagtcgcagctgagctttatgcctggtggtcacttgtttatttcaaggaggctgtgtccatgccgccctccaggcacagggttccatgctttacgtgttcaggcatccaacacgtgtctgttgagtgcctgccacatgccagtgctgtcgtggattatggggaacgcagcaggggcagaggcaagcccccgcttcatggctcacaccccagcaataatgatggattgtcggatcagggctcatggtgttaacaggaggaataacagcttcaggggacagggagtgacagggaacaaggagggggtggcgtcttctgcgaggtcagtgaaggcccctgacgtggtggtgtttgagcagggcctgagtggagggagcgagcgcatgggttggcggcacctgggcatgtggaatgcactcctcgcatcgaggagcagaggcagctggtgtgattgtgggtgagtgcgagaggcagcaggggccatgcagagctttgcagggtgagatgaagactctgttttctctgagtgtgaggggaaggccctgaagaatcatgagcccagaagggtcaagagctgatgatccctgtttgagagaagccagttaggaggcgcctgcacccgtggaggtcagaggtgacggtgcttggccgaaggtgtggcagcagaggtgttgagaaatggtcaggtcctgggtctctctaagaaccatcaggttttgtgaattgattggacataggctgttagagaaagagaaaaatgagggtgcctgggcttggtctaatcagcagaaagcagagtttcattttctgagatggggccgacttgacaaaggggcttggaaggcagatcgaaagtttgattttggacattctgaatgtgacagccacatgctagggttgagtagccaggtggaatttaagtctggagttcaagggccacgtctgggctagagattgaattttgggagccacccttatttggttggtatctaagccacaaggatagatgtgactgcctagggagagcaagtagaatgagaagagaggcgacccaaggtcctgagctgcatctgccctgcagaggtccgggaggaaggggcaggcagaggaggctgaggggcgtcagcagtgaggaagggggacctggactagagaaggggccctgggggatggagaagatgggttttaaggatgaaggggtgattccacagctcaagcaggatgaggcctgagaatcgatcccagtccgttgaatgtttccttcttgacaggagcagtgctggggtcagtaggtgagagcccgggggaactgaagcagtcgtgaggggcacaggtgtggacagtgagttcaacgactcgctcaggagctttgtgtgaggggagagagacagggcagagcagctggagaggaaggtgggattacctttggggttttttttcaagaaggaaattacagcatgagtgtgcaccgacaggaatgatctagatagaacgaccagccatcctggtttacatgggacgcaggaactgccgttttaaagctgggctgagttggtcaccctggagccctggatccgatgaggagagagagggtgtgtctttcactttgctccctttttttcttttttttcttttttttttgagatggagtcttgctttggagtgcagtggtgcaatctcggctcactgcacctctgcctcccaggttcaagcgattcttctgcctcagtctccggagtagctgggattcactttgctccttataccaatgtctatgttgctttccatccacaatctacaaaaagccaaaacaggcctcccttccctctctccaagcccctgtccttcttgccatctgtagggggagtctctaggtccagtggccctcagcgcagatgcagagtgcttcttagacgctgcgggaaagccagcccctgcagcaccacacccagatgcacctgcagtttggaggattctggttggatgataaattccagctggcagtacatagcctcagtcccatctgtatgccctcccacagcctgcttgccactctgccagcctcttccttcacacagggatgctgctatagaaagggaggcagagagtcttaggacaagatgtcaggaatgaggcaggatcccccgttgcatctgccatttttttcctataggaggactcggaggagagtgaaattgacatggaagatgatgatgacgaggatgacgatttggaagacgagagcatttctctctcaccaaccaagcccaatcgaagggtctggaaatctgaacccctggatgagagtgacaatgacttctgacccttttgccaagggaccctggcagattaaaaccctcagacttgtaggtaaatgggaacttagaaggttaggaaggtaacccctgttttgtttactaagctggctggactccatgatcactgaggcaatacttatttctgctttagccctcctatgtttgcattccatgaagcttaaaataaggaattgaagcaaaacccctaagatttaatttttttcccaccttatttatctttctaaaaacttgaggaatgcatgtgttcttagtgattcacatccacgggacaaaaactcaagaagaaataagagctgacgccacacaagtcttggctgcttttgttactatacattttctctgagactccagcagagttggggctggaacttggcactggggactcatgtttggaatcgtaggggaacatctggctgttaatcacttgcacagttgagaacatttcctatacatcggcttttaattctagctcttatttcattttgtaatcttattttctttcgtctgcatgttcacaataccaagcattaaatgtattttaataactaaacttttctgaaagaaggttagctaaagttaaatgaaaacttggtttctttgaaaatcaggcaatagagacaggctccagatgaggaatcctccattttctgtccgaagctgacactcctctggcagtccagttcaccttggattacagccaccttcatgtttccacggttggtactaaatctggaaactctggtgacctgggctgccctctcagaaactccagactcccatggcaatgacagccgggacacttttcttccctccagccagggtttctctaaaggagctttgttttgtctaaagtgtggcaagacatagtgcacaacacagggacaaaggcaggtttcctgcagctcgctacctaagtgtttctgtaggggaaggagccaattaagaaaaagtgttggtacagattcatgtttctgatttaaaaaaacaacaacacaggattgaattaagtagagtaatagcactagaagaatttttctgttgtgaaattagaagtggagttggtttttttcttttttcttcttctttttttttaatatgaaaagtacttagctgggagtggtggcaagcgcccttgggtccagctactcaggaggccaaggtgggaggatcacttgagcccaggagtt

SEQ ID NO: 60718 - DNA, 2648 bp, Homo sapiens
ctactacatataaacatcaaaacaagctccgggaagctacagaagatttgagtaaagtactagatgttgagcctgataatgatttggccaagaaaaccttgtcagaggttgaaagagatctgaaaaattctgaagctgcatctgagactcaaaccaaagggaaaaggatggttattcaggaaatagaaaactccgaagatgaagaaggaaaaagcggaagaaaacatgaagatggcggtggagataagaagcccgcggagacggcgggcggcggcgccaccgggcatccgggcggcgggcagggcgcggagaaccctgccggcctgaagagccagggccaacgagctgttccgaagcgggcagttgcccgaggcggccggcaagtactcggcggcaatcgcgctcctggagccagcaggaagtgaaattgcagatgatctaagtatcttatattcaaatagagcagcatgttacctaaaagaaggaaactgcagtggctgcattcaagattgtaacagggctctggaacttcatccattctctatgaaacctcttctgaggcgggcgatggcctatgaaactctagagcagtatgggaaagcttatgtggattataaaacagtgttgcagatagactgtggactccagctagcaaatgacagtgttaacaggctatcaagaattttaatggagctggatggaccaaattggcgggagaagctgtcacttattcctgctgtgcctgcttctgtgccactgcaagcttggcatccggcaaaagagatgatctcaaaacaagcaggagactccagcagccatcgccagcagggcatcacagatgaaaaaacatttaaagcccttaaggaagaaggaaatcaatgtgtaaatgacaaaaactataaagacgccctcagtaaatacagcgaatgcttaaagattaacaataaggaatgtgccatatatacaaacagagctctctgttacttgaagctgtgccagtttgaagaagcaaagcaggactgtgatcaggcacttcagctagctgatgggaacgtgaaagccttctatagacgagctctggctcataaaggactcaagaattatcagaaaagcttaattgatctcaataaagttatcctactagatccaagtattattgaggcaaagatggaactggaagaggtaactagactccttaatcttaaggataagacagcaccattcaacaaagaaaaggagagaaggaaaattgagattcaagaggtgaatgaaggcaaggaggagcctggaagacctgcaggggaggtctccacgggatgccttgcttctgagaagggaggcaaaagcagcaggtcaccagaagaccctgagaaacttccgatagccaagcctaataatgcctatgaatttggtcagattataaatgctctcagtaccaggaaggataaagaagcctgtgcacatcttttagccatcactgcaccaaaagatttgccgatgtttttaagtaacaaacttgaaggggatacattccttctcctcattcagtctctgaaaaataatcttattgaaaaagatccctcattggtgtatcagcatcttttatacctgagtaaagcagaaaggtttaagatgatgttgacactaattagcaagggccaaaaggagctaattgaacagctgtttgaggacctttcagacacaccaaacaaccattttactttagaagatatacaggccctaaaaaggcagtatgagctttaaatcaagataattgttagatttcttccatgcatgtatgtgttccaggaatgttaatgagatggtattgtaaaagagttgcatggataaaacttggcctagaaaagtttggtctgcactataaaacattttacttattttcctacatagaacatgtatattctacaatctgctttttattagttgtaaatattttcttatgtaccagaaccaaataagtatatttagaacttgttaaaaatacattttaatttatgatatacatattattttaattacttgttaaaattttgagttaagttgcatttctttgggctatgaaggagtcctcttaagtttgatagaaatgaatttcttgtaacattcttttttaaaagtggaagtcattaacagtgattattatatcacttatatcctgctaagatacacataaatcccattttgtactagtacctgtggattacagtcagttaaaatgaaatgcaacactgaagtctataacatgaaatgattattaaattgtttattaatttagagctataagaggaacttattttttctaatacggaagcattgcctaataattaagaacaaaaattgccaaaaatttctaccactttttactagattttaaaaagctactttcttttatattgcctatataagcaaaaaaccaaccactgtattaaagcaaactaagcctgcatttatatctgaattattacctccatattttaccaaacatttgaatgtcccccttcccccttttttgttttctgcttttatgactgtatttattcctttactgtaaaagaatatgaagaactcatacatgttgaaagctcctttgttgactgggtcaaagtgaaggaatttcaatctccaaa

SEQ ID NO: 60719 - DNA, 8461 bp, Homo sapiens
gcgaccgctcgcccggaccctgaggctgctgggcccaccctcccggaaccgtccgaccctcggtggcctcggcctcttctgccatctccggtcctaccctggggcggagggtggaaggcagcttccgtcgaagaggagggggctgcggtggccaccgcggcggagcccgagttattttaccaagaaaatggtttgcacgactttgaacatatactatccatgctgatgggacaggatccaatatgaatataaatgatggaggaagacgacgctttgaagataatgaacatacattacggatatatcctggggctatttcagaagggacaatctactgtccgattcctgccagaaaaaactccacagctgctgaggtgattgagtctcttataaacaaacttcatcttgacaaaacaaaatgttatgttctagcagaggtaaaggaatttggtggagaagaatggattctcaatccaacagattgtccagttcagcgaatgatgctgtggccccgaatggctctggaaaatcgcttaagtggagaggactaccgcttccttctgagagagaaaaaccttgatggatcaatccattatggtagcctgcagtcatggctacgggtaacagaagaacgtcgcaggatgatggaacggggttttcttccacagcctcaacagaaagactttgatgatttatgtagtttacctgatttgaatgagaaaactctcttagaaaacctacgaaatcgctttaagcatgaaaaaatttatacctatgttggcagtattctaatagttattaacccattcaagtttcttcctatttataaccccaaatatgtcaaaatgtatgataaccaccaactgggaaaacttgagccccacatttatgctgtggctgatgtagcttatcatgccatgcttcagcgcaaaaagaatcagtgcatcgtgatttcaggagagagtggttctgggaagactcaaagcacaaactttcttattcaccaccttactgctctcagtcagaaaggatttgccagtggagtagaacagattattcttggagctggaccagtacttgaggcctttggaaatgcaaagacagctcataataacaattcaagtcgttttgggaagtttattcaagtaaattaccaggaaacaggcactgtacttggtgcctatgttgaaaaatatctactggagaagtccagactcgtttatcaggagcataatgaacggaactatcatgtattctattacctcctggcaggagcaagtgaagatgagagatcagcattccatcttaagcaaccagaggaatatcattatctcaatcagataacaaagaaacccctcagacagagctgggatgattattgctatgactctgagccggattgcttcacggtggaaggagaagatttgagacatgactttgagcgcctacaacttgccatggaaatggtaggatttcttcccaagacacgaagacagattttctctcttctctcagccatactacatttgggtaatatctgttacaaaaagaagacataccgggatgactccattgatatctgtaatcctgaagttctgcctattgtctcagaattattagaggttaaagaagagatgctatttgaagcattagttacaaggaagacggtgacagtgggagaaaagcttattttgccatacaagttggcagaggctgtgacagtgaggaactccatggctaagtctctgtatagtgccctgtttgactggatagtttttcgaattaatcatgcacttctgaatagtaaagatttagagcataataccaagacattgtctattggtgttcttgatatttttgggtttgaagattatgaaaataacagctttgaacagttctgtattaattttgctaatgaacgtttacagcactactttaatcagcatatctttaaattggaacaagaggaatatagaactgaaggtatcagctggcacaacatagattacattgataatacctgctgcataaatcttattagcaaaaaaccaacaggactgcttcatcttttggatgaagaaagcaactttccacaggctacaaatcaaacattgctagacaagtttaagcatcaacatgaagataattcttacatcgaatttccagccgtgatggagcctgctttcattataaaacattatgctggaaaagtaaaatatggggtaaaggatttccgggaaaaaaatacagatcatatgcgcccagacattgtagctcttctgagaagcagcaagaatgcatttatctctgggatgattggaattgatcctgtagctgttttccgatgggcaattctccgagcttttttcagagccatggttgctttcagggaagctgggaaaagaaacattcacagaaaaactggacatgatgatacagcgccatgtgcaattttgaaaagtatggatagttttagctttctccaacacccagtccaccagaggagcttagagattctgcagagatgcaaggaagagaagtacagtataacccggaaaaatcccagaacacctctttctgatctccagggcatgaatgctctaaatgaaaaaaaccaacatgatacatttgatattgcctggaatggcagaactgggattcgccagagcagactatcaagtggcacctccttgcttgataaagatggaatatttgctaattcaactagcagcaaactcctggagagagcccatggaattctcacgagaaacaaaaatttcaaatccaagcctgcccttccaaagcacttgctagaagtaaattctttaaagcacctgacaagactgacactacaagatcgcattaccaagtctcttcttcatttacacaagaagaaaaaacctcccagcatcagtgcccagtttcaggcatcattaagcaagctaatggaaacacttggtcaagcagaaccatattttgtaaaatgcattcgctctaatgctgaaaagctgcccttaaggttcagtgatgtcttggtacttaaacagcttcgatacaccgggatgctggaaacagttcgaattcgccaatcaggatacagctccaaatattctttccaggattttgtgagccacttccatgtacttcttccccgaaatattattccatccaaatttaacattcaggatttcttcaggaaaataaatcttaatccagataattatcaagttggaaaaaccatggtctttctaaaggagcaggaacgacagcacttacaagatctgcttcaccaagaggtgctccgcagaatcatattgttgcagcgatggttcagggtcttgctgtgtaggcagcatttcctccatctgagacaagcatctgttattatccagagattctggaggaattacctaaatcagaagcaagtcagagatgcagctgtgcagaaggatgcttttgttatggctagtgcagctgctcttctccaagcttcctggcgtgctcacttagagaggcagcggtacttggagttacgggctgcagccatcgttatccagcagaaatggagagattactataggcgcaggcacatggctgctatttgcatacaagcaagatggaaagcctacagggaaagtaaaaggtaccaagaacaaaggaaaaaaattatccttttgcaatcaacatgtagaggattcagagcaagacaaagatttaaagctttaaaagaacaaaggctaagagaaacaaagccagaagttggattggtgaatattaagggatatggatctctggaaattcagggttcagacccttcagaatgggaggattgttcttttgacaacagaataaaagccatagaggaatgtaaatctgtaatagagagtaatcgaattagccgtgaaagttcagtggactgcttgaaggagtcaccaaacaagcagcaggagagagcccaaagccagagtggtgtggacttgcaggaagatgtgcttgtaagagagagacccaggtccttggaggatctccatcagaaaaaagtaggccgggctaagagagaaagtaggagaatgagagaactagagcaagctatatttagcttagaattgctgaaagttcgttctcttggtggtatttctccttcagaggatcgcagatggtctacagaattggtgcctgaaggccttcagtctccacggggtacacctgatagtgagagctctcaaggaagcttggaacttctgagctatgaggaaagccaaaagagcaaactagagtctgtcatttcagatgaaggagacttgcagtttccatcacctaagatatccagcagtccaaaatttgattcacgggacaatgccctcagtgcctcaaatgagactagcagtgcagagcatttgaaggatggaactatgaaggaaatggtggtctgcagttctgagtctattacctgtaaaccacagctgaaagactccttcatttcaaatagtctacctacttttttttatatcccccaacaagacccactgaaaacaaattcccaactagacacaagtatccaaagaaacaaactattggaaaatgaagacacagcgggggaagctcttactttggatatcaacagggaaactagaaggtatcactgctcaggaaaagatcagattgttccttctttgaatacagagtcttctaatcctgtgcttaagaagttagaaaagctaaacactgagaaggaagaaaggcaaaaacagttgcagcaacagaatgaaaaagagatgatggaacagattcgccagcaaacagatattttagagaaggagcgcaaagccttcaagacaattgaaaagccaagaattggagagtgtttggtggcaccatcttcctatcagtcaaagcaaagagtagagaggccatcctctctcctcagcttaaatacctcaaataagggagaacttaatgtactggggtccctatcattaaaagatgcagctcttgcccaaaaagacagttcctctgctcacttacccccaaaggaccgacctgtcaccgtgttctttgaaagaaaaggaagtccatgccaatctagtactgtcaaggaattatccaagacagacagaatgggcacccagctgaatgtagcctgtaaactctcaaataatcgcatttcaaaaagagaacactttaggccaactcagtcttacagccacaattctgatgacctttccagagagggaaatgctaggcccattttcttcactccaaaggataatatgagtattccccttgtcagcaaagaagccttaaacagtaaaaatcctcaactccataaagaagatgaaccagcatggaaacctgtgaagttagctgggccaggccaaagagagacatcacagcgattttcgtcagttgatgaacaagcaaaacttcataagactatgtctcaaggagagattaccaagttggcagtgagacagaaggcttcagattcagatataagacctcagagagctaagatgagattctgggccaaagggaaacaaggggagaagaagactaccagagtgaaacctactacccagtcagaggtttcgccactctttgcaggcacagatgtgattccagctcatcagtttccagatgaattagctgcatatcacccaacacctcctttgagcccagaactgcccggcagttgccggaaggaattcaaagagaacaaagaaccttctccaaaggctaagcgcaagcgaagtgtgaagattagcaacgtggctttggattctatgcattggcaaaatgactctgtccagatcatagcaagtgtcagtgatttaaaaagcatggatgaatttcttctgaaaaaggtgaatgacctagataatgaagacagcaagaaggatacactagtggatgttgtatttaaaaaagccctgaaggaatttcggcagaatatcttcagcttttattcatctgcattggcgatggatgatgggaaaagcatacggtataaagacctctatgcactatttgaacagattctggaaaagacgatgaggcttgagcagcgtgattcactgggtgaatctccagtgagagtttgggtcaacacttttaaagtgtttttagatgaatatatgaatgaattcaagacttcagattgcacagccactataggtgccaaaaacagaaagaaagaaaagaaggaaaaaggaaactgatttggtggaagaacacaatggtcacatctttaaagccacccaatatagcatccctacatactgtgaatactgttcttctttgatatggataatggaccgagcctctgtttgcaaattatgcaagtatgcttgccataagaagtgctgtctgaaaaccacagccaagtgctctaaaaagtatgatccagagctgtcatctcgacaatttggggttgaactgtcccgtttgaccagtgaagaccgaactgttcctttagtagtggaaaagctcataaactacattgaaatgcatggactgtatacagaaggtatttatcgaaagtctggttcgactaataaaatcaaggagcttcggcagggtctagatacagatgctgagagtgtaaatctagatgactataacatacacgtcattgcaagtgtattcaaacaatggcttcgagatttgcccaatcctctcatgacctttgaactctatgaggaatttcttcgagctatgggccttcaggagaggaaggagacaatccgtggtgtatactctgtgattgatcaactctcccgaactcatctcaatacactggaacgcctcatctttcatctagtcaggattgctctgcaggaagacactaatcgaatgtctgctaatgctttggccattgtgtttgcgccctgcattctccgctgccctgacaccactgacccactacaaagtgtacaggacatcagtaagactaccacttgtgtggaactgattgttgtggaacaaatgaataaatacaaggctcgtctcaaagatatcagtagcttggaatttgctgagaataaggcaaagaccaggttgtcactgattcgtagatcaatgggaaaggggcgtattcgtcgaggaaactatccaggtccatcgtctcctgttgtagttcggttgccttctgtgtctgatgtctcagaggagaccttgactagtgaggcagccatggagactgacatcacagaacagcagcaagcagctatgcagcaggaggagagagtactgactgagcagattgagaacctacagaaggagaaggaggagctaacatttgagatgcttgtactggaaccccgtgcctctgatgatgaaacccttgagtctgaggcctccattgggactgctgatagctcagagaatttgaatatggagtctgaatatgctatctctgagaaatcagaaagaagcttagcccttagctccctgaagacagctggcaagtctgaaccttccagcaagttgcgaaagcaacttaaaaagcagcaagactctttagatgtcgtggactcttcggtctcctctttatgtctgtctaacacggcatcatctcatgggaccagaaaactatttcagatttattccaaatctccattctaccgagctgcctcaggtaatgaggccctgggaatggaaggaccattgggccagaccaaattcctggaagacaagcctcagttcatcagcagaggaaccttcaacccggaaaagggcaaacaaaaattaaagaatgtgaaaaactcacctcagaaaaccaaagagaccccagaggggacagtcatgtctggccgcagaaaaactgtggacccagactgcacctccaaccaacagctagcactctttggaaataatgaatttatggtctgaaccggcagatgtgtgtccctccgtggctacagagtggtaaacaaatctcacctttggggctgcgtttcatcacctcgtccacaatagtcaatcctaattgtggtcctgcctcttttctaagcatatggctaagactgtatgtgctgaattcctgggcctcctgcagaagcagaaagcctgctggggatggtgccagctgtgccttggctgttgtatttgaattgagatttttactatacaaagccacctagggcctggggatttgggtcagttgtagttgcctctcccccaccctcttttcccttcccaaaggtgggtgttgaactaggggggatattgctgtcctgagggaccctctcatttctgacatttgaagaaaacgtataaatctttcttaaccgtgaaagcaaaagcctttgggtttattttgggatagttaggagctagggtagaatataatttttttccaaaaacttacttacaaacaaaaagcctaatccctctattttaagatttctgaaaaaacactccactccatgttatattctggggaaagcaaaaacaaaaaaaa

SEQ ID NO: 60720 - DNA, 2085 bp, Homo sapiens
  misc_feature (1)...(2085): n = a,t,c or g
tcgacccacgcgtaccaaaattctgttgtatgaatggcatttgtatattaaaacacttttttaaaggacagttgaaaagggcaagaggaaaccagggcagttctagaggagtgctggtgactggatatcaattttaagtggcgttcacctagtcaacacgaccgcgtgtgttgcccctgccctgggctccccgccatgacatcttcactttgcagcttgtgctgagactgacccaagtgcagctagcactgggacacagatccttgtcttcagcaccttccaaggagccaacttttattccctttcctctctcccctccccacctcgcttcttcccaatttagtaacttagatgcttccagcacatacgtaggtagctaccccagccggtttggattacaggcctgtgctggaacatcatctcagttggccaccttcctggcaggctgtagacctgacattttgagacaagcctagagtcaggagcagggactttgactcttaggaagagcacacatgagggcaaggctgctggcagacgtctccattgtccttatgttgtctgtgttgtatttttttttttttattgaccatgggtgattatttttttaaaccatcgttaatatactgaagtgagctatagcacatatcatgtgctntaagtttgtgtatttttctccatctccccttggcttcctagagtttggacatattccaggctaaatgcttttactcaagactacagaaaggtttgaagtagtgtgtgcatggcatgcacgtatgtaagtaatctggggaagaagcaaagatctgtttcattcttagcctcaggcctcatgagggtctccacagggccggagctcaggttacaccactccttcgtccttacaggagatgtagggagaagaatctgcaggctgcttgtgggactgttcaccaagggggataccagcagcaagagagtgcacccgtttagccctggaccctgtttcttactgtgtgacttggctagagttgggagttcccccaaaataaacgtgtccccattttaccagaacccaaacctcaacacagcgaagctgtactgtctttgtgtggcaaagatgttcccttgtaggcccctttcaggtaaccgtcttcacaatgtattttcatcacagtttaaggagcatcagccgcttctcaagtgggtagggaaagcaaaaaaacgtacgcaagaggacatggatccaaaatgatgatgaagcatctcccatggggaggtgatggtggggagatgatgggctaaacaggcaacttttcaaaaacacagctatcatagaaaagaaacttgcctcatgtaaactggattgagaaattctcagtgattctgcaatggatttttttttaacgcagaagtaatgtatactctagtattctggtgtttttatatttatgtaataatttcttaaaaccattcagacagataactatttaattttttttaagaaagttggaaaggtctctcctcccaaggacagtggctggaagagttggggcacagccagttctgaatgttggtggagggtgtagtggctttttggctcagcatccagaaacaccaaaccaggctggctaaacaagtggccgcgtgtaaaaacagacagctctgagtcaaatctgggcccttccacaagggtcctctgaaccaagccccactcccttgctaggggtgaaagcattacagagagatggagccatctatccaagaagccttcactcaccttcactgctgctgttgcaactcggctgttctggactctgatgtgtgtggagggatggggaatagaacattgactgtgttgattaccttcactattcggccagcctgaccttttaataactttgtaaaaagcatgtatgtatttatagtgttttagatttttctaacttttatatcttaaaagcagagcacctgtttaagcattgtacccctattgttaaagatttgtgtcctctcattccctctcttcctcttgtaagtgcccttctaataaacttttcatggaaaagctcctgtgccaggagctcagtctgaaaaaaaaaa

SEQ ID NO: 60721 - DNA, 1846 bp, Homo sapiens
  misc_feature (1)...(1846): n = a,t,c or g
ttcggcagaggggcgtggtagcgtagggttgcgcggcccggaaccgcagagccggccaaagcgcggcgcaccgtgcgccggggccgtgcgcgaagagacctcgcgggcgcggagcgaaaggccggcgtgagtgagcgcggagacagtggccgccggcggcccaacccgtctatcccttcggccgccgccggcatgagccacatccagatcccgccggggctcacggagctgctgcagggctacacggtggaggtgctgcgacagcagccgcctgacctcgtcgaattcgcagtggagtacttcacccgcctgcgcgaggcccgcgccccagcctcagtcctgcccgccgccaccccacgccagagcctgggccaccccccgccagaacccggcccggaccgtgtcgccgacgccaaaggggacagcgagtcggaggaggacgaggacttggaagttccagttcctagcagatttaatagacgagtatcagtctgtgctgagacctataaccctgatgaggaagaggaagatacagatccaagggtgattcatcctaaaactgatgaacagagatgcagacttcaggaagcttgcaaagatattctccttttcaaaaatcttgatcaggaacagctttctcaagttctcgatgccatgtttgaaaggatagtcaaagctgatgagcatgtcattgaccaaggagatgatggagacaacttttatgtcatagaacggggaacttatgacattttagtaacaaaagataatcaaacccgctctgttggtcaatatgacaaccgtggcagttttggagaactagctctgatgtacaacaccccgagagctgctaccattgttgctacctcagaaggctccctttggggactggaccgggtgacttttagaagaatcatagtgaaaaataatgcaaagaagaggaagatgtttgaatcatttattgagtctgtgcccctccttaaatcactagaggtgtcagaacgaatgaagattgtggatgtaataggagagaagatctataagagaatggagaacgcataatcactcagggtgaaaaaggctgatagcttttacatcatagagtctggcgaagtgagcatcttgattagaagcaggactaaatcaaacaaggatggtgggaaccaggaggtcgagattgcccgctgccataaggggcagtactttggagagcttgccctggtcaccaacaaacccagagctgcctcagcttatgcagttggagatgtcaaatgcttagttatggatgtacaagcattcgagaggcttctggggccctgcatggacatcatgaagaggaacatctcacactatgaggaacagctggtgaagatgtttggctccagcgtggatctgggcaacctcgggcagtaggtgtgccacaccccagagccttcttagtgtgacaccaaaaccttctggtcagccacagaacacatacagaaaacagacatgacagaactgttcctgccgttgccgccactgctgccattgctgtggttatgggcatttagaaaacttgaaagtcagcactaaaggatgggcagaggttcaacccacacctccactttgcttctgaaggcccattcattagaccacttgtaaagattactccaacccagtttttatatctttggttcaaaacggcatgtctctccaacaatttaagtgcctgatacaaagtccaaagtataaacatgctcctttcctctcttggntgctactcttgcttttgggaagttaccacaggggtctggcaggaaacctgtttgtattaactgttggnacactctctaatggttctcaaagg

SEQ ID NO: 60722 - DNA, 1815 bp, Homo sapiens
ttttttttttttacgtatcaacaaaggatcctttattgaccagagcaggaccgtggcatttttatttatatatatatatatatatatatatatatatatatatatatatataaataaaagtttgaagatctggcaggcagtgatcctattggtccggccaccacccccagcactgatttcctgctccctgcacggggaagggggagggatgactgctccacccaggccacagggccacacttccccttgcaaaccagaggaagaaaggggctttttctgtagccatccccctgcacattcagaaattcaaccaagtatttctctcaaaaggaaaaaaaaatacaggaaattgaaacatttaaatatgaaaaacccaaagggaagtgagtggaaagaggcaagagaggaaaggaactggagtttcttgggaagggactcccatgtctcccttcccatttatgggcattggggtctggggtacgaggctcacacagtgagtttgcagtgacacagctccttgtagatctgccgacgaagtttgggcatgtcctgctgggtgaagctgaatggctgagacagggccagatgcttgcagtactgcaacacaaaagcaccacagtcactgtcattattctgcctggccacattcattttgaagtaacctttccagccctggtggaaatccagtcggtctttctttaccgcctctgcctgtagatacttggcaatatgcttagggcagcggcggttttaagggtacgctgcgagtcaaaataggtgaatggtgcgtcgccttcacatcaaacagagatgagggaccaatgcacctccaggtggatggggattagcagtagctccttattgaagatgtccacgtttttggtccaccttttcaccccatcaataacccttggtacggagtttatcaatagaagaaactattgaagaaatgcacctttttcagggactgtgtccatgaccaggtctccatacatgttcatcacctggtcattgagccagttctgtccatacaaggtccccaagtcatccatggtcagcacgtgccgcttataagccactcggaagcccctcaccatggcattgcctggcatccgctggtaagactggatcagctgcaacaccaggcccttcctggaaggggtggaaaactcctgctggaaaatgtcctccagcttctctactacctcatcagtgctgaggggtatgaggctgccataccgtttgaaggaattcgtccaagatgctctgtacgcaggtcacatgctcctctcgcagggggctgtgctggccggcttttctccccaggcctctctgcctcttctgccatgcccaaatctgagccctgaaaaagctcctgggccacatggtccccgatgctgcacacattgctgatgaggatgctggcatcagggggtgccaagctgcgctccccttctggcccagattgtcccccaaaaccgttgggcagagtacatgaaaggaggcccgagtcagggtccagaggagactttggagtccacctgagtccatcttcctccatggggggcccagagggcactggtggagaccctctcaccccatcctcagccatgagagcacctagcagacccagccggggtggaggtggcccccggggggagtcaaaacgacaacagggggatggcacctgtggcgtcgcacccccttgctggggtgaaagatggttcttggggtgtgcgaggccccgccgccggccccggtggcgcccccaaagcttccagtggaatgtcagcgaggtgcttttccacgcgtcgc

SEQ ID NO: 60723 - DNA, 1699 bp, Homo sapiens
aggccctgttgaagtacggaatgccggaagggccgggctcaaagctccgcctctggcgcgaccgacgactggagcgcagggcaggggtagaggctcgtagatggaactggtagtcagctggagagcagcatggaggcgtcctgggggagcttcaacgctgagcggggctggtatgtctctgtccagcagcctgaagaagcggaggccgaagagttgagtccgttgctaagcaacgaacttcacagacagcgatccccaggtgtttcatttggtttatcagtgtttaatttgatgaatgccatcatgggaagtggcatccttggcttagcttatgttttggctaataccggtgtctttggatttagcttcttgctgctgacagttgctctcctggcttcttactcagtccatcttctgcttagtatgtgtattcagacagctgtaacatcttatgaagatcttggactctttgcatttggattacctggaaagttggtggtggcaggcaccataataattcagaatattggagctatgtcatcttatcttttaattattaaaacagagcttcctgctgctattgcagaatttttgactggagactatagtagatattggtatcttgatggacaaacactactaataatcatatgtgttggcattgtgttccctcttgcacttcttcccaaaataggctttcttggctacacaagtagtttatcatttttctttatgatgttctttgctcttgtggtaataattaaaaaatggtccatcccttgtcctctgacattaaattatgtagagaaaggcttccagatttcaaatgttacagatgattgtaagccaaagctctttcatttctccaaagagagtgcttatgccttaccaaccatggctttttcatttctctgccatacctcaatattgcccatatactgtgaacttcaaagtccttcaaagaaaagaatgcagaatgttaccaatacagcaattgctttaagttttctcatttattttatatctgcactctttgggtacctcactttttatgacaaagtggagtcagaattactaaaaggttatagtaaatacttatcacatgatgttgttgtcatgacctgtgaagttatgccatactatttgctgtgcttttggacagtccctctaatccacttccctgccagaaaagctgtaacaatgatgtttttctccaattttccattctcatggattcgccattttttgatcactctagcactcaatattatcatcgttttacttgcaatatatgttcctgacattagaaatgtatttggtgtagttggtgccagtacatcaacatgtttgatttttatattcccaggactattttatcttaaacttagcagagaggattttctgtcatggaaaaagcttggggttggcgtgcagtggtgtgatctcagctcattgcaacctctgcctcccggactcaagcaatcctcccacctcagcctccagagtagctgagactacaggaagagataccatggagatgtgcacccagaggaaaggccacgcaaggacacagcaagaaggcaactgtttacaagccaagggaagaggcctcaggagaaccaaacgtgtccacaccttgatcttgcacttcccaacctccagaactgtgagcaaataaatgatgttgtttaatcaaaaa

SEQ ID NO: 60724 - DNA, 2060 bp, Homo sapiens
ttaatgtaaaattaacaaaaaatatttatggccagggtggtggcttatgcctgtgattccagaactttcggaggctgaggcaggtggatcacttgaagtcaggagtttgagactagcctggccaacatgacgaaaccccatctctactaataatacaaaaattagctgggtgtggtggcatgtgcctgtaatcccagctacctgggaggctgaggcagaagaattgcttgaacccgggaggtggaggttgcagtgagctgagatcgcaccacggcacactccagcctggccgacagagaaagactccatctcaaaaaaaaagaaaaggaaaaacatttgcacttcaattctccttcaagttaaaatgagttaaaatgcctccttttggacaatcccctggcttgaatgtggctcttccctctctggtactggtgcttagtacctcacagcacctgacaagttaagtgcccatggttgctgaggcagatgcctgccttgtcctgcccacctgcccaccacttctccctaaactgaagccccacatttggagcagtcatctttatcttggacacagcattgagcagatacctgttccacagtcaaccttttatcaagagaaggtaccaaacccaaaagtataacatctaattcttacctgaattttcagtggctcgatgtgattcaggtaaatatgtgcatctcccaaagtgtgtataaagtcacctggctataaacccgggggagaaagcagaacagtatgttagtttcaattctttaaaacatcatttaaaaacattagaatatgcagacaccgcaaggctttttttaaaaaaataatttagtgtagcttttccatttttttgtagcaacagcatcttgttatgttgcccaggctggtattgaactccagacctcaagcaattgctcctgtctcagtctcccaaagtgctgggattacaggcatgagccaccatacccaacctcagcatagcttttgagaaaatccatagaagctgtatcacaaacaacctgtatagatctgttagtgcgtataccacagggccagaaaaccttccagaagaggaaggtttcaaagtaaaagctggttcatgtcttacttacacatatcaaatttaaaagctaatcagagactaaactctgcaatttgttttcccatattaaagaactgaagagctcagtgtggtaggctggcaagtcacccttcccgagacagcccaccttcaggcccgtgatgtgcgcaatcatgtacgtgagcagggcgtagctggcgatgttgaaaggcacaccgaggcccatgtctcccgatctctggtacagctggcaggacagctcactgttcaccacatagaactggcagagggcatggcatggaggcagcgccatcagaggaagatctgaggaaccagcagaggaagataaggagggatggtggtttgaaagaccacagctaaaggcaaagtaaaacaggagagaaacagaagccaactcatatggtggagaccaggagagagagccactgggctgcagtgatgtccataacagcctctgcagcgatggcacggagctgagggagactatccatcggtgcaaggtttctgcaggtgtccatttacggctgaagcaatgctcttccatcagagctgaagggatctgggctacctcgtggcaccagattacaaatacagcaggaataattctgtttgccacaggaaactggtgcttctggtacaccctcctatattaaaagtctctattacatggcccagggcacagtggctcatgcctgaaatcccaacactggggacgccaggggtggggcagattcacttgagggccaacttgagttcgagactagcctggccaacatagtgaaaccccgtctctgctaaaaatacaaaaattcgcgcgcctgtggtcccagctctggggctgaggaatgggaactcgcttggacctgggagatggaggttgccgtgagcggagatcgcgccactgcactccaagcctgggcaacacgcgctgagactgtgtctcaaaaa

SEQ ID NO: 60725 - DNA, 1744 bp, Homo sapiens
gacacggggatcgtgtcatgactccattttgtaaaagaaaaggggaatcaaaggaaacttcaaattttaaaaaaagagggaataatcatctcagtgtacttaccatgttgcttagatttcttttttttttttttcttcttcttctgttttggtctgtagtgatctttgtctctcttctctcttctttccttatctttttcttttctcttaccaaatgctgttgagcttttgtcttccaatttcacttttttttctgttttcgatattcctgctgctgctggagctcctcttccatcagctattgctttggaagaaggatttggaagcatctgtgtatcctctttttctgccctgggacattcattacggtaagaggaatctgaggctaccggtgctgtaacttctgaaccacgacttaagtcaagagggagacagggtcccagcttctcaagtggcaaatgtgcaacatcaggcacctctggtactgaagattcttgctgattttgagaactgatggagaatactttcccatcagtggctggagagggagaagaaaccttttctacagaatcatcaggcatgggtaaggtggctaaacgctgagatcttcttctccgctcactatgcttgaaaggtctagggggattcacaggctgtggaggactagttttatttatcactgaagaagaaagctgagatacaagcgtcaaatcctcgacttgtattaattctggggaaagtggtgatttagggggttttatacacccagaagaatctccagattcatgtttgcatttcttgctgcgagccttccctgaagacaaagttgaggataacagtgcaggtttctgagtgttggcagaactgctaatgtcagcttcattttttttctgactttgaggtttaggtgaaatcgcctgctccagcattggagctgtttcattgtagtcttcctttttttcagcaccatcaaccccaacagctttggatgccaacaaaccagtaatcttgttaagtcgagctctctttgcctgaaacgagttgccttgattatttttcctcttgtttgataatgtgctctctggctgtggaaagaccatctttggaacgttctctacatgaagtcctacaaatgtttcactagatgtaggcagatcttccttccttcctctacgtctggtgtggctaataacaagttgaaagtttcctccatctttgaaggtactttaaaccactttctctcatctttatccttatctttattgctgttagcgctggttcgaggtttactccctgttttgttcttggctgcagctgcagcagctgctttgactaaagctatccaatcctcacttcccatagactggttacacgatccagctgggtcgataggacaacaccagcttagtggatgctgggatttcacctggaacagaaactgccccttagcatcctcgggcatggctttaatgtgcattctttttaaacaacgaattactccatcataaaactgaactgtaaatgttccttctttgttaattgcttcaatcttggcagggtaatagcgacagtctgtccaacgagccagaacttcttctccagctttaaaatcaaagaaatcttcctcatcttttagcccttcttttcttagtgctggtctctcaaggggtcgcaatctattgctatcccagtaaatccactcatcataacgatgactccagcgctcaaaatggaccaacatctt

SEQ ID NO: 60726 - DNA, 5946 bp, Homo sapiens
gaatgctggattcattctgcaatatcctggtctcgagaaagcatgggattatggcaaccacagaatctcagtagtacaagttccattcagttttttctgaaagaaagccctctgttaaagtgaagcaaagaaactgttgtggattataacgtttagaagttccaatttttcagtgctttacaaataaagcatcatttaaccttttaaatgaaaaagattaagatctcatgccactgttgtattttctggaagccattctccaaaagggaagtgcacatttaaaacacagatatgatggtccttgctgcagggatttaagtctacttgcttttacatcatgaccagcttgaaacggtcacagacagaaaggcctcttgccactgacagggcctctgttgttggcacagacggcacccccaaagtccacactgatgatttctacatgcggcgcttccggtcccaaaatggcagcttaggatcatcagttatggctcctgtaggacccccccgaagtgaaggttctcaccatataacctcaacccccggagtcccaaaaatgggggtaagggcaaggattgcagattggcccccaagaaaggaaaacataaaagaatctagccgttcaagccaggaaatagaaacctcaagttgccttgatagcctgtcctccaaaagcagtcctgtgagtcagggaagttctgttagcctcaattccaatgactcagccatgctgaaaagcatacagaacacgctgaaaaacaagacaagaccgtcggagaacatggactccagatttctcatgcctgaagcctaccccagctcccccagaaaagctcttcgcagaatacgccagcgaagcaacagtgatatcaccataagtgaacttgatgtggatagctttgatgaatgtatctcacctacatacaagactggaccatcactgcacaggggaatatggtagcacatcttcaattgataaacaggggaacatctggagaaagcttttttgatttgttaaagggctacaaagatgacaaatctgatcgaggtccaactccaaccaagctcagtgactttctcattactggtggtggcaagggttctggtttctctttggatgcaatacacgggcctatctcacagagagagaacctcaggctttttaaggaaagggaaaaaccactcaagcgacgttcaaaatctgaaactggagactcctctatttttcgtaaattgcgcaatgccaaaggtgaagaacttgggaagtcatcagatcttgaagataaccgatcagaagactctgtcaggccctggacatgtccaaagtgctttgcccactatgatgtccagagtatattatttgatttgaatgaggcaattatgaacaggcacaatgttattaagaggagaaacaccaccactggagcttccgcagctgccgtggcatccttggtctctggacctctgtctcattcagccagttttagctccccaatgggcagcacagaggacctgaattccaaaggaagcctcagcatggaccagggagatgataaaagcaatgagcttgtaatgagctgtccatattttcggaatgagataggtggagaaggggagaggaaaatcagcctttcaaaatcaaattctggctcctttagtggatgtgaaagtgcctcctttgagtctacccttagttcccattgcacaaatgcaggagtggcagtacttgaagtgcccaaggagaacttggtgttgcacctagatagagtgaaaagatacatcgtggaacacgtagatctgggtgcatactattatagaaaatttttctaccagaaggaacactggaactattttggggctgatgagaatcttggtccagtggctgtgagcattcgaagggaaaaaccagatgaaatgaaagaaaatggatctccgtacaactaccgaataatttttagaactagtgagctcatgacactgagaggttcggtcctggaggacgccattccgtcgacagccaagcactcgacagccagaggcctgcctctcaaagaagtgctggagcacgtggttcctgagctcaatgtccagtgcctgcggttggccttcaacacacccaaggtcacagagcagctcatgaaactggatgaacaagggctgaactaccagcagaaagtaggcatcatgtactgcaaagctggacagagcactgaagaagagatgtacaacaatgagtcagctggcccagcctttgaagaatttcttcaactattgggagagcgagttcggctcaaaggatttgagaagtatcgagcacagcttgataccaaaactgactccactggaacccattctctgtacacaacatacaaagattatgaaattatgttccatgtttctaccatgctgccatacacacccaacaacaaacaacagctcctgaggaagcggcacattggaaatgatatcgtaacaattgttttccaagagcctggagcacagccattcagcccaaaaaacatccgatcccacttccagcacgttttcgtcatcgtcagggtgcacaatccgtgctctgacagtgtctgttatagtgtggctgttaccaggtccagagatgtgccttcctttgggcctcccattcctaaaggggtcactttccctaagtcaaatgtgttcagggacttccttttggcgaaagtgattaatgcagaaaatgctgctcataaatcggagaagtttcgggccatggcaactcggacccgccaggaatacctgaaagatctggcagaaaagaatgtcaccaacacccctatcgacccttctggcaagtttccgttcatctctctggcttccaagaagaaggaaaagtctaagccatatccaggagccgagctcagcagcatgggggccattgtatgggcagtccgggctgaagactacaacaaggccatggaactagactgccttttagggatctccaatgagttcattgtgctcattgaacaggaaacaaagagcgtggtcttcaattgttcctgtagagatgtgatagggtggacttcaactgacaccagcctcaaaatcttctatgaacgaggagaatgtgtttcagtgggtagttttattaacattgaggagatcaaagagattgtcaaaaggttgcagtttgtttcaaaaggctgtgaatcggtggagatgactctgcgaagaaatgggctaggacagcttggcttccatgtcaactatgagggcattgtggcggatgtggagccctacggttatgcctggcaggcagggctgaggcagggcagtcgcctggtggagatctgcaaggtggcggtagccactgctgagccatgagcagatgatcgacctcctgagaacatctgtcacggtgaaggttgtcatcattcccccgcatgatgactgcaccccgcggaggagttgctctgaaacctaccgcatgccagtgatggagtacaaaatgaatgaaggtgtttcatacgaattcaagtttcccttccgaaataataacaagtggcagaggaacgccagcaaggggcctcattcacctcaagtcccgtcccaggtgcagagtcccatgacctcgcggctgaatgctggaaaaggagatgggaagatgcctcctccagaaagagccgccaacatccctcgaagcatctccagtgacgggcgcccactagagaggcggctgtctcctggttcggacatctatgtgacggtctcatccatggctttagcaagatcccagtgtcggaactctcctagcaacttgtcttcatccagtgatactggttctgtggggggcacttacaggcagaagtccatgcccgaagggtttggagtgagccgtagatccccagcctccattgacaggcagaacacccagtcagatattggtggcagcggaaaatccacgcctagctggcaaagaagtgaggatagcattgctgaccagatggcttacagttatagaggacctcaggatttcaattcttttgtcctcgagcagcatgaatatacagagccaacatgccatctcccagcagtatcaaaggtactgccagctttccgagagagccccagtgggagattaatgcggcaggatccagtggttcatttgtctccaaacaaacaagggcattctgatagccactactcgagccactccagtagcaatactctctccagcaatgcgtcaagtgcccatagtgatgagaagtggtacgatggggaccgcacagaatccgaactcaacagctataactatctgcaaggcacctctgctgacagtggcattgacaccacctcttatggccccagccacggcagcacagcctcgctgggggctgccacatcgtcacctcgctcagggccaggcaaggagaaagtggcacccctatggcacagctccagtgaagtaatctccatggcagatcggactttggagacagagagccacggcctggaccggaaaacagagtcttccctgagcttagacatacacagcaagagccaagccggctcgacccctctgacaagggagaacagcaccttcagtataaacgatgctgcttcccacacaagtaccatgagctcccgacactctgccagcccagtggttttcaccagtgcccggagttcacctaaagaagagcttcatccagctgccccctcacagctcgcaccatccttctcctcctcttcctcctcctcctctggtcctaggagtttttaccctcgccagggcgctactagcaagtacctgattggatggaaaaaacccgaaggaaccataaactccgtgggatttatggacacgagaaagcgtcatcagagcgatggcaatgaaatagcccacaccaggctgcgtgcctcaaccagagacctccgggcatctcctaagccaacctccaagtccaccattgaagaagatctaaagaaactaattgatcttgaaagcccaactcctgaatcacagaagagttttaagttccacgcactctcctctcctcagtctcctttccccagcacccccacctcacggcgggccttgcacagaacactgtcggacgagagcatttacaatagccagagggagcactttttcacctccagggcgtcacttctggaccaagccctgcccaacgacgtcctcttcagtagcacgtacccttctctccccaagtcgctcccgttgaggaggccttcttacaccttaggaatgaaatcgctgcatggagagttctcagcctcggacagctccctcactgacatccaggagacccgcaggcagcctatgcccgaccctggcctgatgcccctgcctgacactgctgcagacttggattggtccaacctggtagatgctgccaaagcctatgaggtccagagagcctcattttttgctgctagtgatgaaaaccatcgccccttgagtgctgcatccaacagtgatcagctggaggaccaggctctggcccagatgaagccttacagcagcagtaaagactcctctcccactctggcttctaaagtggaccagctggaaggtatgctgaagatgcttcgggaagatttgaagaaggaaaaagaagacaaagctcaccttcaggcggaggtgcagcacctgcgagaggacaacctgaggctacaggaggagtcccagaacgcctcggacaagctgaagaagttcacagaatgggttttcaacaccatagacatgagctagggaaggctgaggaggacaggagaagggcccagacactccctccagtgagtgtcctgcaagcccttattccctccatagaaagcatcctcagagcaccttccctggcttcctactctgccccctttcggggagtgcacaacacaatagttgcagatcaacaatcatcacctgccttttgtagaaaaaaaaaa

SEQ ID NO: 60727 - DNA, 8435 bp, Homo sapiens
  misc_feature (1)...(8435): n = a,t,c or g
ctaaaaataccattaagtaatagtattagcttttgtattctgagattcaacagcagcagtcacttccctccactcctatgtgtatcccaggaccaccctgggcggggagggctgaggtcagggaggtctgaagctggtcctgggctccgggggtgacagtgatgaggaactgggtgcacacatgagtggggcagccgggcctggccagagaagcaacacacacgtgcacagacatgtttatccacatacacatgtgcacgcatgtgcacaaacacattgcaggcaggcatgttgacgcctcaggcagcggaggaccctgactctgggccctgctgacccgggcaaggcccattgtgatgcgtgccatgacctcagaatgtcactggtgcttagcacctatccgctctccagactgcgtctgtgttctacggcagttacacacacgcagtggtattcacaagcggttttgtggactcaaaggttttctccctgagaggcataacccaggccagctgattcatcagaatcaggtgagtgtgacctgctctcttccctccaggctgacttggggacagtggctatggtatgggcggtgttggcctctgggcagctacagaggagggtcatccctgagcactcaccgggcgcccgttctacactgcccatgtagacgattttctctttcgtcttcatggtggcttcgtagagtgggtgctgttcccaaatgtacccattcgacaggtgagccgtctggggtcagagaggcagtaactggcctgggaatccagacaagaccctgggttttgctctcagccctgctgtgtgccatgctagacttcaggcctcaaccctgagacctccctgctctagatcccaaatctgcccagatttccgatccaatgggcagagcctggccctggcagagacactgggatggatccactgtgggtggggaggagggaagggtcctcagaacacacctggggcctaagctgggtcttgatggtcactgtgggacccactggacacacacagtcccttgtctgggagtggcatggggagccttctgcccttgggcagttgtggaaagtgaaggagccctggagagctggctgaggggagactatcttcccttgtgttcaaaggggtccaggcactggggctctccccaagtatttcttattctgtctggcctcgctttccttttgccctgagtattctcaggagggacggtccatctagatgtcctccaggagcaaggacccactgttcttcatcagtgacccaggaaaatgaagccccctcctgtggggacagctcagaatggtggagtccacagtccctccctgagagacatggtttccatgagcacagtggctgctttggagacagtaatcattttcatccccaaaaccaaacacactcctgctcaaatggtgttattgctaaagcagcttcactggttagactgaagggccatggtagcccaagtgatgagcggggtagaatggagcagtcaggagagatcttgttccccgtaggaaactgggcatctctgtggccctgaacatcccaggaggccgatcgtacagagacctctggtgcctgaccgcagttcacatccacatccctggaatagaccatcacaggctcttcacccttggcaggtggacaccattcaacctgccggggcaggatggacatggtagagaatgcagatagtttgcaggcacaggagcggaaggacatacttatgaagtatgacaagggacaccgagctgggctgccagaggacaaggggcctgagcccgttggaatcaacagcagcattgatcgttttggcattttgcatgagacggagctgcctcctgtgactgcacgggaggcgaagaaaattcggcgggagatgacacgaacgagcaagtggatggaaatgctgggagaatgggagacatataagcacagtagcaaactcatagatcgagtgtacaagggaattcccatgaacatccggggcccggtgtggtcagtcctcctgaacattcaggaaatcaagttgaaaaaccccggaagataccagatcatgaaggagaggggcaagaggtcatctgaacacatccaccacatcgacctggacgtgaggacgactctccggaaccatgtcttctttagggatcgatatggagccaagcagagggaactattctacatcctcctggcctattcggagtataacccggaggtgggctactgcagggacctgagccacatcaccgccttgttcctcctttatctgcctgaggaggacgcattctgggcactggtgcagctgctggccagtgagaggcactccctgccaggattccacagcccaaatggtgggacagtccaggggctccaagaccaacaggagcatgtggtacccaagtcacaacccaagaccatgtggcatcaggacaaggaaggtctatgcgggcagtgtgcctcgttaggctgccttctccggaacctgattgacgggatctctctcgggctcaccctgcgcctgtgggacgtgtatttggtggaaggagaacaggtgttgatgccaataaccagcattgctcttaaggttcagcagaagcgcctcatgaagacatccaggtgtggcctgtgggcacgtctgcggaaccaattcttcgatacctgggccatgaacgatgacaccgtgctcaagcatcttagggcctctacgaagaaactaacaaggaagcaaggggacctgccacccccaggcccaacagccctgggacgaaggtgtgtggcaggaagcccccagccagtctgaaccctgggggcagtcccaggagccacccaccatgccccaacggcttccccatgccaggcagcacacacccctccctctgggatcagcagactacaggcgtgtcgtcagtgtcagaccacaggggccacacagagaccccaaggactccagagatgcagccaaacgcgagcaagggtccttggcacccaggcctgtgccggcttcacgtggtgggaagaccctctgcaaggggtataggcaggcccctccaggcccaccagcccagttccagcggcccatttgctcagcttccccgccatgggcatctcgtttttccacgccctgtcctggtggggctgtccgggaagacacgtaccctgtgggcactcagggtgtgcccagcctggccctggctcagggaggacctcagggttcctggagattcctggagtggaagtcaatgccccggctcccaacggacctggatatagggggcccttggttcccccattatgattttgaacggagctgctgggtccgtgccatatcccaggaggaccagctggccacctgctggcaggctgaacactgcggagaggttcgcaacaaagatatgagttggcctgaggagatgtcttttatagcaaatagtagtaaaatagatagacacaaggttcccacagaaaagggagccacaggtctaagcaatctgggaaacacatgcttcatgaactcaagcatccagtgtgttagtaacacacagccactgacacagtattttatctcagggagacatctttatgaactcaacaggacaaatcccattggtatgaaggggcatatggctaaatgctatggtgatttagtgcaggaactttggagtggaactcagaagaatgttgccccattaaagcttcggtggaccatagcaaaatatgctcccaggtttaatgggtttcagcaacaggactcccaagaacttctggcttttctcttggatggtcttcatgaagatcttaatcgagtccatgaaaagccatatgtggaactgaaggacagtgatgggcgaccagactgggaagtagctgcagaggcctgggacaaccatctaagaagaaatagatcaattgttgtggatttgttccatgggcagctaagatctcaagtaaaatgcaagacatgtgggcatataagtgtccgatttgaccctttcaattttttgtctttgccactaccaatggacagttatatgcacttagaaataacagtgattaagttagatggtactacccctgtacggtatggactaagactgaatatggatgaaaagtacacaggtttaaaaaaacagctgagtgatctctgtggacttaattcagaacaaatccttctagcagaagtacatggttccaacataaagaactttcctcaggacaaccaaaaagtacgactctcagtgagtggatttttgtgtgcatttgaaattcctgtccctgtgtctccaatttcagcttctagtccaacacagacagatttctcctcttcgccatctacaaatgaaatgttcaccctaactaccaatggggacctaccccgaccaatattcatccccaatggaatgccaaacactgttgtgccatgtggaactgagaagaacttcacaaatggaatggttaatggtcacatgccatctcttcctgacagcccctttacaggttacatcattgcagtccaccgaaaaatgatgaggacagaactgtatttcctgtcatctcagaagaatcgccccagcctctttggaatgccattgattgttccatgtactgtgcatacccggaagaaagacctatatgatgcggtttggattcaagtatcccggttagcgagcccactcccacctcaggaagctagtaatcatgcccaggattgtgacgacagtatgggctatcaatatccattcactctacgagttgtgcagaaagatgggaactcctgtgcttggtgcccatggtatagattttgcagaggctgtaaaattgattgtggggaagacagagctttcattggaaatgcctatattgctgtggattggcaccccacagcccttcaccttcgctatcaaacatcccaggaaagggttgtagatgagcatgagagtgtggagcagagtcggcgagcgcaagtcgagcccatcaacctggacagctgtctccgtgctttcaccagtgaggaagagctaggggaaaatgagatgtactactgttccaagtgtaagacccactgcttagcaacaaagaagctggatctctggaggcttccacccatcctgattattcaccttaagcgatttcaatttgtaaatggtcggtggataaaatcacagaaaattgtcaaatttcctcgggaaagttttgatccaagtgcttttttggtaccaagagacccggctctctgccagcataaaccactcacaccccagggggatgagctctctgagcccaggattctggcaagggaggtgaagaaagtggatgcgcagagttcggctggggaagaggacgtgctcctgagcaaaagcccatcctcactcagcgctaacatcatcagcagcccgaaaggttctccttcttcatcaagaaaaagtggaaccagctgtccctccagcaaaaacagcagccctaatagcagcccacggactttggggaggagcaaagggaggctccggctgccccagattggcagcaaaaataaactgtcaagtagtaaagagaacttggatgccagcaaagaaaatggggctgggcagatatgtgagctggctgacgccttgagtcgagggcatgtgctggggggcagccaaccagagttggtcactcctcaggaccatgaggtagctttggccaatggattcctttatgagcatgaagcatgtggcaatggctgtggcaatggctacagcaatggtcagcttggaaaccacagtgaagaagacagcactgatgaccaaagagaagatactcgtattaagcctatttataatctatatgcaatttcgtgccattcaggaattctgggtgggggccattacgtcacttatgccaaaaacccaaactgcaagtggtactgttacaatgacagcagctgtaaggaacttcacccggatgaaattgacaccgactctgcctacattcttttctatgagcagcaggggatagactatgcacaatttctgccaaagactgatggcaaaaagatggcagacacaagcagtatggatgaagactttgagtctgattaccgaaaagtactgtgtgttacagtaaagctaccactctggctgctagacagcttggcggttgnagggagatggactccttgttagctgacatttgggcaaaagcgtccactggaaagggcaagctaaatgtagttattttatcctgttagaacaaaaattctaattaaaatcgttaacttgaagagtagaaacaattgtattttgaagtctcatacaagctgtctgatagagaactttcaggcagatcccaccattagcctgtaaacaaaaggtgtggcaccagccacctgggaccaaataagaattgaattgtgcttgtccagatatgaacaaatatgtagtgagtatagagtttaccaataatcataacaaatattaaagatttccttggagtcagaggaaaaaacaaacaattataatgttgtctagggacgacatgatacgctacctcctttttcctgaagttttattccattatattgacaagatggagaaagcaagatcatgaaggtgtgcaaatgattcttacggcatggacaaggatttttcaatttattttttaaactgtttccataccctttctttttcttgctttttgtttttgccattgtgtttacagtttgagacacaaccagtcattggtggcaggggcatagagtggtcagtctgaaagggaggctctcttaagagctatgtgccttccaaccagagggagacccagtagaaagaaaaacatcctgggaaatccagctaccagggccctcccagtggaggcatcttacatttaggctacttcaagtatcctcagaaatgtattctgcacccccggccccgcccatgctgagggaaggggagcagttgccaatatttgcaccatcttcacatgcacatgttgcaacaagagcttctgggaaggtaagcggcatcggagctagatcacgtttcacaattagtggttattcttttctgtgtttgttttgcactttaaaaaagagagaacacatgcaaatgaacttgcttgtgtgtatttgaatggctctaagggctataaattacaaacaaaacacatcccagacattaggagttcataaagtatatttaatgaaattggtggttttaggaagtcaactttagttttgctttgtttgcatgtccactaattttttttattttgatattagtcttttttaaaaaattttacagtagtcattgaaagttatgtttctttgtttacttcattttttccctctaattatttaagattggaacaaaagtataaatattatttatttgaggtagaatttttttcatgtagtttcttaatatatacttgaaggaaatgtttcaccttatttttggtctttgtttattcatttagaccctgcaagttgattctcattgccagattccattaccctttcttcctcataggtagtaattaccaatgtaactaagcatttgtgttctgatatctgaggccagtaactattaatatctagttctcagaggcatttggaaaggttatcttaaatggctacctaaattgaaatccttttcagaaaaaatataattgcaagtaggtaggagtggcctaaattgtctaatgtaataaagtcagacaaaatgcacactttatagtttcaagattttcagtaaataaaatctgtccattcctacctggacatgtcccattaaaaagtggaagattttaaataatttctttacagatgttttatttaaacaggtagcacaatctactaatgttgtgtgatttgtgttatactggttgtaattaatttttttaattcatgaactagcggaaaatttattaaattaactattaactacattcaccttgtaaattactgtataaaacttgttgacaatgcactgactttagaaagatgttaatgtacataaatagagtgtaaataaaatagtgttgatgtactgaaatatgaactgtatcaaaagtattggtaattgtatatggggtgtacctgtttatctgttaactattatccaaacaaattaaatactgtggttgcctctatgtgctgtttttcctcatacaagtaaacacagaaagtcaaattcttcagcctccctctctgtgatcctgttttaattctcctacttgaataatttctttctgacttgtatacagaggggatgcttcatctctgaggttggaaactctgtagagcaggattccccaactcctgggctacagaccagtactgtccatggcctgttaggaaccgggctgcgcagcaggaggtgagtggcgagctgtatttatagccgctcccccttgctcccattaccgcc

SEQ ID NO: 60728 - DNA, 2830 bp, Homo sapiens
gtgaaatcccattctctggctggagacacagatggcctcaaatgagagagatgctatatcgtggtaccaaaagaagattggagcctacgatcagcagatatgggaaaagtcaatcgaacagactcagattaagggtttgaaaaacaaaccgaaaaagatgggccacataaagccagacttgattgacgttgacttaatcagagggtcaacatttgccaaagcaaaacctgaaattccatggacatctctgactcggaaggggcttgttcgagttgtattttttccattgttcagcaattggtggattcaggttacctctttaagaatctttgtttggctgttactactttatttcatgcaagttatagcaattgtcttatatttgatgatgcctattgtgaacataagtgaagtacttggacccttgtgccttatgctactcatgggaactgtccactgtcaaattgtgtctactcagataacaagaccatcaggaaacaatggaaatcgaagaagaagaaaattacgaaaaactgtaaatggtgatgggagccgagaaaatggaaataactcctctgataaagtcagaggaatagaaactttggaatctgtacccattattggtggtttttgggagactatctttggcaacaggattaaaagagtaaaattaatatctaacaaagggactgaaactgacaatgacccaagttgtgtccatcctatcattaagaggagacaatgtcgaccagagattagaatgtggcaaacaagagagaaagcaaaattttcagatggagaaaagtgccgtagggaggcttttaggcgtttgggtaatggggtgtctgatgacctgtcaagtgaagaagatggtgaagcacggacacagatgatattattgcgtaggagtgtggaaggggcctcaagtgacaatggttgtgaagttaagaatagaaaatcaatactttcaaggcacctaaactctcaggtaaagaaaaccactacaaggtggtgtcatattgtgcgggattcagatagtctggctgaatcagaatttgaatcagcagccttcagccagggctctagatcgggtgtgagtggtggctctcgaagcctcaacatgtcaagaagagactcagaaagcacccgccatgactcggagactgaggacatgttatgggacgacctgctacatggcccagagtgccggtcatctgtcaccagtgacagtgagggggcccatgtgaatacccttcactcagggaccaaacgtgaccccaaagaggatgtttttcagcagaatcatttattctggcttcagaattcaagtccttcctctgatcgagttagtgcaataatctgggaggggaatgagtgcaaaaagatggatatgtctgtgttggaaataagtggcatcatcatgagcagggtcaatgcctatcagcaaggagtaggttatcagatgctgggaaatgttgtcactattggattagcattttttccattcttacatcgacttttccgtgagaagagccttgaccaactaaagtccatttcagctgaggagatcttgactctcttttgtggggcaccacctgttacacctattattgttttgtcgataattaatttttttgaaagattgtgtcttacttggatgttttttttcatgatgtgtgtgggcagagagaacatataaaacagagatttttatttgcaaaactcttcagccatatttacttctgccagggaaagctagggaaatatgaaatacctcatttcagacttaagaaggtggagaatattaaaatatggttatcactgcgttcctatctaaagagacgggggccacagcgttcagttgatgtggtttgtatcctcggttttcctactgacactttcgattgctttcatttgttgtgctcaggttctccaagggacataaaactttcctggaatgatgcttattaactggggagtttttgatctgggggaaacagctttactactttttttattgcgtctggcctcactggggtctgaaaccaataagaaatacagcaatgtttcaatattacttacagaacagattaatttatatcttaagatggaaaaaaagccaaataagaaagaacagcttactctagtaaacaatgtattaaagctgtccaccaagttgttgaaagagctggacacaccatttagactctatggactgacaatgaatcccttaatctacaatatcacaagagtagttatcctttctgctgtctcaggtgttataagtgatcttctaggatttaatataagactgtggaaaattaaatcataagctgagttaaatgcctggactctcccctggctggtatcaaaacttacctatcaaggaaagtgatgactgcagaaaccagtgagatacccacctgcttgttcacatgcacaggtgctctcagctctgccaaagcgaatgaatggtgtttccggaggagcaagtccttttccaactgggtgtgcatgctaaaaacctgtattttcatgcttttcaaacaacatgaatagtcagctgactaaagactgtgtgtgttgtggtaacacaaagacaattttgtaagtttgcgcttcagtactgtgacagttatgtttactggacatagtcttttgggcaactatgatagatgcccaaagcatgaagcaaatatcttttattggaaatatgcaaattcaatacttttccattatagtctatagaactggagatttcatttctctatcaaagagagatcaagcgaactattttaggttaaatccgaataaaagaactttactggaa

SEQ ID NO: 60729 - DNA, 895 bp, Homo sapiens
tttttttttttttagaacatgggaataggttttattttcatctcaagaacatttaagttgggtgaagaaattcagcttttgttgttagaatctgacaggcttcaaacacttgtgaatggaggggttgttgtcatatcaaagtccacctagtaaagttttaggtgaccaagtgactttgtcaattaggtctgctggtcctggcccaatccctaggacagtttgagagcctggtgcaaatctgagtacgtccagcatcttgaattaaacttacagtcagtcccagcatttttgcatgggcccaataatgcaatcagggtttcttcatcaggagctttgaccaccaccttgggctggccacagtattcccattgtttgagcatttcaggatttcttctttgaatctgcttgtaggctgaaacagcagcatgagagcactgggcagccactttcccttttcccatctttaagtcatttcgaaccacaagaatcatcttgtactccccgctgtctcccaagatgcttgcttcactttcagtatctgtgtgtgtcttgctcgtcttgcttttggggagcatcccaaagcatactcgaaggctccagcccaggcacatgccacaagcaactccaacagccaagccgagtgtactgggatgagccaaatattccataaccaaggatttggagggcatcattaatttacacagctgaaagcacagtggtcctgaaaaatgtttgaagcactgaaatagaattaattgctggatgatggggatgcaacagggtcctcaatttctctctcttctgatgaacatcgagaataggtggtagaaggcattgggacatcaacactagttgatggtttagcaagcatagtgttgttcttccagctcgtgcc

SEQ ID NO: 60730 - DNA, 3536 bp, Homo sapiens
ttctccactaggggagcgttcgcaaggggtgtggggaggtggccagcgcttgccaatcagaggaggccagggctgtcccctagcgggcggtgaccaatcgccggggccggccagagcgcgcttccttagtaggtggatggtggtcggagcgccgactcccttctcgtcgtcgccattttgagctggtgactgtggccggctgggagtaggcggcagtgagtttccctgggagggcagcgcgcttggcgcttctcccctccccccgatctgcctccagtctcggacttggttgttgcgcgctccggctccggctgagctgggagagttggaggaggtggcggcgggcagaggtgatgtctgggagcccttccttgacagcccgggccgagaagagtccctgcaggaagcatcacccaggctggcagatcatggtagcagcagcgggggtggctgggaagtgaaacggagccagcggctgaggaggggccccagcagcccccgaaggccctatcaggacatggagtatgaaagacgtggtggtcgtggtgacaggactggccgctatggagccactgaccgctcgcaggatgatggtggggagaaccgcagccgagaccacgactaccgggacatggactaccgttcatatcctcgcgagtatggcagccaggagggcaagcatgactatgacgactcatctgaggagcagagtgcggaggattcctacgaggcctccccgggctccgagactcagcgtaggcggcggcggcggcacaggcacagccccaccggcccgccagggcttcccccgagacggcgactatcgggaccaggactatcggaccgagcaaggggaggaggaggaggaggaggaggatgaggaggaggaggagaaggccagtaacatcgtcatgctgaggatgctgccacaggcagccactgaggatgacatccgtggccagctgcagtcgcacggcgtgcaagcacgggaggttcggctgatgcggaacaaatcttcaggtcagagccggggcttcgccttcgtcgagtttagtcacttgcaggacgctacacgatggatggaagccaatcagcactccctcaacatcctgggccagaaggtgtcgatgcactacagtgaccccaagcccaagatcaatgaggactggctgtgcaataagtgtggcgtccagaacttcaaacgccgagagaagtgcttcaaatgtggcgtgcccaagtcagaggcagagcagaagctgcccctcggcacgaggctggatcagcagacactgccactgggtggccgggagctgagccagggcctgcttcccctgccgcagccctaccaggcccagggagtcctggcctcccaagccctgtcacagggctcggagccaagctcagagaacgccaatgacaccatcattttgcgcaacctgaacccacacagcaccatggattccatcctgggggccctggcaccctacgcggtgctgtcctcctccaacgtgcgcgtcataaaggacaagcagacccaactgaaccgcggctttgccttcatccagctctccaccatcgaggcagcccagctgctgcagatcctgcaggccctgcacccaccactcactatcgacggcaagaccatcaatgttgagtttgccaagggttctaagagggacatggcctccaatgaaggcagtcgcatcagtgctgcctctgtggccagcactgccattgctgcggcccagtgggccatccttcacagggcctcccaaggtggggaagggtacctgggccacctccgaggagcctgccggtcgactacagctactaccaacaggatgagggctatggcaacagccagggcacagagtcttccctctatgcccatggctacctcaagggcaccaagggccctggcatcactggaaccaaaggggatcccactggagcaggtcccgaggcctccctagagcctggggccgactctgtgtcgatgcaggctttctctcgcgcccagcctggtgctgctcctggcatctaccaacaatcagccgaggcgagcagtagccagggcactgctgccaacagccagtcgtataccatcatgtcacccgctgtgctcaaatctgagctccagagccctacccatcctagttctgctctcccaccggctaccagccccactgcccaggaatcctacagccagtaccctgttcccgacgtctctacctaccagtacgatgagacctccggctactactatgacccccagaccggcctctactatgaccccaactcccagtattactacaatgctcagagccagcagtacctgtactggggatggggagaggcggacctatgttcccgccctggagcagtcggccgacggacataaggagacaggggcaccctcgaaggagggcaaagagaagaaggagaagcacaagaccaagacagctcaacagattgccaaggacatggaacgctgggcccgcagtctcaacaaacaaaaagaaaacttcaaaaatagcttccagcctatcagctccctgcgagatgacgagaggcgggagtcagccactgcagatgctggctatgccatcctcgagaagaagggagcactagccgagagacagcacaccagcatggatctcccgaaattggccagtgacgaccgcccaagccctccgcgaggactggtggcagcctacagcggggagagtgacagtgaggaggagcaggagcgtgggggccctgagcgggaggagaagctcaccgactggcagaagctggcctgtctgctctgccgacgccagttccccagcaaagaggcgctcatccggcaccagcagctctcagggctccacaagcaaaaccttgagattcaccggcgagcccacttgtcagaaaacgagctagaagcactagagaagaatgacatggagcaaatgaagtaccgggaccgtgcagctgaacgcagagaaaagtatggcatccccgagccgccagagcccaagaggaggaagtacggcggcatatccacagcctctgtagacttcgagcagcctactcgggacgggctgggcagtgacaacattggcagtcggatgctgcaggccatgggctggaaagagggcagcggcctgggccgcaagaagcagggcattgtaacgcctatcgaggcccaaacacgggtgcggggctccggcctgggtgcacggggcagctcctacggggtcacctcaaccgagtcctacaaggagacactgcacaagacaatggtgacccgcttcaacgaggcccagtgagcagcttcaagagcaacttctccacatgttgggtgtccatcctggggcagggaaggacagagtgttggatggctgggacggggccttgctcttgtcggccagcccactccccagccagagagggcttgaccaaatcaaattgaggtggtgacttttgttggaaaattgggctgggatcacgtcctgttttgtaataaaagctgaaaagtctgaaaaaaaaaa

SEQ ID NO: 60731 - DNA, 1490 bp, Homo sapiens
tttttattttatttttatattatttatttattcttcgttagtttgtttttggagcgtgggttttgttttgttttttgatttttttctttttttcgacccacggatttattcttattgcccaggcttgagtgcaatggcgtgttctcagcttactcaacctccgcctcttgggtttgggtaattgttgtgcctcggcctccctctgcctcttgggcttgggcgattgttccacctcatccgccctccgcctcttgggtttcggtgattgttccacctcatccaccctccacctcttgggtttgggtggtttttccgcctcggcctcctgagtagctaagggaggagtcttgagattatcatccactgagggtggaagaggagagggtggaagagggacaaagagacagtccttcagattatcatccactgagggtgggaagaggagagggtggaagagggacccaggagacactccttcagattatcatccactgagggtggaagaggagcaagaggacactccttgatattatcatccactgagggtggaaggggatgaaggagacattcgggaggtgtcttgaggctcagggagttatcagttatagaatgttgttgagttggaggaggtggctggcggcccatcctgttttttaaagtttcagctgtgaggtagggccagcagggcaatcctgaagaatgatgatgctccgctgccgccattctgacctgtagggccgaagaagggaatgttttcacacatattcatttgatggacaaaattaccgccaccaacacggtctgcaccttctgttgctggtgatagatttttgcacctttccatcctccaggtttcaaaatagcagtatcagtgtcataatatcacccttccactgagtactgccgacagctggggagtaaagaaaagtcattgggacacactgttgtctccacatgccactgtgtctgtctgcaaatgtaggcaggctggggtcctgccccagggaagacagagtcataacagagtaataaagaggcatgtttgagacacaggagtgtctatgtctatcctcattcctccctcacagccatcaccagagcatgtttcttgcaccaggtcaacagacagtaagagaggcatgaaaagcccattgtccacacatgttgcagcttctttttggagaatgttttccaggccttttatgttctgtctctgattctcggaactctgcaaggtcagtgtgaccaccctgctccaaatctaagaaaacagaggttaccagaggaaggagaaattgtgcccggggtcacacagcttgcaagaggcagagtggaagttgattccagctctgcctgcaggaccctctcatttcccctgtttcccttcttgataaaggatcttcttcactctggaggtgccacccatgagaacaaagagctctgcagagatgtggattcctgaagagctgcaggggaactgggagagggtt

SEQ ID NO: 60732 - DNA, 2826 bp, Homo sapiens
gtcttggtagcggaggcacccgaatgctgcccgggtgagtgtgatgagaagccattagagggttgagtgaagggaaaggatatccaacgagaacctcctgccctgtgtctcatgaagaggcagtatttcaagaagaggcttaaagctgagagtgttttgctaatcagtgaagatgtgactaatgagctgctggggaagtcaagccttctatgaggaagccaaggcccagcagagctgagatgtgactgcagagccgtccaaccccagtcctgtgacctttctctggtgcctgatacctctcagcatttgagggccttttctcttcctgcttcatctctaaaggtccttctaggagagaggtgaaagaaacctggcaaagaaaacggtctcgacaatgagtaggccacccatcactactaactacagatgacttgccatttcatttacaaagatgtcttctgctgctgaaaatggagaggcagcacctggaaaacaaaatgaagaaaaaacctataaaaagactgcatcatctgctattaaaggtgctattcagctgggaataggatacacagtggggtaatctcacttccaagccagaaccgagatgttcttatgcaagacttttatgtggtggaaagtgtgttcctacccagcgaagggagcaatctgaccccagcacatcactacccagactttagatttaagacatacgctccattagcattccgatatttcagagaactttttggtatcaagcctgatgattacttgtattccatctgcagtgaacctctaatagaactgtctaaccctggagccagtggatccttgttttttgtgaccagtgatgatgaatttatcatcaaaacagttcagcacaaagaagctgagtttcttcagaagctactgccaggctattacatgaatttaaaccagaatccaaggactcttttgccaaaattttacggactgtattgtatgcaatcaggaggcattaatatcaggattgtggtgatgaacaacgttttgccacgctccatgagaatgcactttacatatgacttgaaaggctcaacgtataagcgaagagcatcccgtaaagagagagagaaatccaaccccacatttaaggacttaggatttcctgcaagacatggcacggaagggttgtattttgatacggaaacatacaacgcgcttatgaaaacacttcagagagactgccgggtgctagaaagcttcaagatcatggattatagccttctgttgggaattcatttcctggaccattccctcaaagagaaagaggaggagaccccacaaaatgtgcctgatgctaagcggactgggatgcagaaggttctctactcaacagccatggaatctatccagggtccagggaaatctggagatgggataatcacagagaacccagacacaatgggaggcattccagctaaaagccataggggagaaaaactacttttatttatgggcattattgacattctgcaatcatataggttaatgaagaagttagaacattcctggaaagctcttgtttatgatggggacactgtttctgttcatagaccaagcttttatgcagacagatttcttaagttcatgaattccagagttttcaagaaaattcaagctttgaaggcttcaccgtctaagaaacggtgcaattcaatcgccgccctaaaggccacttcacaggagattgtgtcctcaattagccaggaatggaaggatgagaagcgggatttgctgactgaaggacaaagttttagcagccttgatgaagaagccctgggatcccgacacaggccagacctggtccctagcactccatcactgtttgaagctgcttccttggcaaccacaatttcatcttcttccttatacgtcaatgagcactatccacacgacagggcctatcactcttatttcaaacagcaaagggttaccttccagttcaacatttaccttggaagaggggaccatctacttgaccgctgagcccaacactctggaagtgcaggatgacaatgcttctgtgcttgacgtctatttataagtgaaaatggtgatcacctaagcacatggatgagacgtgagcacagttatggcagagaagtttctccgcaccagaattatccacagcaacttggctgagccccactacacacagagaaatcatcaacctgacttaagagttttcaagatgtcaacttcaggctgatcagcagatgggatgtgaaaaatactaccctattctatcatttgctgttgcttgctgaactgtgaagaactgcatgaactatatttaagctgctttctgtaccattgccaatcacctttttggagttggaagtgctattttcctatggacttttgcattatttcattgtgcatgcatccagtgattatacataagcaacatatgtaatctgcttatatatttttaaaaatccatccacacacattggtaaattaagtataaattcttttgcaaaattatagttcatatgtcattgaaagtttaaattggtttcatttaaagatcaatatacctaggtctgccttcactttatagaaaactagcttctataaagattttttcactgtttacctagtgaaatgagaaaagcaaagctatttataaaaggccttatgtcgtgtacatacattgtctttgaaatatttgtgatctagtttattgcttgtaaaagagaaattatataatttatttagtaaaattatagttcattactactgtaaactatagttttgtgagagaaataaaatattttgttctca

SEQ ID NO: 60733 - DNA, 2381 bp, Homo sapiens
cccatcgtagaccctagtcagtgtggtggaattcggtccctccctggctgcgggagagacggaggtagagggaggacacagagccgcgccgcccgcaccacagaccttcgcctcgccccgccggttcctcaccctcggggagcaacatggcagataatctcagtgataccttgaagaagctgaagataacagctgttgacaagactgaggatagtttagaaggatgcttggattgtctgcttcaagccctggctcaaaataatacggaaacaagtgaaaaaatccaagcaagtggaatacttcagctgtttgcaagtctgttgactccacagtcttcctgcaaagccaaagtagctaacatcatagcagaagtagccaaaaatgagtttatgcgaattccatgtgtggatgctggattgatttcaccactggtgcagctgctaaatagcaaagaccaggaagtgctgcttcaaacgggcagggctctaggaaacatatgttacgatagccattcgcttcaagctcagcttatcaatatgggtgttattcctaccttagtgaaattactgggcatccactgccaaaatgcagctcttacagaaatgtgtcttgttgcatttggtaatttagcagaacttgagtcaagtaaagaacagtttgccagtacaaacattgctgaagagctagtaaaactcttcaagaaacaaatagaacatgataagagaaatgatttttgaagttcttgctccattggcagaaaatgatgctattaaactacagctggttgaagcaggcctagtagagtgtctactagagattgttcagcaaaaagtggatagtgacaaagaagatgatattactgagctcaaaactggttcagatctcatggttttattacttcttggagatgaatccatgcagaagttatttgaaggaggaaaaggtagtgtatttcaaagggtactctcttggatcccatcaaataaccaccagctacagcttgctggagcattggcaattgcaaattttgccagaaatgatgcaaattgtattcatatggtagacaatgggattgtagaaaaacttatggatttactggacagacatgtagaagatggaaatgtaacagtacagcatgcagcactaagtgccctcagaaacctggccattccagttataaataaagcaaagatgttatcagctggggtcacagaggcagttttgaaatttcttaaatctgaaatgcctcctgttcagttcaaacttctgggaacattaagaatgttaatagatgcacaagcagaagctgctgaacaattgggaaagaatgttaagttagtggagcgtttggtggaatggtgtgaagccaaagatcatgctggtgtgatgggggagtcaaacagactgctgtctgcccttatacgacacagtaaatcaaaagatgtaattaaaaccattgtgcagagtggtggcatcaagcatctagttaccatggcaactagtgaacatgtaataatgcagaatgaagctcttgttgctttggcattaatagcagctttagaattgggcactgctgagaaagatctagaaagtgctaaacttgtacagattttacatagactgctagcagatgagagaagtgctcctgaaatcaaatataattccatggtcctgatatgtgctcttatgggatctgaatgtctacacaaggaagtacaggatttggcttttctagatgtcgtatccaaacttcgcagtcatgagaacaaaagtgttgcccagcaggcctctctcacagagcagagacttactgtggaaagctgagaactgcccgatacacggcatcatcccatctctaatttcccctctgtcctccatccagcggcttcttccgcttcattctctaccataccacttgtgcatgcatgtgatgttctaataccaattgaagaaccgctgtaggtacctccctaataagatttctaaacctatagttagtgtgatcatgactttgtcaaaggcaagtctccacccataaccgttctcttgtattcctgttgcttgagctacattaagtagaatgtgcatgttgtagtcctatgatgatgtaaacttggtactacataatgacttgctccacacatgcagtaaactacataatgatgtactggtaaactagaaacaaagaatgcagcaggatctgtctagcttattaaagatgaaactgaattggaaaaatagctccattttttggtgcttgggaagcacagtgaccaaaaaagttgtatggctgcttattcattagtctttcctactgatgtcaaatccatggtacctagagttaaataaaattccaatgctcttactctttaaaaaaaaaa

SEQ ID NO: 60734 - DNA, 2941 bp, Homo sapiens
tttcgtgccgcgggctccggcgagggacagacgcaccgatcgccggagggacagacacacgaccacgcggcgccaccgcccacgcctccacccaccggcgcccaagtcctccccgcgccgcctcctctgtatggcacaaactttcctcccgggacggaacacgctgcctcagggagcccgcgaccgcgccttctcctccgccggtcccatacgctgctgaaatgggttgcggattgaacaagttagagaaacgtgatgaaaaacggcctgggaatatttattcaactttgaagaggcctcaggtggaaaccaagatagatgtgtcctatgaataccgcttcctggagttcacgactctgagtgctgcggagctccctgggtcctcagcagtgaggctggcctccctgcgtgacctgcccgcccagctcctggagctgtaccagcagggcttctcgctggcggccctgcaccccttcgtgcagcccacccatgagcgggagaagacgcccctggagcacatctttagagccatcctgatcaagaaaaccgacagatctcagaaaactgatcttcacaatgaaggctacatcttggaattagattgctgttcctccttagaccacccgacagaccagaaactcatcccagagttcattaagaagatccaggaggctgcaagccagggcctgaaattcgttggtgttatacctcagtaccattcctctgtgaactcggcaggcagcagtgctccggtgtctactgccaacagcaccgaggatgccagagatgcaaaaaacgcacgtggggatcacgcgtcactggagaatgagaaaccggggactggggatgtgtgcagtgctccggctgggagaaaccaaagcccagagcccagctcaggccccacgaggggaggtgcccctcgccaagcagcccagctcaccctccggagagggagatggtggagaactttcaccacagggggtgagcaagacactggatgggccggagagcaaccccttggagggtgcatgaagagccactctcagggaaaatggagatcttcacccttttcaacaaaccgaagagccatcagaagtgccggcaatactaccctgtcaccattcctctccatgtctccaagaatggccagacagtgagcggtttggacgccaactggttagagcacatgagcgaccacttccggaaaggaggcatgctggtgaacgcagtcttctaccttggaatagtgaatgattccttacatggcttgacagatggagtattcatctttgaagctgtttccacagaagatagcaaaaccatacagggctatgatgctattgtggttgaacaatggacagtcctggaaggtgtcgaagtgcagacagactacgtgcccctgctgaactcgctggcggcctatggctggcagctcacctgtgtgctaccaactcccgtcgtcaagactaccagcgaggggagtgtatccaccaagcagattgtctttcttcagagaccgtgtctacctcagaaaatcaagaagaaggaatcgaagtttcagtggcgattctccagagaagaaatgcacaacaggcagatgaggaaatcaaaaggtaaactcagtgccagagacaaacaacaagcagaagaaaatgagaagaacttagaagaccagtcttccaaagctggagacatgggaaactgtgtttcaggacagcagcaggagggtggagtctccgaggagatgaagggccctgtccaagaggacaagggagaacagctgtcccctggtggcctgctgtgtggggtgggtgtggagggtgaggctgtgcagaatggtcctgccagccacagcagggccctggtggggatttgcactgggcactccaatcctggagaggatgccagggacggggatgctgaggaagtcagagagcttggtacggttgaagaaaactgagtcttgggcaatttgtgctaaaactaggtgagttgccaaacccaaggcatcttaccaacagctggtttgggggctggtttccctggtgttgtgtgttacctaccctttggcttggcttgacctctccttgtgagctcacctgagccctcccagggccaggttcctgacagtgttggtttttgcacatccactggaaaggtgtcattaatgacccagtgttagaatgcaagaggtcaggttattctagccctcatggctgaaggcccagtcctggctccaccactcctccagccagagggtctggaccatccagtgcctgtcctcgccacagggcctccagggagcattcgggtcaaatccatggacaccctgggctacaaaccaaggctgctgttcatcccacatcgtgtggggcagtgtccatcccctgcagctacttggtgacttaacaactccaggagccctgtcagctgccctcctccacctaaaccccttcgactcttctgctttgacaaagaaaatgacattggggaggggaggtgctccgcctcccagcttttctcaaaatagtcctatagatactggtaatctggaaatgaagaagtaattctgtctctgcacctacttttgcagaatgttcaaggaagtattctgtgttagtattaatgccaaaaagttgtttttaaaggttttgtactcagcacatcatacaaaccacattacttctgtcacttcagggcatcgggactggctggcgcccttgttatgtgctattttaatcagtgtaacattggtcaagttgttacccatgtatgctgtgtttatcatgtgtatatcgtccagaaagtattaaggctttaggtagatgcaactggcgaaccttggagagggaatgctgattgtcttgaccaaacccacagcctgtctcttctcttggttagttacttacggcaataaatcatctatgagttaaaaaaaaaa

SEQ ID NO: 60735 - DNA, 2206 bp, Homo sapiens
  misc_feature (1)...(2206): n = a,t,c or g
ttttttttttttacagctggagaagttacttttattcttgcagttttatactaggaagtcaacatttaataagccatcatccacaattgattaaaaatgtttaatccttaaattgtgcatcaatatcctatgactccaaattttatttatcactctccttcaagtctgaagaaaatgattaatttggtaagttccacagacagtacagtcccactgacataacatttagtatgatgtcctactctcatattagaattaaggacagccagtatcaaactggcctgaaacctgattgtgttcctggttcagaatacctgtagtaaatctgtaaatccacaccaagacacaacattaaactagggtgtgtatatcttataaaaaccttttcacagtaaaaatcaacattaaaattttaccaaattccaacattatggtttttgaatccaattaagctttcaaaatgcctgattagctgtgaattaattataaataacttcatgtagtttgcccagcatttcaaaatggttatggactatcatgtttaaaatgtcaaagtatgctatacatattgcacttttctgctaggctgggctagtatcttccatggcaagatcctcaaactactgaataaaatacacttttaaatcaatataggtacttgattaatttccctgaaattatcaacatcattaccaaaatcttccaggattttgtaagatttgattccttaaatacagttttaaagttaaacttatggagggaaaaaaaccctcatagattgactgtaaattttacgtccttttttggtccctcaatgaccaaagagaattttaaacaaattatgcttcatgtttcctggcttaataaaaagctacaatttttattatccaaattaagaaatattatactaatcaaaagctattaattttgaaatgtctatgtatgtctgtctgtaggtccccttagaacctttccaaacatttataatcaagagattttaatcaattatgtactagaatcatattaaagaaaaacttattttgcaaaaataaaatcactttccaatatgcttgacagaaacaagctattcattttcatttgtgttccactgaagacattactgaaatctgtccaatggtttatttccaagtggtccactatggaattcttcggaatgttttaagattggctgtagctagagttctgacttccatttggaccctgctctccttcactgtttggaggtggttttggttttggcatcttactaagaatggttgccatctcttttctctcatcgaaattcttccactgctcatatagttttaaaataaccctgattatttccaaaatcttttccatatccacagaaagctcagcaaaccattgcctggcatctttctgctgtacaacacaggctacatgtaggcaagctaaagctatcatgaaaggaggatacagtaggcaaagatccgttctgtaggtatcattcactatcctccatgcaaggggaagcaacatgtcttcttggcccatgtcctgcacatactggagcaaaggtctataaggatgatacactatcaagcaacaatccattagttctaacagatagaattcacattctaatatatgattcatcctataaggaaattcctttggaaaggcatatgaaaatctagtttttaatacagaagtagcagcagcaatcaatcttgtatttgaaactactccaaattcctctactttggatgccaaaaacacacatgtaggagccattaatacaggatctatacttttcagagaatacctggcatagaatctcttgaaatataccgtagcagtggcaataacttgttgtcttaatttaagatgttcacctaatgcttggataacatttgtaaaaaatatttgtaacttccaatattcttcctctgagagaaactttaaatccttttggcgctccttcaacagatcttgtttatccaaaatccattgcaaatagtgggagctctgccaaaagttccctgccatggaacacagcttgccctgataaaaaagcaccagccggcggagcggcccgcggagcgaccatagacccagcccgtccggtaaccgcgctcctcgatcaaatcagctcggctcgactccgctccgcgtacgcgtgggtctncccgggantttcggaggttntcgagttgnttcagat

SEQ ID NO: 60736 - DNA, 3572 bp, Homo sapiens
gacgctgagaggcaggaggcactagggatcgtccgcaggattgggactgatacagaggccgccacggagcccgccggagccaccgttcctgctgctgccgccgctgcccgaatcggaaccgtcgggccgcagccgccggcaatgccgcgaaggaagaggaatgcaggcagtagttcagatggaaccgaagattccgatttttctacagatctcgagcacacagacagttcagaaagtgatggcacatcccgacgatctgctcgagtcacccgctcctcagccaggctaagccagagttctcaagattccagtcctgttcgaaatctgcagtcttttggcactgaggagccctgcttactctaccagaagagtgacccgtagtcagcagcagcctaccccagtgacaccgaaaaaataccctcttcggcagactcgttcatctggttcagaaactgagcaagtggttgatttttcagatagagaaactaaaaatacagctgatcatgatgagtcaccgcctcgaactccaactggaaatgcgccttcttctgagtctgacatagacatctccagccccaatgtatctcacgatgagagcattgccaaggacatgtccctgaaggactcaggcagtgatctctctcatccgccccaagcgccgtcgcttccatgaaagctacaacttcaatatgaagtgtcctacaccaggctgtaactctctaggacaccttacaggaaaacatgagagacatttctccatctcaggatgcccactgtatcataacctctcaagctgacgaatgcaaggtgagagcacagaacccgggataagcagatagaagaaaggatgctgtcttcacaggcaagatgacaacaacaggcattgcaaccaggcaccaggcaccaacggagaggcagcttcgatataaggaaaaagtggctgaactcaagaagaaaagaaattctggactgagcaaagaacagaaagagaaatatatggaacacagacagacctatgggaacacacgggaacctcttttagaaaacctgacaagcgagtatgacttggatcttttccgaagagcacaagcccgggcttcagaggatttggagaagttaaggctgcaaggccaaatcacagagggaagcaacatgattaaaacaattgcttttggccgctatgagcttgatacctggtatcattctccatatcctgaagaatatgcacggctgggacgtctctatatgtgtgaattctgtttaaaatatatgaagagccaaacgatactccgccggcacatggccaaatgtgtgtggaaacacccacctggtgatgagatatatcgcaaaggttcaatctctgtgtttgaagtggatggcaagaaaaacaagatctactgccaaaacctgtgcctgttggccaaactttttctggaccacaagacattatattatgatgtggagcccttcctgttctatgttatgacagaggcggacaacactggctgtcacctgattggatatttttctaaggaaaagaattcattcctcaactacaacgtctcctgtatccttactatgcctcagtacatgagacagggctatggcaagatgcttattgatttcagttatttgctttccaaagtcgaagaaaaagttggctccccagaacgtccactctcagatctggggcttataagctatcgcagttactggaaagaagtacttctccgctacctgcataattttcaaggcaaagagatttctatcaaagaaatcagtcaggagacggctgtgaatcctgtggacattgtcagcactctgcaagcccttcagatgctcaaatactggaagggaaaacacctagttttaaagagacaggacctgattgatgagtggatagccaaagaggccaaaaggtccaactccaataaaaccatggatcccagctgcttaaaatggacccctcccaagggcacttaaagtgacctgtcattccgagccagcgaaccccagcagtaggaatccgtaccctagggatctgtctgtcatttctctgttgctcttgtgattggcaagtacagtatcctttgggaaggccatccccctcaggactgtcctggctccgacctttgtgtacactgcagacgctggttctgaggaactgttgtttcggcctcagtgaggttgcctggatgggatctgtattagacttgagtgcaggtctctcagcactgacccaaggagttctgttatggtactgtacctgtccagtcactggttctctcctcatgtcctctcgccccatgaggttgtgttgtgtcttctaagcgtggtactagtgcttgccacctggtcaccagacctccaaatatggctgccaccaccaggacctttccagttactccttatatgtgtgttctatggaggggcagggaaaaggtggcacttgtgagtgtgtgtggattggcagggggtccattcactttgggttccatcttgctttaaatttcttcattttgattaagagacctctttttgatctgtattgggctaaccagagccaaatacttttgaagagtttcccagggactagtcatggtaatagcatataattgatctgaatgagatggagagaagaatgaaggggtggtggttctgggtttgatttgagttcacctgtgggcagtgggcagtgggcagtgtcttggtgaaagggaacggatactactttttgcctcaccgtaaagtactcactagtaaatatttccttctctctttactcccactttttacgtttgcaggtgccaaagtaatgtccacttttccctttcatgctgcatattaactggttaattatactgcagaaaccttttcacctccactagtctgatacagtacatctgtacttccatataccttgcactgattttgtctgagtgccctgggagaagtagaaaatgattgaaagtgacttccgtatctcagcccatgactcagcaaggcagaatggccacccctgccaaagtttgcttctcttttcaacagtgcctcaccctccctctaggattaaagtgcttctgcccttccacgaactcctcctccatttcctttttgggatttgtcaccatccttctattctctggtcttctatttttggtgttgttcaagtgaaggaagagatgttccctctaatttctctctagcccattataacctgctatcttggggcaacttttgatgtatgacatgtcacccttcccaacttggtctcctccaacatgctgtcttcatgtggagccctcaccacaatccctgactccggtcatttgtgcctttctcttgtcatctctgtacactacttatattcactgtgggttgggggagctaattttaagcatgttcagtggcagctcccctccagtttcagtgtcactgttaaaatttatcaaaaagcaacttcactaggggttttcttaagggataaaggccttttacagaagctaaacccttccccacatgtggtagaatgtgctcttctatatctactcctcaataaagcatgttctctg

SEQ ID NO: 60737 - DNA, 1556 bp, Homo sapiens
tttttttttcatagttcatagtttattacaaatgcatattatccaactcagtagaaatccatgtaccccagaatgtacagaaggtatgcaatgttccagagtgtcattgtcagctctggttttatatatatattaaatatatacatattttgagacagggtctcgctgtcacccaggctggagtgcagtggcacaatctcagctcactgcaacctctgcctcccagcctcaagagatcctcccacctcatccttctgagtagctgggactacatgcgcatgccaccacacccagctattatttttatttctttttgtagagacaagggctcactatgtttctcaggctggtcttgaactcctggtctcaagtgatccttctgccttggcctcccaaagtgctggaattataggcatgagccactgagcctggcctgattatctgttttttgaatagtgaccctaatgtgcttttccagttccagtaacttttgataaaatttttcagcagtgtcttcatctaggtccatcttctgggtcataatataatttcttccaaagccagtggtggcactcagatatttgatcagaggattgagagattcaggcttttggtggaaaagccataccagagcttctgttccattatatggtgtcaaagtgaatgcatttgcaaaaaagcgaagtagcaatattgccggcatcaacagcgtccatataaacggaggcagaattccatatgtcaaattggtcaatgctgtacctggacaggccacattggaatagagaccctgctggttgaagttcctgttcaaagccacactcaaaaggtcagtggcatatttggaagagctgtagggttccttgcctttgctgtgctggaagtcctcgaggctgaaattagatttccttgcattgcgagatgatgtccagatgagctgagatggattgtcactgtgacagaggagaggctccagttcccgaatcaggataaaatggccaaagacatcggtctcaaacacctcctgaagtccatcagcagtgatcttatcaccctgggtcagcaggccttcagcttgaaaagaggccaaagagaagtgctttgatatttagttgtggattaggcatgatcccagcatttagatatatacagtctaatctctgaaacctgcaagtaaaccaccaaacaagattgtgagttgcaagtaaaaacatcaggacaagattgtgtattctatctctagagtgactagattcaaggaggcctaagaaagacaaaaaatactttttaaattaataaattagcccacagcaagctcagaagaatttatagcccattagagttacagcatttctttctcaacagtttttctttagctacagtaaacatttgagaattctttctttggtagtggcttcaaacagaatctgtggagtcatcgtggactttaagtaaaacctctgatcaataattccttccagctctgtcctctcaataaggaattgcagcaaccctttaacttttaaaccccctctcctcatcttacaaagtctctt

SEQ ID NO: 60738 - DNA, 2761 bp, Homo sapiens
gcccgactctaacatggcggcgccctttgtctgctctggagtgccgtccccggccttctcgcggccgtgatgcacctccctctgcggtggggtccgggacatggcaggtaatgagccggacgaggggagccaagctggagtttacacaggcaaactgtcagaaaagagtagcctgggctgtctggaaatctgagccatggactttccccagcacagccagcatgtcttggaacagctgaaccagcagcggcagctggggcttctctgtgactgcacctttgtggtggacggtgttcactttaaggctcataaagcagtgctggcggcctgcagcgagtacttcaagatgctcttcgtggaccagaaggacgtggtgcacctggacatcagtaacgcggcaggcctggggcaggtgctggagtttatgtacacggccaagctgagcctgagccctgagaacgtggatgatgtgctgcgccgtggccactttcctccaaatgcaggacatcatcacggcctgccatgccctcaagtcacttgctgagccggctaccagccctgggggaaatgcggaggccttggccacagaaggaggggacaagagagccaaagaggagaaggtggccaccagcacgctgagcaggctggagcaggcaggacgcagcacacccataggccccagcagggacctcaaggaggagcgcggcggtcaggcccagagtgcggccagcggtgcagagcagacagagaaagccgatgcgccccgggagccgccgcctgtggagctcaagccagaccccacgagtggcatggctgccgcagaagctgaggccgctttgtccgagagctcggagcaagaaatggaggtggagcccgcccggaaaggggaagaggagcaaaaggagcaagaggagcaagaggaggagggcgcagggccagctgaggtcaaggaggagggttcccagctggagaacggagaggcccccgaggagaacgagaatgaggagtcagcgggcacagactcggggcaggagctcggctccgaggcccggggcctgcgctcaggcacctacggcgaccgcacggagtccaaggcctacggctccgtcatccacaagtgcgaggactgtgggaaggagttcacgcacacggggaacttcaagcggcacatccgcatccacacgggggagaagcccttctcgtgccgggagtgcagcaaggccttttccgacccggccgcgtgcaaggcccatgagaagacgcacagccctctgaagccctacggctgcgaggagtgcgggaagagctaccgcctcatcagcctgctgaacctgcgcaagaagcggcactcgggcgaggcgcgctaccgctgcgaggactgcggcaagctcttcaccacctcgggcaacctcaagcgccaccagctggtgcacagcggcgagaagccctaccagtgcgactactgcggccgctccttctccgaccccacttccaagatgcgccacctggagacccacgacacggacaaggagcacaagtgcccacactgcgacaagaagttcaaccaggtagggaacctgaaggcccacctgaagatccacatcgctgacgggcccctcaagtgccgagagtgtgggaagcagttcaccacctcagggaacctgaagcggcaccttcggatccacagcggggagaagccctacgtgtgcatccactgccagcgacagtttgcagaccccggcgctctgcagcggcacgtccgcattcacacaggtgagaagccatgccagtgtgtgatgtgcggtaaggccttcacccaggccagctccctcatcgcccacgtgcgccagcacaccggggagaagccctacgtctgcgagcgctgcggcaagagattcgtccagtccagccagttggccaatcatattcgccaccacgacaacatccgcccacacaagtgcagcgtgtgcagcaaggccttcgtgaacgtgggggacctgtccaagcacatcatcattcacactggagagaagccttacctgtgtgataagtgtgggcgtggcttcaaccgggtagacaacctgcgctcccacgtgaagaccgtgcaccagggcaaggcaggcatcaagatcctggagcccgaggagggcagtgaggtcagcgtggtcactgtggatgacatggtcacgctggctaccgaggcactggcagcgacagccgtcactcagctcacagtggtgccggtgggagctgcagtgacagccgatgagacggaagtcctgaaggccgagatcagcaaagctgtgaagcaagtgcaggaagaagaccccaacactcacatcctctacgcctgtgactcctgtggggacaagtttctggatgccaacagcctggctcagcatgtgcgaatccacacagcccaggcactggtcatgttccagacagacgcggacttctatcagcagtatgggccaggtggcacgtggcctgccgggcaggtgctgcaggctggggagctggtcttccgccctcgcgacggggctgagggccagcccgcactggcagagacctcccctacagctcctgaatgtcccccgcctgccgagtgagctggcggcccttctgactgtttatttaaggatggatggcaccctggaaccgggaagggtggcctgttccctagagagaataaattggattattttttaaaaaaaaaaacctcgtgccaagcttggggtaatgagtgtaatcagctttcgat

SEQ ID NO: 60739 - DNA, 1806 bp, Homo sapiens
ggccaagttccgccatgctcagggcactgtcctgtaccgagacagccacatcaccaacctcaaggggctgaacctcaccacacctggtgagagtgacggcttctgtgccaacaagctgcgtgtggccgtgccgctgctcagcagcgggggacaggtggctgtgcttgagctacggaagcctggccgcctgcccgacacggcactgcccacgctgcagaatggggcagctgtgactgatctggcctgggacccctttgacccccatcgcctcgctgtggctggtgaggacgccaggatccgactgtggcgggtacccgcagagggcctggaagaggtgctcaccacgccagagactgtgctcacaggccacacggagaagatctgctccctgcgcttccacccactggcagccaatgtgctggcctcgtcctcctatgacctcactgttcgcatctgggaccttcaggctggagctgatcggctgaagctgcagggccaccaagaccagatcttcagcctggcctggagtcctgatgggcagcagctggccactgtctgcaaggatgggcgtgtgcgggtctacaggccccggagtggccctgagcccctgcaggaaggcccagggcccaagggaggacgcggagctcgcattgtctgggtatgtgatggtcgctgtctgctggtgtctggctttgacagccaaagtgagcgccagctgctcctatatgaagctgaggccctggccggcggacccttggcagtgttgggcctggacgtggctccctcaaccctgctgcccagctacgacccagacactggcctggtgctcctgaccggcaagggcgacacccgtgtattcctgtacgagctgctccccgagtcccctttcttcctggagtgcaacagcttcacgtcgcctgacccccacaagggcctcgtcctcctgcctaagacggagtgcgacgtgcgggaagtggagctgatgcggtgcctgcggctgcgtcagtcctccctggagcctgtggccttccggctgccccgagtccggaaagagttcttccaggatgacgtgttcccagacacggctgtgatctgggagcctgtgctcagtgccgaggcctggctgcaaggcgctaatgggcagccctggcttctcagcctgcagcctcctgacatgagcccaggtgcaccgagggactgggtgtggggaggaagcgggatgggggttggagaaagggacagaaggcccaggttgaagttccattcctgttggcacgcagaatcctctggcctttgggagggtggagtggctgtgtcaatcagtctctgagccagtggagggcagggctcgtggtctgtgttttcatcacaggtccccacccctaacacacacacacacgcacacactgtggtgtctagggcagggcttatacagtgaggctccattgactgttaataccacctcttagatctgcgccatagaaatcccctatgtcggccaggcgcggtggctcatgcctgtaatcccagcactttatgaggctgaggcgagtggatcacctgaggtcgggggtttgagaccagcctggccaacatggtgaaaccccatctctactaaaaatacaaaattagcctggcgtggtgggcgcctgcaatcccaactactccagaggctgaagcaggagaatcgcttgaacccagaggaggcggaggttgcagtcagcctaggtcacatcattgcactccagcctgggcaacaagagcaaaactccatctcataaaaaaaaaaaggggggcgcctttaac

SEQ ID NO: 60740 - DNA, 1572 bp, Homo sapiens
ttttttttttttacatcaaaatgtcttttatttgagacacaaaaatgcaaaattgctgagatatcaaacatttcccgatcagctacaatactgccactatgtacaaaagatctgatgataaatgtgcacacatataaaaatacagtatgcattacttatgtacagtacatgtgcaaaatgtatggcattcaaacatgatatggaattgatttcaggggtgcaaacagcaaatacaaaggcatcatggtttttcttttaaaaaacaacataaaggcaatagatgaatggacccccgattgccataattttttgttgattaaactagtgcttcaacaagcagggctctgtagattggtatctttctcctttttttcataaagtgagatgctaagacataatgtgacaatgaaaataagaagagaaacacctatcacattgcatttctattgcaagcaagaaaagaaaactaatttctacatagaaaaaaaactttgtattactactgaatgttactcttaaaccaacaaaacaactctatactattttacatgaaaacaataagagaaatatctacatcttagtgaaaattataaccttaaatggataatacctttttggggctgatttttgagatctcattagtctcaaattttaaataaaaagtgcctccttttggcaaatacttggcaatgcctttggttcctttaaagcaagtttgcattactattggttacttgaggtcaagtacttttggtagatactaaaccctttcctaaatgcttcctcttcctaccaaattagcaagattccttacagcatcacgtagagaggtaattgttacgagtttcagtattctataaactttgttaaagctttgtcttagtagttggcataaagctctgttaaacactatagatgtgatgatatctctgataacatattttatttgattcccgacagcaccttgtagatccgagattgccatcttattgtcacaaagctgtgacaccacagagcaaagtgtttgcatggagggtaagagctcttctgtaaacatgtgcagcttttcgaattgtaggccttccatgaaagatttcaggtagaaaccctttgtaatgatgtgtttccctggatactgcaagaaagggcgaatgtggaaaaaacacgcacctgctcattgccatgcagacagagtcactttacaaataaaaatgtagctcagagagactgctgaatgagcaagttattgaaggtttgaaccaggaaaaaaaaattactacatcttagttgttttccagttttgactgaaatcacttaaaagatgagttgaaatgcagttaggatgctctccagatacacactgatgcatttgtaagctatgttccttgaaaaacctgaccttccagttaatgttctttgataattttgggctaattctgtggcctctagggcggtgggacgatttgtatgggtattctcttgtcagtattcaatattcatgtttacagtagcagatattgaaaaatggagggttatttgtgaatttggttaaattgacacatgttgctctgc

SEQ ID NO: 60741 - DNA, 1158 bp, Homo sapiens
gtccagtgtggtggaattccgtcgtctctatggtggcggcggatttggagggaccctacgaaccaggagtcaggcgagccgatctggggctgcaggatgttccgctgggagcgctccattcccctgcgaggctcggccgccgccctgtgcaacaacctcagtgtgctgcagctgccggctcgcaacctcacgtattttggcgtggttcatggaccaagcgcccagcttctcagcgctgctcctgagggtgtgcccttggcccagcgccagctccacgctaaggagggtgctggagtgagtcccccacttatcactcaggtccactggtgtgtcctccccttccgagtgctgctggtactcacctcacatcgaggaatacagatgtacgagtccaatggctacaccatggtctactggcatgcactggactctggagatgcctccccagtacaggctgtgtttgcccggggaattgctgccagtggccacttcatctgtgtgggaacgtggtcaggccgggtgctggtgtttgacatcccagcaaagggtcccaacattgtactgagcgaggagctggctgggcaccagatgccaatcacagacattgccaccgagcctgcccagggacaggattgtgtggctgacatggtgacggcagatgactcaggcttgctgtgtgtctggcggtcagggccagaattcacattattgacccgcattccaggatttggagttccgtgcccctctgtgcagctgtggcaggggatcatagcagcaggctatgggaacggacaagtgcatctatatgaggccactacaggaaatctacatgtccagatcaatgcccatgcccgggccatctgcgccctggacctggcttctgaggtgggcaagctactctctgcaggtgaggacacctttgtgcatatctggaagctgagcagaaacccagagagtgggctacattgaggtggaacactggcatggtgagtgtgtcgccgacacccagctgtgtggtgctcgattttgggattcctcaggcaactcctttgctgggactggctatgaccttgcggagatccggagattcagcagtgtgtgagaagagcagccttcctttgtccctgtggtattcataaagtacccgctccacccaaa

SEQ ID NO: 60742 - DNA, 1692 bp, Homo sapiens
  misc_feature (1)...(1692): n = a,t,c or g
atttgagacctttctgagaccatagtcagtgtggtggaattcggcattttgtcgtgggcaggggctcagctgtcggttccatagaggaccttccagataaggaggcccctccagcccctgactgccgagcttgatttccaggaagggttgtggaagtcaccgagtgccctccatgcacctgtgaagagtgcccagtggggccctccctggagtggagaggagtgactccccgtggccagcagccttgccttcctggggcacaccccgcatacagcttctccccgggctgggacagtggaagggctgccttgccatcacctccctgcgcacttgctttgcccaggtcctggggctctgctcctgccagctcctgggtggttcatgctcctgtgagggcactgaccagccaagcaggaggcctttgtggtggctgagtagaggcatgtggggtcactcatgcgccctcggggtccaggccccactagtcctcctccaagtcccattttggctggtnggacacccaggtgtgtggcctagaggctatcaggctgcagcttggggaagcaaacaagggagggtgatggttcctggccccacaccatcattctggtgtcagccctgagagggtgcctgtcacagcaggttccaggactgctgcctcctgaggatggagaaactgtggcaccctgggggccactaagggaggccagctgattgcagccacgtgtaccttcctcttctcgtctctgtgttttgtagatgaccgcacctcgagcaggagtggggatgccacgtctgcccccagcgcccggccctctgtccaccacggtcattcccggagccgccccgaccctgtccgtgcccacaccagatggcgccctcggaaccgcccggagaaaccaggtgtggtttggcctccgagtcccccccaccgcctgctgtgggcacagcactcagccgcgagggggacagcgggtgggcagcaagactgcttcctttgcggcttcagaccctgttcgctcctaggttcctgtggtccacgcgccgtctccacacccacttcctatacttgagttgatggttagaaccttgtcgtcaccctgcagaagtacagtgccttgaatgccagcttttccgttccctgatgaaaagatatgttaaaaaaaattatcggaaaaggtttcatttgcaattggcttgtgcattgataatctttatttactgttttaagttgcagagatgtgaatggtttacaaatctgaagctgaagttcaatctttggttttctgttgtaaatgccttttacaaacattgaattagctaccttaagtattgaagagcttccattgctaggtgagccctgctttgtcctcagtagagtgccggttccctgggctcatccaggggctgagagacggcgggacgctggggcagggcacactggcggagctgcttgctcagtagggaatgtcagttgttgcgctgggccatgagaaatccgccagaaaacgttaggtgagcagacatgccccccatgccagtgggctgctgtgagtgaggataaagtgtgtgttgggcatagaaaccctggctgcccgcccaccctgtggagacaagtgcagctcctccagctggagagggctgcctctctcctgcccacttccctcccttctccatgatttccatggagag

SEQ ID NO: 60743 - DNA, 4075 bp, Homo sapiens
agaaactccgggaattactggggcgacgacttcgtgcgctaccgagcgtaggccctgcgcagcgacggggcttgggtgaccatggagagcgcgctcaccgcccgtgaccgggtgggggtgcaggatttcgtgctgctggagaacttcaccagcgaggccgccttcatcgagaacctgcggcggcgatttcgggagaatctcatctacacctacattggccccgtcctggtctctgtcaatccctaccgggacctgcagatctacagccggcagcatatggagcgttaccgtggcgtcagcttctatgaagagccccctcacctgcttgccgtggcggacactgtgtaccgagcactgcgcacggagcgtcgggaccaggctgtgatgatctctgtggagagcggggcaggcaagaccgacgccaccaagaggctgctgcagctctatgcagagacctgcccagccccccaacgcggaggtgccgtgcgggaccggctgctacagagcaacccggtgctggaggcctttggaaatgccaagaccctccggaacgataactccagcaggttcgggaagtacatggatgtgcagtttgacttcaagggtgcccccgtgggtggccacatcctcagttacctcctggaaaagtcacgagtggtgcaccagaatcatggggagcggaacttccacatcttctaccagctgctggaggggggcgaggaagaaactcttcgcaggctgggcttggaacggaacccccagagctacctgtacctggtgaagggccagtgtgccaaagtctcctccatcaacgacaagagtgactggaaggtcgtcaggaaggctctgacagtcattgatttcaccgaggatgaagtggaggacctgctgagcatcgcggccagcgtccttcatttgggcaacatccactttgctgccaacgaggagagcaatgcccaggtcaccaccgagaaccagctcaagtatctgaccaggctcctcagcgtggaaggctcgacgctgcgagaagccctgacacacaggaagatcatcgccaagggggaggagctcctgagcccgctgaacctggagcaggccgcgtacgcacgagacgccctcgccaaggctgtgtacagccgcacttttacctggctcgtcgggaagatcaacaggtcgctggcctccaaggacgtggagagccccagctggcggagcaccacggttctcgggctcctggatatttatggctttgaagtgtttcagcataacagctttgagcagttctgcatcaattactgcaacgagaagctgcagcagctcttcatcgagctcacgctcaagtcggagcaggaggagtacgaggcagagggcatcgcgtgggagcccgtccagtatttcaacaacaaaatcatctgtgatctggtggaggagaagtttaagggcatcattctcgattttggatgaaggagtgtctgcgcccgggggaggccacagacctgaccttcctggagaagctggaggatactgtcaagcaccatccacacttcctgacgcacaagctggctgaccagaggaccaggaaatctctgggccgaggggaattccgccttctgcactatgcgggggaggtgacctacagcgtgaccgggtttctggacaaaaacaatgaccttctcttccggaaccttaaggagaccatgtgtagctcaaagaatcccattatgagccagtgcttcgaccggagcgagctcagtgacaagaagcggccagagacggtcgccacccagttcaagatgagcctcctgcagctggtggagatcctgcagtctaaggagcccgcctacgtccgctgcatcaaacccaatgatgccaaacagcccggccgctttgacgaggtgctgatccgccaccaggtgaagtacctggggctgttggaaaacctgcgcgtgcgcagagccggctttgcctatcgccgcaaatacgaagctttcctgcaaaggtacaagtcactgtgcccagagacgtggcccacgtgggcaggacggccgcaggatggggtggctgtgctggtccgacacctgggctacaagccagaagagtacaagatgggcaggaccaagatcttcatccgcttccccaagaccctgtttgccacagaggatgccctggaggtccggcggcagagcctggccacaaagatccaagctgcctggaggggctttcactggcggcagaaattcctccgggtgaagagatcagccatctgcatccagtcgtggtggcgtggaacactgggccggaggaaggcagccaagaggaagtgggcggcacagaccatccggcggctcatccgaggcttcgtcctgcgccacgccccccgctgccccgagaacgccttcttcctggaccatgtgcgcacctcttttttgctaaacctgaggcggcagctgccccagaatgtcctggacacctcgtggcccacgcccccacctgccctgcgtgaggcctcagagcttctgcgggagttgtgcataaagaacatggtgtggaaatactgccggagtatcagccctgagtggaagcagcagctgcagcagaaggccgtggctagtgagatcttcaagggcaagaaggataattaccctcagagtgtacccaggctcttcatcagcactcggcttggtacagatgagatcagcccccgagtgctgcaggccttgggctctgagcccattcagtatgcggtgcctgttgtgaaatacgaccgcaagggctacaagcctcgctcccggcagctgctgctcacgcccaacgccgtcgtcatcgtggaggacgccaaagtcaagcagaggattgattacgccaacctgaccggaatctctgtcagcagcctgagcgacagtctttttgtgcttcatgtacagcgtgcggacaataagcaaaagggagatgtggtgctgcagagtgaccacgtgattgagacgctgaccaagacagccctcagtgccaaccgcgtgaacagcatcaacatcaaccagggcagcatcacgtttgcagggggccccggcagggatggcaccattgacttcacacccggctcggagctgctcatcaccaaggccaagaacgggcacctggctgtggtcgccccacggctgaattctcggtgataaaggcgcccactggaccctcccaacgcccaatgctttgcttttctcctcctccccttcccagttaccaaagactcgaacttccagacagggacccagggacaccccgaagcccacctgcaatctcccacctcctgcccatccctctcttgagggagcagcaggggccaggagctaccccaggagtgggccaggccgggccacagcaataggaaagccagggccagagcgagccatgccagccctactgccgatgccaaatatttgagagaagggaacttttgctgaggttttctctgaggtttttttgatgctttataggaaactattttttaaaaaaagccatttcccacccaaggacacagtggatgtgttttccctgactccagcagggcaaggaatgtagccgagaggttgtgtgggctgggctctggtgccctcttccctggccaggacacctctcctcctgattcccttggcaccttgtctttctgtctgtttacctgtctccctgcctgcccatctgcatcttttgcagcccactctgacttccatctgggggctgagaccacccttgcctgcccccttctttctgccttaagaatgtccttttaggctgggcatggtggctcacgcctgtaaccccagcactttgggaggcggagacgggcagataacctgaggtcaggatttcgagaccaacctgacctacatggagaaactccgcctctagtaaaaatacaaaattagccgggcatggtggtgcacgcctctaatcccagctactcgggaggctgaggcaggagaatcacttgaacccgggaagtggaggttgcagtgagccaagagtacaccactgcactccagcctgggcaacagagcgagactccgtcttaaaaaaaaaa

SEQ ID NO: 60744 - DNA, 1239 bp, Homo sapiens
ggcacgagcgcaaggctccagtggccttgacctcccgcggcgtgggaggctgcgcggcgatgctgcagttcgtccgggccggggcgcgggcctggcttcggcctaccggcagccagggcctgagttccctggcggaagaggcagcgcgtgcgaccgagaacccggagcaggtggcgagcgagggtctcccggagcccgtgctgcgcaaagtcgagctcccggtacccactcatcgacgcccagtgcaggcctgggtcgagtccttgcggggcttcgagcaggagcgcgtgggcctggccgacctgcaccccgatgttttcgccaccgcgcccaggctggacatactgcaccaggttgctatgtggcagaagaacttcaagagaattagctatgccaagaccaagacgagagccgaggtgcggggcggtggccggaagccttggccgcagaaaggcactgggcgggcccggcatggcagcatccgctctccgctctggcgaggaggaggtgttgcccatggcccccggggccccacaagttactactacatgctgcccatgaaggtgcgggcgctgggtctcaaagtggcactgaccgtcaagctggcccaggacgacctgcacatcatggactccctagagctgcccaccggagacccacagtacctgacagagctggcgcactaccgccgctggggggactccgtactcctcgtggacttaacacacgaggagatgccacagagcatcgtggaggccacctctaggcttaagaccttcaacttgatcccggctgttggcctaaatgtgcacagcatgctcaagcaccagacgctggtcctgacgctgcccaccgtcgccttcctggaggacaagctgctctggcaggactcacgttacagacccctctaccccttcagcctgccctacagcgacttcccccgacccctaccccacgctacccagggcccagcggccaccccgtaccactgttgatgtgaagcacctcttctgagccaggccgagcccctggccgacttgggagcctcaggcccacgcccacccttcgaggaaggtgtcacctggaccccttcattccacggaggaagctgaggccacagggagcggccatcgccattgggaaggggcgactccacggaaagcccagacgggcttctgcatccattccctctttttgtttttaaaataaattgtatttttgaatcaaggaaaaaaaaaa

SEQ ID NO: 60745 - DNA, 676 bp, Homo sapiens
atccgggctctgaccatgatttggcgccgcgcggcgctggcggggacgcggctggtttggagcaggagcggctcggcaggctggcttgacagggcggcgggagctgcgggagctgcggcagctgcggcctctgggatggagagcaatacatcatcatctttggagaatttagcgacggcgcctgtgaaccagatccaagaaacaatttctgataattgtgtggtgattttctcaaaaacatcctgttcttactgtacaatggcaaaaaagcttttccatgacatgaatgttaactataaagtggtggaactggacctgcttgaatatggaaaccagttccaagatgctctttacaaaatgactggtgaaagaactgttccaagaatatttgtcaatggtacttttattggaggtgcaactgacactcataggcttcacaaagaaggaaaattgctcccactagttcatcagtgttatttaaaaaaaaagtaaaaggaaagaatttcagtgatgtttatactaataagtttgctagtacagtgtcagttatttaaagtggtaatgcccgataatgtcttttaaatgttttgagggatgttttaaaatacatgcattgtcttcacgaagaagatgtaaaaataatgaacaataaattgcggtggaaacctcttcttaa

SEQ ID NO: 60746 - DNA, 1826 bp, Homo sapiens
  misc_feature (1)...(1826): n = a,t,c or g
gaattcggcacgaggcaggtcgggcggtacgacaggtcagagctgcggcctgagcagccagcgtccggcatgaaggtctggggtctggctgctgcctgcttcttgctccagcaccatggaatgcctgcgcagtttaccctgcctcctgccccgcgcgatgagacttccccggcggacgctgtgtgccctggccttggacgtgacctctgtgggtcctcccgttgctgcctgcggccgccgagccaacctgattggaaggagccgagcggcgcagctttgcgggcccgaccggctccgcgtggcaggtgaagtgcaccggtttagaacctctgacgtctctcaagccactttagccagtgtagccccagtatttactgtgacaaaatttgacaaacagggaaacgttacttcttttgaaaggaagaaaactgaattataccaagagttaggtcttcaagccagagatttgagatttcagcatgtaatgagtatcacagtcagaaacaataggattatcatgagaatggagtatttgaaagctgtgataactccagagtgtcttctgatattagattatcgtaatttaaacttaaagcaatggctgttccgggaactcccttcacagttgtctggagagggtcaactcgttacataccctttaccttttgagtttagagctatagaagcactcctgcaatattggatcaacacccttcaggggaaacttagcattttgcagccactgatccttgagaccttggatgctttgggggaccccaaacattcttctgtagacagaagcaaactgcacattttactacagaatggcaaaagtctatcagagttagaaacagatattaaaattttcaaagagtcaattttggagatcttggatgaggaagagttgctagaagagctctgtgtatcaaaatggagtgacccacaagtctttgaaaagagcagtgctgggattgaccatgcagaagagatggagttgctgttggaaaactactaccgattggctgacgatctctccaatgcagctcgtgagcttagggtgctgattgatgattcacaaagtattattttcattaatctggacagccaccgaaacgtgatgatgaggttgaatctacagctgaccatgggaaccttctctctttcgctctttggactaatgggagttgcttttggaatgaatttggaatcttcccttgaagaggaccatagaattttttggctgattacaggaattatgttcatgggaagtggcctcatctggaggcgcctgctttcattccttggacgacagctagaagctccattgcctcctatggtatgaaggatatggttcacggcggtattgtggaagggttatgatcatgggccctaaagtcagagcgcctgggattaagttgtcacaggcactatggcccttgcgagttgctttctcaaacttccttcagtttccctatctgtcagttaagtcggtattacctgcttcatagggttatgggaagaattaaacaatatgtgtaaagcacttactagcccactgcctaacccaataagttagaaatataatttgtgtagaactctgacaacatacatttaaacagatgttagtaattctggtataaggtttgtcataaccaaatggaaatgtaggaaacatttataatgttcttaaaagatagaaaattcccctccattttctttgtacttgaagatggcaccactggaataaatacttaagacactgaaaaaaaacctcgtgccaagctggcgtaagcaggtccgagactatcagtgggatcaggnnccct

SEQ ID NO: 60747 - DNA, 3354 bp, Homo sapiens
atacccggatcgacccacacgtccgggcgggagtggcgtggcgcagggatggcacaaaagaaatatcttcaagcaaaattgacccagtttttaagggaagacaggattcaactttggaaacctccatatacagatgaaaataaaaaagttggtttggcattaaaggaccttgctaagcagtactctgacagactagaatgctgtgaaaatgaagtagaaaaggtaatagaagaaatacgttgcaaggcaattgagcgtggaacaggaaatgacaattatagaacaacgggaattgctacaatcgaggtgtttttaccaccaagactaaaaaaagataggaaaaacttgttggagacccgattgcacatcactggcagagaactgaggtccaaaatagctgaaacctttggacttcaagaaaattatatcaaaattgtcataaataagaagcaactacaactagggaaaacccttgaagaacaaggcgtggctcacaatgtgaaagcgatggtgcttgaactaaaacaatctgaagaggacgcgaggaaaaacttccagttagaggaagaggagcaaaatgaggccaaactcaaagaaaaacaaattcagaggaccaagagaggactagaaatactggcaaagagagcagcagagacagtggtggatccagaaatgacaccgtacttagacatagctaaccagacaggcagatcaatcagaattcccccatcagaaagaaaagcccttatgttagctatgggatatcatgagaagggcagagctttcctgaaaagaaaagaatatggaatagccttgccatgtctgttggacgctgacaaatatttctgtgagtgttgcagagagctgctggacacagtggataactatgccgtcctccagctggatatagtgtggtgttacttccgcctggaacagctggaatgccttgatgatgcagaaaaaaaattaaacttggcccagaaatgctttaaaaattgttacggagaaaatcatcagagactggtccacataaaaggaaattgtgggaaagagaaggtactgtttctaagactctacttacttcaagggatccgaaactatcacagtggaaatgatgtagaggcttatgagtatcttaacaaggcacgtcagctctttaaagagctatatattgatccatcaaaagtggacaatttgttgcagttggggtttactgcccaggaagcccggcttggcctgagggcgtgtgatgggaacgtggatcatgcggccactcatattaccaaccgcagagaggaactggcccaaataaggaaggaggaaaaagagaagaaaagacgccgcctcgagaacatcaggtttctgaaagggatgggctactccacgcacgcggcccagcagattctgctcagcaatcctcagatgtggtggttaaatgattccaatcctgaaaccgacaaccgtcaagaaagtccttcccaggaaaacattgaccgattggtgtacatgggttttgatgcactcgtggccgaagctgcgctgagagtgttcagaggcaacgtccagctggccgcccagacccttgctcacaacggaggaagcctgcctcccgagctgccgctgtcgccagaagactctttgtccccgccagccacgtccccttctgactccgcaggaacctctagtgcctcaacagacgaagacatggagacagaggccgtcaatgagatactggaagacattccagagcatgaggaagactatcttgactcaactctggaagatgaagaaattattattgcagagtacctatcctatgtagaaaataggaagtcagcgacaaagaaaaactaaataatgaacagaaatagcgctaattttctgcttataaatgctatcattatgaaaaggctaatgcagctctttctgttcttactttttatctgaattacaagtcctctttgggtgtaggagggggtgggcaggggacaagtccaggaggggtcccagggccttcatgcgtggtctcggggaagaagcttcctctggcctggcgcaggccgttccatctgcctcccaggtctgcgtccctaaccccttccccagcttggtgttttaccccgaaacaggaaggaacaggggtcctgtagaacaggggtcctggggaaggtgtccagggcagggtcctgggaagggtgtcccgaccgcttcctctccagctgtggctccatctgcccagcttgcctgcctcctgcacccactgccctgaccttcctgcttcccacgctgccatctctgccagggtgccacatgggttcctgtgccaccctttccccgcccctcaaatcgtcctttaagtcttccttccaagtgctgtggggcataacgatgaggcgctggccttgggggccacaccaggtcgcagcaaatggcttcagcctgggacgccagtgttttatgctcttagttcagtaaaatacgcccccgaaattcaagattgagtgtcaggctttatatatattcagcattcctcattacagaaatcttctattgaatgggaaaggtttaaatgctaaccaaagcaatttatttttaattaatatttttagactctgtgctgtcatactgaactcactgctagctaagagacctatcagagatttagatatattttctccaggttttttgtgggttttctttgttgttgttgttgttctagccatgtgacagaggctctttctaaaagtatgtagttcgctgtgtgtcggctccagcagtaaccgtcctcactgcgccacgcactcctctgtagatgtgtgcccagtgggagttccttccagccccaggaccgcagcagcagccaggtgccgagtggattgagtgccaggtgcatccaagactttccctcccttccagaaggcactgactgaagacaggatggatcatgcggagccggctgaaatgctccaactttttcaaagtgtgggtggtccagtttggactgatgggaatcttcttgtcattctttttaaacggatgataccgatggaaataaaaggtgggaaatatattcaaaaaaaaaaaaaaggggggcccttttaaaagaacccttggggggcccaaatttacccggggttggcaaggtaaaatttttttccttatggggggcctttttaaaccctccttgggatttttggaaaggaaccttttttttgggggggggacttattggcccaccccccctccaaaatttaaagcctttagggaaaaaaaaaatttttaaggggaaaagggggaaaaccaaccccaattccctggctgttaaaaatttttctttccggagtagaattaaga

SEQ ID NO: 60748 - DNA, 933 bp, Homo sapiens
cgtcggaactcggccgcgggacatccacggggcgcgagtgacacgcgggagggagagcagtgttctgctggagccgatgccaaaaaccatgcatttcttattcagattcattgttttcttttatctgtggggcctttttactgctcagagacaaaagaaagaggagagcaccgaagaagtgaaaatagaagttttgcatcgtccagaaaactgctctaagacaagcaagaagggagacctactaaatgcccattatgacggctacctggctaaagacggctcgaaattctactgcagccggacacaaaatgaaggccaccccaaatggtttgttcttggtgttgggcaagtcataaaaggcctagacattgctatgacagatatgtgccctggagaaaagcgaaaagtagttatacccccttcatttgcatacggaaaggaaggctatgcagaaggcaagattccaccggatgctacattgatttttgagattgaactttatgctgtgaccaaaggaccacgaaagcattgagacatttaaacaaatagacatggacaatgacaggcagctctctaaagccgagataaacctctccttgcaaagggaatttgaaaaagatgagaagccacgtgacaagtcatatcaggatgcagttttagaagatatttttaagaagaatgaccatgatggtgatggcttcatttctcccaaggaatacaatgtataccaacacgatgaactatagcatatttgtatttctactttttttttctagctatttactcgtactttatgtataaaacaaagtcacttttctccaagttgtatttgctatttttcccctatgagaagatattttgatctccccaatacattgattttggtataataaatgtgaggctgttttgcaaacttaaaaaaaagtcgacgcg

SEQ ID NO: 60749 - DNA, 1083 bp, Homo sapiens
ggcgggaccggacttccggctggtctgtggggtttcgggttcggggtttcctggtgggcgtcaggggcaggcaacagagtggcggccgctacggccctggaacggggccatggagaagctgcggcgagtcctgagcggccaggacgacgaggagcagggcctgactgcgcaggattcacagattaatctcttgaggtcctggatgcctcatcccttagtttcaacaccagattgaaatggtttgccatctgcttcgtatgtggcgttttcttttctattcttggaactggattgctgtggcttccgggcggcataaagctttttgcagtgttttataccctcggcaatcttgctgcgttagccagtacatgctttttaatgggacctgtgaagcaactgaagaaaatgtttgaagcaacaagattgcttgcaacaattgttatgcttttgtgtttcatatttaccctgtgtgctgctctttggtggcataagaagggactggctgtgttattctgcatattgcagttcttgtcaatgacctggtatagcctgtcgtacatcccatatgcaagggatgcagttattaaatgctgttcttctctcctaagttgaaaatcagaaacttgtggaaaagagcacttgaatgttggtactctatgtttggtgaagtttgcttttccccataaaacactccaggaacaactgacgtgacagttgaagaccgttttgtactaagtctcattttgtatactggtaaaaactacatgcttgattaaaccattaaatgcttgtaactttaaattcattatgtgtcattaatatacttttccaaagataagatttttaatcactgccagttgtaaattatttttagccaatttttaaatcttttcaaagcagctttgaaatgtgaatatttaaaggtagacctgtgctgcaagataattaaacttttttgcttttaaaaaaagtctgcatttttaagattttttttactttaaatgtgaaacttattttaagctaaaaattgcttattatatgtaataaaaataatatataaatctttacaattttgaaataaac

SEQ ID NO: 60750 - DNA, 1981 bp, Homo sapiens
  misc_feature (1)...(1981): n = a,t,c or g
acagagatggcactgatgcaggaactgtatagcacaccagcctccaggctggactccttcgtggctcagtggctgcagccccaccgggagtggaaggaagaggtgctagacgctgtgcggaccgtggaggagtttctgaggcaggagcatttccaggggaagcgtgggctggaccaggatgtgcgggtgctgaaggtagtcaaggtgggctccttcgggaatggcacggttctcaggagcaccagagaggtggagctggtggcgtttctgagctgtttccacagcttccaggaggcagccaagcatcacaaagatgttctgaggctgatatggaaaaccatgtggcaaagccaggacctgctggacctcgggctcgaggacctgaggatggagcagagagtccccgatgctctcgtcttcaccatccagaccagggggactgcggagcccatcacggtcaccattgtgcctgcctacagagccctggggccttctcttcccaactcccagccaccccctgaggtctatgtgagcctgatcaaggcctgcggtggtcctggaaatttctgcccatccttcagcgagctgcagagaaatttcgtgaaacatcggccaactaagctgaagagcctcctgcgcctggtgaaacactggtaccagcagtatgtgaaagccaggtcccccagagccaatctgccccctctctatgctcttgaacttctaaccatctatgcctgggaaatgggtactgaagaagacgagaatttcatgttggacgaaggcttcaccactgtgatggacctgctcctggagtatgaagtcatctgtatctactggaccaagtactacacactccacaatgcaatcattgaggattgtgtcagaaaacagctcaaaaaagagaggcccatcatcctggatccggccgaccccaccctcaacgtggcagaagggtacagatgggacatcgttgctcagagggcctcccagtgcctgaaacaggactgttgctatgacaacagggagaaccccatctccagctggaacgtgaagagggcacgagacatccacttgacagtggagcagaggggttacccagatttcaacctcatcgtgaacccttatgagcccataaggaaggttaaagagaaaatccggaggaccaggggctactctggcctgcagcgtctgtccttccaggttcctggcagtgagaggcagcttctcagcagcaggtgctccttagccaaatatgggatcttctcccacactcacatctatctgctggagaccatcccttccgaagatccaggtcttcgtgaagaatcctgatggtgggaagctacgcctatgccattcaacccccaacagcttcatcctgggtctgaagcagcagattgaagacccancaggggcttcctaaaaaggcagcagcagctggaattcccaaggccaaagtcctgcaaggactggttggggtctggggattttatggcatccaagacaagtgacactctcaatcctctcggaagaagaaaggagaggctctgtttccagccagttagttttctctgggagacttcttctgtacatttctgccatgtactccagaactcatcctgtcaatcactctgtcccattgtctactgggaaggtcccaggtcttcaccagttttacaatgagttatcccaggccagacgtggtggctcacacctgtaatcccagaactttgggaggccgaggtgggaggagcgcttgagccgaggagttcaagaccagcctgggtatcacagggagaccccgtctctacaaaataaaaaaataattcactgggtgtggttgtgcacatttgtggtctcaggcactcgggaggctgaggcagaagaatcgcttgagcccaggaggctgaggctgcagtgagctgtgatcacaccgctactctcctgcccaggccacagagcatgaccctgtgtctaaaaa

SEQ ID NO: 60751 - DNA, 2018 bp, Homo sapiens
ttttttttttttcatagtaatgtaaaaccatttgtttaattctaaatcaaatcactttcacaacagtgaaaattagtgactggttaaggtgtgccactgtacatatcatcattttctgactggggtcaggacctggtcctagtccacaagggtggcaggaggagggtggaggctaagaacacagaaaacacacaaaagaaaggaaagctgccttggcagaaggatgaggtggtgagcttgccgaaggatggtgggaagggggctccctgttggggccgagccaggagtcccaagtcagctctcctgccttacttagctcctggcagagggtgagtggggacctacgaggttcaaaatcaaatggcatttggccagcctggctttactaacaggttcccagagtgcctctgttggctgagctctcctgggctcactccatttcattgaagagtccaaatgattcattttcctacccacaacttttcattattcttctggaaacccatttctgttgagtccatctgacttaagtcctctctccctccactagttggggccactgcactgaggggggtcccaccaattctctctagagaagagacactccagaggcccctgcaactttgcggatttccagaaggtgataaaaagagcactcttgagtgggtgcccaggaatgtttaaaatctatcaggcacactataaagctggtggtttcttcctaccaagtggattcggcatatgaaccacctactcaatactttatattttgtctgtttaaacactgaactctggtgttgacaggtacaaaggagaagagatggggactatgaagaggggagggcttccctcatcttcctcaagatctttgtttccacaaactatgcagtcataattgagaaaaagcaatagatggggcttcctaccatttgttggttattgctggggttagccaggagcagtgtggatggcaaagtaggagagaggcccagaggaaagcccatctccctccagctttggggtctccagaaagaggctggatttctgggatgaagcctagaaggcagagcaagaactgttccaccaggtgaacagtcctacctgcttggtaccatagtccctcaataagattcagaggaagaagcttatgaaactgaaaatcaaatcaaggtattgggaagaataatttcccctcgattccacaggagggaagaccacacaatatcattgtgctggggctccccaaggccctgccacctggctttacaaatcatcaggggttgcctgcttggcagtcacatgcttccctggttttagcacacatacaaggagttttcagggaactctatcaagccataccaaaatcagggtcacatgtgggtttcccctttccttgcctcttcataaaagacaacttggcttctgaggatggtggtcttttgcatccagttgggctgacctgacaaagcccccagtttcctgtggcaggttctgggagaggatgcattcaagcttctgcagcctaggggacagggctgcttgttcagttattactgcctcggagctccaaatcccaccaaagtcctgactccaggtctttcctaatgcacagtagtcagtctcagcttcggcagtattctcggctgtatgttctctggcagagagaggcagatgaacatagttttagggagaaagctgatgggaaacctgtgagttaagccacatgtctccccaggaataatttatgccaggaaaccaggaagtcattcaagttgttctctgaggccaaagacactgagcacagcccagagccaataaaagatctttgagtctctggtgaattcacgaagtgaccccagctttagctactgcaattatgatttttatgggacagcaatttcttgcatctctacagaggaagaagagggggagtgggaggggaaggaaagagaacagagcggcactgggatttgaaaggggaacctctctatctgaggagcccccactggcttcagaag

SEQ ID NO: 60752 - DNA, 1583 bp, Homo sapiens
aggaacgagagcggagcggagcacagtccgccgagcacaagctccagcatcccgtcaggggttgcaggtgtgtgggaggcttgaaactgttacaatatggctttccttggactcttctctttgctggttctgcaaagtatggctacaggggccactttccctgaggaagccattgctgacttgtcagtgaatatgtataatcgtcttagagccactggtgaagatgaaaatattctcttctctccattgagtattgctcttgcaatgggaatgatggaacttggggcccaaggatctacccagaaagaaatccgccactcaatgggatatgacagcctaaaaaatggtgaagaattttctttcttgaaggagttttcaaacatggtaactgctaaagagagccaatatgtgatgaaaattgccaattccttgtttgtgcaaaatggatttcatgtcaatgaggagtttttgcaaatgatgaaaaaatattttaatgcagcagtaaatcatgtggacttcagtcaaaatgtagccgtggccaactacatcaataagtgggtggagaataacacaaacaatctggtgaaagatttggtatccccaagggattttgatgctgccacttatctggccctcattaatgctgtctatttcaaggggaactggaagtcgcagtttaggcctgaaaatactagaaccttttctttcactaaagatgatgaaagtgaagtccaaattccaatgatgtatcagcaaggagaattttattatggggaatttagtgatggctccaatgaagctggtggtatctaccaagtcctagaaataccatatgaaggagatgaaataagcatgatgctggtgctgtccagacaggaagttcctcttgctactctggagccattagtcaaagcacagctggttgaagaatgggcaaactctgtgaagaagcaaaaagtagaagtatacctgcccaggttcacagtggaacaggaaattgatttaaaagatgttttgaaggctcttggaataactgaaattttcatcaaagatgcaaatttgacaggcctctctgataataaggagatttttctttccaaagcaattcacaagtccttcctagaggttaatgaagaggctcagaagctgctgctgtctcaggaatgattgcaattagtaggatggctgtgctgtatcctcaagttattgtcgaccatccatttttctttcttatcagaaacaggagaactggtacaattctattcatgggacgagtcatgcatcctgaaacaatgaacacaagtggacatgatttcgaagaactttaagttactttatttgaataacaaggaaaacagtaactaagcacattatgtttgcaactggtatatatttaggatttgtgttttacagtatatcttaagataatatttaaaatagttccagataaaaacaatatatgtaaattataagtaacttgtcaaggaatgttatcagtattaagctaatggtcctgttatgtcattgtgtttgtgtgctgttgtttaaaataaaagtacctattgaacatgtgaaaaaaaaaa

SEQ ID NO: 60753 - DNA, 2176 bp, Homo sapiens
attggcaccagggttactgggagggggcttgctgtggccctgtcaggaagagtagagctctggtccagctccgcgcagggagggaggctgtcaccatgccggcctgctgcagctgcagtgatgttttccagtatgagacgaacaaagtcactcggatccagagcatgaattatggcaccattaagtggttcttccacgtgatcatcttttcctacgtttgctttgctctggtgagtgacaagctgtaccagcggaaagagcctgtcatcagttctgtgcacaccaaggtgaaggggatagcagaggtgaaagaggagatcgtggagaatggagtgaagaagttggtgcacagtgtctttgacaccgcagactacaccttccctttgcaggggaactctttcttcgtgatgacaaactttctcaaaacagagggccaagagcagcggttgtgtcccgagtatcccacccgcaggacgctctgttcctctgaccgaggttgtaaaaagggatggatggacccgcagagcaaaggaattcagaccggaaggtgtgtagtgcatgaagggaaccagaagacctgtgaagtctctgcctggtgccccatcgaggcagtggaagaggccccccggcctgctctcttgaacagtgccgaaaacttcactgtgctcatcaagaacaatatcgacttccccggccacaactacaccacgagaaacatcctgccaggtttaaacatcacttgtaccttccacaagactcagaatccacagtgtcccattttccgactaggagacatcttccgagaaacaggcgataatttttcagatgtggcaattcagggcggaataatgggcattgagatctactgggactgcaacctagaccgttggttccatcactgccatcccaaatacagtttccgtcgccttgacgacaagaccaccaacgtgtccttgtaccctggctacaacttcagatacgccaagtactacaaggaaaacaatgttgagaaacggactctgataaaagtcttcgggatccgttttgacatcctggtttttggcaccggaggaaaatttgacattatccagctggttgtgtacatcggctcaaccctctcctacttcggtctggccgctgtgttcatcgacttcctcatcgacacttactccagtaactgctgtcgctcccatatttatccctggtgcaagtgctgtcagccctgtgtggtcaacgaatactactacaggaagaagtgcgagtccattgtggagccaaagccgacattaaagtatgtgtcctttgtggatgaatcccacattaggatggtgaaccagcagctactagggagaagtctgcaagatgtcaagggccaagaagtcccaagacctgcgatggacttcacagatttgtccaggctgcccctggccctccatgacacacccccgattcctggacaaccagaggagatacagctgcttagaaaggaggcgactcctagatccagggatagccccgtctggtgccagtgtggaagctgcctcccatctcaactccctgagagccacaggtgcctggaggagctgtgctgccggaaaaagccgggggcctgcatcaccacctcagagctgttcaggaagctggtcctgtccagacacgtcctgcagttcctcctgctctaccaggagcccttgctggcgctggatgtggattccaccaacagccggctgcggcactgtgcctacaggtgctacgccacctggcgcttcggctcccaggacatggctgactttgccatcctgccccagctcgtgccgctggaggatcccggaaagagtttccaaagagtgaagggcagtacagtggcttcaagagtccttactgaagcccaggcaccgtggctcacgtctgtaatcccagcgctttgggaggccgaggcaggcagatcacctgaggtcgggagttggagacccgcctggctaacaaggcgaaatcctgtctgtactaaaaatacaaaaatcagccagacatggtggcatgcacctgcaatcccagctactcgggaggctgaggcacaagaatcacttgaacccgggaggcagaggttgtagtgagcccagattgtgccactgctctccagcctgggaggcacagcaaactgtccccaaaaaaaaaa

SEQ ID NO: 60754 - DNA, 6321 bp, Homo sapiens
tttcgtcggggatcgccggcgggcggcaagcggaggcggcccaggcccggcggtctccgagatgtcacgatggctgtggccatggtcaaactgtgtgaaagagcgggtctgccgctacttgctgcaccactacttaggtcacttcttccaagagcacctcagcctggaccagctcagcctcgatctgtacaagggcagcgttgccctgcgagacatccacctggaaatctggtctgtgaacgaggtgctggagtcaatggagtcaccgctggagctggtggaaggcttcgtgggctccatcgaggtggccgtgccctgggctgctctgctcaccgaccactgcacagtgcgcgtgtccggcctccagctcaccttgcagccccgccggggtccagcgccaggggctgccgactcacagagctgggcctcatgcatgaccacaagcctgcagctggcccaggagtgtctgcgggatgggctaccggagccctctgagccaccacagcccctggaggggctggagatgtttgcccagaccattgagactgtgcttcggaggatcaaagtgaccttcctggacactgtcgtgagggtggagcactctccgggtgatggggaacgtggtgtggccgtcgaggtccgtgtgcagagactggagtactgtgatgaggcagtgcgggacccaagccaggcgccgccggtggatgtgcatcagccgcctgccttcctgcacaagctgctgcagctggcaggggtccgcctgcactacgaggagctcccggcacaggaagagcctccagagccccccttgcagatcggcagctgctcagggtacatggagctgatggtgaagttgaagcaaaatgaggccttccctggccccaagttggaggtggcgggacagctgggctccctgcacctgctcctgaccccgaggcagctccagcaacttcaggaactgctcagcgccgtgagccttacagaccacgagggcctggctgacaagctgaacaagagccgcccgctaggtgccgaagacctgtggctgattgagcaggacctgaaccagcagctgcaggcaggggcagtggctgagcccctcagcccagacccccttaccaacccccttctcaacctggataacactgacctcttcttctccatggctggcctcacaagcagtgtggcctcagccctctctgagctctccctctccgatgtagacctggcctcctctgtgcgcagcgacatggcctcccgccggctctctgcccaggcccacccagctggcaagatggcccccaaccccctcctggacaccatgcgccctgactcgctgctgaagatgaccttggggggtgtgaccctgaccttgcttcagacgtctgccccatcttccggaccacctgacctcgccacgcactttttcaccgagtttgatgccaccaaggatgggcccttcggttcccgagacttccatcaccttcgaccacgcttccagagggcctgtccctgtagccatgttcggctaacgggcacagccgtgcagctgtcctgggagctgcggacgggcagtcggggccggcggacaaccagcatggaagtgcacttcgggcagctggaggtgctggagtgtctgtggccccggggcacctctgagcctgagtacacggagatcctgacctttcctggtacgctgggctcccaggcctcagctcggccctgcgcccatctgcgccacacacagatcctgcgccgtgtgcctaagagccgaccccggcgctcagttgcctgccattgccactcagaactggccctggacctggccaacttccaggcggacgtggagctgggggccctggaccggctggccgccctactgcgcctggccaccgtacctgctgagcctccagccggcctgctgacagagcccctgccggcgatggagcagcagacggtatttcggctctctgcaccccgggccacgctgcggctgcgcttccccattgccgacctgcggcctgagcgggacccctgggcgggccaggccgtgcgggctgagcagcttcggctggagctgagtgagccccagttccggtcagagcttagcagtgggcctggtcccccagtccccacccacctggaactcacctgctccgacctacatggtatctatgaagatggagggaagccacctgtcccttgcctgcgtgtctccaaagccctggaccccaagagcactgggcgcaagtacttcctgccccaggtagtggtgactgtgaacccccagtccagcagcacacagtgggaggtggccccggagaagggagaggaactggagctgtcagtggagagtccctgtgagctgcgggaacctgagccctcgcccttctcctctaagaggaccatgtatgagacagaggagatggtgatccctggagaccctgaggagatgaggacgttccagagccggaccctggcactgtcccgctgcagcctggaagtgatcctgcccagtgtccacatctttctgcccagcaaggaggtctacgagagcatctacaacaggatcaacaacgacctgctcatgtgggagcctgcagatctgcttcccacccccgaccccgccgcccagccctcgggcttccccggcccctcaggcttctggcacgacagctttaagatgtgcaagtcagccttcaagctggccaactgctttgatctcaccccagactcggactcggatgacgaggatgcccacttcttctcagtgggggcatcaggtggcccacaggccgctgcccctgaggccccaagtcttcacttgcagagcaccttctctacactggtgacagtgctgaaggggcggatcacagccctctgtgagaccaaggatgagggtgggaagcggctggaggctgtgcacggggagctggtgctggacatggagcacggtaccctcttcagcgtctcccagtactgtggccagccaggacttggctacttctgtctggaagctgaaaaggcaacactctaccaccgagcggccgtggatgactacccgctgcccagtcacctggaccttcccagtttcgctcccccggctcagctggccccaaccatctacccatcggaggaaggggtgaccgagcggggagcctcgggccgcaagggccagggccggggaccccacatgttgtccactgctgtgcgcatccacctggacccccacaagaatgtgaaggagttcctggtgacactgcggttgcacaaagccaccttgcgccactacatggccctgcccgagcagagctggcattcccagttgttggagttcctagacgtgctggatgaccctgtgctgggctacctgcccccgacggtcatcaccatcctgcacacacacctgttctcctgctctgtggactataggccactctacctcccagtgcgtgtcctcatcaccgcggagaccttcactctctccagcaacatcatcatggacacctccaccttcctgctcaggttcatcctcgatgactccgccttgtacctgtccgacaagtgtgaggtggagaccctggacctgcggcgagattatgtctgtgttttggatgttgacctcttggaacttgtgattaaaacctggaaagggagcaccgagggcaaactgagccagccactattcgagctgcgctgctccaacaatgtggtacacgtgcacagctgtgccgactcctgtgccctgctggtcaacctgctccagtacgtaatgagcacaggcgatctgcaccccccaccccggccccccagccccacggagatcgccggccagaagctctcggagagtcctgcctctctgccctcgtgccccccagtggagacggccctcatcaaccagcgtgacctggccgacgccctcctggacaccgagcgcagcctacgggagctggcccagccttcaggtggccacctccctcaggcgtcgcccatctccgtctacctattcccaggtgaacggagtggggccccacccccttcaccacctgtcgggggccctgctggcagcttagggtcatgctcagaggagaaggaagatgaaagggaagaggagggcgatggagacaccctggacagtgatgagttctgcatccttgatgctcccggcctgggcatcccgccccgagatggggagcctgtggtgacacagctgcatcccggccccatcgttgtgagggacggttacttctcacggccgatcggcagcacggactttgcttcgggcaactgcccatttcccagtgcccagcactcgggtggtgctacgtgaggtctccctcgtctggcacctctatgggggccgagactttggcccccaccccggccacagggcaagaactggcctctcaggtcccaggagctccccttcccgctgctctggccccaaccggccccagaactcatggcgcacgcaggggggcagcgggcggcagcaccatgtcctcatggagatccagctgagcaaggtaagcttccagcacgaggtgtacccagcggagccagccacaggccctgcggcccccagccaggagctggaggagcgaccgctgtcccgtcaggtgttcatcgtgcaggagctggaggtccaaaaccggctcgcctcctcccagatcaacaagttcctgtacctacacacgagtgagcggatgccgcgacgtgcccactctaacatgctcaccatcaaagcgctgcatgtggcccccactaccaacctgggtgggcctgagtgctgtctccgcgtctcgctgatgcccctgcggctcaatgtggaccaggatgccctcttcttcctcaaggacttcttcactagtctgggggccggcatcaaccccgtggtcccaggggagacctccgctgaggctcgccccgagactcgagcccagcccagcagccccctggaagggcaggccgaaggcgtagagaccactggttcgcaggaggccccaggaggtggacacagcccctcccctcctgaccagcagcccatctacttcagagagttccgcttcacgtctgaggtccccatctggctggattaccatggcaagcacgtcacgatggaccaggtgggcacttttgctggcctcctcatcggcctggcccaactcaactgctccgagctgaagctaaagcggctctgttgcaggcacgggctcctgggtgtggacaaggtgctgggctatgccctcaacgagtggctgcaggacatccgcaagaaccagctgcccggcctgctgggaggcgtgggccccatgcactcggttgtccagctcttccaagggttccgggacctgctgtggctgcccattgagcagtacaggaaggatggccgcctcatgcgggggctgcagcgaggggctgcctcctttggctcatccacagcctctgccgccctggaactcagcaaccggttggtacaggctatccaggccacagctgagaccgtgtatgacatcctgtccccggcagcccccgtctcccgctccctgcaggataagcgctctgcgcggaggctgcgcaggggccagcagcctgccgacctgcgggagggtgtggccaaggcctacgacacagtgcgagagggcatcttggatacagctcagaccatctgtgacgtggcatcgcggggccatgagcagaaggggctgacgggcgccgtggggggcgtgatccgccagctgcccccgactgtggtgaagccgctcatcctggccacggaggccacgtccagcctgctcgggggcatgcgcaaccagattgtccccgacgcccacaaggaccacgccctcaagtggcgctcggacagtgcccaagactgagcctggggtgcccggcacccagaggggtgctgcccaccatgctcctgagcctcccaagagctgcagcccacgggcccggcccggcctggcccttcaggggatggccactgtgaaggacgccttcccagcctgcccgttgccaatctgctgtgagaggggggcctccctgccttggggccttagccctggctctgcacttttcctccggggagaaaggacactgcccctcccccgacctgggcccacactgctgccttctcccaggacggaggcttttggaccctcggaccccatcccactcagccaagtgtctttctgtgtctggggggaggaggggatgatatccgtgtggttcgatgtattatttttaagctccgtgagtgcgtgggtcaagtgtctgcatgaagtggaataaactgcccaccgccaaaaaaaaaaaaaa

SEQ ID NO: 60755 - DNA, 3387 bp, Homo sapiens
ggaaatctgggaggagtgtccttggggcagcattttaaaagggggagggaactgcggctaaagagacgttcggtgatgggagcgcaatgtatgaggggatacagtgcctcaggtttaaaagagcaggaagctgagtgagaggttgcagaaaaagtgtcttcgctcggcagaggttacaggtggcatctcagaaagagctttgaggctacaggctgtagtcgggaaggggatcggagaactgtgtgaagggacagcttagggactagcgtcctgggactagggggaagttcgcgactttctgaagactggcaggaatgtgcctcctggccctcgatgcttcccccctgaggggaggcatcgtgagggactgtggcaggcttcactgaacgctgagccggggaggtccaactccacgtatggatccggggaatgagaattcagccacagaggctgccgcgatcatagacctagatcccgacttcgaaccccagagccgtccccgctcctgcacctggccccttccccgaccagagatcgctaaccagccgtccaagccgcccgaggtggagccagatctgggggaaaaggtacacacggaggggcgctcagagccgatcctgttgccctctcggctcccagagccggccgggggcccccagcccggaatcctgggggctgtaacaggtcctcggaagggaggctcccgccggaatgcctggggaaatcagtcatatgcagaactcatcagccaggccattgaaagcgccccggagaagcgactgacacttgcccagatctacgagtggatggtccgtactgtaccctacttcaaggacaagggtgacagcaacagctcagcaggatggaagaactcgatccgccacaacctgtccctgcacagcaagttcatcaaggttcacaacgaggccaccggcaaaagctcttggtggatgctgaaccctgagggaggcaagagcggcaaagccccccgccgccgggccgcctccatggatagcagcagcaagctgctccggggccgcagtaaagcccccaagaagaaaccatctgggctgccagctccacccgaaggtgccactccaacgagccctgtcggccactttgccaagtggtcaggcagcccctgctctcgaaaccgtgaagaagccgatatgtggaccaccttccgtccacgaagcagttcaaatgccagcagtgtcagcacccggctgtcccccttgaggccagagtctgaggtgctggcggaggaaataccagcttcagtcagcagttatgcagggggtgtccctcccaccctcaatgaaggtctagagctgttagatgggctcaatctcacctcttcccattccctgctatctcggagtggtctctctggcttctctttgcagcatcctggggttaccggccccttacacacctacagcagctcccttttcagcccagcagaggggcccctgtcagcaggagaagggtgcttctccagctcccaggctctggaggccctgctcacctctgatacgccaccaccccctgctgacgtcctcatgacccaggtagatcccattctgtcccaggctccgactcttctgttgctgggggggcttccttcctccagtaagctggccacgggcgtcggcctgtgtcccaagcccctagaggctccaggccccagcagtctggttcccaccctttctatgatagcaccacctccagtcatggcaagtgcccccatccccaaggctctggggactcctgtgctcacaccccctactgaagctgcaagccaagacagaatgcctcaggatctagatcttgatatgtatatggagaacctggagtgtgacatggataacatcatcagtgacctcatggatgagggcgagggactggacttcaactttgagccagatccctgagtcatgcctggaagctttgtcccctgcttcagatgtggagccaggcgtgttcatatctactctttacccttgagccctccccaggaatttgggaccctgctttagagctagggtggggtctggtcacacacaggtgttgaagaaattataaagataaagctgccccatctggggacgatatggggagggagatgggaggggaaaggggagagggtttttctcactgtgccaattagggggtaaggccccctctcaggagccatcatcggctttccccattcctacccacttaggctttgtagcaagatgagcaatgctgttggaaatgtgaagtcaccagtggccttacccctgcctttgggagcaggatttttttgtagagagtcttatctgagctgagccaggctagctggagcctgggatttctatgcagtggccccttaggccagtgatgtgcggtgggtgggctgtttaggggatctggaagggccaaggtctgagcactggagtggctcgccaggccaaatcacccttagaaggctgcagataacagaaaggctttttataaacttttaaagaaatataaacacaaatatagagattttttaaccatggcagggtgctagtggtgggcagaatgcttttttttctttctgaaggctttgtgatagtgacatgatacaaacactacagacaataaatattaggagacacagggaagtggggagagttggggagtaatagtaaacacagggaagagctcccctacggaccaggtatagagaaaggtctatgcagaaataggttagagtttccctaacaaaaaagctaacccaggtcccctcattccttcaacttgtgcctgggagtgtgtggtgttagggtgcagccacactcttctatgacccagcatgggttagtgctatggtgggagagtacattgaaggcctggaattagcttggggccagggaagggactgggaggggagagaagagaaggagggaaggatttaggatggtaaagttaggtacagagacctccctgttcaaggcccctgacagctgtccctgcccttcttccccttccctgactgcaggggttatgtggaagtgtgtgtggcagcaggcagcggggaggggaggaacagggaagggggagctggggagcttggctgagggtctgggaaatgagcagggatggggggggatgtggatcaggtttactagcacctgccagggaggccatctggggctccttctccaccccagcccccaaagcagcccttcccccagtgccctttgcatcgtcccctcccccacccctgctgtgggttcccatcatttcctgtgtcagcgcctggcctacccagattgtatcatgtgctagattggagtggggaagtgtgtcaaatcaataaatgaataaattcaataaatgcctataaaaaaaaaa

SEQ ID NO: 60756 - DNA, 4005 bp, Homo sapiens
gcggccgcccgggcccgggcccgcgtcgggcgcctggctctgtacgcgagcccggggatctgcggccttcgtgccccccctcccccgcccgccctctcgtggagcccggcgccggcggcggctgcccgggcggggggttgcggcgctcaggagaggccccggctccgccccgggcctgcccagggggagagcggagcggtccgcagccgggtcgggtcggggcccctcccgggaggagcgtggagcggcggcggcggcggcggcagcagaaatgatggaagaattgcatagcctgggaccccacgacgccaggaattattggaggccaggttttactggattaggtgttagtaagggaccacttaatagtgagtcttccaaccagagcttgtgcagcgtcggatccttgagtgataaagaagtagagactcccgagaaaaagcagaatgaccagcgaaatcggaaaagaaaagctgaaccatatgaaactagccaagggaaaggcactcctaggggacataaaattagtgattactttgagcgacgagtagaacagcccctctatggtttagatggcagtgctgcaaaggaggcaacggaggagcagtctgctctgccaaccctcatgtcagtgatgctagcaaaacctcggcttgacacagagcagctggcgcaaaggggagctggcctctgcttcacttttgtttcagctcagcaaaacagtccctcatctacgggatctggcaacacagagcattcctgcagctcccaaaaacagatctccatccagcacagacagacctcagtccgacctcacaatagaaaaaatatctgcactagaaaacagtaagaattctgacttagagaagaaggagggaagaatagatgatttattaagagccaactgtgatttgagacggcagatttgatgaacagcaaaagatgctagagaaatacaaaggaacggttaaatagatgttttgacaatgagccaagaaacttccttatagaaaagtcaaaacaagagaagatggcgtgtagagataagagcatgcaagaccgcttgagactgggccactttactactgtccgacacggagcctcatttactgaacagtggacagatggttatgcttttcagaatcttatcaagcaacaggaaaggataaattcacagagggaagagatagaaagacaacggaaaatgttagcaaagcggaaacctcctgccatgggtcaggcccctcctgcaaccaatgagcagaaacagcggaaaagcaagaccaatggagctgaaaatgaaacgttaacgttagcagaataccatgaacaagaagaaatcttcaaactcagattaggtcatcttaaaaaggaggaagcagagatccaggcagagctggagagactagaaagggttagaaatctacatatcagggaactaaaaaggatacataatgaagataattcacaatttaaagatcatccaacgctaaatgacagatatttgttgttacatcttttgggtagaggaggtttcagtgaagtttacaaggcatttgatctaacagagcaaagatacgtagctgtgaaaattcaccagttaaataaaaactggagagatgagaaaaaggagaattaccacaagcatgcatgtagggaataccggattcataaagagctggatcatcccagaatagttaagctgtatgattacttttcactggatactgactcgttttgtacagtattagaatactgtgagggaaatgatctggacttctacctgaaacagcacaaattaatgtcggagaaagaggcccggtccattatcatgcagattgtgaatgctttaaagtacttaaatgaaataaaacctcccatcatacactatgacctcaaaccaggtaatattcttttagtaaatggtacagcgtgtggagagataaaaattacagattttggtctttcgaagatcatggatgatgatagctacaattcagtggatggcatggagctaacatcacaaggtgctggtacttattggtatttaccaccagagtgttttgtggttgggaaagaaccaccaaagatctcaaataaagttgatgtgtggtcggtgggtgtgatcttctatcagtgtctttatggaaggaagccttttggccataaccagtctcagcaagacatcctacaagagaatacgattcttaaagctactgaagtgcagttcccgccaaagccagtagtaacacctgaagcaaaggcgtttattcgacgatgcttggcctaccgaaaggaggaccgcattgatgtccagcagctggcctgtgatccctacttgttgcctcacatccgaaagtcagtctctacaagtagccctgctggagctgctattgcatcaacctctggggcgtccaataacagttcttctaattgagactgactccaaggccacaaactgttcaacacacacaaagtggacaaatggcgttcagcagcgggtttggaacatagcgaatccgaatggatctgatgaaacctgtaccaggtgcttttattttcttgcttttttcccatccatagagcatgacagcatcgattctcattgaggagaaaccttgggcagctccggccaggccttgtaggaaaaggccccgcccgaggttccagcgtcaacggccactgtgtgtggctgctctgagtgaggaaaaaattaaaaagaaaaactggttccatgtactgtgaacttgaaaacttgcagactcaggggggtccctgatgcagtgcttcagatgaagaatgtggacttgaaaatacagactgggctagtccagtgtctatatttaaacttgttcttttcttttaataaagtttaggtaacatctcctgaaaagcttgtagcacaaaggctcagctggggatggtgtttgacttcggaggaaaaaagttgctattgcccgttaaaggcactagagttagtgttttatccctaaataatttcaatttttaaaaacatgcagcttccctctccccttttttatttttgaaagaatacatttggtcataaagtgaaacccgtattagcaagtacgtggcaatgttcattccaatcagatgcagctttctcctccgtctggtctcctgtttgcaattgcttccctcatctcagtagggaaaaaaattgagtgggagtactgagatgtgtgggtttttgccattggacaaagaatgaggttagaagactgcagcttggagtctctctaggttttcaactatttcttcacaatttgaacacttgacggttgtcccttttaatttatttgaagtgctatttttttaaataaaggttcatctgtccatgcagtcctcttggattctctgaatgtagtaactatgaagctatgccaaaggtaggcagaaaatgggcttgggagccagacactccagggatcagtagttcctacccatagtctttgtgtgcttgctaaatggtgtacatttcttgttaaccacgttattaaaacttgatcagcacataagctttcttctgttagatcttttggcagcaaacaaccttccccccaaacctctgaattttgtgggtgtgtggtggtgtgtgtctgtgtgtgcatgtacacacacactttgtctagctcactttaaaagattcatcaaatggaattttaaaaataatctgaaaagaaatagatatttcaggccgggcctggtggttcatgcctgtaatcccagcactttgggaggccgaggtgggtggatcacgaggtcgggagttcgagatcagtctggtcaacatggtgaaacgccatctctactaaaaatataaaaattagcctggcgtggtggcgtgtgcctctagtcccagctacccgggaggctgaggcaggagaatttctggaacccaggaggcggaggttgcagtgagccgagatggcaccactgcaatccagcctaggcaacagaatgagactctgtctcagaaaaaaa

SEQ ID NO: 60757 - DNA, 1612 bp, Homo sapiens
  misc_feature (1)...(1612): n = a,t,c or g
aagctcactctcgatgtgctcaggccctcgcagggttgaggcattgctttgggggaactgtctgtgctccaccagcctcctcaactccagcagagagtggaggaatgggtgagttcctgcccaggcagctgggggccccaagcaggaaacctgtgtagaaccagagaccaaaatcctttggaggaacaaggattcatcacatgagaattactctcaaagtagagattctggaggtgcccctgactctctggagagaagaatgaatgaatgaatgaatgaatgaatgaacaaaagagcttacatttattgagcatgcttgtgctaagccctgggctggcctttgtttcattggcacaacagccttgagaggttggtccattatcacccctcagttcaggtaagtggactgaggctgagagaggtgcacgggtttgtcagggtcacatagcacatgaggacagagccagaccaggagccctgtgacatcctcggccaggatgctaaccctaaggacagtgacggtcactcttcacaccgctgtgaagggagaggctattgctctgcacccacagctcagcaatggggaccatgaacgcctctaggcagcccatgtatggggccgctacctacctggtaactgtccgcggctgtccatttggaagagatattgatgtgtttgttttctcctccccagcctgtgggctcctggagccaaaggaccccacctaattcatcactaggcacaaaacagctgctcaataaatgtttactgaatgaatgaacgcatgaagaatcaatgaaggaggcggtgaaggaatgaatgagtcagtggagaacctgaattggttcctcaagccagccttccactgccctgcatgccctcggcatcttcggacatttcttggcactaggctgctcctgccacctcactgccaggggtgatacagggctgccggcctcttgcaagccggggaggcctacggctgtgccgaggcacgggaacagtgtgctgtactcctcctggaagcttaggtccttgaatctccgcacggccagggctgcggtcaggctccaggtgaagatggagaaaaaggagaatggcgatgggcggcccgggcttgcgtccgtcccttcgttcagtgggttgtccttgggcttggagacctgccactggttggccaaggtagcaagaatccccantgaaccagaggaaagcccaaaaggctgctgggtggggctcacccgagacaaccggatgtccggacaggacggcttttcttgcggtccttgacgctgctgatctgcgggaagtacacgtccagggccaggtacagcaggcaggtgaggaaggcgagcacgcccacggccacgccatagctgcaggcgttggggttgcggttgtagatgcagaactcctccccctcggaggcgctgttgaggtagccctcgttcacgatggagccgaacaccactatggagaacagctcacatccgggcctgctcctccagctcacccaggcctctgtgtccagctgcctatccatgaaggatcgaattccagaatcccaaactctaaggtcaacatgagaccaaggaggcatgcctgctggtc

SEQ ID NO: 60758 - DNA, 3176 bp, Homo sapiens
gcggccgcccatggagaaggccaggagaggcggggatggcgtcccccgggggcccgtactgcacatcgtggtggtcggatttcaccacaagaagggctgccaggttgaattctcttacccgcccctgattccaggagatggacatgacagccacactttacctgaagaatggaagtatttgcccttccttgccttaccagatggcgcacacaactaccaggaagatactgtgttttttcacttgccacccagaaatggaaatggagccacagtatttggtatctcttgctatcgaccaaattgaagccaaggcactgaaagtaaggcaagcagatatcaccagagagactgttcagaaaagtgtctgtgttctaagcaagctgcctctgtatggtttacttcaagcaaaacttcaactcattacacatgcatattttgaagagaaggatttttcccaaatttctattctaaaggagctttatgaacatatgaatagttccttgggaggtgcttcattagaaggatcccaagtatatcttggtctgtcacctcgagatcttgtccttcattttcgacacaagggcttaatcctatttaagctaattcttcttgaaaaaaaggttcttttttatatttctccagtgaataaattggtgggtgcactgatgactgtgttatccctttttccaggcatgattgaacatggtctcagtgactgttctcagtatagaccccggaaaagtatgtctgaagatggtgggcttcaggaaagtaacccatgtgcagatgattttgtttctgcatccactgctgatgtttcacataccaacttgggaactatcaggaaagtcatggcaggaaaccatggagaagatgctgccatgaagactgaggagcctttgttccaagtggaagacagcagcaaagggcaggaacccaatgataccaatcaatatttgaaacctccatctcgcccatctccagattcttcagaaagtgactgggaaactttggatcctagtgtcttagaggaccccaacttgaaagaaagggaacagctgggatcagaccagacaaatttgtttccaaaggactctgtcccctcagagagtcttccaattactgtacaacctcaagctaatacgggacaggtagtcctgataccagggctcatttcgggtttggaagaggatcagtatggcatgcccctggccatcttcacaaagggatatctgtgtttgccttacatggcattgcagcagcatcatcttctctccgatgtcaccgttcgggggtttgttgctggagctactaacatcctttttcgacaacagaaacacctcagtgatgccattgtggaagtagaagaagctctgatccagatccatgatccagaactcaggaagctgcttaacccaaccactgcagacctaaggttcgcagactacctagtgaggcacgtgactgagaatcgggatgacgtcttcctagatggcacgggctgggagggaggtgacgaatggatccgggcccagtttgcggtctacattcatgccctgctggctgccacgctgcaattagttctgttcagaatagtgaacgtggcaaaaaaaattggaaacgtcatggtcacaactaagccggaatgttgtacaaacagggaaaagctgttggccagtcagttggaggagctttttcccagtgcaaagacagcttatgtcttcatggctttccactttcaccacttccacctcccaaagtctcactgagccaccagatgagaagccttgagcaaggcgtcagaggctgctattgctttctgaggtttaagtgtcccctgtctgtttggtggtcccagggttgttactagccacagatccccagcaggggaccaaatgtcgaactgtttacatggatgttgctttaagtgaatgtttcgggatgccgaaatgatgaaatcacagccaaagcagggatggctttccaggttggggtttcaattgacaacttttatttcagtttgagcctgattaaaacatacagtgaaccttctaatgaattttgagttttgatattgtacattggtttactttagaagagtttttacttatgtaaattttgttctgttttggtgtttgaatatctagatggtcactgtaatttatacttgctaaaattaatttatattaccattttctctaaagttggccttaaaacgtgcttataaagtgaaggggtcatacagttgggccttcattattttgctgaattatgtgatgatttttttgctttctacccacaaaacatttattaattcacttcctcccagaaacatgaaagttagaggtggtagttctgaggattgggtgttttgttttacgtttttagtttgttctttccacatccttaaaaacttggtttcagacatcaaggagtatcactgtgctttcctcctctttataactgtgcaggtgggtgtgcagagaaatagcagagtgatggttcgatgatactgaagcagtttaacatgaatgtgtctgtagggcaatactttcaaagaagacctatgtgtttatttttcaaccgcagtcatgttgcagtcttacaagcactttttttttattccagagtttgtgccatctgtttctctttttttttgggggggggggggggcggggtctcactctatcgcccaggctggagtgcagtggtgccatctcggctcactgcaacctccatctcccgggttcaagcaattcttgtacctcagcctcccaagtagctgggattatggacatgcgccaccatgcccggctaagtttttgtattttagtagagacggggtttcaccatgttggccaggatggtctcgatctcctgacctcgtgatccacccaccccggcctcccaaagtgctgggattacaggcatgagccactgcgcccggccagctgttattcttatataaggaatttttccctcttttttatttgttatcattatggacggcttcatgggtcttctaatttgattttgattgactccattccaggttcttttttatatttctccagtgaataaattggtgggtgcactgatgactgtgttatccctttttccaggcatgattgaacatggtctcagtgactgttctcagtatagaccccggtacgaaa

SEQ ID NO: 60759 - DNA, 4450 bp, Homo sapiens
gcgcactctcgcaaaaacacacgaccgcggaacacctgttattcagcttccttctcacagtcctgtggaagagcgaaagcccaacctctttgtcttctctgcgttcacggagcacacaaatggaatcaactcgtgtttcagcttctctccccagaagttaccggaaaactgatacagtcaggttaacatctgtggtcacaccaagaccctttggctctcagacaaggggaatctcatcactccccagatcttacacgatggatgatgcttggaagtataatggagatattgaagacattaagagaactccaaacaatgtggtcagcacccctgcaccaagcccggacgcaagccaactggcttcaagcttatctagccagaaagaggtagcagcaacagaagaagatgtgacaaggctgccctctcctacatcccccttctcatctctttcccaagaccaggctgccacttctaaagccacattgtcttccacatctggtcttgatttaatgtctgaatctggagaaggggaaatctccccacaaagagaagtctcaagatcccaggatcagttcagtgatatgagaatcagcataaaccagacgcctgggaagagtcttgactttgggtttacaataaaatgggatattcctgggatcttcgtagcatcagttgaagcaggtagcccagcagaattttctcagctacaagtagatgatgaaattattgctattaacaacaccaagttttcatataacgattcaaaagagtgggaggaagccatggctaaggctcaagaaactggacacctagtgatggatgtgaggcgctatggaaaggctggttcacctgaaacaaagtggattgatgcaacttctggaatttacaactcagaaaaatcttcaaatctatctgtaacaactgatttctccgaaagccttcagagttctaatattgaatccaaagaaatcaatggaattcatgatgaaagcaatgcttttgaatcaaaagcatctgaatccatttctttgaaaaacttaaaaaggcgatcacaattttttgaacaaggaagctctgattcggtggttcctgatcttccagttccaaccatcagtgccccgagtcgctgggtgtgggatcaagaggaggagcggaagcggcaggagaggtggcagaaggagcaggaccgcctactgcaggaaaaatatcaacgtgagcaggagaaactgagggaagagtggcaaagggccaaacaggaggcagagagagagaattccaagtacttggatgaggaactgatggtcctaagctcaaacagcatgtctctgaccacacgggagccctctcttgccacctgggaagctacctggagtgaagggtccaagtcttcagacagagaaggaacccgagcaggagaagaggagaggagacagccacaagaggaagttgttcatgaggaccaaggaaagaagccgcaggatcagcttgttattgagagagagaggaaatgggagcaacagcttcaggaagagcaagagcaaaagcgggcttcaggctgaggctgaggagcagaagcgtcctgcggaggagcaaaagcgccaggcagagatagagcgggaaacatcagtcagaatataccagtacaggaggcctgttgattcctatgatataccaaagacagaagaagcatcttcaggttttcttcctggtgacaggaataaatccagatctactactgaactggatgattactccacaaataaaaatggaaacaataaatatttagaccaaattgggaacacgacctcttcacagaggagatccaagaaagaacaagtaccatcaggagcagaattggagaggcaacaaatccttcaggaaatgaggaagagaacaccccttcacaatgacaacagctggatccgacagcgcagtgccagtgtcaacaaagagcctgttagtcttcctgggatcatgagaagaggcgaatctttagataacctggactccccccgatccaattcttggagacagcctccttggctcaatcagcccacaggattctatgcttcttcctctgtgcaagactttagtcgcccaccacctcagctggtgtccacatcaaaccgtgcctacatgcggaacccctcctccagcgtgcccccaccttcagctggctccgtgaagacctccaccacaggtgtggccaccacacagtcccccaccccgagaagccattccccttcagcttcacagtcaggctctcagctgcgtaacaggtcagtcagtgggaagcgcatatgctcctactgcaataacattctgggcaaaggagccgccatgatcatcgagtccctgggtctttgttatcatttgcattgttttaagtgtgttgcctgtgagtgtgacctcggaggctcttcctcaggagctgaagtcaggatcagaaaccaccaactgtactgcaacgactgctatctcagattcaaatctggacggccaaccgccatgtgatgtaagcctccatacgaaagcactgttgcagatagaagaagaggtggttgctgctcatgtagatctataaatatgtgttgtatgtcttttttgctttttttttaaaaaaaagaataactttttttgcctctttagattacatagaagcattgtagtcttggtagaaccagtatttttgttgtttatttataaggtaattgtgtgtggggaaaagtgcagtatttacctgttgaattcagcatcttgagagcacaagggaaaaaataagaacctacgaatatttttgaggcagataatgatctagtttgactttctagttagtggtgttttgaagagggtattttattgttttttaaaaaaaggttcttaaacattatttgaaatagttaatataaatacataattgcatttgctctgtttattgtaatgtattctaaattaatgcagaaccatatggaaaatttcattaaaatctatccccaaatgtgctttctgtatccttccttctacctattattctgatttttaaaaatgcagttaatgtaccatttatttgcttgatgaagggagctctattttctttaccagaaatgttgctaagtaattcccaatagaaagctgcttattttcattaatgaaaaataaccatggtttgtatactagaagtcttcttcagaaactggtgagcctttctgttcaattgcatttgtaaataaacttgctgatgcatttaacgagtgggtcgtctttttcttaggtgtatgtgtctgacctcaggccttttagccatatttcagtatgtggccttttttgatgttatgttttatccagtagctttactaaggtataattgatgtaataaactgcatatatttaaagtgtatactttgacaaattttgacatggtgtataccttcgaaactatgccacagtctggatgtgtttactgaaacattttaataaggaagtttatttttgataaagttatgtttttggatacaatatatttgtatggtgagagtgatgaattgttggatcatttgaataaaatcttttactaaccccatgataaaaggagaagacaacagtgagcttagaatatctataaagcaaaaaatgtagtctcttgtttaaaaaatctggagcgggaatgcaaggatacaaaactttagcatgctttgagcaaaaatttaaacttactggaatcttttataataatgtaagtggaatggaggattctaggaactgagaactgtattggaataggttcaaaatatgtaagaaatgctaatgtgggagataaaaattttatttagtacttattctgattattattaaagtaaataatgtgttccttgaggataacttgtcaaatgccccccaaagccataaagaatataattctgaatccccaaattcccaaagacaagaactctgtgtttgaattcattctgcatataattatttataagtatagattgtgaatttttccatgttcttaaaattatttttatcttttttcatggttgccatagtgctcccattgtttggccttggtaatatttagttgataattccattactgtgtatttttcacttgtttctaagatcaaacattttaatatgtgcatgttatatataaatatgtaaattctgtgatactctatgatcatctctttctttatattattttcatagacatggaaatagttggctcagagattatggcattttaaggacactcatagtatatattggccaaagtgggttttccagaaaggcactgctggcttcgactcctataagcagcacgtgggcttgttcatctcactgcatgtttatgaagatacagttcttttgccttgttctctgcctgatgtgtatgcagaggcagccctcaatatgcagtggttgaataaatgaatgaagaaaccac

SEQ ID NO: 60760 - DNA, 2493 bp, Homo sapiens
tcttctggaggaagcagcgcgggcttgaccggcgtcggcccgccgctccgctgccgcttcgccccaatccggtccctctggcccggcctgacccggtctggcttgttcgggcccagcggccgcgaggccgcagctcccgatggaaatcatattatgtagaatacttgggtgacatctgcctgagagatctccaagaattacagaagaccaaaattcctaattgcttttgagaaagcggtagttttggggggagggggaaaaagcaactgctttcctgatctgcaacttggctggatgcttaagatgtccagtggacatgaatagcccaggggtctgacagcaatgaagaggactatgaccccaaattgtgagggaaaaggaagaagaagaagaagaccgacccctggggacatagaggactattaccgtgggagtagccagcgatgtggagcagcagggggctgatgcctttgatcccgaggagtaccagttcacttgcttgacctacaaggaatctgagggtgccctcaatgagcacatgaccagcttagcttctgtccctaaaggtatcccattccagttggctaaacttatatttagttaattttccactggcaagtttcagagatattggacagatacaagtccaattctgctcaactgcttgttgaggctcgagttcagcctaatccatcaaaacatgttcccacatcccatccccctcaccactgtgcagtgtgtatgcagtttgtgcgaaaggaaaacctactctctctggcctgtcagcaccagttttgccgcagctgctgggagcagcactgctcagttctcgtcaaggacggcgtgggcgtgggagtctcttgcatggctcaggactgtccactccgtacaccagaggactttgtgtttccattgcttcccaatgaagaattgagagagaaatacaggcgctacctcttcagggactatgtggagagtcattaccagctccagctgtgccctggtgcagactgccccatggttattcgggtacaggagcctagagctcgccgagtacagtgcaatcggtgcaacgaggtcttctgtttcaagtgtcgtcagatgtatcacgcacccacagactgtgccacaatccggaaatggctcacgaagtgtgcagacgactctgaaacagccaactacattagtgctcacactaaagactgtcccaagtgcaacatctgcattgagaagaatggaggctgcaatcacatgcaatgctccaaatgtaaacacgacttctgctggatgtgtctaggagattggaagactcatggcagtgaatactatgagtgcagtcgttacaaggagaatcctgacatcgtgaaccagagccaacaagcccaggcgagggaagccctcaagaagtacttattctactttgagaggtgggaaaaccacaataaaagcttgcagctagaggcacagacataccagcggattcacgagaagattcaggagagggtcatgaacaatctggggacatggatcgactggcagtacctacagaatgctgccaagctcttggccaaggttccttctcttctctcctgttgcagtgtcgatacaccctgcaatacacctacccatatgcatattacatggagtccggacccaggaagaagctgtttgaataccagcaggctcagctggaggctgagatcgaaaacctctcatggaaagtggagcgtgcagacagctatgacagaggggacttggagaaccagatgcatatagcggagcagcggaggagaaccctgctgaaagatttccatgacacctaagttgggatgtggatgtgccggggtgaggaagatgtggctgcaaggtctcccggctgccatactgcatgctgcaggctctgcctttcatgaccccaggcaacagccagggccccactcctgagagacactggcaacacctcttagttgatttctgttttcttctcttttcactttttgtttctaccagggtagaggccatgttgaactggcctcttttcaggacttttatttccccctggatggttgttgggagggagggaaagtgttttctgaatggctattaatagtattagatcattacaacttatgtaactttcaaaggttgtacaattatacaaaaaaaaaaaaaggggcaccttttggaaaaccacagccccttttttaaaaaaaaatgggattgggggggttaacccctcaaccggtttaattaaaaaggaaaaataggcggccaccccccctaaaaatgtttttcctgaaaaaggccccgggcccttttttttcaatattcccgtgggcccaaagtggaaccccaaaaaaaaacctggggggcaaaatggtaggaaatgaaacggccctgggaaagggccttgaaccaaagggggtcacaaaaggcctcctgctttaccggggaaaccggagacagccaaaaaatggtttttttgcacagggg

SEQ ID NO: 60761 - DNA, 2144 bp, Homo sapiens
cgcagcgtcccgccagccagctccttgcacccttcgcggccgaggcgctccctggtgctccccgcgcagccatggctcagcacttctccctggccgcctgcgacgtggtcggattcgacctggaccacactctgtgtcgctacaacctgcccgagagcgccccgctcatttataatagctttgcccagttcctagttaaggagaaagggtacgataaggaattgctcaatgtgaccccagaggattgggatttctgttgcaaaggtttggcattggatctagaagatgggaacttccttaaacttgcaaataatggcactgttctcagggcaagccatggcaccaagatgatgactccagaggtgctggcagaggcatatggcaagaaagagtggaagcacttcttgtcggacactggaatggcttgccgctcaggaaagtattacttttacgacaactactttgacctgccaggagctcttctgtgtgccagggtggtggactatttaacaaaactgaacaatggtcaaaaaacatttgatttttggaaggatatagttgctgctatacaacacaattataaaatgtcagcttttaaggaaaactgtggaatatattttccagaaataaaaagagatccaggcagatatttacatagttgtcctgaatctgtgaaaaaatggcttcgacagctaaagaatgctgggaaaattcttctgttaattaccagttctcacagtgattactgtagacttctctgcgccatatattcttgggaatgattttacagacctttttgacattgtgattacaaatgcattgaagcctggtttcttctcccacttaccaagtcagagacctttccggacactcgagaatgatgaggagcaggaggcactgccatctctggataaacctggctggtactcccaagggaacgctgtccacctctatgaacttctgaagaaaatgactggcaaacctgaacccaaggttgtttattttggtgacagcatgcattcagatattttcccagctcgtcactatagtaattgggagacagtcctcatcctggaagaactcagaggggatgaaggcacgaggagtcagaggcctgaggagtcagagcctctagagaagaaaggaaaatatgagggaccaaaagcaaaacctttaaatacttcatctaaaaaatggggctcttttttttattgattcagttttgggactggaaaatacagaagactccttggtttatacatggtcttgtaagagaatcagtacttacagcactattgcaattccaagtattgaagcaatcgcagaattacctctggactacaaatttacaagattctcttcaagcaattcaaaaacagctggctactatccaaatcctccactggtcttatcaagtgatgagacactgatatccaaataagttgtctttactgaaaaatgaagtgaagacccatatatgcagttaaaaaaaagttaattttcaaaaaatactgtaaaagactttaaggaacaagttttattgaccaataagttgatatttgtccataggtctcctttctataaatcatcttgatgtttaacaactcttattatattaaaatctcagtatcctaaaacttagaaccttattgatattttctatacagtagttttgtgattagaattcacctggggacacacactcacacgcacagtcactcttacacatatgcctagtccagtggttctcaaagtgtgatccatagactaatagcatagcattacctgagaacttgataatgcatatttgcaggccccacgcaaaacctgctgaatcagaagctctgagagtaaggcctgccaatctggtttaacaagcccgtcaggtgattctgatttacagtacagtttgagacccactggctagaacatatcctccagagacttggcttaattggtctgggtaaatatggctgagcgttgttatcttttgttatcttttatatgccctaggaaagtacaaccagaattgaaaaccaactgatctataccagttctttcaattaatagtcaagaacattgagtccagtgagattaagtgatttttgcaggctatgaggttttatgctattcctgtgttctcc

SEQ ID NO: 60762 - DNA, 2772 bp, Homo sapiens
aaacaaacaaaaaggaaccagaggccacttgtatatataggtctcttcagcatttattgggggcagaagaggaagatttctgaagagtgcagctgcctgaaccgagccctgccgaacagctgagaattgcactgcaaccatgagtgagaacaataagaattccttggagagcagcctacggcaactaaaatgccatttcacctggaacttgatggagggagaaaactccttggatgattttgaagacaaagtattttaccggactgagtttcagaatcgtgaattcaaagccacaatgtgcaacctactggcctatctaaagcacctcaaagggcaaaacgaggcagccctggaatgcttacgtaaagctgaagagttaatccagcaagagcatgctgaccaggcagaaatcagaagtctggtcacctggggaaactatgcctgggtctactatcacatgggccgactctcagacgttcagatttatgtagacaaggtgaaacatgtctgtgagaagttttccagtccctatagaattgagagtccagagcttgactgtgaggaagggtggacacggttaaagtgtggaggaaaccaaaatgaaagagcgaaggtgtgctttgagaaggctctggaaaagaagccaaagaacccagaattcacctctggactggcaatagcaagctaccgtctggacaactggccaccatctcagaacgccattgaccctctgaggcaagccattcggctgaatcctgacaaccagtaccttaaagtcctcctggctctgaagcttcataagatgcgtgaagaaggtgaagaggaaggtgaaggagagaagtttagttgaagaagccttggagaaagccccaggttgtaacagatgtacttcgcagtgcagcccaagttttatcgaggaaaggatgagccagacaaagcgattgaactgcttaaaaaggctttagaatacataccaaaacaatgcctacctgcattgccaaattgggtgctgctatagggcaaaagtcttccaagtaatgaatctaagagagaatggaatgtatgggaaaagaaagttactggaactaataggacacgctgtggctcatctgaagaaagctgatgaggccaatgataatctcttccgtgtctgttccattcttgccagcctccatgctctagcagatcagtatgaagacgcagagtattacttccaaaaggaattcagtaaagagcttactcctgtagcgaaacaactgctccatctgcggtatggcaactttcagctgtaccaaatgaagtgtgaagacaaggccatccaccactttatagagggtgtaaaaataaaccagaaatcaagggagaaagaaaagatgaaagacaaactgcaaaaaattgccaaaatgcgactttctaaaaatggagcagattctgaggctttgcatgtcttggcattccttcaggagctgaatgaaaaaatgcaacaagcagatgaagactctgagaggggtttggagtctggaagcctcatcccttcagcatcaagctggaatggggaatgaagaatagagatgtggtgcccactaggctactgctgaaagggagctgaaattcctccaccaagttggtattcaaaatatgtaatgactggtatggcaaaagattggactaagacactggccataccactggacagggttatgttaacacctgaattgctgggtcttgagagagcccaaggagttctgggagagggaccagattggggggtaggtccacgggcttggtgatagaattatttctcgattgacttcttgagtgcaatttgaactgtaacatttgcttagtcacctttagtggagtaatccactgggcttgtttctatatttatataaagcagccaaatccttcatgtaatattgaagtccatttttgcaatgttgttccatacttggagtcattttgcatcccatagaggttagtcctgcatagccagtaatgtgctaagttcatccaaaagctggcggaccaaagtctaaatagggctcagtatcccccatcgcttatctctgcctccttcctcctccttcccagtctatcatcaaccttgagtattctacacaatgtgaattcaagtgcctgattaattgaggtggcaacatagtttgagacgagggcagagaacaggaagatacatagctagaagcgacgggtacaaaaagcaatgtgtacaagaagactttcagcaagtatacagagagttcacctctactctgccctcctcatagtcataatgtagcaagtaaagaatgagaatggattctgtacaatacactagaaaccaacataatgtatttctttaaaacctgtgtgaaaaaataaatgttccaccagtagggataggggaaaagtaaccaaaagagagaaagagaaaggaatgctggtttatctttgtagattgtaatcgaatggagaaatttgcagtattttagccactattaggaatttttttttttttgtaaaatgaaaactgaactttgttcaaatgctttcatgaacctggtttgaaacggtaggaaagcaccaaaacgtgggaacctggtgactaagggcctggggcaaggacttgggaaatgtcattgataatagaggggggggttttcccccctttaaaaatggtggatattaagcgatttataccctttttttaactccgaaaattttttgataaaccccaaaatatcccggctgcttggaaacaatcggaatttt

SEQ ID NO: 60763 - DNA, 2614 bp, Homo sapiens
  misc_feature (1)...(2614): n = a,t,c or g
agcgggaactgaaacctgattacggtccgaccggcccggattcccggtcgacccacgcgtccgcccacgcgtncggaactctggaggaacgctgagctgagcagcaccgaggacagcgcccggcagcgcccgcgcccaggtctccctccgcagccctgactcgcgcacacgctgagcttttgctcactccccttcgcgcggacacagacacacgcatattcacacacccagacacacaccccgctgtacaatggcagaatcccacctgcagtcatccctcatcacagcctcacagtttttcgagatctggctccatttcgacgctgacggaagtggttacctggaaggaaaggagctgcagaacttgatccaggagctccagcaggcgcgaaagaaggctggattggagttatcacctgaaatgaaaacttttgtggatcagtatgggcaaagagatgatggaaaaataggaattgtagagttggctcacgtattacccacagaagagaatttcctgctgctcttccgatgccagcagctgaagtcctgtgagggaattcatgaagacatggagaaaatatgatactgaccacagtggcttcatagaaactgaggagcttaagaactttctaaaggacctgctagaaaaagcaaacaagactgttgatgacacaaaattagccgagtatacagacctaatgctgaaactatttgattcaaataatgatgggaagctggaattaactgagatggccaggttactaccagtgcaggagaattttcttcttaaattccagggaatcaaaatgtgtgggaaagagttcaataaggcttttgagctgtatgatcaggacggcaatggatacatagatgaaaatgaactggatgctttactgaaggatctgtgcgagaagaataaacaggatctggatattaataatattacaacatacaagaagaacataatggctttgtcggatggagggaagctgtaccgaacggatcttgctcttattctctgtgctggggataactagagttggtggccgcaaccacttgctagtgatacactgtatctaaaaaataactgtgcactataagggagtaggctgtattttcttttatatctgtaaatttaactgcatatagataattatccaggatgtgtggctcattcttttcagcttgtttctatactgtttgtaatatacagtttttgtaaccatatgattgaaaagaagaaagtctatgcttaggccagtcagtacacccaattttaaaaaataacatattcttgctttcacaaatatagttgaacaagatttccctaaaaattccaccaggattaatctctaaaattctagtctctgatttgcaaatgcacatttgtcactgaataatggaattatgtataacaagccaaacattcttattttagacaaccatagaactgtcccacaaaatatttctaagcttatttctaactattaggaggaatgtgcttttccatctaaaatactcaccaaaatatagttaattgtggctttatgaagttaacagtctcattacagatttagtttaccaatcaacagcatgtctactgcttggatccatacaaaactatcggttcaagttgatgtgacaagggaagggagcaccagatgacacataaatctgtctgattctatgcctgtatttccaacaaacttactgtcagagaatatgacctaaatccattttctaaactgttttcatgtgttgcaaattattctagtcaactgctgttttatgtcatactctgtgtaatctctgattaaatttaatatactgcatatcctggtgtctagtttgcatacttcctggattttctttctatgtagaactgttcatttccaccaagggtatctgctgcctctgaaaatatttttttctagctataacaactctattttttactacataattaaattttaatgtaaaattcatagcatcctgattattgaatgttatatcatcaatacttttgtgtattctgtggattctatatttcatattgagatcagcattcaaaatagttctatttctatctgcaaatagtttcaaatgagtttaaaaaaataacatctgaaaagaaatgctaatgtaatcatttatcttatctagcaagaagattctaaaacattctttaacatacatctaagtcagtttcacatatttgtagctagaatatcctatactggttatagttgatatgtaacagttggtgattttagatttctttgattgtgaaacagggagctatgagagatgtgtccatgtgaaatttacagttactgcctaggagttaatgatcgttctgggtcagcttgaatgtccccattctataaattcaacacttattttctgaattcataaaaataaccaaaaaatgtgagctataatgtttccctcaagaacaaacagaaacgagatttgccaaaaactaaaattcaacaaatgatgttgagtgggagattggctttgcctttaggcgtgtaaatggaagcactgccattagactgaatttaactactaagaataaataaagaagaaaataaccttaaaaaaaaaaaaa

SEQ ID NO: 60764 - DNA, 5623 bp, Homo sapiens
ttttttgatatttaatgatgtagcttctaaatttggtagttctgtctttgagtgtgaacttaaaaattatgaagatgcggctgggcgcgggggctcacacctgtcatccaggcactttgggactacaggcatgagccactgcatctggcagcaacatatatttcaaaagagtagcctggccactaggatctacctacctacatttttggtgcaaactattactttggggacatctttcttttttccttttcttttttttttttttaatttacagatggggtcttgttatgtttcccaagaggctcaagtgcagtggctattcacaggcatgatcatagcacactatagccttgaactcctggcctcaagtgatcttcccacatagctgagacaacaggtacatgccactgtgcccagcaggacatttttcttaatagaaaactactatcgtgaagaattatgtttatctcttaactatgtctactcaactagtttcaacatagtagtgaaattaacagtatcacgaaaagcaatgttccatgttaatttccatgtcgaagcaatgttctttgacccaacatttggataaatctcattcttgatgctagctatttcttggggtatgggttgctttaatcaacctctgcaaaactccgatcttagtaattccaagtgaaagaaccttgctagttgttcttactctgtacagaaatatatcagtctggattgattggacttggagttctatcttgatatgacaattttttctggtaagaccttgctcagaaatatgacccatgttgtcaaattttcataaatatcttatttttagaaatcccatcactactttacattaggctttctctttcagtgttcacaggcatcagagctctggatgaaaaaggcagatcccaactcccacagcacgtctttaccgtttcccaacgatgctcaggcccaggccccggccagctttcttctgcagatccacagggaaaatctccaagttctcctcatcccggtagtgtgcctcatctctatacaccaccagccgcaccttctggggggtctgcctcagggctgtgatggcttcttcgtggctggagttcctcaggtcaaccccattaaccaagggtgtgtcttttcctcccacaatgctgagaccaagccctgaacgtctcttggatatttctataatcatttcctgtccagggacaatgggacacgttgcggggtccactgacagaggagcctggaaaccaccatagcctgtgaagtctgcatctgttgaatggtatgatgaagctggtgctaatggtatctcttgtgaactgaaggagacttttgttggatatttttgctgtttcatctggctgacagccagtttgaagctttcactttcaggcaattgtttaataccaaccttcgaggctgccatcgttcctcactactaataggttcggtgccgctctgatcctcaatagaagatggagaacttgatggcactggaaagggagtaacggccatctgattgactgcatcctcgtttctgatgaaaaccagcttgacttttgatggggcagtcttaataatggcagatgcgattttggtgacttcttccatacagaatctgattgtttatctctaagagttcatctccaatatgcattcgtccatctgcggcagcaggtccttccgggttaattcccaccacaaatatgctcatgcgtgatcggtctttattaccagcaaggctgagtccaagtccattcttatctttttcaagttcaataatgtgcagttctccaggcagatctgcatatctttgtctgattttttggtcggtaaaggcatcttcttcttcattttcatcactgtcatcagtcagagctttataaggaggaggaagtttcattggcggtggagcagttccttgcctcttttctttcttttcttgggtgtcctggttctggttaccggtgattttgttggccttgttatgtacgttaggaatgactcgtggagtggatgacaaactctgaacaatgaacaccacagggtttcctgcattcttaatggcctcaactgcttcgctgtgtgaggcattctgcaaatctactccagacacctcaagtattttatctccagttttaagtgcgttcgtcttccctgctggactgtcttctaaaacttgtttgatgaatatacctttaagctcctctccattctttagacgttttataacagtttgtccaccaacaatactgatcccaagagacacattgggttctctaaaaatctcaacaattctcggtggaccccagtggctaaaatttggagtttcttctccttcgccttcttctctctcaggtaactcacatgtatcagtggcatatctagaagacaacattcctgtgtatgctgaggccttggaaataactcgtgtcgcttggtgttgatataaaggcaaatcttcttgctcccttctttgagccacaacaggaaggtcaatgagcaagctaggaccttggacatcattcgggatcatgcctaaatccagactagtttttgctaatgaattaagattttccaggtcgtcaaatctgccttgttgactgtttccttcagttgatggtacagatggtagggactccatgacaaaattttctttcatcacattttcagggcaatagccatacggctgtgcctcctgggaatagacagtcctcccggttcttgcctcttgagactcggatggttcattatcatgcaaccactgtgtaccaaagtgaagttcattcacagagggcacaggagtggcctcttgaatgtgcgacaagggatacaactccatggatggtgagggatcttgatataactcatattcttcatcaacaagcatttctctttcttcatccatttcctgcaatctaggagtcagaaattcatgcatctcccaggcctccttgctttgctctatctctttttgttgggaatggaaagactttcccagatctagaaatggttcatccacaagttcttctttaaaatatggttcatctctaaatcccttgggtgcttcgagtattaaagatgaatttatatcatgaattgttcctgaaaattcagtcttgtcttcattactgcttgaatgtaaaatataacaactttcttcttcattatcttccaccaaaggcttacagatgccaaggtgtactaggcctggtggcacagctttcaatatttccacagcttcagcaagtgaggtgttgtccaaacggtattcattgactgagaccaggcggtctccaggtaatagtcccccacttctttctgctacaccatctgctaccagggagcggatcacaatcactgatcttgtaggatctaaagggtcctggtaatccaaaatgctgaatcccaaacctttacaatcttttactagttcaacaatcttgacttcaggggaccacagtgctaattccccatcatcatcttcttcagtattgacatccatattgtggtcaacctctgtctcaggaagagaggtttcagtgcgccttggttcatctacagaagcttcatcatcaaacaacctccgacagcaaaccaaagtaaaagggggtggcacttctttaagaaaggagactgcttctcggcgagattttccataaagctgcatgccattgacctcaagcagctcatcttctggctgtaggagacccaatgtatcaacaggaccaccagaaacaattgaagaaatataatggtgcccatcaaaggaatccacttccacaccaagcctcagagtgtgaataggcagcagctttgaatatttctgtaactcagcatcatctgcaatctgtgtgtccaaagtagcaaccattacttcataatcaggacccaacaggttttcccatctggatttcagctcattttctggagagtctgggactttttccaatttttctaaggcttgtatgttgtcattttttaaagtatcaattctttctttaatttcctcatcttcaccatccacattagtttcagtttccactgctccagttagaaagagagctggtggtttcagtggttctacaacagttcctctgtctgaaggtggttcaagtggagaagtagatgaggatgtcttccttcgaactagggttaggtgtaccacctgccctgcatttcgtaatacttcaacaacatcatggttggcaaaaccctgaatgttcacgccatcgacagcaactattttgtcattcacttgaatgtggccattgtggtacgcagcactgccaggtattatacttttcacataaatccctgaagcttcccctgtatgagatgttccaacatagccaacaattctaattccaagactctgcccatcttttctcacaagctcaacattataagtttcaaaaagagaactgtcagaaccagggcccttgctggctacagtaggcagggcaacaggtaaggctgcaggggcagggggggtgactgaaatgtcaccagctggatctctagcaacgagcatcctgactgaattcccacagttccttagaacttgtgcaacttgctcactggtcattccctgcacgtttgtgccaccaatcttcaagatgtggtcccctgtctggagtcttccatctcgatctgctaatcctccaggaactatagtcctcacaaccacgccacttgtttttcctccaactattccaaaacctagtccagagccatcattaatgagctcaacctcttcaacatggccccaacaaactgtttcaggcagagttgtatcatttaggctgctagaagtactgctttttgtgtggactggttccctggccacaatcagtctcaaagatccagtggtttgttgtaataatgcaattgcttgctgatgggaaatgttctgatccaatggcgtgtgattaatggccaatatttgatcattttcctttaatctttgatccctgtctgctacactccctggctggacatccttcacgaagatatcaacttttccgagattttgacttctgagggccaccacactgaatccaaggcctccagttgaaggccgttctatatctatatattcaatttgccggccctgagccatctgttgaatgactgagttaaagtcttcatttcccaacttcggggtccacggaaataacccagatacagtcgagttattagagggcctgtggacatttccattagtaatggaaccatctgtgaacactaacaaacctttcctagaaaaatcaaagttggctgaacaatctgagggtatatggttgagttgacccttcagttgcttgatggactgctgaagtgtgagtatctggttgaagagaggactctttagtgtctcataaaacatagataacttctcattctgcgacgtgtcacccttctcctgcaatttcattttcaggcgatcaagtacctgcagcacctgcagtttatctgtagcaggattttcaggcattttgaattattctcttcaatcactcttaaagacacctggtgcgctggaggagcaggtgggagcccgggtcgggcgggctcggtgtcggccctgcctcacctgggcggaagtgag

SEQ ID NO: 60765 - DNA, 1915 bp, Homo sapiens
atccagcctcaggaactgcccccagccatcgagccttggctacttaagggacctgggcccaatccacagctgggacagtcctggcccactgcactgggaatctaggatgggggccttggccagagccctgccgtccatactgctggcattgctgcttacgtccaccccagaggctctgggtgccaaccccggcttggtcgccaggatcaccgacaagggactgcagtatgcggcccaggaggggctattggctctgcagagtgagctgctcaggatcacgctgcctgacttcaccggggacttgaggatcccccacgtcggccgtgggcgctatgagttccacagcctgaacatccacagctgtgagctgcttcactctgcgctgaggcctgtccctggccagggcctgagtctcagcatctccgactcctccatccgggtccagggcaggtggaaggtgcgcaagtcattcttcaaactacagggctcctttgatgtcagtgtcaagggcatcagcatttcggtcaacctcctgttgggcagcgagtcctccgggaggcccacaggttactgcctccagctgcagcagtgacatcgctgacgtggaggtggacatgtcgggagacttggggtggctgttgaacctcttccacaaccagattgagtccaagttccagaaagtactggagagcaggatttgcgaaatgatccagaaatcagtgtcctccgatctacagccttatctccaaactctgccagttacaacagagattgacagtttcgccgacattgattatagcttagtggaagcccctcgggcaacagcccagatgctggaggtgatgtttaagggtgaaatctttcatcgtaaccaccgttctccagttaccctccttgctgcagtcatgagccttcctgaggaacacaacaaaatggtctactttgccatctcggattatgtcttcaacacggccagcctggtttatcatgaggaaggatatctgaacttctccatcacagatgacatgataccgcctgactctaatatccgactgaccaccaagtccttccgacccttcgtcccacggttagccaggctctaccccaacatgaacctggaactccagggatcagtgccctctgctccgctcctgaacttcagccctgggaatctgtctgtggacccctatatggagatagatgcctttgtgctcctgcccagctccagcaaggagcctgtcttccggctcagtgtggccactaatgtgtccgccaccttgaccttcaataccagcaagatcactgggttcctgaagccaggaaaggtaaaagtggaactgaaagaatccaaagttggactattcaatgcagagctgttggaagcgctcctcaactattacatccttaacaccttctaccccaagttcaatgataagttggccgaaggcttcccccttcctctgctgaagcgtgttcagctctacgaccttgggctgcagatccataaggacttcctgttcttgggtgccaatgtccaatacatgagagtttgaggacaagaaagatgaagcttggaggtcacagctggatctgcttgttgcatttccagctgtgcagcacgtctcagagattcttgaagaatgaagacatttctgctctcagctccgggggtgaggtgtgcctggcctctgcctccaccctcctcctcttcaccaggtgcatgcatgccctctctgagtctggactttgcttcccctccaggagggaccaccctccccgactggcctgggatatctttacaagcaggcactgtatttttttattcgccatctgatccccatgcctagcagagtgctggcacttagtaggtcctcaataaatatttattaaatgatgagatgatggaaaaaaaaaa

SEQ ID NO: 60766 - DNA, 1824 bp, Homo sapiens
ttttttttttttcagagacaaacactttttaatttcagtagcagtagggaaaaataacagcatccatgcattaaaactaagagccttcacaaagacgtttcaagatgtattttgaacaaaagaggacaggctcttgggccccctctgggtcctgcctcagcacatcgagtcctcaaatccgagtgaggaaagtctggggagctgcactgtggagccatcagaaagtacctggagcggctgctgctgggctggaaaagccgcagaagtcctcggcggtagctggggttgctatggcaacaggagtcccaggctgcccgtgctttctggccacaacctttacctcatcattaatgacttcaaagtggctcctcttcctcttcttcaatgtccaaatcattctgcctaagatatgcttgtaatggtccatacagtctctccttgaaagctaagaaatccatcatgttcccttgaaagtgttgcaagaaaaacagttcaatcaaatactccttgaagacctccttcagagcctgcatctcctggtgatgatagtccaggcactgcttcctcatctgtgccatctccggagaggctgggggaatctcctctaacttcttgggaaccttcttcattcccgtgttccccacagacgtgagtgggaggctggaaaggcctgggggcacggcagtcctggaagggctggtgggcgggggtggggacgtcatcccaaaccccgctgcgcccccagccccggggagcagcacgccgggcgtcctctcgaagcccaggggccggggcagcggcggcccctgcagcacctgctgctgctgaaccagctggccctggatgatgctgctgatctgcggtggcaagttagccgtggtgatgtggcttgggctggccaggggctgcaggccggccccacccgcggctgcagggctctggggtcccaggtggtggatggtgccccctgactgtgtgtggggctgggagggtctccgctctcggactgtgatgggcgtacccgggtgctggagctgaacctgggctccctgggcgatctgggtgagccctgacccatcctgaaacacaaagtgtccaccactggaggggctcaagctgatctgcctcaccagcacgctggcatccacgaagtcccctgtagggctgctgctgcagaggcccagcccagggccaggggcacctgcacgcacattctgcaaggcctgccccggccccggactgggctgcgtgggactctgggtctggacctgctgggacaagggggacgtgacctgaatgtatgatggagacccatgctcaaaccgccgaggctgagcgctgaactggaagcctggagaggtggggctggggagcggcagtggggccagcgtgacctgtgggcttccctggagcccagggcccacgccctgcaggtcaacattcatgttctgcccacccgcagggccccctctcaccatcagctgctgtagttggtggctgggggatggcagtgtgaggggcagggacggctgggagcacgctggctgctcctcgcccgcgccggggcaggccccaggccactggacatggcgctggctgctctgggagctgctgacgtgctgcatgactacgtcttcaggaaatgctccctaaacaaatgcagaaaagttagagttgagtgaggtgagctccatgcccgggcgcctttcggagcctgcacaggtgtctggaaaggtggctcaggaggggccaatgcgggcccagcaaacctcaggcacgagcctgctacccagggcaaaaagtgctcagatcagaatatctgct

SEQ ID NO: 60767 - DNA, 1937 bp, Homo sapiens
cctccactgccggggctgggcccggccgcgggaaggaccgaaggggatacagcgtgtccctgcggcggctgcaagaggactaagcatggatggcagccggagagtcagagcaacctctgtccttcccagatatggtccaccgtgcctatttaaaggacacttgagcaccaaaagtaatgctttttgcactgactcctcttctctcagactaagcactctccagctggtcaagaatcacatggctgttcactataataaaatcctttcagccaaagctgcagtagactgctcggttccagtaagcgtgagtaccagcataaagtatgcagaccaacaacgaagagagaaactcaaaaaggaattagcacaatgtgaaaaagagttcaaattaactaaaactgcaatgcgagccaattataaaaataattccaagtcactttttaataccttacaaaagccctcaggcgaaccgcaaattgaggatgacatgttaaaagaagaaatgaatggattttcatcctttgcaaggtcactagtaccctcttcagagagactacacctaagtctacataaatccagtaaagtcatcacaaatggtcctgagaagaactccagttcctccccgtccagtgtggattatgcagcctccgggccccggaaactgagctctggagccctgtatggcagaaggcccagaagcacattcccaaattcccaccggtttcagttagtcatttcgaaagcacccagtggggatcttttggataaacattctgaactcttttctaacaaacaattgccattcactcctcgcactttaaaaacagaagcaaaatctttcctgtcacagtatcgctattatacacctgccaaaagaaaaaaggattttacagatcaacggatagaagctgaaacccagactgaattaagctttaaatctgagttggggacagctgagactaaaaacatgacagattcagaaatgaacataaagcaggtagcatctaattgtgtgacatatgatgccaaagaaaaaatagctcctttacctttagaagggcatgactcaacatgggatgagattaaggatgatgctcttcagcattcctcaccaagggcaatgtgtcagtattccctgaagcccccttcaactcgtaaaatctactctgatgaagaagaactgttgtatctgagtttcattgaagatgtaacagatgaaattttgaaacttggtttattttcaaacaggtttttagaacgactgttcgagcgacatataaaacaaaataaacatttggaggaggaaaaaatgcgccacctgctgcatgtcctgaaagtagacttaggctgcacatcggaggaaaactcggtaaagcaaaatgatgttgatatgttgaatgtatttgattttgaaaaggctgggaattcagaaccaaatgaattaaaaaatgaaagtgaagtaacaattcagcaggaacgtcaacaattccaaaaaggcttgggatatgttattgtcggcaccaaaggatgagaacgagatattcccttcaccaactgaatttttcatgcctatttataaatcaaagcattccagaaggggttataattcaacaggtgaatgatgaaacaaatccttgaaacttcaactttggatgaaaatcatcccaagtatttcagacagtttaacagatcgggaaacttctgtgaatgtcattgaaggtgatagtgaccctgaaaaggttgagatttcaaatggattatgtggtcttaacacatcaccctcccaatctgttcagttctccagtgtcaaaggcgacaataatcatgacatggagttatcaactcttaaaatcatggaaatgagcattgaggactgccctttggatgtttaatcttcattaataaatacctcaaatggccagtaactcaaaaaaaaa

SEQ ID NO: 60768 - DNA, 1049 bp, Homo sapiens
  misc_feature (1)...(1049): n = a,t,c or g
ttttttttttttntgatcgaaaggcaaatatttatttttcaggaagagaaacaggagacctcgaggcttctggacttaggaggtccgggcagctggtccatggttgtccaggtagtgccgcagggctgtgggataatccgttatgacgccagtggctcccacgctgaaggctgcttcaaaatccgactcttcattaaggcaccaaaagaccacctgcacccctcgctcctccaagtgtcggatcagactcttcctcatgatcagccatttcgaaaccacagccaataactggttcaggcaagagcaggaaaatgggaaataggtcctgttgatgatgttgggcaggaagcagaagaagaacttctcagggattgggatgaagggcagcagccccaggtagtaggaaagcagcacccagaatcctcggcttattgtgaaggacaggggcatctcggggttggcagccttgcatttcttcatgaccgagctcttctccgaggcccagatggtgatttcattacggtcatagcgtctcaccaagcctgctcacggatgagctcttcgttcttccctttgatctctacgctcatgggtgtccttggaaacctctggaacaggtcctccagacgaaccatgcgccggtctgacccgtgagcaaagtggcctggagagaagtaaacctccagcttctccttgtagaggggcaggtcctcgaagtccaggctgcccacatccctgtttaggcccgactggcggcacaggttctcatcatgtgacaccaccaccactctgtcccgtgtcagctgacagtcgagctccaggaggtccgagcgctgggccatggagctgtgggggtgaaggtcagcggggggcaggggcaggggactgggatgaggggcatggtggctgggaggtggccgggaatgtgagagcggagttcgtggcgggatgtgcaggccacctccagggggcgccagtcacccagctaggaagtgaatggcgtcccttgctgtgatgcagtccacgacctgcacaccctcacatggcag

SEQ ID NO: 60769 - DNA, 1388 bp, Homo sapiens
ttttttttttttccgcagaaaagaaatttattaccaagctataaattagaggcggcggggtgggcggggggagccgagcagtcacgtatggggcatctgccctttttctctgtcctcctgggcctggattttgagttcctcatccaggcgctcctttgcgcggaccacctttgactgcaggtagaaggagccacccacggatttatcattcaccttaaataagtgttcatagttcttctggacctcctcagggctcagcttggacacgttgagaatctgctgtgcctcctggaggctgaggccggagaggttggaagcggctgcagaccggtgtccagcgcgtcctcgggcatcagctgcggcccggctggctgtgtggacatgtgggtgatcgctcagtcctcagcagcccacacttcaccctgggccttccgagttggtggctcacccctgcaaactcctgccgcaaggcccgtgcaaaggccctgcccaccacctgcacgcccatcacaatgatctgggccaggtacttggctggacaggcaaggcaggcgggtgaacttgaccgagctcccagaggcagacttggccccacctcatccttcaggaaaggcgtagaggagcaaggcaaagtggctgcaaccaccggcttcaggaagaaacactgtggtctgggagccagaacacagggacagccctggacctggcagtaactcactctcgaccctggggccgaccatcactcttcctgagtttctgagatcatcaggcccaacctttactttaccaacggggaaacagatctgtcctaattctcccaagtccgaagactttaagtccattccattcaataaaacaaacttactatgcaaacctgtttccatcttcaaggagctaaaagcccactaggagggtatttaaacacactatggaccaaatcatgagggagagtcaggctcgttcatttgtgcagccattggttcacccattcattcaaacatctgctgagagtctactctgctcagcacttgagcacaaagctacacagaacctggtccctgccccgagtcagagcacactgctggcctggcagggaaccccactgtcacacaccaggctgaacatgccggaacactgcacgtgtgattccatgccccgcagaggccctggggactcactaagatgtgagcggaagcaacagagtcgagggaaaactcaagactgagatgggattcggtgagaggagggggttctgtgtgagaggagggcgttccgtgagaggagggggttccgtgagaggagggggttccgtgagaggagggggttctgtgtgagaggagggggttctgtgtgagaggagggggttctgtgagaggagggggttccgt

SEQ ID NO: 60770 - DNA, 6491 bp, Homo sapiens
ctgcaggaattcggcacgagccggcacaaacctcagtggtggttctgtggttgtttctgtctttttttgatagaatctttgattagtatcgaatttactgtatttggccatgtgaactattgggagcctcctagggtgagggaaattaagagctttcagaggaatgaggcgactgatttgcaaacggatctgtgattataaaagcttcgatgatgaagaatcagtggatggaaataggccatcatcagctgcatcagccttcaaggttcctgcacctaaaacatccggaaatcctgccaacagtgcaaggaagcctggttcagcaggtggccctaaggttggagcaggtgcttctaaggaaggaggtgctggagcagttgatgaagatgattttataaaagcttttacagatgtcccttctattcagatttattctagtcgagaactcgaagaaacattaaataaaatcagggaaattttgtcagatgataaacatgactgggatcagcgtgccaatgcactgaagaaaattcgatcactgcttgttgctggagctgcacagtatgattgcttttttcaacatttacgattgttggatggagcacttaaactttcagctaaggatcttagatcccaggtggttagagaagcttgtattactgtagcccacctttcaacagttttgggaaacaagtttgatcatggcgctgaagccattgtacctacactttttaatctcgtccccaatagtgcaaaagtcatggcaacttctggatgtgcagcaatcagatttatcattcggcatactcatgtacccagacttatacctttaataacaagcaattgcacatcaaaatcagttcccgtgaggagacgttcatttgaatttttagatttattgttgcaagagtggcagactcattcattggaaagacatgcagccgtcttggttgaaactattaaaaagggaattcatgatgctgacgctgaggccagagtggaggcaagaaagacatacatgggtcttagaaaccactttcctggtgaagctgaaacattatataattcccttgagccatcttatcagaagagtcttcaaacttacttaaagagttctggcagtgtagcatctcttccacaatcagacaggtcctcatccagctcacaggaaagtctcaatcgccctttttcttccaaatggtctacagcaaatccatcaactgtggctggaagagtatcagcaggcagcagcaaagccagttcccttccaggaagcctgcagcgttcacgaagtgacattgatgtgaatgctgctgcaggtgccaaggcacatcatgctgctggacagtctgtgcgaagcgggcgcttaggtgcaggtgccctgaatgcaggttcctatgcgtcactagaggatacttctgacaagctggatggaacagcatctgaagatggccgggtgagagcaaaactttcagcaccacttgctggcatgggaaatgccaaggcagattctagaggaagaagtcgaacaaaaatggtgtctcaatcacagcctggtagccggtctgggtctccaggaagagttctgaccacaacagccctgtccactgtgagctctggtgttcaaagagtcctggtcaattcagcctcagcacaaaaaagaagcaagataccacggagccagggctgtagcagagaggctagtccatctaggctttcagtggcccgaagcagtcgtattcctcgaccaagtgtgagtcaaggatgcagccgggaagctagtcgggagagcagcagagacacaagtcctgttcgctcttttcagcccctcgcctccagacaccattccagatcaactggtgccctctacgcccccgaagtgtatggggcctcaggtccaggttatgggatcagccaatcaagtcgactgtcgtcttctgttagtgccatgcgagtcctgaacacaggttctgatgtggaggaggcggtggcagatgccttgctcttaggagacatacggactaagaaaaaaccagctcgaagaagatatgaatcatatggaatgcattcagatgatgacgccaacagcgatgcatctagtgcttgttcagaacgctcctatagttctcgaaatggtagtattcctacatatatgaggcagacgggaagatgtgggcagaagtcctcaatagatgtgctagttccaattggtcagaaaggaaagaaggcctcctaggtctgcagaacttattaaaaaatcagagaacactaagtcgagttgaactgaaaagattatgtgaaattttcacaagaatgtttgctgaccctcatggcaagagagtattcagcatgtttttggagactctagtggatttcatacaagtccacaaagatgatcttcaagattggttgtttgtactgctgacacaactactaaaaaaaatgggtgctgatttgcttggatctgttcaggcaaaagttcagaaagcccttgatgttacaagagagtcttttccaaatgatcttcagttcaatattctaatgagatttacagttgatcagacccagacaccaagcttaaaggtgaaggttgctatccttaaatacatagaaactctggccaaacagatggatccaggagattttataaattccagtgaaactcgcctagcagtgtctcgggtcatcacttggacaacagaacccaaaagttctgatgttcggaaggcagcacagtcagtgctgatttcattatttgaactcaataccccagagtttacaatgttattaggagctttaccaaaaacttttcaggatggtgctaccaagcttcttcataatcaccttcgaaacactggcaatggaacccagagttccatggggagtcctttgacaagaccaacaccacgatcaccagctaactggtccagtcctcttacttctcctaccaatacatcacagaatactttatctccaagtgcatttgattatgacacagaaaatatgaactctgaagatatttatagctctcttagaggtgtcactgaagcaatccagaatttcagcttccgtagccaagaagatatgaatgagccattgaaaagggattctaaaaaagatgatggcgattcaatgtgtggtggtcctggggatgtctgacccaagagcaggaggtgatgctactgactcaagtcaaacagctctttgataataaagcttcattgctccattcaatgcctactcactcctctccacgctctcgagactataatccatataactattcagatagcatcagtcccttcaacaagtctgccctcaaggaagccatgtttgatgatgatgctgaccagtttcctgacgatctttccctagatcattctgacctagttgcagagttgttgaaggagctgtctaaccataatgagcgtgtagaagaaagaaaaattgccctctatgaacttatgaaactgacacaggaagaatcttttagtgtttgggatgaacacttcaaaacaatattgcttttattgcttgaaacgcttggagataaagagcctacaatcagggctttggcattaaaggttttaagagaaatcctaaggcatcaaccagcaagatttaaaaactatgcagaattgactgtcatgaaaacattggaagcacataaagatcctcataaggaggtggtgagatctgctgaggaagcggcatcagtgtttggccacttcaatttagtccagagcagtgcatcaaagtcctttgtcctatcattcaaactgcagactacccaattaatctggctgcaatcaaaatgcaaacaaaagtgatagagagagtgtccaaggaaaccctaaacctgcttttgccagagattatgccaggtctaatacagggttatgataattcagagagcagtgttcggaaagcttgtgtcttctgcctggtggctgttcatgcggtaattggtgatgaactaaaaccacatctcagtcaacttactggcagtaaaatgaagctactgaatctttacatcaaacgtgcacaaacaggttctggaggagctgatcccactactgatgtttctggacaaagttagtgaagctcatcacagcgaaccaggtctctcaaaagaaaggacagatagaccaccctcatcaatgaaaggaagttctcaaacacatcctttggaacttactattgtttcccagttttagttttttgtttcgtttcgttttgtattttctgtaacagaggactatcctcagtctgcatgtaacttttatgatagttattccaaattcaagaagaagcagtattaacatcaattgatcgacacaaagtaatttttaatttaattcatcatttcacatgtttgtactttgtcttcccattaacctttgccagtgttatgattgtataaatttttttaaatgctggttaaacaggaatgcttaaagctttaaaagtttaacagtctaaaacatttttgcttttattcaactgcagaataatatttttattgctactttgagttttgtttcgtatcatgtcctatgctagaaatatttaaatgatgtgaaacaaagcaggactaatttgaactacagctggactccgtttgtgtgatggtgatacatgtcattagttgcaacttctttggggtgatctatagtttgaaaactaaaacctcaaagacagatgttacagaatcagccagttctgtaaaactgatattgtctattggttattgatcttgccatctttatttaaaaccatgtcccttctatgatcccttaagaaagctgcaccaaatcatctgcctgttttttcttgatacttactgaaatagaaggttttattgcagggtttattttggtttgtttatatctttgttgtgaatgatgcttttttgtatttattaatatcaaattcacttatgaataaacttgataatggaaacggacaaaaaaaatcaagtgcgtgtgtgtccttgaccgtcttctgtttctcacgtaataaacaaattatcgagacatgggagtgaccagcaccttttctttaaatggtggaacctggtttccttttaccatgaaattgtcttacttgaaaatattgatcctgatgagagagaagatggtgccaaggctgtctttgtataatgggctcaaattctctacctcttcagggctaatacttttaactgagctgctgcctatagtgtcttttggaaaactacttaaagggtgattttctgttactttttagcaaatttttttaatcacctcttgctacacccattcttttcatgtgcagccgactcaaaaattaccagttttggtgaaaggctaaattagataatttggaaccaggatactaatgatttctcatctttacttttttttaatcctaatataaagtgaatttgattgaaaaggcaaatagctattagggaagcagtttgccattgttgcagagttatctgtactttgtttaactgaaaaaaatgtagaaatatatgtaaagaatttaagacaagagtactgaatggatgatttgtcataggctttcccctttctttctgttctagcagcaggaaaagtttctctatatcctctccctctacctgtaacaattttgttttctactgttaattacattgtgtatttatagttctatgcttactgttgtgcatatactggcaataaaactgtacataacattacttgaaaaagttaataatgtatatcagtttttctgtctcactgtgtaacaagtcactcagttttattttaactttagacggtcttgtatcagtggtggtctcttgaattttgtaagttcatctgaggagaaaagatttttcaggtgtagctaccacaatcaaaggtatatagctacatacgcatgtatatattacagcttatctgtaagaagaaaatgcattttaaacacaactcttctcagtagcattttatgacctttggatatgtttgtaatcatttcgaatcaaaatattgatttaattttgacctctggtttaagatactgctttaactactgttgacaaccaagtagagtgacttaagctgaacagtaactaactggaaaattcgataagcacctggcatctaatggcaggcaggcactcaagatatgaattaactacataatggaaaaatatggtttaacgtgtccaaatgaaagctagtagatgtaaacatggaaaaattgtgtttacaattttataatctcagttgataagactataagaaagctgattatttaaatcactatatacaatacacccttaatttgttcattccagaaacatactgagatgtcagctacttaaaaatggtcacaaaaagctactgtttatatttttcctcctgctattctctcccaaattaattattaataagtgttgttcatttactgcactgctgagaactaattaaaattatatattccagattgtaaaaaaaaaa

SEQ ID NO: 60771 - DNA, 1371 bp, Homo sapiens
agcacactccagaaaaaaacttcccaaaccctgggcaactgaggttctgatgtggagctctggatggaaagcgtgctgaagtcttgttaaactagcaagcttttgtttggaggtccaccgccgaaggcgcacaggcctgtgggaacacgagcgttgagactgggggcgtctagatgatccaagggctcggacctcaggcacatgcgaatgacccggagtgtggacaacgtccagttcctgccctttctcaccacggaagtcaagtgaggggccgacggctgcgcaacctgggctggctgagttatggggctttgaagggagacgggatcctcatcgtcgtcaacacagtgggtgctgcgcttcagaccctgtatatcttggcatatctgcattactgccctcggaagcgtgttgtgctcctacagactgcaaccctgctaggggtccttctcctgggttatggctacttttggctcctggtacccaaccctgaggcccggcttcagcagttgggcctcttctgcagtgtcttcaccatcagcatgtacctctcaccactggctgacttggctaaggtgattcaaactaaatcaacccaatgtctctcctacccactcaccattgctacccttctcacctctgcctcctggtgcctctatgggtttcgactcagagatccctatatcatggtgtccaactttccaggaatcgtcaccagctttatccgcttctggcttttctggaagtacccccaggagcaagacaggaactactggctcctgcaaacctgaggctgctcatctgaccactgggcaccttagtgccaacctgaaccaaagagacctccttgtttcagctgggcctgctgtccagcttcccaggtgcagtgggttgtgggaacaagagatgactttgaggataaaaggaccaaagaaaaagctttacttagatgattgattggggcctaggagatgaaatcactttttattttttagagatttttttttttaattttggaggttggggtgcaatctttagaatatgccttaaaaggccgggcgcgggggctcacgcctgtaatcccagcactttgggaggccaaggtgggcggatcgcctgaggtcaggagttcaagaccaacctgactaacatggtgaaaccccatctctactaaaaatacaaaattagccaggcatgatggcacatgcctgtaatcccagatacttgggaggctgaggcaggagaattgcttgaacccaggaggtggaggttgcagtgagctgagatcgtgccattgtgatatgaatatgccttatatgctgatatgaatatgccttaaaataaagtgttccccacccctgaaaaaaaaaa

SEQ ID NO: 60772 - DNA, 5805 bp, Homo sapiens
tttcgtggcgcgggagccgagaggtggcgcgggggtgccaccgttgccgcaggctggagagagattgctcccagtgaggcgcgtaccgtctgggcgagggcttcattcttccgcggcgtccctggaggactggagactgatgcatgagggggctacggaggcgcaggagcggtggtgatggtctgggaagcggagctgaagtgccctgggctttggtgaggcgtgacagtttatcatgaccgtgttcaggcaggaaaacgtggatgattactacgacaccggcgaggaacttggcagtggacagtttgcggttgtgaagaaatgccgtgagaaaagcaccggcctccagtatgccgccaaattcatcaagaaaaggaggactaagtccagccggcggggtgtgagccgcgaggacatcgagcgggaggtcagcatcctgaaggagatccagcaccccaatgtcatcaccctgcacgaggtctatgagaacaagacggacgtcatcctgatcttggaactcgttgcaggtggcgagctgtttgacttcttagctgaaaaggaatctttaactgaagaggaagcaactgaatttctcaaacaaattcttaatggtgtttactacctgcactcccttcaaatcgcccactttgatcttaagcctgagaacataatgcttttggatagaaatgtccccaaacctcggatcaagatcattgactttgggttggcccataaaattgactttggaaatgaatttaaaaacatatttgggactccagagtttgtcgctcctgagatagtcaactatgaacctcttggtcttgaggcagatatgtggagtatcggggtaataacctatatcctcctaagtggggcctccccatttcttggagacactaagcaagaaacgttagcaaatgtatccgctgtcaactacgaatttgaggatgaatacttcagtaataccagtgccctagccaaagatttcataagaagacttctggtcaaggatccaaagaagagaatgacaattcaagatagtttgcagcatccctggatcaagcctaaagatacacaacaggcacttagtagaaaagcatcagcagtaaacatggagaaattcaagaagtttgcagcccggaaaaaatggaaacaatccgttcgcttgatatcactgtgccaaagattatccaggtcattcctgtccagaagtaacatgagtgttgccagaagcgatgatactctggatgaggaagactcctttgtgatgaaagccatcatccatgccatcaacgatgacaatgtcccaggcctgcagcaccttctgggctcattatccaactatgatgttaaccaacccaacaagcacgggacacctccattactcattgctgctggctgtgggaatattcaaatactacagttgctcattaaaagaggctcgagaatcgatgtccaggataagggcgggtccaatgccgtctactgggctgctcggcatggccacgtcgataccttgaaatttctcagtgagaacaaatgccctttggatgtgaaagacaagtctggagagatggccctccacgtggcagctcgctatggccatgctgacgtggctcaagttacttgtgcagcttcggctcaaatcccaatatccaggacaaggaagaagaaacccccctgcactgtgctgcttggcacggctattactctgtggccaaagccctttgtgaagccggctgtaacgtgaacatcaagaaccgagaaggagagacgcccctcctgacagcctctgccaggggctaccacgacatcgtggagtgtctggccgaacatggagccgaccttaatgcttgcgacaaggacggacacattgcccttcatctggctgtaagacggtgtcagatggaggtaatcaagactctcctcagccaagggtgtttcgtcgattatcaagacaggcacggcaatactcccctccatgtggcatgtaaagatggcaacatgcctatcgtggtggccctctgtgaagcaaactgcaatttggacatctccaacaagtatgggcgaacgcctctgcaccttgcggccaacaacggaatcctagacgtggtccggtatctctgtctgatgggagccagcgttgaggcgctgaccacggacggaaagacggcagaagatcttgctagatcggaacagcacgagcacgtagcaggtctccttgcaagacttcgaaaggatacgcaccgaggactcttcatccagcagctccgacccacacagaacctgcagccaagaattaagctcaagctgtttggccactcgggatccgggaaaaccacccttgtagaatctctcaagtgtgggctgctgaggagctttttcagaaggcgtcggcccagactgtcttccaccaactccagcaggttcccaccttcacccctggcttctaagcccacagtctcagtgagcatcaacaacctgtacccaggctgcgagaacgtgagtgtgaggagccgcagcatgatgttcgagccgggtcttaccaaaggratgctggaggtgtttgtggccccgacccaccacccgcactgctcggccgatgaccagtccaccaaggccatcgacatccagaacgcttatttgaatggagttggcgatttcagcgtgtgggagttctctggaaatcctgtgtatttctgctgttatgactattttgctgcaaataatcccacgtcaatccatgttgttgtctttagtctagaagagccctatgagatccagctgaacccagtgattttctggctcagtttcctgaagtcccttgtcccagttgaagaacccatagccttcggtggcaagctgaagaacccactccaagttgtcctggtggccacccacgctgacatcatgaatgttcctcgaccggctggaggcgagtttggatatgacaaagacacatcgttgctgaaagagattaggaacagggttggaaatgatcttcacatttcaaataagctgtttgttctggatgctggggcttctgggtcaaaggacatgaaggtacttcgaaatcatctgcaagaaatacgaagccagattgtttcggtctgtcctcccatgactcacctgtgtgagaaaatcatctccacgctgccttcctggaggaagctcaatggacccaaccagctgatgtcgctgcagcagtttgtgtacgacgtgcaggaccagctgaaccccctggccagcgaggaggacctcaggcgcattgctcagcagctccacagcacaggcgagatcaacatcatgcaaagtgaaacagttcaggacgtgctgctcctggacccccgctggctctgcacaaacgtcctggggaagttgctgtccgtggagaccccacgggcgctgcaccactaccggggccgctacaccgtggaggacatccagcgcctggtgcccgacagcgacgtggaggagctgctgcagatcctcgatgccatggacatctgcgcccgggacctgagcagcgggaccatggtggacgtcccagccctgatcaagacagacaacctgcaccgctcctgggctgatgaggaggacgaggtgatggtgtatggtggcgtgcgcatcgtgcccgtggaacacctcaccccctttccatgtggcatctttcacaaggtccaggtgaacctgtgccggtggatccaccagcaaagcacagagggcgacgcggacatccgcctgtgggtgaatggctgcaagctggccaaccgtggggccgagctgctggtgctgctggtcaaccacggccagggcattgaggtccaggtccgtggcctggagacggagaagatcaagtgctgcctgctgctggactcggtgtgcagcaccattgagaacgtcatggccaccacgctgccagggctcctgaccgtgaagcattacctgagcccccagcagctgcgggagcaccatgagcccgtcatgatctaccagccacgggacttcttccgggcacagactctgaaggaaacctcactgaccaacaccatgggggggtacaaggaaagcttcagcagcatcatgtgcttcgggtgtcacgacgtctactcacaggccagcctcggcatggacatccatgcatcagacctgaacctcctcactcggaggaaactgagtcgcctgctggacccgcccgaccccctggggaaggactggtgccttctcgccatgaacttaggcctccctgacctcgtggcaaagtacaacaccaataacggggctcccaaggatttcctccccagccccctccacgccctgctgcgggaatggaccacctaccctgagagcacagtgggcaccctcatgtccaaactgagggagctgggtcgccgggatgccgcagactttttgctgaaggcatcctctgtgttcaaaatcaacctggatggcaatggccaggaggcctatgcctcgagctgcaacagcggcacctcttacaattccattagctctgttgtatcccggtgagggcagcctctggcttgggcagggtctgtttggactgcagaagcaagggggtgatgtagcccatccttccctttggagatgctgagggtgtttcttcctgcacccacagccagggggatgccactcctccctccggcttgacctgtttctctgccgctacctccctccccgtctcattccgttgtctgtggatggtcattgcagtttaagagcagaacagatcttttactttggccgcttgaaaagctagtgtacctcctctcagtgttttggactccatctctcatcctccagtaccttgcttcttactgataattttgctggaattcctaacttttcaatgacattttttttaactactatattgattgtcctttaaaaaagaaaagtgcatatttatccaaaatgtgtatttcttatacgcttttctttgttataccatttcctcagcttatctcttttatatttgtaggagaaactcccatgtatggaatcccactgtatgatttataaacagacaatatgtgagtgccttttgcagaagagggtgtgtttgaaatcatcggagtcagccaggagctgtcaccaaggaaacgctacctctctgtcccttgctgtatgctgatcatcgccagaggtgcttcaccctgagttttgttttgtattgttttctgacagtttttctgttttgtttggcaaggaaaggggagaagggaatcctcctccagggtgattttatgatcagtgttgttgctctaggaagacatttttccgtttgcttttgttccaatgtcaatgtgaacgtccacatgaaacctacacactgtcatgcttcatcattccctctcatctcaggtagaaggttgacacagttgtagggttacagagacctatgtaagaattcagaagacccctgactcatcatttgtggcagtcccttataattggtgcatagcagatggtttccacatttagatcctggtttcataacttcctgtacttgaagtctaaaagcagaaaataaaggaagcaagttttcttccatgattttaaattgtgatcgagttttaaattgataggagggaacatgtcctaattcttctgtcctgagaagcatgtaatgttaatgttatatcatatgtatatatatatatgcactatgtatatacatatatattaatactggtatttttacttaatctataaaatgtcggttaaaaagttgtttgtttttttctttttttataaataaactgttgctcgttaaaaaaaaaa

SEQ ID NO: 60773 - DNA, 6547 bp, Homo sapiens
gaatctctcacgagctggagccggagccattttccccccttcggccgcggcgaggaggagccggagcgggagtgacaccgagccggacccagcgcgacctgcggcggctccgggtgactcgggccagtgtagaggtcctcaggccgccggcaggagcagctgggccaattccctggccgggagcggaaggggatggcgtcgggcctgggctccccgtccccctgctcggcgggcagtgaggaggaggatatggatgcacttttgaacaacagcctgcccccaccccacccagaaaatgaagaggacccagaagaggatttgtcagaaacagagactccaaagctcaagaagaagaaaaagcctaagaaacctcgggaccctaaaatccctaagagcaagcgccaaaaaaaggagcgtatgctcttatgccggcagctgggggacagctctggggaggggccagagtttgtggaggaggaggaagaggtggctctgcgctcagacagtgagggcagcgactatactcctggcaagaagaagaagaagaagcttggacctaagaaagagaagaagagcaaatccaagcggaaggaggaggaggaggaggatgatgatgatgatgatgattcaaaggagcctaaatcatctgctcagctcctggaagactggggcatggaagacattgaccacgtgttctcagaggaggattatcgaaccctcaccaactacaaggccttcagccagtttgtcagacccctcattgctgccaaaaatcccaagattgctgtctccaagatgatgatggttttgggtgcaaaatggcgggagttcagtaccaataaccccttcaaaggcagttctggggcatcagtggcagctgcggcagcagcagcggtagctgtggtggagagcatggtgacagccactgaggttgcaccaccacctccccctgtggaggtgcctatccgcaaggccaagaccaaggagggcaaaggtcccaatgctcggaggaagcccaagggcagccctcgtgtacctgatgccaagaagcctaaacccaagaaagtagctcccctgaaaatcaagctgggaggttttggttccaagcgtaagagatcctcgagtgaggatgatgacttagatgtggaatctgacttcgatgatgccagtatcaatagctattctgtttctgatggttccaccagccgtagtagccgcagccgcaagaaactccgaaccactaaaaagaaaaagaaaggcgaggaggaggtgactgctgtggatggttatgagacagaccaccaggactattgcgaggtgtgccagcaaggcggtgagatcatcctgtgtgatacctgtccccgtgcttaccacatggtctgcctggatcccgacatggagaaggctcccgagggcaagtggagctgcccacactgcgagaaggaaggcatccagtgggaagctaaagaggacaattcggagggtgaggagatcctggaagaggttgggggagacctcgaagaggaggatgaccaccatatggaattctgtcgggtctgcaaggatggtggggaactgctctgctgtgatacctgtccttcttcctaccacatccactgcctgaatcccccacttccagagatccccaacggtgaatggctctgtccccgttgtacgtgtccagctctgaagggcaaagtgcagaagatcctaatctggaagtggggtcagccaccatctcccacaccagtgcctcggcctccagatgctgatcccaacacgccctccccaaagcccttggaggggcggccagagcggcagttctttgtgaaatggcaaggcatgtcttactggcactgctcctgggtttctgaactgcagctggagctgcactgctcaggtgatgttccgaaactatcagcggaagaatgatatggatgagccaccttctggggactttggtggtgatgaagagaaaagcccgaaagcgaaagaacaaggaccctaaatttgcagagatggaggaacgcttctatcgctatgggataaaacccgagtgggatgatgatccaccgaatcctcaaccacagtgtggacaagaagggccacgtccactacttgatcaagtggcgggacttaccttacgatcaggcttcttgggagagtgaggatgtggagatccaggattacgacctgttcaagcagagctattggaatcacagggagttaatgaggggtgaggaaggccgaccaggcaagaagctcaagaaggtgaagcttcggaagttggagaggcctccagaaacgccaacagttgatccaacagtgaagtatgagcgacagccagagtacctggatgctacaggtggaaccctgcacccctatcaaatggagggcctgaattggttgcgcttctcctgggctcagggcactgacaccatcttggctgatgagatgggccttgggaaaactgtacagacagcagtcttcctgtattccctttacaaggagggtcattccaaaggccccttcctagtgagcgcccctctttctaccatcatcaactgggagcgggagtttgaaatgtgggctccagacatgtatgtcgtaacctatgtgggtgacaaggacagccgtgccatcatccgagagaatgagttctcctttgaagacaatgccattcgtggtggcaagaaggcctcccgcatgaagaaagaggcatctgtgaaattccatgtgctgctgacatcctatgaattgatcaccattgacatggctattttgggctctattgattgggcctgcctcatcgtggatgaagcccatcggctgaagaacaatcagtctaagttcttccgggtattgaatggttactcactccagcacaagctgttgctgactgggacaccattacaaaacaatctggaagagttgtttcatctgctcaactttctcacccccgagaggttccacaatttggaaggttttttggaggagtttgctgacattgccaaggaggaccagataaaaaaactgcatgacatgctgggggccgcacatgttgcggcggctcaaagccgatgtgttcaagaacatgccctccaagacagaactaattgtgtcgtgtggagctgagccctatgacagaagaaatactacaagttacatcctccactcgaaatttttgaaggcactcaatggcccgaggtggtggcaaccaggtgtctctgctgaatgtggtgatggatcttaagaagtgctgcaaccatccatacctcttccctgtggctgcaatggaagctcctaagatgcctaatggcatgtatgatggcagtgccctaatcagagcatctgggaaattattgctgctgcagaaaatgctcaagaaccttaaggagggtgggcatcgtgtactcatcttttcccagatgaccaagatgctagacctgctagaggatttcttggaacatgaaggttataaatacgaacgcatcgatggtggaatcactgggaacatgcggcaagaggccattgaccgcttcaatgcaccgggtgctcagcagttctgcttcttgctttccactcgagctgggggccttggaatcaatctggccactgctgacacagttattatctatgactctgactggaacccccataatgacattcaggcctttagcagagctcaccggattgggcaaaataaaaaggtaatgatctaccggtttgtgacccgtgcgtcagtggaggagcgcatcacgcaggtggcaaagaagaaaatgatgctgacgcatctagtggtgcggcctgggctgggctccaagactggatctatgtccaaacaggagcttgatgatatcctcaaatttggcactgaggaactattcaaggatgaagccactgatggaggaggagacaacaaagagggagaagatagcagtgttatccactacgatgataaggccattgaacggctgctagaccgtaaccaggatgagactgaagacacagaattgcagggcatgaatgaatatttgagctcattcaaagtggcccagtatgtggtacgggaagaagaaatgggggaggaagaggaggtagaacgggaaatcattaaacaggaagaaagtgtggatcctgactactgggagaaattgctgcggcaccattatgagcagcagcaagaagatctagcccgaaatctgggcaaaggaaaaagaatccgtaaacaggtcaactacaatgatggctcccaggaggaccgagattggcaggacgaccagtccgacaaccagtccgattactcagtggcttcagaggaaggtgatgaagactttgatgaacgttcagaagctccccgtaggcccagtcgtaagggcctgcggaatgataaagataagccattgcctcctctgttggcccgtgttggtgggaatattgaagtacttggttttaatgctcgtcagcgaaaagcctttcttaatgcaattatgcgatatggtatgccacctcaggatgcttttactacccagtggcttgtaagagacctgcgaggcaaatcagagaaagagttcaaggcatatgtctctcttttcatgcggcatttatgtgagccgggggcagatggggctgagacctttgctgatggtgtcccccgagaaggcctgtctcgccagcatgtccttactagaattggtgttatgtctttgattcgcaagaaggttcaggagtttgaacatgttaatgggcgctggagcatgcctgaactggctgaggtggaggaaaacaagaagatgtcccagccagggtcaccctccccaaaaactcctacaccctccactccaggggacacgcagcccaacactcctgcacctgtcccacctgctgaagatgggataaaaatagaggaaaatagcctcaaagaagaagagagcatagaaggagaaaaggaggttaaatctacagcccctgagactgccattgagtgtacacaggcccctgcccctgcctcagaggatgaaaaggtcgttgttgaaccccctgagggagaggagaaagtggaaaaggcagaggtgaaggagagaacagaggaacctatggagacagagcccaaaggtgctgctgatgtagagaaggtggaggaaaagtcagcaatagatctgacccctattgtggtagaagacaaagaagagaagaaagaagaagaagagaaaaaagaggtgatgcttcagaatggagagacccccaaggacctgaatgatgagaaacagaagaaaaatattaaacaacgtttcatgtttaacattgcagatggtggttttactgagttgcactccctttggcagaatgaagagcgggcagccacagttaccaagaagacttatgagatctggcatcgacggcatgactactggctgctagccggcattataaaccatggctatgcccggtggcaagacatccagaatgacccacgctatgccatcctcaatgagcctttcaagggtgaaatgaaccgtggcaatttcttagagatcaagaataaatttctagctcgaaggtttaagctcttagaacaagctctggtgattgaggaacagctgcgccgggctgcttacttgaacatgtcagaagacccttctcacccttccatggccctcaacacccgctttgctgaggtggagtgtttggcggaaagtcatcagcacctgtccaaggagtcaatggcaggaaacaagccagccaatgcagtcctgcacaaaggtattctgaaacagctggaagaactgctgagtgacatgaaagctgatgtgactcgactcccagctaccattgcccgaattcccccagttgctgtgaggttacagatgtcagagcgtaacattctcagccgcctggcaaaccgggcacccgaacctaccccacagcaggtagcccagcagcagtgaagatgcagactgataccacctccaccgctgagcagtgaccttcctcactttctcttgtcccagcttctcccctgggggcctgagagaccctcaccttccttctgcccatcttccatgttgtaaaggaacagccccagtgcactgggggaggggagggagtgaggggcagtggtgcccttcctgcagaagagacatgcagcagtagcgctggcgccatctgcaggagctggcgggctggccttctggaccctggcttctccccactgtaacgcctgttacacacaaactgttgtgggttcctgccaggcttgaagaaaatgatctgaattttttcctccttttggttttattttgttggtttattttgtgttttcttttctcctttttggggggtattcagagtgggctgggcccctgggcgagacacagctacctctgttggcatctttttaataccaggaacccagcggctctagccactgagcggctaaatgaaataaagtggaaaaaaaaaaaaagggaaaaacccaaagccttaaaaacccccagcaaattttttgatgaaaattgaaaaaaaaagtttccttgtaaaaaaaaaa

SEQ ID NO: 60774 - DNA, 3349 bp, Homo sapiens
ttttttttttttcattttttaattttttattttttttagtcatttttaatgcatttttctctgtgcacaagagaaataactgatgaagtcaaaagacacactttcctttatacatagcagttaaaagtaatgcaaacatcacatgacactttcagtgaaagttacatttccaattacaaatcaaaatgcatattagggtctctttatgggagaagctgagaaggaagtcttaggtaaaaagcactttcctggcattactacactgatccttcaggctgcacaaagattaaggtcatatacagtcaatctgcaaatgttgacacaatgttacactgtaaattttctgtacaattaaatgtatacttagagataccaggataaacatttctactatattttaactgaacttgcctagccaacattttcactgagaagtttatcaaagatgctgtaagattctacaaaattgtgagacataactagctccagaaacatttcttgtattctttctcattttggttacacatattacactcagattctactgtaatatttttagatgtacagtgccaattgtgcttactgtactgtatacaaatatagcaaaaaagatcaatggtataaatcttacagcattttgctagcaaaaatacatgccaaagtcacaataagcaatatcgtaccacaaattagagagcttcaaataatttgcttctgtttttaatatcttcattctacattaaattactatcataggctaatgtttaaaaatgcaaataaattggacatctgtaggacaacacttgttcacccaactgtgaaggttgatacctgtttccaaaaatcacaataaatgcagaataaagagaagtgtttgcatgcaacacttttgagtgaaacagcattgattcccaccactcaaaacggctaaggaaggaaactaaaggaaataaggaaggaaggaaacaaagagggagggagtggggagacaagaggaagggaaggtaggaaaaataagcaaaggagaaagggagtgagggaagtaggagggagggactccatcttaaaatgcatcatattagacttacaactagacagatttaaaagaatcaaaatgaaagtaaagaacgattttgtgtgtgtgtttaaagatttaagagccattatcaaaaataagatacattttttttccaggtacagaaatgtgattacgatggctgggagcccagcagcctttcaatggctgcattgatgtcgcctcctgttgctattagggcctgcaagtttgcttcacggtttaagaaccccattgcgttgagctgttccagttgttgctgaaatctgacttctggattcggcagctgtggagcatttgctccagccagggcctgcaccatttgctgaatgaactgctggttgggtccagattctgatgtaggactcgtggtttcactaggtgcagcgctggacacagtaggccccgtggggccaccagagccggtggagccagggggggctgcagggccagtgggtcctatgggcccaatggggcctatgggggtaaaagggactatagggcctatggggcctatgggggtgactgggcctacagggcctatagcggttcccagcacccccacccccacacctggagtgaagctcggaatcaggccaggtgcttcagtggctaatgtctgtagcccctgctggatctgcattaaagcctgcattgctcttgggtttgacatggctgatagtgtgtctggattctgcatctgctgcaggaaggctgggagctgtggccgcatctgctcctgcagctgaggatttgcagtaaacagcgggctattcagcatcatctgtgcagccaaatctggattctggctcagcgactgcatcatgcttctcatgtagggcgccgacagcatattctgaatcagctgggggttttcagttatctgttgcagcaggctctgcatgcctggggtactaaagatgctggcgacataattagcggcagcaacggtgttcccagtagcattgctggaactattgccagacccactaccagtgcttgtggtcgtgctggtagttgcagaactctgggtagctggcggtggtgcccatggattgggtagtggatcgcaattttctgtgcgggaaggctgcgtaccttccccagaggaggaactactccccacggaggcaaatggattacccccaaactgctcttgtgcggcattcagcatcggctcttgaatgtcagtgtacatgcgccgtaaagcattatagccacctgggatgctttctagattgctaagagccaggtcttgatttctcatcatctcttgcatcatggctggattcctggcaatttcgagtgtctgcctcattatgtctgggttgttgagcaggtgactgatttctgggtttctctgaatcaattgctgcatctgtggattagccataatgagctgcctcatcagatcgggattcgaaagcatgctctgaacaaagggattttccattatttggatcatcatctcagggctggccataagctgctgctgcatctggctctggagctcagagaagttggtcgagctcaagctcaggctgctaaggcctgcaagtcctcccaggctccccaacccaaacgggttgctatttgtggaaataggtgtggagttactcctgggagtcgacgccgaggtagtgttaagtccccgcggcattgctaggctgcgtggactggccctgaggtcggttctggcttttgatgacaaggtgaacagtcagcccatcatggatgccatgctggatcaaggtatcctgatcttttaagaatttttccggcaaaaatcagcactagctgatcggtttgggatttgaagcgtttcgaaatcgcttgacttaaactgctgaaccgagactgttctcgggcaccgcgaactcctctttctctttgggagtcttcaccgtgactttgatgattttaggctcagccggggcagcagccgagccttgggccgcagcaggaccgcgggaggggcgcggggggccgctgatctcgccattctcagccatggcggccgcggtgacgcaggcgggcagggaaggcgcgggcgggcgaaagagagagcgcgagggaaggaggaaggaaggaggcaccgccgcagcgggctgggccgggtcaggcggggagcgcggagcacggtacctctgtgatgaagactgcggttccctggtcctccggtggagaaaggcctgggcgtaggccgctggctgaggtctccgcgctccggtctctgggcctcctccgccgccgccttgtgatccgaccgcgcgc

SEQ ID NO: 60775 - DNA, 1243 bp, Homo sapiens
gacaatgatttcttgcggaacacagtgcacaggcatgagccaccagtcacagcagagcccattcgcctgctagctgagaacgaagatgtggtggttgtagacaagccttcctccattcccgttcacccctgtggccgcttccgacacaacacagttatcttcatcctaggcaaggagcaccaactcaaggagctacaccccttgcatcggcttgaccgccttacctcaggggtgcttatgtttgccaagacagctgcagtctctgagagaattcacgagcaggttcgggaccggcagctggagaaggagtacgtgtgccgggtggaaggggagttccccactgaggaagtgacctgtaaagaacccatcttagtggtgtcttacaaagtaggggtgtgccgtgtagatccccggggcaagccctgtgagacagtgttccagaggctaagctacaatggccagtccagtgtggtacggtgccggccactcacaggccgcacacaccagattcgagtccaccttcagttcttgggccatcccattctcaacgaccccatctacaactcagttgcctggggtccttctcgaggccggggcggctacattcccaagacaaacgaggagttgctacgggacctggtagcagagcaccaggccaaacagagcctggatgtgctagatctctgtgagggtgacctgtccccaggactcacagactctacggccccctcctcagagttgggcaaggacgacctggaagagttggctgcagctgcccagaagatggaggaagtagctgaggcagcccctcaggagttggacacaatagccttggcatcagagaaggcagttgaaacagatgtcatgaatcaagagacagacccactctgtgcagagtgccggctggtgcgacaggatcccttgccccaagaccttgtgatgttcctacatgccctacgctataaagggccaggctttgagtacttttcaccaatgcctgcctgggcacaggatgactggcaaaaggactgagggtgtggccaatggagggattgcttcttgggttgtgacaaggatgggctatagggcaagggctgaccccatgggctagtacttggggtttctataggaatgaggacgggcttctaaagagacctgctcatacttgctacctccttccagtgggaatttggagactttttggtttgtaaatatatccctttttctaacatcaaaaaaaaaa

SEQ ID NO: 60776 - DNA, 5890 bp, Homo sapiens
ggcacgagcttggacaggtagagtacgtgtttacagataaaactggtacactgacagaaaatgagatgcagtttcgggaatgttcaattaatggcatgaaataccaagaaattaatggtagacttgtacccgaaggaccaacaccagactcttcagaaggaaacttatcttatcttagtagtttatcccatcttaacaacttatcccatcttacaaccagttcctctttcagaaccagtcctgaaaatgaaactgaactaattaaagaacatgatctcttctttaaagcagtcagtctctgtcacactgtacagattaacaatgttcaaactgactgcactggtgatggtccctggcaatccaacctggcaccatcgcagttggagtactatgcatcttcaccagatgaaaaggctctagtagaagctgctgcaaggattggtattgtgtttattggcaattctgaagaaactatggaggttaaaactcttggaaaactggaacggtacaaactgcttcatattctggaatttgattcagatcgtaggagaatgagtgtaattgttcaggcaccttcaggtgagaagttattatttgctaaaggagctgagtcatcaattctccctaaatgtataggtggagaaatagaaaaaaccagaattcatgtagatgaatttgctttgaaagggctaagaactctgtgtatagcatatagaaaatttacatcaaaagagtatgaggaaatagataaacgcatatttgaagccaggactgccttgcagcagcggagaagagaaattggcagctgttttccagttcatagagaaagacctgatattacttggagccacagcagtagaagacagactacaagataaagttcgagaaactattgaagcattgagaatggctggtatcaaagtatgggtacttactggggataaacatgaaacagctgttagtgtgagtttatcatgtggccattttcatagaaccatgaacatccttgaacttataaaccagaaatcagacagcgagtgtgctgaacaattgaggcagcttgccagaagaattacagaggatcatgtgattcagcatgggctggtagtggatgggaccagcctatctcttgcactcagggagcatgaaaaactatttatggaagtttgcagaaattgttcagctgtattatgctgtcgtatggctccactgcagaaagcaaaagtaataagactaataaaaatatcacctgagaaacctataacattggctgttggtgatggtgctaatgacgtaagcatgatacaagaagcccatgttggcataggaatcatgggtaaagaaggaagacaggctgcaagaaacagtgactatgcaatagccagatttaagttcctctccaaattgctttttgttcatggtcatttttattatattagaatagctacccttgtacagtattttttttataagaatgtgtgctttatcacaccccagtttttatatcagttctactgtttgttttctcagcaaacattgtatgacagcgtgtacctgactttatacaaatatttgttttacttccctacctattctgatatatagtcttttggaacagcatgtagaccctcatgtgttacaaaataagcccaccctttatcgagacattagtaaaaaccgcctcttaagtattaaaacatttctttattggaccatcctgggcttcagtcatgcctttattttcttttttggatcctatttactaatagggaaagatacatctctgcttggaaatggccagatgttcggaaactggacatttggcactttggtcttcacagtcatggttattacagtcacagtaaagatggctctggaaactcatttttggacttggatcaaccatctcgttacctggggatctattatattttattttgtattttccttgttttatggagggattctctggccatttttgggctcccagaatatgtattttgtgtttattcagctcctgtcaagtggttctgcttggtttgccataatcctcatggttgttacatgtctatttcttgatatcataaagaaggtctttgaccgacacctccaccctacaagtactgaaaaggcacagcttactgaaacaaatgcaggtatcaagtgcttggactccatgtgctgtttcccggaaggagaagcagcgtgtgcatctgttggaagaatgctggaacgagttataggaagatgtagtccaacccacatcagcagatcatggagtgcatcggatcctttctataccaacgacaggagcatcttgactctctccacaatggactcatctacttgttaaaggggcagtagtactttgtgggagccagttcacctcctttcctaaaattcagtgtgatcaccctgttaatggccacactagctctgaaattaatttccaaaatctttgtagtagttcatacccactcagagttataatggcaaacaaacagaaagcattagtacaagcccctcccaacacccttaatttgaatctgaacatgttaaaatttgagaataaagagacatttttcatctctttgtctggtttgtcccttgtgcttatgggactcctaatggcatttcagtctgttgctgaggccattatattttaatataaatgtagaaaaaagagagaaatcttagtaaagagtattttttagtattagcttgattattgactcttctatttaaatctgcttctgtaaattatgctgaaagtttgccttgagaactctatttttttattagagttatatttaaagcttttcatgggaaaagttaatgtgaatactgaggaattttggtccctcagtgacctgtgttgttaattcattaatgcattctgagttcacagagcaaattaggagaatcatttccaaccattatttactgcagtatggggagtaaatttataccaattcctctaactgtactgtaacacagcctgtaaagttagccatataaatgcaagggtatatcatatatacaaatcaggaatcaggtccgttcaccgaacttcaaattgatgtttactaatatttttgtgacagagtataaagaccctatagtgggtaaattagatactattagcatattattaatttaatgtctttatcattggatcttttgcatgctttaatctggttaacatatttaaatttgctttttttctctttacctgaaggctctgtgtatagtatttcatgacatcgttgtacagtttaactatatcaataaaaagtttggacagtatttaaatattgcaaatatgtttaattatacaaatcagaatagtatgggtaattaaatgaatacaaaaagaagagcctctttctgcagccgacttagacatgctcttccctttctataagctagattttagaataaagggtttcagttaataatcttattttcaggttatgtcatctaacttatagcaaactaccacaatacagtgagttctgccagtgtcccagtacaaggcatatttcaggtgtggctgtggaatgtaaaaatgctcaacttgtatcaggtaatgttagcaataaattaaatgctaagaatgattaatcgggtacatgttactgtaattaactcattgcacttcaaaacctaacttccatcctgaatttatcaagtagttcagtattgtcatttgtttttgttttattgaaaagtaatgttgtcttaagatttagaagtgattattagcttgagaactattacccagctctaagcaaataatgattgtatacatattaagataatggttaaatgcggttttaccaagttttcccttgaaaatgtaattcctttatggagatttattgtgcagccctaagcttccttcccatttcatgaatataaggcttctagaattggactggcaggggaaagaatggtagagacagaaattaagactttatccttgtttgcttgtaaactattattttcttgctaatgtaacatttgtctgttccagtgatgtaaggatattaagttattaagctaaatattaattttcaaaaatagtccttctttaacttagatatttcatagctggatttaggaagatctgttattctggaagtactaaaaagaataatacaacgtacaatgtctgcattcactaattcatgttccagaagaggaaataatgaagatatactcagtagagtactaggtgggaggatatggaaatttgctcataaaatctcttataaaacgtgcatataacaaaatgacacccagtaggcctgcattacatttacatgaccgtgtttatttgccatcaaataaactgagtactgacaccagacaaagactccaaagtcataaaatagcctatgaccaactgcagcaagacaggaggtcagctcgcctataatggtgcttaaagtgtgattgatgtaattttctgtactcaccatttgaagttagttaaggagaactttatttttttaaaaaaagtaaatggcaaccactagtgtgctcatcctgaactgttactccaaatccactccgtttttaaagcaaaattatcttgtgattttaagaaaagagttttctatttatttaagaaagtaacaatgcagtctgcaagctttcagtagttttctagtgctatattcatcctgtaaaactcttactacgtaaccagtaatcacaaggaaagtgtcccctttgcatatttctttaaaattctttctttggaaagtatgatgttgataattaacttacccttatctgccaaaaccagagcaaaatgctaaatacgttattgctaatcagtggtctcaaatcgatttgcctccctttgcctcgtctgagggctgtaagcctgaagatagtggcaagcaccaagtcagtttccaaaattgcccctcagctgctttaagtgactcagcaccctgcctcagcttcagcaggcgtaggctcaccctgggcggagcaaagtatgggccagggagaactacagctacgaagacctgctgtcgagttgagaaaaggggagaatttatggtctgaattttctaactgtcctctttcttgggtctaaagctcataatacacaaaggcttccagacctgagccacacccaggccctatcctgaacaggagactaaacagaggcaaatcaaccctaggaaatacttgcattctgccctacggttagtaccaggactgaggtcatttctactggaaaagattgtgagattgaacttatctgatcgcttgagactcctaataggcaggagtcaaggccactagaaaattgacagttaagagccaaaagtttttaaaatatgctactctgaaaaatctcgtgaaggctgtaggaaaagggagaatcttccatgttggtgtttttcctgtaaagatcagtttggggtatgatataagcaggtattaataaaaataacacaccaaagagttacgtaaaacatgttttattaattttggtccccacgtacagacattttatttctattttgaaatgagttatctattttcataaaagtaaaacactattaaagtgctgttttatgtgaaataacttgaatgttgttcctataaaaaatagatcataactcatgatatgtttgtaatcatggtaatttagatttttatgaggaatgagtatctggaaatattgtagcaatacttggtttaaaattttggacctgagacactgtggctgtctaatgtaatcctttaaaaattctctgcattgtcagtaaatgtagtatattattgtacagctactcataattttttaaagtttatgaagttatatttatcaaataaaaactttcctattttattaaaaaaaaaa

SEQ ID NO: 60777 - DNA, 2317 bp, Homo sapiens
cccgggtcgacgatttcgtgaggcgagggtggctgccgcctgaactttttagatctggggcggcgcggaatccgcatccgccgggagtgtgatgaagctaccctgcctcgctgctccgcttgccgccagctgacaccgcctgcacccagcccgcccgggaggggagacgccgcggggccgtgaccttggcggaggagggcacactgataattcttgtatcttgagtgtggaccaagttttgggtgacatggcccaggggaataattatgggcagaccagcaacggggtggccgatgaatcacccaacatgctggtgtacagaaagatggaagacgtcatagcacggatgcaagatgaaaaaaatggaattcctattcgtacggtcaaaagctttctttccaagatacctagcgtcttctctggttcagacattgttcaatggttgataaagaacttaactatagaagatccagtggaggcgctccatttgggaacattaatggctgcccacggctacttctttccaatctcagatcatgtcctcacactcaaggatgatggcaccttttaccggtttcaaaccccctatttttggccatcaaattgttgggagccggaaaacacagattatgccgtttacctctgcaagagaacaatgcaaaacaaggcacgactggagctcgcagactatgaggctgagagcctggccaggctgcagagagcatttgcccggaagtgggagttcattttcatgcaagcagaagcacaagcaaaagtggacaagaagagagacaagattgaaaggaagatccttgacagccaagagagagcgttctgggacgtgcacaggcccgtgcctggatgtgtaaatacaactgaagtggacattaagaagtcatccagaatgagaaacccccacaaaacacggaagtctgtctatggtttacaaaatgatattagaagtcacagtcctacccacacacccacaccagaaactaaacctccaacagaagatgagttacaacaacagataaaatattggcaaatacagttagatagacatcggttaaaaatgtcaaaagtcgctgacagtctactaagttacacggaacagtatttagaatacgacccgtttcttttgccacctgacccttctaacccatggctgtccgatgacaccactttctgggaacttgaggcaagcaaagaaccgagccagcagagggtaaaacgatggggttttggcatggacgaggcattgaaagacccagttgggagagaacagttccttaaatttctagagtcagaattcagctcggaaaatttaagattctggctggcagtggaggacctgaaaaagaggcctattaaagaagtaccctcaagagttcaggaaatatggcaagagtttctggctcccggagcccccagtgctattaacttggattccaagagttatgacaaaaccacacagaacgtgaaggaacctggacgatacacatttgaagatgctcaggagcacatttacaaactgatgaaaagtgattcatacccacgttttataagatccagtgcctatcaggagcttctacaggcaaagaaaagaggggaaatctctcacgtccaagaggttaacaagccttgctcagtcttactaaacggatcatcttgtagcatgaatgcagactggagtcactgcacacactttgtagctcaatgttgtgacctggagcagaggacattagaacaagatgttgcatgagcaaaggacctaaattgttatttttgtgtgtacattccatctccaatggactcttccgtctcaatgcctccattccaaactgttgtctgctttctttctccttctactatgctggatctgtgtctcttcctttttaacaagttcaagtgaagtaaaaccttttctttttttccttctttctctctctctctctctcaaagcttcagttagacacacagttcactgaaaattcagtcagtcaaaaactggaagaactgtaaaagaaaaaagtatatatcaataagtatacatgtggcttcacatttattaaacaataaattccgcacagaaagtttcatttcaccaatgtgtcacagtcagaaacaaactcatgtcttcggtctgttgtctgtacattctccgttaatgtttctcgcatttatttttataccatatttaaagaagaaacaccttttactccaaatgtattaaagttgatcccttctctgtaaatttgtgtatgtttatattgttgttttatctttcattaaaagatgtcagaatctcaaaaaaaaa

SEQ ID NO: 60778 - DNA, 6941 bp, Homo sapiens
cgacctgacgaagttagtatcctctagagcggccgcctgcagctcagcttctccatcttctgcgctgagcctgcgacgctcctggccgacacgccggttaacgacggcgcctggcacagcgtgcgcatccgccgccagttccgcaacaccacgctcttcatcgaccaggtggaggccaagtgggtggaggtcaagtccaagcgcagggacatgacggtgttcagcggccttttcgtcggggggctgcccccggaactgcgcgccgcggcgctcaagctcaccctggcctcggtgagggagcgggagcccttcaaggggtggattcgtgacgtgagggtcaactcctcgcaggtcctgcccgtggacagcggcgaggtgaagctggacgatgagccgcccaacagcggcgggggaaggcccgtgcgaggcgggcgaggagggcgagggcggggtgtgcctcaacggaggtgtgtgctccgtggtggacgaccaggccgtgtgcgactgctcgcgaaccggcttccgcggcaaggactgcagccaagaagacaacaatgtggaaggtctggcgcacctgatgatgggcgaccaaggaaaagaagaatatattgccacgttcaaaggatctgaatacttctgctacgacttgtctcaaaaccccattcaaagcagcagtgatgaaataactctgtcatttaaaacccttcagaggaatggactgatgcttcacactgggaaatcggctgattatgtcaatcttgccctgaaaaatggagctgtctctctggtcattaatttgggatcaggggcctttgaagcactagtggagcctgtgaatggaaagtttaatgataatgcctggcatgatgtgaaagtcaccaggaatctgcgtcagcactcaggcattggacacgctatggtgacaatatcagtggatgggattcttaccacaacgggctacacgcaagaagattataccatgctggggtctgatgactttttctatgttggaggcagtcccagcacagccgaccttccagggtcaccagtcagtaacaactttatgggctgtctcaaagaggttgtatataaaaataatgatgtgaggctggaattatctcgacttgccaagcaaggagatcctaagatgaagatccatggagtggtggcatttaaatgtgagaatgttgcaactttagacccaatcacctttgaaaccccagagtctttcatctctttgcctaaatggaatgcaaagaaaactggctccatatcatttgatttccgtacaacagagccaaatggcctcatcttatttagccatggcaagccaagacatcagaaagatgccaagcacccacagatgataaaggtggacttctttgctattgagatgctagatggccacctctacctcctcctggacatggggtcaggtactataaaaataaaagccctgttgaagaaagtgaatgatggagaatggtatcatgtggacttccagagagacggacggtcaggtaccatttctgtcaacacgttgcgtactccctacactgctcctggtgagagtgagattctggacctggatgatgagttgtacctgggggggctgccagaaaataaagctggccttgtcttccccaccgaggtgtggactgctctgctcaactatggctacgtgggctgcatcagggatttgttcatcgatggccaaagcaaagatatccggcaaatggctgaagttcaaagtactgctggagtgaagccttcctgctcaaaggaaacagcaaaaccgtgccttagcaacccttgcaaaaacaatggcatgtgcagggatgggtggaacagatatgtctgtgattgttccggaacaggctatcttggcaggtcctgtgagagagaggcaacggttttgagctatgatgggagcatgtttatgaaaattcagctccccgtagtcatgcatacggaggctgaggatgtttccttacggttccgatcccagcgtgcatatggcattctgatggcaaccacttctagagactctgctgacaccctccgcctggagctagacgcaggacgtgtgaaactgacggtcaatctagattgtatcaggattaactgtaattccagcaaaggtcccgagactctttttgctggctataacctcaatgataacgagtggcacacagtgcgtgtagttcggcgtggaaaaagtttaaagttaacagtggatgaccaacaggccatgacaggtcaaatggcaggtgatcatactaggctggagttccataacatagagactggcatcatcacagaacgacggtatctttcttctgtcccctccaacttcattggacacctgcagagcttgacatttaatggaatggcatacattgacctgtgtaaaaatggcgacatagattactgtgagcttaatgccagatttggcttcaggaacatcatagcagatcctgtcaccttcaagaccaaatcgagctatgttgccttagctaccttgcaagcctacacttctatgcatctttttttccagttcaagacaacatccctagatggattaattctatataacagtggggatggaaatgactttattgtggttgaattagttaaagggtacttacattacgtgtttgatttgggaaatggtgctaacctcatcaaaggaagctcaaataaacctctcaatgacaatcagtggcacaacgtgatgatatcaagggacaccagcaacctccacactgtaaagattgacacaaaaatcacaacgcaaatcaccgccggagccaggaacttagacctcaagagtgacttatatataggaggagtagctaaagaaacatacaaatccttaccaaaacttgtacatgccaaagaaggctttcaaggctgcctggcatcagttgatttaaatgggacggcttccgggacctcatctccgatggttctttttcttgcaacgggacagattcgaggagagggatgtggaaggggcccagcacaacctggccaagaggactcatgttccaatcaaggtgtgtgcttgcaacaatgggatggcttcagctgtgactgtagtatgacttccttcagtggaccactctgcaatgaccctgggacgacatatatctttagcaaaggtggtggacaaatcacgtataagtggcctcctaatgaccgacccagtacgcgagcagacagactggccataggttttagcactgttcagaaagaagccgtattggtgcgagtggacagttcttcaggcttgggtgactacctagaactgcatatacaccagggaaaaattggagttaagtttaatgttgggacagatgacatcgccattgaagaatccaatgcaatcattaatgatgggaaataccatgtagttcgtttcacgaggagtggtggcaatgccacgttgcaggtggacagctggccagtgatcgagcgctaccctgcagggcgtcagctcacaatcttcaatagccaagcaaccataataattggcgggaaagagcagggccagcccttccagggccagctctctgggctgtactacaatggcttgaaagttctgaatatggcagccgaaaacgatgccaacatcgccatagtgggaaatgtgagactggttggtgaagtgccttcctctatgacaacttgagtcaacagcccctgccatgcaatcagagatgtccacatcaattatggagactaccacgaccctggctactagcacagccagaagaggaaagcccccgacaaaagaacccattagccagaccacagatgacatccttgtggcctcagcagagtgtcccagcgatgatgaggacattgacccctgtgagccgagctcaggtgggttagccaacccaacccgagccaggcggcagagagccgtatccaggctcagcagaagtgatccgggagtccagcagcaccacgggtatggtcgttgggatagtagccgctgccgccctgtgcatccttatcctcctctatgccatgtacaagtacagaaaccgggatgaaggctcatacccatgtggacgagagtccgaaactaccatccagtaaccccagccacagtcccaatggggctgttgtaaaggagaaacaaccccagcagtgcgaaaagccccaacaaaaataagaaaaacaaggataaagagtattatgtctgatcccaagatcttaaatggacacttgtatagaaatagtcttcattttatctgagacataatataaacttatttactttcctttttatgaagcacatacaaaagaagacagggaatgcaatcaggaaggaaagactttttaaaaaataaaaacaagtatctcatgctccttgtttctcaaaaaagaaaaacaaaaaacaaaaaacagggggccaataaattccctaacatccacagtgttttcatttactctgcttgtctttatgttgctgggacatttctaaaagacagtgatgaccgcacgcattcataaagcaaaggagtagtacagcatcaaggcacgacacaaaaaccaacacaaaacataacacaaaaaagaagctacctatgatcctggatttagccaaaagtgctagcgctttcctgagaagtcagttcaatttgcagagaaagactgtccttttgaagtgactcaacctgcaaaccctttaaaagtttgccgcctggtgcaactggagcagtggttggaacttgcatttgaaacaaagtgctggcttttttgaagacttgtgtaggaacacattcaaaaagcccctttctggttgtgagagaggaaaaaaaagtatggaggccttattttcaaaaatgtgaaatataaggcacgttttcacacaaaatttcaaaacaaaaacaagagggcatagatgcaatcattgggaaattttcatgcacgcttattatgttattacatatgtttatataaaatccatctctgtgggctttctggactgtgataagtgacgttttatagcctgttgtatagaaaatgcaaaatatatctctgctcttcagccatttttggtaaattcaatgttataagtgttgctaagtatagggagttttatgacatcagagcaacaattatttcagttgggtttttctttttttttgccaccattataaattgccacaattacttacttttattttttaaagaaattacagtgtagtgtttattctaaggaagatatgtatgaatgtatatacaaagactcagctacttcttttcttatatgtacagccttcattctgttgcaattaagttttagtacttgtatgaaaggtgtgaattagaaagtcacatatatacatatgtatcttataatcttttctccctgaaatactcacattcccacatacattcactattttcacacacacacacacacacacacacacacacacacacgaatccacagcaatccatcagatatgctggaagatccaaacgtgcatacagtagcaaatatttattgacaaattgaaaagcaggaaggaagagggttgtgcccaaggtattgatgacaaatggggtgatttgcttcattgagatcttgctcccaggtaaccttaagaagattttagtccctaaagaaatgaacctttccttatcaaatagaatatcactgatatactgctgcatgaataagaaccattatgtgggcaggttatggaagcaaaattggttaatctacaccttaactctggctgctgcaattgaaaactttctttctaataaaataatatatatatctctgaatctgatgtgcatgatgaacatttctggaaagtaaacactttctctcgactaagaaagtatttttcagtaatttttgattctgtattactacccacttaaaaaatcattctctgttaattattgactatgttttaacttttctggttttacatatatatcattaaatatagttttagtttaacacattaagtagtggaaaagtatagattatacacttgttttgcatattattcaatgatgttcacagcaataaattactaatatgagaaggtagtgcaaaaaatgcattattacattgcaagttgatgtttcaggaaaaattggttgcattacttgaataccttctaaaagaacgataaaaaattttgtagaagagaagaatatctttccaattagctttaatcagcaaaggcaaaaaatgcaaaacatcttttgtgatactttagttgatgaaaaaaaagccaagaagtggcctggatttcagacatacagcaccttagaaatatgtataattcatagcaaatcaccactatctatggttgccaagtaattgttgtgtacaaagaaatttagtggctttttatgacccagaaagtagaaggtataaaatgaaaatttaatatccattgcttcttttctagattttcattttttttaatttgccacattaaataattcacgagtcttttcttttcccccgtctcattcagtcttactcagggaaagccagttaaataagaagggaagtgtaaaactactaatttacagcttgaagggtttttttttttaaaatggcttttctattttatctattaagcttgaaccagtttccatctggaaagattctaaaatataatagaaaataaattgaataatggtaattttaagcagtatatctatgaaatgtgttgttggggattgatttcaatgttcctccccagcgtaaattttaaagttacatgcaatgattgatatagtttattatcagcaaaattatttctaatattattggcttacacaaactctagcaaaaattattttttcctcaatggaaaaagaaaagagaggaacagagttagaaagagaaaatgacttgaatcccaagtatcttcataccaaacatatca

SEQ ID NO: 60779 - DNA, 4553 bp, Homo sapiens
ccggccgcgtcgactttttttttttgcattaagcacaatacagcaatttatttagatgcttaaaatgaatacaaagggaaaataaagatcacaaaattatacatactacaacagtgtgtcatatattagatggtataaatgaatccaccatgatggtgttgaactaaagataaaactaaatatccaaaatgcagcactcattggtttgctgcttcaacacaacacacttttatacagatctaaaaggtgtcaaaattagtagctgcaaagtcaattcttgcatgtgattttagcttaaaagatttcagaaaacagatctgaaataccagtttttgtttttgacagctgtaatgtcaaggatattcagaacaagaaaaatcctataatacaagagagtccagatatatatcttacgtggctggcctctgttgcaagattgtacaaggttatgtgcaaaaactaagtctgtccaaaaagtccatactagcgcagttttgagcttttgctaggtaaactagatagagcgtttattacacagcaagggcaacactaaaaaaagaaatctatgatgggcacacagtaacaggatcatgagcatcacttgaataggtctaaaagactgtacaaatatacatttcaactattcagaatgaatacatgaaaaaaaatcgcttttcccaaagtctactatacacattagactggtagcttgtatgttggccctacactaccatgtgaattagtttaacacttctcaaagacatctgaccaatcatttcacagagggaaagaaatgttgaaaaggcagataaaataaacctctgcttttcctcgtgtgtattcatgagtcaccagcttattggtttttcacatttagttaccgtgtctgtcagagaaggttctgaagcaagaacagcctgtcctgtcatagacttagaaataaccactggaactgcagcggccacatgccccacagtccaaccagtactcacaaggcagtaccagtgagaagacagctttgcagtcacactggagatcagagttccaggctgcagcatgtcaccaacgccagggaacctggcacttaggcctgttggctgctcagtttaactccggctaagctgccatgcatgggctcagctactccatcagtcatgttgtcaaactgttccccatcctcactgtcaattgtgctattctgccactcaatctgggggttagataagcgctcatcattctcagatgcattcttccactgtgactggtccttagaccaaaacccttcaacttttccataggaactattcttccatttcaactgctctctgtcaccttgcatggtagccttttttttggcagctggcttactgctccttgcatcttcgctttgggaagactcgtcagaccaggttcctggtttcatttcgcaggtattgtcctcaaagtctgacacttgttgggatccaggcccactctcagatggagaagcaccgtctttccactcaacaacatcgtcttggtcaacctcactatcagatgcattgtgcattagtttggttggttcctcagtcaaatgaatagtttcgtattttgaaccatcctctttttggtctagcttctcctcagattctgaagcatcctcaggaattaccttcagtacatgttcctctgggttatcgttagagattttaggttcaacttcaaaaacagggtcaaaagggctaccactttcattggattcttcttccaaattttcaaaactgtctgaggaactgtcatcttccttcccaaggttgagctttttgtcagcagtcttactagcattgactctggaatccttctcatcatgattttcaaatagcccctcagcatcaaaatccatctcatgcttgactttatttaattctttcatgttaaaccccagcaacacgccaggcttgtacttttcacaatcacggacacacttcttccttttgttactaaaatgggaagcgatgtcactctttccaatacccataaactggctgctagcttctcaatttctctcctggtgggatagggctgtttgggtgaaatactttgttagaaagcttttcctggcttcataggaatcatcttcagtgacccttggggtctaaagctaaaacaacaggctcttcaggcttctcttcaaagaagctgggtgaatcactatcatcatctaactttcgttttttcagtaagggaaattccatttgctcgtaagtgcgcttcacaggtgccagacttggagactgattaagccgagagggtgcatttgtcttatcctggccattttgggtctttccaacgcccctgcagtgaactagatgcagagtgatagttgaggcggtcatgttgctggtatacacaccaaggcaatggatacatttgtaggtgagctttttctcaactggatgaaccgtctgaataacttggtgcctctctcgtaagtgatgtgcaagtgcatcagatatgggtccttttaggattgaaaagcaaagaggacaaagggttttcccaacatcttttttatagggcactgcagcttgaggtgaactttttacagggatatctgccttttcctgaacctttggctgtggctttggaggaactggaggattattttgggcatggtaagcaacagattcagctggggcatccctcagattgtatgtagttaccaggagatggatgttagtgtgactaccctgctgcaatgtcaaatcaaaactcaaagtagaatctgttttaggtcccatctcttcatcaatgtgaaccatccgcatgtgtgcggccatcttttccacatcattgaaagttgaacggcaatatggacaagacagaccatgaattaacatatggttgagcagagtatctgtgggtaaatagcgattacagtagaggcatttgctagtaaaattgtgtattttcataatgtagttggctactgctgggactttctcagctttatgttctttttcgaagtgcacactatagacattttcaggaaaaagctcattacagattgtacatattttccacttttgagttgaggaagtgttacctgggggagggcctgtggcagctgcagcaggtttggaactggactgacctaacactctggatgcctgtgactgagagagggaaggagactttaactggcccgatgagagagaagaggcattagcagactgcagggagtatcttgctggtgcctgggacctctgctctgacccaagcccataagaccttccgtttccacttggaagtaactgctttacagactgagattgttgaggaatggaaactggtgcgttgccacctagacccagtctcattgactgaccaacactgtaaccctggcctacagatttgactccatagttgttctgctgcagatgaacactggacatcatgttgactcctgtagaatttaagttaggctttggtattgagagtcgattcaccatctgctgtgatggtaaagaccggacatttccagaagcaagggaaccgatccttggtgggagtcccatgctcttcttgtcttgaggtttgggagcaattagcatcaagggtttggatcggggaaccactacatttgtgtgcccaatcatggcagtgacctgatagcctatacgttcatggtcttcgatgacatgctgtaccaaagcttcataggactttggcatgaaaaggcatcgcttgcagtgaatactactctcttctcgggcattcgagcctaaggggactgccccattgagtgatttttctcctgcctttgctatgtaaggtgctgccacatgctgaaaatgttccctgtaaatgtgcttcctaactatttcataaagaggatctcggtaagtgcacttcttacagtaataaacagcttgctctacactgtcagcctgcttaggtttaaggccatcatttttgtttttatctttgaaagtgctgaggctgctacttggtgcgctggcgttcggagcatgaaatattttaatgtgtgtttccaaagtctttttgtctgcattgaaggtacagtaggggcaattaaggagaatcctattttcaaagtcttcactatggacattgcggaaatgacttttgtaggcagagaagaattttgaggaaaatggacaagcgctgcagcagaaaggttttgtccgatagtcctggtttttcgtaagtgatgggtcccacagtcctacatcctcccatgtagtgtttttcaaataaaagtcattaggttcaaattgtttaaaatcttctatatgttctttacagtattccaacccaatgtcactaagtatttttttcacagttttccgggcttttcttaaactgccaagattgttgacaggaagttggaacatagtttcttgactcggcctcgaggcgcgcgcggggccggcgtgctcgggggccggacagcggcggcggcggcgggcggatggcggcggcacggcggtggcgccagcggggagggcgcgcccggggcctcgtcgcgctccggctcggcggactccggc

SEQ ID NO: 60780 - DNA, 7564 bp, Homo sapiens
ataatgccctgcgggagctcgagactgttaaggggatgttggacacatcctaatgaacctgttagtgacctctcttactttgactgcattgagagtgtgatggaaaactccaaggttctgggtgaatcgatggcagggatttcacagaatgccaagaccggagacctccctgcctttggggaatgtgtggggattgcatccaaggctctctgtgggctgacagaggctgcagcccaggctgcatacttggttggcatctttgatccaaacagccaggcaggccaccagggcctggtggaccccatccagtttgccagggctaaccaggccatccagatggcatgccagaacttggtggaccctggcagcagcccatcacaggtcctgtcagccgccacaattgttgccaagcacacgtcagccttgtgtaatgcctgccgcatcgcctcatccaagacggccaacccagtagccaagaggcacttcgtccagtcggccaaggaagtcgccaacagcactgccaacctggtgaagaccatcaaggccctggatggggatttctctgaagacaaccgcaataagtgtcgcatcgccaccgcacccttgattgaagctgtggagaacctgacagcgttcgcctcaaaccctgagtttgtcagcattcctgcccagatcagctccgagggttcccaggcacaggaaccaatcctggtctcagccaagcccatgctggagagttcatcgtacctcattcgcactgcacgctctctggccatcaaccccaaagacccacccacctggtctgtactggctggacattcccatacagtgtccgactccatcaagagtctcatcacttctatcagggacaaggcccctggacagagggagtgtgattactccatcgatggcatcaaccggtgcatccgggacatcgagcaggcctcgctggccgccgtcagccagagcctggccacgagggacgacatctctgtggaggccctgcaggagcagctgacttcggtggtccaggaaatcggacaccttatcgatcccatcgccacagcggctcggggagaagcagctcagctgggacataaggggacacaactggcaagctattttgagcccttgatcttagccgcagttggtgtggcctccaagattcttgatcatcagcagcagatgacggtgctggaccagaccaagactctcgcagagtctgccttgcagatgttgtatgcagccaaagaaggtggcggaaaccccaaggcacaacacacccatgacgccatcacagaggccgcccagttgatgaaggaagccgtggatgacatcatggtgacgctgaacgaagctgccagtgaagtggggctggttgggggcatggtggacgccattgcagaagccatgagcaagctggatgaaggcactcctccagaaccaaagggaacatttgtcgactatcagacgactgtggttaaatactccaaagccattgcggtgacagctcaggaaatgatgactaagtcggttactaacccggaggagttgggaggactggcttcacaaatgaccagtgactatgggcacctggctttccagggccagatggcagcagccacggcggaaccagaggagatcggattccagattcgcactcgtgtgcaggacctgggccacggctgtatcttcctggtgcagaaggcagggggccctccaggtctgccccacagacagctacaccaagagggagctgatcgaatgcgcccgtgccgtcacggaaaaggtctccttggtgctctcggctctccaggccgggaacaaaggaacccaggcatgcattacagccgccaccgctgtgtctgggatcattgccgacctggacaccaccattatgtttgcaacagcggggacgctgaatgcagagaacagtgagaccttcgcagaccacagggagaacattctcaagacggccaaggccttggtagaagacacgaaactacttgtgtcaggagctgcgtccactcctgacaagctggcccaggcggcccagtcctcagcagccaccatcacccagctcgcagaagtggtcaagctgggggcagccagcctgggctccgacgaccccgagacccaggtggttttgatcaatgccatcaaagatgtggccaaggccctttctgatctcatcagtgctaccaagggagctgccagcaagccagtggacgacccttccatgtaccagctcaagggggctgccaaggtgatggtgaccaatgtcacctcgctcctcaagactgtaaaggcagtggaggatgaggccacccggggcaccagggcgcttgaggccacaattgaatgcataaagcaggagcttacggtgttccagtcaaaagacgtacctgaaaagacatcatcacctgaagaatccataaggatgacgaaaggcatcaccatggcaacagccaaagccgtggcagctgggaactcatgtagacaggaggacgtgattgctactgccaacctgagccggaaagccgtgtcagatatgttgacggcttgcaagcaagcatccttccaccccgatgtcagtgacgaggtgagaaccagagccttgcgtttcgggacggagtgcacccttggctacttggacctcctggagcacgtcttggtgattcttcagaaaccaaccccagaactcaagcagcagctggccgctttctccaagcgagtcgccggcgctgtgacagagctcatccaggcggcggaagccatgaaaggaacagagtgggtggatccagaagacccaactgtcattgcagaaacagagttactgggggctgcagcatccatcgaagctgctgctaagaagttagagcaactgaagccaagagcaaaaccaaaacaagcggatgagaccctggactttgaggaacagatcttggaagctgctaaatccattgctgctgccacaagcgccctggtcaaatcggcctcagcagcccagagggagctggtggcccaaggaaaggtgggctccatccctgccaatgctgcagacgacggacagtggtcacaggggctgatttctgctgcccggatggtggcggctgcgaccagcagtctctgtgaggcggccaatgcctccgttcagggacacgccagcgaggagaagctcatctcatctgccaagcaggtcgccgcttccacggctcagctgctggtggcctgcaaggtgaaggccgaccaggattcagaggccatgaggcggctacaggcggcaggaaatgctgtgaaaagagcctcagacaatcttgtccgtgcagcccagaaggcagcatttggcaaagctgatgacgacgatgttgtagtgaaaaccaagtttgtggggggcattgctcagatcatcgccgcccaggaagaaatgctaaagaaagagcgagaactggaagaagcaaggaaaaaactggcccaaatccgccagcagcagtataagtttttacccaccgagctgagggaagatgagggctaaaggtgcgagcccagatggcgagccccaggggatggccctggctgaactggacagacagtgttcctgagaggctgggcacttagctggaaaccgcccacctccctcccgggtgagcctggagccctgcgtgcttgttctcacatctctgtcccgtcggcactggctgcatgatcgtgatgtcacacggtacaatgtcctacccacaactcctctgccgcctcccctcatgcctcaccgtgtctcaggagagaggggtgcacgtttcatggactgttaccaacaaagaaaagtcagtattatgttgttctcagacactttggcttttgttggtccttctcttaggcctgctcctggacctctttatgatattgtgatagggaaaaaaatcattgacgtcatagaatattcttcttcctctcaggagaagacggaagctggagttggacatggttcataaaagccagaaacacaaacccgtgtggactccgggagggtgactcaggtcctccttccatgtcttgagcactggctcacccagggggtgaaaaattcccgcccctgtttgcacgctttcttgcctccgtgtgtaagctccttgtacaacccagacccatcttgtattttgtggcccagaaaactgaacgattattttgttcctccgtagtccaaagggcagagttgcggaaggccgtcggggcttggtgagcaggggctgtaatacagtctgtggggctccttaccctgcagaggctgtttcagctcacacagagttcatccacacaaacccacggctcccagttgacagtcagtggaatgctcgtctccttagcgtccagggtggggattctgctggaataaagagcttcctcagtgactcatcctttaggtcccacgctggtttctgtgccttcagaatggtcacaagcccggattggaaaggatctgcttacaaacctgtcccctgtcctccaacccaaaacgccttttttttctgtcttaatatccagaaaatctaaatgcatcctaaaatcaattgtgaaccctttaacaaggatagtttttacttattatcacataagacataagatgttttcattttctggatgtcacacttccagaatttcatatttttcccctcttttctttccccttttcagagccctcccataggaagggaagggcttgaatttacccttaatctgcacctttagccaaggcagtgcatggaagatgaatggctcgtggggccagaatctaatgccagggagcaggagtgtttgaaagaattcatagtggggaaggtaaaagttaatggaagtacatgattttcaaaactggtaacagttaaaggcactcaccctccgcctctctctctctctctctctctggggggctatcatgtcttggactccatccacactatagtttcaaagttccactgacgggggaaagttggtgctttggtcctccgaagatgtcacctttcgaccttgcccgatcttgtttcaccagactctagcccatgtcatggttttaaaatacataaacttctgacagcttcccatatttataagttacttataagtgctgcacgtattagaatttttttttttcagaccagtaaagttagaaaaaagacgctgtaaaggaaaagcaagtgagagtatgtgtaggacactgacagtgtgtgggcaccagttctgaagaggaggggagctgctggagccctagcctgttggggaaaagctggcacactcttggctcgccctctttgagtggagctgatccaacacctcatgcctgccttggccggacactgagaggaggggcacacgtgcttccagagacactcaggagtcagaccccaatgctcagagtcacaatgtgttcatggcctcctgtaacaggactctggggatcccctctgtggcccagcccaccccaccctctgctcttctatgctgtgcccagggcagctgccctcttctgcctgtgccccatcccatcctgaaaacccaggaccaaggcaggggcaggcagccagttcttccaccttgcctcagagtcatttaaaacctttactgcatttgataccagaaaagcctccagagacaaaccaaatgcaaaggcctttcctttataactctaaagaacaggcatcgaaagtttatttttgtaggagctatataaatactcacctttctggagtcgtccagtgctgggagctttggggagattggttctcagttatcacctggtatggtcccagtttctcatctgtcctttcctcatccaccctgcacatgtgtatgtgaacggcttcgtggccggtgtggtggtttctcatttcataagatagttgaagggccatgccttgtctggatgttatttaataggcactactgcggtgtcctcagatggtactgagggggccttctggtccttcaaaggaaaataacacaggcatgagttcatttgggagtgtgaactttcagaacacctaataagagagtggtgtcagagtaaaaacggccccaggtctggagcatagaagtgtatctctgtgaagagagagccggtgtgttgacatgtggttcttctcacacccctctactcctcgagggctttgaatccttgggctgatttttgtgccagaaattgctgttcccgatggccaaaaggggaacctgaactggatttcagaactgcccagtgatttgaaaatttagattttacttgggcctttcaggagtctttagatagggatgctgaggtcatatttagttcaatgaacagcccttgtttaagttttgccagtgtccagccagctgtggccctggccatctgtgcaggcaggttcctcaattcctggttggccctgcagtcggtcaacacagtccctccaggtcggctgcagaggcagctgcccagcctgcagtctatgcacgggccttaagaaatgagctgcctgtagcctcacggcatatgcttttatcagggaaaacccttcgagcttcttctgattctcacctgcttgctttctggctgtcttagtcagtgtgtttacaggcaactaaagcctgttcctaatttatcaaaaaattataaccaaaattcaccatagcctaagagagtaaaccccacctccaaagtgatgccaaggccaaaacctcatcaaggaaccagacacaggtcaaaagtggtgagcaagccatggtctctgctcctggggaactcacacgctgacccccgaggagccttggtttcctccctggcagatagtccccagaatcttctctcccagctttgaggttctgggctctggaaaggcctctgggatgctggccttaagatctcagcacagactatcagcatgttccattctcagattcctggaggaaaggtaccctctgttgaccaaggggctggctgcttctgagacttaccaacccaagaaatttggagacattcccctcaggctaaaaggcagcggtccccagagttcagaaagcaaaagatcttgacaactgtgccagtagtggctctggtcctatctctccacagtgctggcctctgctggggaaggcatctttcccaaaggtatccccaagtaccatgttgaaaatgtcctcagtctgttgctccatctttctgagcctctgcttggtatgtcatgtttatggtcactacggatgagtgtgtgcagagtttgggttgattcttttaaatgctacaaacaagagctatttcttttcaataaaaaaggtttggattcggcctcttcctctgagcccacctcccagccctccagggagcatcagtgtacctgagtcactttgtctgcatctcttcatcccacaaaacacgaggctgggtctcattcagcggcctctcaccaaccttcaagatccagaagaaaacaggaacgttcagctctgccctgtgtcgtatctaatcacatacattaatttatctaaccacataagttatttttttttatttgcccagaaataaacctttaaaggaacg

SEQ ID NO: 60781 - DNA, 761 bp, Homo sapiens
cacaactttacacctgaatgaacgccaaacctctatggatatataaagggaagcttgaggaggaatttcacagttacagtgcagaagcagaggcaaaagaattaaccagctcttcagtcaagcaaatcctctactcaccatgcttcctcctgccattcatttctatctccttccccttgcatgcatcctaatgaaaagctgtttggcttttaaaaatgatgccacagaaatcctttattcacatgtggttaaacctgttccagcacaccccagcagcaacagcacgttgaatcaagccagaaatggaggcaggcatttcagtaacactggactggatcggaacactcgggttcaagtgggttgccgggaactgcgttccaccaaatacatctctgatgggccagttgcaccagcatcagccctctgaaggagctggtgtgtgctgggcgagtgcttgcccctgccagtgctccctaactggattggaggaggctatggaacaaagtactggagcaggaggagctcccaggagtggcggtgtgtcaatgacaaaacccgttacccagagaatccagctgcagtgccaagatggcagcacacgcacctacaaaatcacagtagtcactgcctgcaagtgcaagaggtacacccggcagcacaacgagtccagtcacaactttgagagcatgtcacctgccaagccagtccagcatcacagagagcggaaaagagccagcaaatccagcaagcacagcatgagt

SEQ ID NO: 60782 - DNA, 8872 bp, Homo sapiens
  misc_feature (1)...(8872): n = a,t,c or g
cccggaattcccgggccgacgatttcgtgcgagcggcagcagctccgggctcgagagcccgcgcccatgccagtgcccatgcggggccgccgccagtgacgccggagaggtgttccccccacactggggctcccactactgcgaggagtgacccacgaaggccacagagatggccggggcttcggtgaaggtggcggtgcgggtccgccccttcaattcccgggaaatgagccgtgactccaagtgcatcattcagatgtctggaagcaccaccaccattgttaaccccaaacagcccaaggagacgcccaaaagcttcagctttgactactcctactggtcgcacacctcacctgaggacatcaactacgcgtcgcagaagcaggtgtaccgggacatcggcgaggagatgctgcagcatgcctttgagggatacaacgtgtgcatcttcgcctatgggcagacgggtgccggcaagtcctacaccatgatgggcaagcaggagaaggaccagcagggcatcatcccacagctctgcgaggacctcttctctcggatcaacgacacgaccaacgacaacatgtcctactccgtggaggtcagctacatggagatttactgtgagcgcgtccgtgacctcctgaaccccaagaacaagggcaaccttcgcgtgagggagcacccactgctggggccctacgtggaggacctctccaagctggctgtcacctcctacaatgacatccaggacctcatggactcagggaacaaggccaggaccgtggcggccaccaacatgaatgagaccagcagtcgctcccacgccgtcttcaacatcatcttcacccagaagcgccatgacgcagagaccaatatcaccacggagaaggtgagcaaaatcagcctggtggacctggctgggagcgagcgggctgactccacgggagccaagggcacgcgcctcaaggagggagccaacatcaacaagtcgctgaccaccctgggcaaggtcatctccgccctggctgaaatggactccggacccaacaagaacaagaaaaagaagaagacagatttcattccgtaccgagattccgtgttgacctggctcctccgggaaaacctgggcggtaactcaaggacagctatggtggcagccttgagtcctgcagacatcaactacgatgagacccttagcacgctgaggtatgctgaccgggccaagcagatccgctgcaatgctgtcatcaatgaggaccccaacaacaagctgatccgcgagctgaaggatgaggtgacccggctgcgggaccttctgtacgcccagggtcttggcgacatcactgacatgaccaatgccctggtgggtatgagcccctcatcctcgctctcagccctgtccagccgcgcggcctccgtgtccagcctccacgagcgcatcttgtttgccccgggcagcgaggaggccattgaaagactgaaggaaacagagaagatcatagctgagctcaatgagacctgggaggagaagctgcggcggacagaagccatccggatggagagggaagccctgctggccgagatgggtgtggccatgagggaggatggcggcaccttgggcgtattctctcccaaaaagacaccacacctcgtcaacctgaacgaggacccgctgatgtctgagtgcctgctctactacatcaaggatgggatcaccagagtgggcagggaggatggcgagaggcggcaggacattgttctgagtgggcacttcatcaaggaggagcactgcgtcttccggagcgactccaggggaggcagcgaagctgtggtgaccttggagccctgtgagggggcagacacctacgtcaatggcaagaaagtcacagagcccagcatcctgcgttcaggaaaccgcatcatcatgggtaagagccatgtgttccggttcaaccaccccgagcaggcccggcaggagcgtgagcgcacgccttgtgcggagacgccagctgagcctgtggactgggccttcgcccagcgtgagctgctggagaagcagggcatcgacatgaagcaggagatggagcagaggctccaggaactggaggaccagtaccgccgcgagcgggaggaggccacctacctgctggagcagcagcggctggactatgagagcaagctggaggctctgcagaagcagatggactccaggtactacccggaggtgaacgaggaggaggaggagcccgaggatgaagtccagtggacagagcgggagtgtgagctggcgctctgggccttccggaagtggaagtggtaccagttcacgtctctgcgggacctgctgtggggcaacgccatcttcctcaaggaggccaatgccatcagcgtggagctgaaaaagaaggtacaattccagtttgtcctcctgacggacacactctactcccctctgccacccgacctgctgcccccagaggccgccaaagaccgagagaagcggcccttcccccgcaccattgtggccgtggaggtccaggaccagaagaacggggccacccactactggacgctggagaagctcaggcagcgtctggacctgatgcgggagatgtacgaccgcgctgcagaggtgccctccagtgtcatcgaggactgtgacaacgtggtgaccggcggagaccccttctatgaccgcttcccctggttccggctggtgggcagggccttcgtgtacctgagcaacctgctgtaccccgttcccctggtacaccgtgtggcaatcgtcagcgagaagggcgaggtgaagggcttcctccgcgtggccgtccaggccatctcagccgatgaagaggcccctgattatggctctggcgtccgccagtcgggaactgctaaaatctcctttgatgaccagcattttgaaaagttccagtccgagtcttgccccgtggtggggatgtcccgctcgggaacctcccaggaagagcttcgcatcgtggagggccagggccagggtgcagacgtggggccctcagccgatgaagtcaacaacaacacctgttcagcagtgcccccagaaggcctcctcctagacagctctgagaaagccgccctggatgggcccctggatgctgccctggaccacctccgcctgggcaacaccttcaccttccgtgtgacagtcctgcaggcgtccagcatctctgccgaatatgccgacatcttctgccagttcaacttcatccaccgccacgacgaggccttctccacagagcccctgaagaacacaggcagaggccccccacttggcttctaccacgtccagaacatcgcagtggaggtgaccaagtccttcattgagtacatcaagagccagcccattgttttcgaggtctttggccactaccagcagcacccgttcccgcccctctgcaaggacgtgctcagccccctgaggccctcgcgccgccacttccctcgggtcatgccactgtccaagccagtgcccgccaccaagctcagcacactgacgcggccctgtccgggaccctgccactgcaagtacgacctgctggtctacttcgagatctgtgagctggaggccaacggcgattacatcccggccgtggtggaccaccgtgggggcatgccatgcatggggaccttcctcctccaccagggcatccagcgacggattacggtgacactactgcatgagacaggcagccatatccgctggaaggaagtgcgcgagctggtcgtgggccgcatccgaaacactccagagaccgacgagtccctgatcgaccccaacatcttgtctctcaacatcctctcttccggatacatccacccagcccaagatgaccggaccttttaccaatttgaggctgcgtgggacagctccatgcacaactctctcctgctgaaccgggtcaccccttatcgagagaaaatctacatgacactctccgcttatatcgagatggagaactgcacccagccggctgttgtcaccaaggacttctgcatggtcttctattcccgtgatgccaagctgccagcctcgcgctccatccgcaacctctttggcagtgggagccttcgggcctcagagagtaaccgtgtgactggtgtgtacgagctcagcctgtgccacgtggctgacgcgggcagcccagggatgcagcgccggcgccgacgagtcctggacacatctgtggcctatgtccggggcgaggagaacctggcaggctggaggccccggagtgacagtctcattctggaccaccagtgggagctggagaagctgagcctcctgcaggaggtggagaagactaggcactacctgctcctgcgggagaagctggagaccgcccagcggcctgtcccggaggcactgtccccggccttcagcgaggactctgagtcccatggctcctccagcgcctcctccccgctctcggctgagggccgcccattcaccctgggaggcttcccaacgagaggcagcgggagctggccgtcaagtgcttgcgcctgctcacgcacacattcaacagagagtacacacacagccacgtctgcgtcagtgccagcgagagcaagctctccgagatgtctgtcaccctgctccgggacccgtcgatgtcccctctaggggtggccactctcaccccctcctccacttgcccctctctggttgaagggcggtacggtgccactgacctgaggaccccgcagccctgctcccggccagccagcccagagcccgagctgctgccagaggccgactccaagaagctcccttcccctgcccgggcaacagagacagacaaggagccccagcgcctgctggttccctgacatccaggagatccgagtcagcccgatcgtttccaagaaggggtacctgcacttcctggagccgcacacgtcaggctgggccaggcgcttcgtggtggtgcggcgcccctatgcctacatgtacaacagcgacaaggacaccgtggagcggttcgtgctcaacctggccactgcccaggtggagtacagtgaggaccagcaggctatgctcaagacacccaacacattcgcggtgtgcacggaacaccgcggcatcctgctgcaggccgccagcgacaaggacatgcatgactggctgtacgccttcaaccccctcctggccgggaccatacggtccaagctctccagaaggaggtctgcccagatgcgggtctgaacctgagccctcccgtgacagccgggcaggccccagcccatcccctccctcatcctcgtctgacctgtcaacctgccgcccagcccctctcctgccatacagcccacgactgggtcgaaccccccagggggcgcccatgcccaggcccggggaccctgtgcccacacgaaccagctgtgctccccancagaggctgtgcgtgtcagttcttcttgcagaatgtgctctggtggaacaagttgggagaggctgggggggccaagggcacaggttacgggggttcttgctgccgttctaatatttttttaagcatagacagacttataattaatatacgttagttagtgacattgaaacagtcaactcggaaattaactataagacttggtctatttataagtatttatttctaatgcctccacatagccctgtaatattcagatggaacccccaaccacctccaccctgtttgttcccacatgtgtctcccaagcctgctagggacaggcagggcagggacagccaccttggaaggccgcagtgaggagctgtctggaccagtggggcaccttggggctagcacacgggtgtatcgcctgggccccaggcttctccatggccacatgggtcctgggtgtatgtgtgggagagtgggggggtgtctttggtgcctgaagtctgcgcggcatggagggtggtgtgagttcctctggtgggagggagaacgcacatctcttctgggcggccacctgaggagtgactccaagaagagttccggcagctttccccaggaaagggtgaggggtgacactcggctctggctctgagatgaggcagacggcacccaggctgtgatctgtcctgggcggggaccaggagggagcggggtcgggatcacctgccagtgtgcagactctgggactgcgtgctgtctccggaccatcagggtagggtggtgggttgagaccaggaagtcagggaagatcggaattcagggcgacggtctaggtgtcgagggctgtggccgcagcctcttcagctgcggcgagaaatggagtgagtcaaggtagcttctgggaagaaatgctgccattagcaggtttcttgcaaagactttcctctctttgttcccagggcagagagtttctgtgagtcccactgagaaaatcccatggggtgggggtatcctggtcggtcggcaatggagggtggctggcttggtggttattgtcttcaaggagctcttcgctgctgcatctgcggtgtccctttgttcttgtcccatttcaccccctctgcagacaccaatgtccgagggccacccaggacaggacgggggtcagccccaagctgagagtctggtcataggagtcatgtccagaggcctagggaggttttaggggccctccccacccacacccacaggtcgatttggtctcttttttaagttcaaagggaaagacagtagccaagcaacagagcccctctcccgccgtggcccgtgggagcagttacatcgggtctggtgctccagacctagggcccagcactttcatcagatcctgcctcctggagtgggggaaacgcagcaccccactggttctgaggcccctaccctcccaggctgtcccacgtgatgctgacatgagcctcagagaccccaatcccatgcctgggggagagacagcggctcaggagtgggggagcacgggccttctacaccacatgggaaggctctggcatgaggttttcctttgggaaggttgtttgggcccctgaagttccatctccgagagtggtgtgcagggcaggccagggcccatgctggctgcagtctctgtggctgcctgcctgggccagcctgtttgggagctgggactgtgggctcgccttttcgtacctgggctcaggtgcggtgtggccaccgccaccctcatcccctgcctgggaggctctcccaggggctgatgggggggttctgtgagggagaatcagggctcgggaagccacgcctgggaaggcaggacacaggacacagcagctttctttggaaatctcccaggtgaggattcacatcccaaaataaaattcagaagccaggtggcctgtgctccccatgggtgacctctggaggcagtggaccaagatgcagcaaggagaggatgcagaacagcttcttgcagaagcacctgctccggcatccagcgctgcctggaggcaggaaggagaggcagggcaggacacgctggtctgagatgagggggagccccacgggccccaggcaggctagaggaggcacaggccctgccacggccaactcaggtcagccagcctgaggctgtggcctccaaagggtctgggcgcaccccccaggtcgcaggtgtctgaggccagccaacctgcagagcactcgcggcgtgggtgggctgagtggaggtgcctgggagctgcctaaattcagaagcctccactgccatggagactgcctggctgtgtcctctcagccaggtgccgtgttggccttggctaggacccagagccacactgcagcctccgccgactccctccttccgggcctgctctagtgaggagtgcctaagccaggacccagaaactcaaagttgatggtgagaggaggccgcctgagtcaggacacctggcttcttgaaaagttcgctctgccagaaaccacctagggaccacgttagctgccttccttgagctccccaggagtcggtttccacatctgtgaggtggagggctggtgtggaggtgctcatggggtgcggtgcttgggagacagccaggcccagggtggctgctgcttcctgctaagtgggggaggtgagacagatctggaaagccgtctccctcagatggtttcatttaatgctttatactgccgagtctgggggcttgttttggtttgggggcagccatcctccaccagaaagggggagctccttccgctgcggctccagatagatggggatgccgggctccaggccgaccagcacttgggatctgatgggacacggccagtgcctaggggtgccaagtccaaggcctcccactgggagtcatcgctgagaagatgccaatgtttcatccaccggctgcacaggcacaaactcccccacccaggacggctgtgatgaggtggccctccctgtcaaccctggtccctggagtccccagcacctggggccctggtggggctgatgtcacaggtgtttactgtgctgctgcactggtcctatgccagcctcacccatgtggggaccacggaaggcacactcccttacccccggtgccgggccgtgcggtcccccagacggacagcagctgtggcgacctgcgtttctccctgggcctgtgcttcctgtagttagtccgtcccctggttcccctgtggctcagaggccgcgtccctggcttgtacatatgtgattgctgtgggcacaccccagaccccatgtcatagctgccgtcccgacgtcacgacgcccgtcccgatgtcttacacccgagtgttagccctaggctcctgtactgtgcgtgcacttgaggctctgtaccaattaagaaataaatgtggctcttactcaacacagtagaaaaaaaaaa

SEQ ID NO: 60783 - DNA, 1268 bp, Homo sapiens
gcagttatcatagagcacagtccctcacatcacacagctgcagagatgagtaaacaaagaggaaccttctcagaagtgagtctggcccaggacccaaagcggcagcaaaggaaacctaaaggcaataaaagctccatttcaggaaccgaacaggaaatattccaagtagaattaaatcttcaaaatccttccctgaatcatcaagggattgataaaatatatgactgccaaggtttactgccacctcccagagaagctcactgccgaggtcctaggaatcatttgcattgtcctgatggccactgtgttaaaaacaatagttcttattcctttcctggagcagaacaatttttccccgaatacaagaacgcagaaagcacgtcattgtggccattgtcctgaggagtggattacatattccaacagttgttattacattggtaaggaaagaagaacttgggaagagagtttgctggcctgtacttcgaagaactccagtctgctttctatagataatgaagaagaaatgaaatttctggccagcattttaccttcctcatggattggtgtgtttcgtaacagcagtcatcatccatgggtgacaataaatggtttggctttcaaacataagataaaagactcagataatgctgaacttaactgtgcagtgctacaagtaaatcgacttaaatcagcccaggggggatcttcaatgatatatcattgtaagcataagctttagaagtaaagcatttgcgtttgcagtgcatcagatacattttatatttcttaaaatagaaatattatgattgcataaatctgaaaatgaattatgttatttgctctaatacaaaaattctaaatcaattattgaaataggatgcacacaattactaaagtacagacatcctagcatttgtgtcgggctcattttgctcaacatggtatttgtggttttcagcctttctaaaagttgcatgttatgtgagtcagcttataggaagtaccaagaacagtcaaacccatagagacagaaagtagaatagtggttgccaatgtctcagggaggttgaaataggagatgaccactaattgatagaacgtttctttgtgtcgtgatgaaaactttctaaatttcagtaatggtgatggttgtaactttgcgaatatactaaacatcattgatttttaatcattttaagtgcatgaaatgtatgctttgtacatgacacttcaataaagctatccagaaaaaaaaaagcctctga

SEQ ID NO: 60784 - DNA, 1834 bp, Homo sapiens
tgcccgtacgagcgcctgagccaagcttggcacgaaggttaaatttttctgcatttaaaaaatgtgcggattggtctccggatccagaggctggtaccaccttcctttctaaaataaaatctctctggcatgaagtcaccgcctatttcacatccggtttgccctgggacgtattactactgtcttggtaaagagaaatcttttgttgtatagctgcagattggatattgggaagcaaatttgggtgtgaaatcttcagcaaaggagcacgcagagtccatgatggctcataccaagtgagtgagaggcagagcgaggacgcccctttgctctggcgcgcccggactcggactcgcagactcgcgctggctccagtctctccacgattctctctcccagacttttccccggtcttaagagatcctgtgtccagagggggccttagctgctccagcccgcgatgaggaaaagtccaggtctgtctgactgtctttgggcctggatcctccttctgagcacactgactggaagaagctatggacagccgtcattacaagatgaacttaaagacaataccactgtcttcaccaggattttggacagactcctagatggttatgacaatcgcctgagaccaggattgggagagcgtgtaaccgaagtgaagactgatatcttcgtcaccagtttcggacccgtttcagaccatgatatggaatatacaatagatgtatttttccgtcaaagctggaaggatgaaaggttaaaatttaaaggacctatgacagtcctccggttaaataacctaatggcaagtaaaatctggactccggacacatttttccacaatggaaagaagtcagtggcccacaacatgaccatgcccaacaaactcctgcggatcacagaggatggcaccttgctgtacaccatgaggctgacagtgaggagctgaatgtccgatggcatttgggagggacttccctatgggatggcccatgcttgcccactaaaatttggaagttatgcttatacaagagcagaagttgtttatgaatggaccagagagccagcacgctcagtggttgtagcagaagatggatcacgtctaaaccagtatgaccttcttggacaaacagtagactctggaattgtccagtcaagtacaggagaatatgttgttatgaccactcatttccacttgaagagaaagattggctactttgttattcaaacatacctgccatgcataatgacagtgattctctcacaagtctccttctggctcaacagagagtctgtaccagcaagaactgtctttggagtaacaactgtgctcaccatgacaacattgagcatcagtgccagaaactccctccctaaggtggcttatgcaacagctatggattggtttattgccgtgtgctatgcctttgtgttctcagctctgattgagtttgccacagtaaactatttcactaagagaggttatgcatgggatggcaaaagtgtggttccagaaaagccaaagaaagtaaaggatcctcttattaagaaaaacaacacttacgctccaacagcaaccagctacacccctaatttggccaggggcgacccgggcttagccaccattgctaaaagtgcaaccatagaacctaaagaggtcaagcccgaaacaaaaccaccagaacccaagaaaacctttaacagtgtcagcaaaattgaccgactgtcaagaatagccttcccgctgctatttggaatctttaacttagtctactgggctacgtatttaaacagagagcctcagctaaaagcccccacaccacatcaa

SEQ ID NO: 60785 - DNA, 6292 bp, Homo sapiens
  misc_feature (1)...(6292): n = a,t,c or g
gaggacagagtgcagccttttcctcccctaatagaaaagccattgccctcttttcctcccctaatagaaaagccattgccctcttttcctccacccttaagaagacctgcatctgttggaccaacagacaactatccggcttacggccaggggagcccctgcagctgcacagaaccagtttcttatgtatctggcggtaattgggaaagcttctgagaaagtccatggggccgatgtatgggagatgaatgtggtcccggaggcatttaaacgagggctgtgtggtgtgctcatgtggagggatggactacactgcatactaactgtaagcaggccgagagacccaataaccagcagaattgtttcaaagttttgcgatttggcacaaagagttgtacgactggagactgggaccttggaatcagtgtcagcccgtgatttcaaaaagcctagagaaacctcttgagtgcattaagggggaagaaggtattcaggtgagggagatagcgtgcatccagaaagacaaagacattcctgcggaggatatcatctgtgagtactttgagcccaagcctctcctggagcaggcttgcctcattccttgccagcaagattgcatcgtgtctgaattttctgcctggtccgaatgctccaagacctgcggcagcgggctccagcaccggacgcgtcatgtggtggcgcccccgcagttcggaggctctggctgtccaaacctgacggagttccaggtgtgccaatccagtccatgcgaggccgaggagctcaggtacagcctgcatgtggggccctggagcacctgctcaatgccccactcccgacaagtaagacaagcaaggagacgcgggaagaataaagaacgggaaaaggaccgcagcaaaggagtaaaggatccagaagcccgcgagcttattaagaaaaagagaaacagaaacaggcagaacagacaagagaacaaatattgggacatccagattggatatcagaccagagaggttatgtgcattaacaagacggggaaagctgctgatttaagcttttgccagcaagagaagcttccaatgaccttccagtcctgtgtgatcaccaaagagtgccaggtttccgagtggtcagagtggagcccctgctcaaaaacatgccatgacatggtgtcccctgcaggcactcgtgtaaggacacgaaccatcaggcagtttcccattggcagtgaaaaggagtgtccagaatttgaagaaaaagaaccctgtttgtctcaaggagatggagttgtcccctgtgccacgtatggctggagaactacagagtggactgagtgccgtgtggaccctttgctcagtcagcaggacaagaggcgcggcaaccagacggccctctgtggagggggcatccagacccgagaggtgtactgcgtgcaggccaacgaaaacctcctctcacaattaagtacccacaagaacaaagaagcctcaaagccaatggacttaaaattatgcactggacctatccctaatactacacagctgtgccacattccttgtccaactgaatgtgaagtttcaccttggtcagcttggggaccttgtacttatgaaaactgtaatgatcagcaagggaaaaaaggcttcaaactgaggaagcggcgcattaccaatgagcccactggaggctctggggtaaccggaaactgccctcacttactggaagccattccctgtgaagagcctgcctgttatgactggaaagcagtgagactgggagactgcgagccagataacggaaaggagtgtggtccaggcacgcaagttcaagaggttgtgtgcatcaacagtgatggagaagaagttgacagacagctgtgcagagatgccatcttccccatccctgtggcctgtgatgccccatgcccgaaagactgtgtgctcagcacatggtctacgtggtcctcctgctcacacacctgctcagggaaaacgacagaagggaaacagatacgagcacgatccattctggcctatgcgggtgaagaaggtggaattcgctgtccaaatagcagtgctttgcaagaagtacgaagctgtaatgagcatccttgcacagtgtaccactggcaaactggtccctggggccagtgcattgaggacacctcagtatcgtccttcaacacaactacgacttggaatggggaggcctcctgctctgtcggcatgcagacaagaaaagtcatctgtgtgcgagtcaatgtgggccaagtgggacccaaaaaatgtcctgaaagccttcgacctgaaactgtaaggccttgtctgcttccttgtaagaaggactgtattgtgaccccatatagtgactggacatcatgcccctctatcgtgtaaagaaggggactccagtatcaggaagcagtctaggcatcgggtcatcattcagctgccagccaacgggggccgagactgcacagatcccctctatgaagagaaggcctgtgaggcacctcaagcgtgccaaagctacaggtgggaagactcacaaatgggcacagatgccaaattagtccctttggagcgtgcaacaagacagcccctggagcacaggaaggctgtgggcctgggcgacaggcaagagccattacttgtcgcaagcaagatggaggacaggctggaatccatgagtgcctacagtatgcaggccctgtgccagcccttacccaggcctgccagatcccctgccaggatgactgtcaattgaccagctggtccaagttttcttcatgcaatggagactgtggtgcagttaggaccagaaagcgcactcttgttggaaaaagtaaaaagaaggaaaaatgtaaaaattcccatttgtatcccctgattgagactcagtattgtccttgtgacaaatataatgcacaacctgtggggaactggtcagactgtattttaccagagggaaaagtggaagtgttgctgggaatgaaagtacaaggagacatcaaggaatgcggacaaggatatcgttaccaagcaatggcatgctacgatcaaaatggcaggcttgtggaaacatctagatgtaacagccatggttacattgaggaggcctgcatcatcccctgcccctcagactgcaagctcagtgagtggtccaactggtcgcgctgcagcaagtcctgtgggagtggtgtgaaggttcgttctaaatggctgcgtgaaaaaccatataatggaggaaggccttgccccaaactggaccatgtcaaccaggcacaggtgtatgaggttgtcccatgccacagtgactgcaaccagtacctatgggtcacagagccctggagcatctgcaaggtgacctttgtgaatatgcgggagaactgtggagagggcgtgcaaacccgaaaagtgagatgcatgcagaatacagcagatggcccttctgaacatgtagaggattacctctgtgacccagaagagatgcccctgggctctagagtgtgcaaattaccatgccctgaggactgtgtgatatctgaatggggtccatggacccaatgtgttttgccttgcaatcaaagcagtttccggcaaaggtcagctgatcccatcagacaaccagctgatgaaggaagatcttgccctaatgctgttgagaaagaaccctgtaacctgaacaaaaactgctaccactatgattataatgtaacagactggagtacatgtcagctgagtgagaaggcagtttgtggaaatggaataaaaacaaggatgttggattgtgttcgaagtgatggcaagtcagttgacctgaaatattgtgaagcgcttggcttggagaagaactggcagatgaacacgtcctgcatggtggaatgccctgtgaactgtcagctttctgattggtctccttggtcagaatgttctcaaacatgtggcctcacaggaaaaatgatccgaagacgaacagtgacccagccctttcaaggtgatggaagaccatgcccttccctgatggaccagtccaaaccctgcccagtgaagccttgttatcggtggcaatatggccagtggtctccatgccaagtgcaggaggcccagtgtggagaagggaccagaacaaggaacatttcttgtgtagtaagtgatgggtcagctgatgatttcagcaaagtggtggatgaggaattctgtgctgacattgaactcattatagatggtaataaaaatatggttctggaggaatcctgcagccagccttgcccaggtgactgttatttgaaggactggtcttcctggagcctgtgtcagctgacctgtgtgaatggtgaggatctaggctttggtggaatacaggtcagatccagaccggtgattatacaagaactagagaatcagcatctgtgcccagagcagatgttagaaacaaaatcatgttatgatggacagtgctatgaatataaatggatggccagtgcttggaagggctcttcccgaacagtgtggtgtcaaaggtcagatggtataaatgtaacagggggctgcttggtgatgagccagcctgatgccgacaggtcttgtaacccaccgtgtagtcaaccccactcgtactgtagcgagacaaaaacatgccattgtgaagaagggtacactgaagtcatgtcttctaacagcacccttgagcaatgcacacttatccccgtggtggtattacccaccatggaggacaaaagaggagatgtgaaaaccagtcgggctgtacatccaacccaaccctccagtaacccagcaggacggggaaggacctggtttctacagccatttgggccagatgggagactaaagacctgggtttacggtgtagcagctggggcatttgtgttactcatctttattgtctccatgatttatctagcttgcaaaaagccaaagaaaccccaaagaaggcaaaacaaccgactgaaacctttaaccttagcctatgatggagatgccgacatgtaacatataacttttcctggcaacaaccagtttcggctttctgacttcatagatgtccagaggccacaacaaatgtatccaaactgtgtggattaaaatatattttaatttttaaaaatggcatcataaagacaagagtgaaaatcatactgccactggagatatttaagacagtaccacttatatacagaccatcaaccgtgagaattataggagatttagctgaatacatgctgcattctgaaagttttatgtcatcttttctgaaatctaccgactgaaaaaccactttcatctctaaaaaataatggtggaattggccagttaggatgcctgatacaagaccgtctgcagtgttaatccataaaacttcctagcatgaagagtttctaccaagatctccacaatactatggtcaaattaacatgtgtactcagttgaatgacacacattatgtcagattatgtacttgctaataagcaattttaacaatgcataacaaataaactctaagctaagcagaaaatccactgaataaattcagcatcttggtggtcgatggtagattttattgacctgcatttcagagacaaagcctcttttttaagacttcttgtctctctccaaagtaagaatgctggacaagtactagtggtcttagaagaaccgagtcctcaagttcagtattttatagtgggtaattgtctgggaaaactaatttacttggtggttaatacaatacggtttcctactttccctgattttcaaactggttgcctgcatcttttttgctatatggaaggccacatttttggcacctatattaggtgccagcacgataggcgccttaacccagtattgccataggaaactggcctctnttttcatgtgggatgaagacatctgtgccaagagtggcatgaagacatttgcaagttcttgtatcctgaagagagtaaagttcagtttggatggcagcaagatgaaatcagctattacacctgctgtacacacacttcctcatcactgcagccattgtgaaattgacaacatggcggtaatttaagtgttgaagtccctaaccccttaaccctctaaaaggtggattcctctagttggtttgtaattgttctttgaaggctgtttatgactagatttttatatttgttatctttgttaagaaaaaaaaagaaaaaggaactggatgtctttttaattttgagcagaaggagaaaataaataatgtatcaatgacctttgtaactaaaggaaaaaaaaaaaaa

SEQ ID NO: 60786 - DNA, 3963 bp, Homo sapiens
ttttttttttttacgctgcaaacattttaatgattattgttgagcatacattttggaaattttttacttcaaacggcaacaagttaaataaatgtttataatatacaaagaaaatacaaccgaaagtaaaactcgctgtaagtgtgccttgcacttagaccaggttttccccccttaatacatctttatttttgagctgcaaacacacttaagactttgatcttcatagtatggcatttaggaaataaaaatatactcccaccttaaagaaataaaaagtttggtgcatgattatatgccaaacaaagagagaacactagaatactcttgatagtgcaggcatcattaaaaaggaaaagaaaaagcttgagatgctcattaattctctatgttttaaggaagcaggatttttgaccaagtagcttaaaagccagcaaaacagggatcagtgacagcaactgtagtgtatggagtatgaaatgacaaactttacacaaatacactgttagaaatttaccagtgaacactgaagatctgagaagctgctctttggaacagtcaagtgggaccaccttattccagtcacataagcccttgtaaagtaacacagtgttctgtgctatatacttgctggctgggtagttacaggatttgttttgtcattagcagctaaaaaacttattccacatgttcttaaagccttaatggtggaaaaaaaggcaagtgtcattagcatggtggatcatatacttctctgcacacaaacacaagaggcttcactagtatttttaaagtctctgatgtctcccattgcacttcaaagctcaattgagatgaaagcctttctccattgtagcagctagcaggcgctctctcatgatctcctcggaagaatattcaggcaacttaaggtaatgcacacatgtattgactgatggatagcttgcatcagtagcatcaaccttgcgtacaaccgtgagcctgggatgcaggttagccagtccacctgggggtagagttgaacaaccagtggtaaactgcaagaatgctttcctttcatcagaagacatgccacataaaaccctcacaaacctcaggaaaccagggctgtcacgtgtataacccagcttaggttcagtgtaattgataatatcctctgctgcccaggatggtgactggtttccacaaagaatcatttggacttcttcatggctgaaggaacttaatttctccattggaaaaactttattaaacccatctctaaaggcttccatttgtttctgaatacccgtatgcatacaaaagtcaaacatcaaatccacatattcttctgcattatccattgttatcatctcatcttcaccacttggcttgagatccacagctgtaaaaccatatattcttgaggaagggcaaaactggaaatttaaacctaaatcctctatgctaagtggaggcccagaacctgatggattcttcagcactagttcctgtaattttgtgttcttctcatcttcagaaagacctttgttgcttaaaatttggcgcctcttgatagcaaggtctttaatttcttttaaaaatctggctctgtgtgggtttactaattcaaagtcttcccaagtcaaaattccattaaaccaagctgggggttttggtttagggggatcaagaataaattctgattttgaatcctcttcaaagcttcctaccgagagtgaatcatgaccttcttctgtagaagcttcagactgactttcagtacagtgtaagtctctatcacctcgtgactcataaatcagtttactcatattgcttttaatgtcacccatacacataagtttaaaaaaaggtttagaaataggtaagtccacaagtctattgtcttgaatgcatttggccaagaaaattccaaggaaatgaaacagtttcgtgatcctttcaagctcatcactatcctgtggaaatggtgctgtgaacagtccacatgacctctgcacataatatccaggaggtttcaatccacctccaagatcaacgtgacgagattcatcatctggaaaattatcatcacaaagccaagctcccaagtcagttctctggaattctgctgccaccagagcataaaactctaatgtgggtcccaagccagttccttcttctcctaaaaattcaacctcaagaactgatttccgatctgcatgtatttgcatgacattctcagcccattccatcagtgactcgccacgtggaacttttactctttcatgcttgagacgaccaactcgaaactctccagggtcatctcgcctaacactgcttgtggttctcgttcgctccacagtggcttcacgtcggttctgtaaccatactattgctcttgaggcgccaaatgctgtacatgtgaaataaagctgtctagtttcaaatggtattagaaaaggacatttgctggttaattgttcacaccagtctggcagagccccacttgccagtgccaatggttcctcaatctgctgtaatatttttgttgtaattttttgctagtgaattcatctggtggaaaagtaaactgaggctgttcatcaccatcttcctgggatattcttgaataagggtcacttgcaactatatatagaatacgcagaagctgaaggacatcttctactccacaagagttctgtccattgcctgctttggcctgaggttgttcttttgttaaattaagaatatcactactttgaagagtagaaatggccccctggtttaacccagacttttgttccatgctcaccccaaatcccaatatgcagctatgagctgagaacaatttctgtttttcctaatacttttattagtgccagttaatttccagtggcgcaggaaagcagcgtctgcattcttctgcaggtaggttatcaagtcattctttggtaattcatcagtgccaaggtactgctccacatgctctatagaccagcaacccatttttccattttccttttctttatcagaatccttcatttctctgtacatgattgtgtatgtgggctcccaaatacgcctaagtttatctgatttcacattgccattacaggacaattgaagcaatttttgtacatagtaaaagatggttgatctgaaattggtgagtggtaattcaacttcacgagtcgttccaagacctgttactttcaaagtgagagctaatcgaggtgacggagtacattcgacttcttccaagagctctgaatgaggggtccctgggggtggtatttctagatcagttgtctgctggacattagtacgaccaggtctaggatcaaaagcaggaaccaatgcagaaaactgtctctttagcacataatcatcatcccatgttctccggcgtcctcctttagtttcgtactcttcttcttcctgctccccaataggtcggctccctgctccagcaggtacctgtggtagctgcgaggtaacagcatgatgcgttacatcagagcgggagccagctcgacgttgcagggatgggcgtctcagaatcataacctcctcgtattcttggtcctcctgattgtcatcttcattctcatcatcttcttcatctggctcaggtaagtcctcatcatcatcgagctcagccaatagagtactggcacggcagctatcaaggaaatcatataaggaatattctgcttcctgacctgtgtcactctcactggaagttgatgtgaggctggtggttaaagtgttacttaaagattgaccaactgataaaactgttgttgctgtagctacattgctgctgctagtaacactggatgttgacatagtcactgttgatgtagtaccaggtgtggtcaaattagggaaactctgagcacccataagaggagaagttgctgtgctcatcacattcctccccaaagtattagtgttgttatcactgctgcttcggcttag

SEQ ID NO: 60787 - DNA, 2358 bp, Homo sapiens
tttcgtgtgacttcgggctgtgggctcgctcgcggctcttcggccatggttttctcaaacaatgatgaaggccttattaacaaaaagttacccaaagaacttctgttaagaatattttccttcttggatatagtaactttgtgccgatgtgcacagatttccaaggcttggaacatcttagccctggatggaagcaactggcaaagaatagatctttttaactttcaaacagatgtagagggtcgagtggtggaaaatatctcgaagcgatgcggtggattcctgaggaagctcagcttgcgaggctgcattggtgttggggattcctccttgaagacctttgcacagaactgccgaaacattgaacatttgaacctcaatggatgcacaaaaatcactgacagcacgtgttatagccttagcagattctgttccaagctgaaacatctgggatctgacctcctgtgtgtctattacaaacagctccttgaaggggatccagtgagggctgccgaaacctggagtacctgaacctctcttggtgtgaccagatcacgaaggatggcatcgaggcactggtgcgaggttgtcgaggcctgaaagccctgctcctgaggggctgcacacagttagaagatgaagctctgaaacacattcagaattactgccatgagcttgtgagcctcaacttgcagtcctgctcacgtatcacggatgaaggtgtggtgcagatatgcaggggctgtcaccggctacaggctctctgcctttcgggttgcagcaacctcacagatgcctctcttacagccctgggtttgaactgtccgcgactgcaaattttggaggctgcccgatgctcccatttgactgacgcaggttttacacttttagctcggaattgccacgaattggagaagatggatcttgaagaatgcatcctgataaccgacagcacactcatccagctctccattcactgtcctaaactgcaagccctgagcctgtcccactgtgaactcatcacagatgatgggatcctgcacctgagcaacagtacctgtggccatgagaggctgcgggtactggagttggacaactgcctcctcatcactgatgtggccctggaacacctagagaactgccgaggcctggagcgcctcgagctgtacgactgccagcaggttacccgtgcaggcatcaagcggatgcgggctcagctccctcatgtcaaagtccacgcctactttgctcccgtcaccccaccgacagcagtggcaggaagtggacagcgactgtgcaggtgctgtgtcattctctgacagcagctgcctgggcccaaggggtgatgaggcatcctttcctctagaagacctgagtcttcctgaccgactccaccatcacccaatctgttgattctccattgggaaaggcatttacaggtaaaagacttctgtatggattgcagttactctggtgatagttttcacctttattctgctgtgaaacaatcaaatcaaagccttgtgtcagttaacacatgacaagtggtctcaatgcagctaggaccatgccagaaacctggatctcttaagagattggtacctacctaggtacgaaagttctacccttggcatactcagcattcctcaaaaagaccatcagtgttagcacaaactgagcagaaaaaataagctgttgattttctacctgatacttaagccagtggcctactttaattcacaattccattttgattagcaggacttttccactttgaagataaatagcaactttatcaaagtgactgtactgcaaattaattcataatgcctgatagttttatatatagagacttatgtggaaggcatgttaataggtttccatgagacaccaaagaaaagaggactctatactgggtggagcagggtcttcacctttttgtttctgtcaacttgtcatatacacctccagggaccaaaaacaaaagcagctcggagtctgtgttgcctgattggaaagtagaagctctggtgtatgctacagcacataacacatttttactaaaggaaaaaagctaattatgtccatgcctctcgtaaaactggggggaaccttaaagagaaagaactaaggcttaagttatctgtagtataatcaattagaagtaatgaatggatgcatgtaaaatggatgtgatttttttttcaagcttattttgaaatcttaaaaattcaggttacaccatagctactcaaaagttttacacacttaaaactcagatcagtaagtgttggtaccttttagactcataaaattgaataaaccgattgcaatgctttaaaaaaaattaaaaaaaaa

SEQ ID NO: 60788 - DNA, 1822 bp, Homo sapiens
  misc_feature (1)...(1822): n = a,t,c or g
ttttttttttttgactggacttcattttttttaatagatatagatatagatttatatttatatataaaatagttttttacaaaaaaatcaaccaaacaaaaaattaaaatcaacttaaaaaaacaacaaccaaacaacaataacaaaattcaaacaggagcagagatggggctgaggcataggggaggcccctagcgctgccctgaggaggagggggtgagaggctgaggcactcagtctcccttctgcttgggtgcttgcacagtcccattggccagagcagtggggttgcctggggatgaggcatttggtgtctgggaggtgcctcgagaggtgtgtggggggcgcaggtaggtgctgaagagtttcccatagagtgggtcatggagggagaagttctggaactgacagagggagaggccttggctggatcctgcctggcacagctcagcatgcaaagctgtggcagcagggtggggtgaacccagcagcaggtgcaggatggtgctgaagccgtctttgtacagcaggcggttgggaccctctgcttgctcttcagcaaagagctcaaaggccagacgagttagctcttccaggctcctgcccccatccagagctgctagtgcaagggccacatctcggaagtccaccaaacccttggtatcctgctggaagtagccaaaggcaccagccaccgtctgaggatcagagagctgtagctgcctggcaaactcttccaggctgatcattcgactccggcctggctctgccccagcgtccacatagccagcggacagcccagccttccgaagcacttttcccagttcccagagctgtggttccaacgccaccttcagccggcccaccacaatcacaggtaagctccctacaaactcacattcggtggctggaatgcccagagcctgtgccatgaccctctgaacattgttggcatagagggtggggtccctgctctcctcagggctggggtgatacacaggaaggaactccacatccacaatgctgcagggctgagaggctgtgagccagaggactttgagtactccaggacccctccatgcccagctggtggtgtccagactgttggggtagcggatgaggacaggctgcacaggcacccctgcgatgaaggctcctggtttgaacttaagcaaagccttcttgttggaacaggtgccctcaggaaagaatagcacctgcggccacttgcctcctgaggtggcccgccttcggacctcctccaccactctgcgtcgagaagccgggtcatgccgggataccaggatggcttggttgaatcgaagaagggctccaatgacaggaacggaaaggttctcagctcgggacacaactttgggcaggtcacagggcagcagaacaatggggtcaaagaaagtggagtgtggggcagcaacaaggacaggggcttgaaggcgagaggctcgctggccacgaacgcgaatccggaggaagcccagcaggaaaaacagcaggcggctcaggcctagcaccccgttgtggcacacagtcttcctccatcctgtaattggctcctgaagctgctcctcactaagaccggccacttgaagccaggcaaagggccagaggagaaagaggacgataaaggccagaagcactcggatgggggccagcaatgcccccaggaggcagaactttgccagggctcaaatggccccattttcctatcctcacgggtccttccgacgcccgctccccacacacctcgtgccaagcttggcgtaatgaggtcaaacagtnctcatnntcatncccccccgcg

SEQ ID NO: 60789 - DNA, 3096 bp, Homo sapiens
  misc_feature (1)...(3096): n = a,t,c or g
gcgctgtggctcatgcctgtagtcccagcactttgggaggccaaggcaggggggatcgcctgaggtcaggagtttgagaccagcctggccaacatggtgaaacccacctctgctgaagatacaaaaattagcctggcttggtggcgggcacccgtagtcccagctacttgggaggctgaggcatgagaattgctcgagcctgagaggcagaggttgcagtgagccaagattgcgccactgcactccagcctgggtgacagagcaagactccatttcaaaaaaaaaaggaaaaagagactaagagactaattatttggaatctggaagtttaaaatccaacttttctctttctcctttgggacattagaacagtagttctataacttcattgtaagaatcacctggataattcattaaagatgcagattcagggccacgtgttcaattctgatacagtaggtcctgtaataaggcctaggaatggccatttttaaacagtacactaggtggttttgatacagatccaaggactctaatttagaggaacactaggttagaggtttctcagacctgcaaacacctaagcacctgggctaaacaaagctacaacgaagatctgtatgaagatatatagttctgcagaatttaaaaagagcacaatttaagtcttcggccctcagaagttaaattcatattccatctaagccaactttgattttcattaagttagaatgaactcctagtattccagtattacacagaacgaagtactactactaacacatagaagtcattactgtgatataaaaagcaaaatagatccttaattaaaaattagtcactcatattcagtgttgaataagaagttaaagtttctagcataactatcttgagtgcattaaaaatgcttttagagcaataagataagcttctagctgactgcctagaaaaacagaagatacaaattcagtgtcagaaatgaaagggaatacactacagacactatagttattaaaaggctaactagaaaacaccatgaccaactcaaggattgtatatttaacaacttagatgaaacagattccctataggatacaaactagaaagctcactgtagaaacagataacctaaacagaaccatatttattaaggaaattgagtttgtgggtaagttaaaaaccttccagtaaagaaaactacaggcccagataacttccgagatgaattttaccaaacacttaagggagaaagaatatcaattctaaacaatctcttccaggaaacagaagaggaggaaatacttcccaactcattttatttgaccagtattacccagacaaagatactataagaaaaaaaactttaaaacaatgtcttcatgtgctaacatctgtagttaaattagccattctttttacatgaaataatgggaattggtatatttcttccatttcatttttctatttctttgctaatataccacctgtaacaaattcaatctagatgctatctgtccacttgcctacatttccattctattcaagccatttttgctcttcaagtaccttgatcactttggaatcatagcattgcaagctatttcaaaaaaagttgcgtggttggattgtgctagctacttttaaatttataaaaaatgccccatatattttcttgcttgtctgggaaatatagttgctatctaactagaaaaataagagggcattattaaagtaactctttaagcatcgtactaaatgtttgacttccattaaccatatttcttgtagtagctgtagctattatgatactgtgtaaaacagaacaggttctatatatgcaaatgacattttcatttaatgtaccaaattgtgtatctaacttttataatataggttaaacagatcctttctaagatggcattatttaatctttacttaaaactatgaaaaatatgtgtaagttattgtttataaacagaagagactataattaaaatatagagcagattccaagtgaccatcattttactttttagatttaaaacagaatgaaacagaagatttagtcataagaagatgcttgaaaaacaatccaagtatccaatgcagtggctataaaatattatttcatcatttaatcttaatcattttgaaacaaagacagacttcaattttacactgcttgcactttattttgtacagacatttcattaattattactcaattttgaggtgcaaaccttctgaatatagctttcattttggaccaaacaatttgttatggcaataaataatgatgcattgaaaaaccaatttttgtatttgatttaatcgcactcttacatttaagaaatttatatatacattcttgaatttcaacttaccaaaatagaatagcttttatttaacagcctaagcttttgttttcctgacaaatactgaaactttttggttacattaatgctgcaaagttgtttatcacctcaactttctcactgctttgctcataactaagtgtgattacatggagagagaaagttttgtaacagtaacacatgatttagagtttaaaatcatatcagaagatgggaattatttaaatataccttataaaaataagtggcttaatcaatgagaaaaaaacccaggggtttttggcttataattagaaaataagtattattcttagttaatagttaattaaaaaaaatcaacaacctaaaaagtaaaaccaattctgatgtgttcagtagctgaaagatatgtatgtttgtaggtataatatacaaatacagacacaaaccattacagtaattttgaaaacaactagaaagcttatactgtgttgacaaatatcaggttataagaggactaccccctttgttttaagcaaactttttctgctgaccgaatagctaggaaaaaactggagttaactgaaatatttctaaccaaaatattacaaagttctaagaaacaactctatcttctagattgaggtcagccaactatacccctggcggggccaaatctggccccggctggcctctttttttttgaggacaggggtcttcactctggtcggctcgggntagg

SEQ ID NO: 60790 - DNA, 2319 bp, Homo sapiens
ctctgtaattcggcacgaggtgcaacacgtgggggcggtgccggtcggagggctcctagtgcgccaggttgtgggaagtgaggctggcggtggcgacaaccgaggaggaggggcgggacgccgtggagcacggcgaccggctgagcgtcatggagggctcaggggagcagccgggcccacaaccacagcatcccggagaccaccgcatccgcgacggcgacttcgtggtgctgaaacgtgaagatgtgtttaaagcagtacaagtccagcggagaaaaaaagtaactttcgaaaaacagtggttctacctggataacgtcattggccatagttatggaactgcatttgaagtgaccagtggaggaagtctacagcccaagaagaagagggaagagcctactgcagagactaaagaagcgggcactgataatcgaaatatagttgatgatgggaaatctcagaaacttactcaagatgacataaaagctttgaaggacaagggcattaaaggagaggaaatagttcagcagttaattgaaaatagtacaacattccgagacaagacagaatttgcccaagataaatatattaaaaagaagaaaaaaaaatatgaagccatcattactgttgtgaagccatccacccgtattctttcaattatgtattatgcaagagaacctggaaaaattaaccacatgagatacgatacactagcccagatgttgacgttgggaaatatccgtgctggcaacaaaatgattgtgatggaaacgtgtgcaggcttggtgctgggtgcaatgatggaacgaatgggaggttttggctccattattcagctataccctggaggaggacctgttcgggcagcaacagcatgttttggatttcccaaatcttttctcagtggtctttatgaattccctctcaacaaagtggacagtcttctacatggaacattttctgccaagatgttatcttcagagccaaaagacagtgctttggttgaagaaagtaatggcacactggaggaaaaacaggcttctgaacaagagaatgaagacagcatggcagaggccccagagagcaaccacccagaagaccagggaaacaatggaaacaatttctcaagatccagaacataaggggcctaaagagagaggaagcaaaaaagattatattcaggaaaaacagaggagacaagaagagcagaggaaaagacatttagaggctgccgctctgctgagtgaaagaaacgcagatggtttaattgtagctagtcgtttccaccccactcccctgctgctgtctttgctggactttgtggccccttcaaggccgtttgtggtctactgtcagtacaaagagcctctgttggaatgctacacaaaactgcgggagaggggaggggtcatcaacctcaggctgtctgaaacctggctcagaaattatcaggttttgccagatcgaagtcatcctaaactgctgatgagtggaggtgggggttatcttctctccggcttcaccgttgccatggacaaccttaaagcagacaccagcctcaaatctaatgcaagcactttagaatcacacgagactgaggagcctgcagctaaaaaacgaaaatgcccagagtctgactcttaacccttttgagaattgctctgaattttgttctcaggcattatacagttagtaattaaactttaaatgccattactacttgttttttcatatcccaagaataagaacatgtctatgtacccgtttctaggaaggaggagtatatgccttttgtctatttctgacacagatgcatttggtctgtcaaaactgcaaccatggggtatgtagtatgaccaactgcatttaacaaaactcctctaagtacttctaaatattctgtgcaaatatcttgagaacttcaacatcctaaaaatgtgtttctacaagactttatattttaagctaagtggaataatacaacgtaactaaaacatggcgggtaccgaaaggagggcaattcatggaagaaatttcctctgttcattccgttctcttcaacctaagcaatatggatgtgtgagtgtgtgatttattatggtaccaaaaatgtccaccttctttcctgcagcggaataagcttttttgaaatgctgaggttttattttaatagttgacaacctgggaaagttctgagtatttattttactgctctttttttgtgcatagaaaggtttagtagggtacttttttgcattaatttgccaatactcttattctttgttctaaataaagtgactagaatttttgtgtactatt

SEQ ID NO: 60791 - DNA, 2929 bp, Homo sapiens
ttttttttttttgggagacacttcttttatttaggaaggaggtccttcccctactggcgccgggctccctgccaagagggtcggggtgaccagccgggatccagaagcactgctcctcacacacagtgggagtggaggatggcttcccgcagcctctttagaaagcccaggagttctctttatttcagagaagggcatttctatacaagacatcattccattacagtcgtcacttccaactacaggctcagggagacgactcttgatattcataggtatatatttactttaatcatattttagaaatcagctcttccacactaagatttacaataaaaataaaataatttgttctgtaaactatagtagaaagtttcaaatgtcttaaaaactatcttccatacaatggaaaaaggcttttgtgttcttttgggcaaagaagacccaaatacgctgagagaagacgcatgggcgtgttgctggagtgatgctggaagcacttctttgctacagacggttgctaagagaacagagtcactttctccccttcagcctggaagtccaactcttctcttgcttaagaatctaacctcgggatcttccaagatgcttaaggctgctctgctgttgcctggtccttggcagcagcaacaagctctgcgagagctgagaagctttttatgtcacttgcttgtagtcccaacttttgtatctgctctcccaagtactcaacatctagggccaactgcagcctgattttgtcgtcgtcgctcatgccaccactgggaccgacggggttggcgggagtggtttttctggcttgtttcagccttttcaggctctcttccatcttcttcacagagtttaatacatctgacacggtttcatagtacttatgagtgctttcactgagagtgccttctagccactgctgaattattgcttgtttgagcttatccttgtgtccgctctgaagctggaataagggcttcagagcactgtccacataggaggaagctgtggttgggacctccttattggttcttcggtaaagcctgggaacctccagggcgctttttaggaaaccgaagcaagagtcacttaaatcctggatgatcttgctactcaaggagggcacacaggctgaaaaagagctctgggagtcctccagggctgctgagatagaagaaaaattcttaaagccaatcatttcaagttttggcttgattatttccaagagttctggaagctgctcctgaagcttgtccaggtctgcaaccacatacacgagctgagtgcgggaaatggaaaccacaggctttgtttccgaaggaccacttccttggtcttcagtgtttccttgggtgatggaaggttctttgctaccagttaccaaaggtttcttgatctccttgggactttcattagaaatgggcctgagtgaaagctccattggacaaacacagagtatcgtgcccaaaatctgccagagtgaagtctccacaggcgatgcaccagtaatggcaagaacatctcatctgaccaacacctcctaaggctgctccaagttctatgagaagccaaaaggcaatacggactttcagctggggcatcttccaggacatctgtaagtgctgcttctaaggatcccgctatttctctaaatcttatttgaaaataaacaggcaagttccacttcttattgaagctgtgataggcaggatgggctcttaatctctttacactagcctgtgatccacactgccgttccaatcttctgacaaaatccatacttatggtatatttctcatgaaatgcatcgggattcccaggattaaaaagcgagggtaacttttcttctaatccttgtactatttgtggccaaacagaattcaccaaaaagtcatatccaggaacagtattgcctttttcactggagatggcacctcctgtgacttctcgaagaaggcggcaatggtgaggaacaaactccaggagtttattatacatgacctgaaggccattgggatgagattcaacaaactgctctataatcacctcgtctatgtatggtttcactagtacttggccaactaaggcctccgcgtcccgtgtcttgtcaatcgtggcgtaagtccgcaagcagtgccgtattatatcgacgtcagacgtctgaaggccttctaataggagaccttccagtgactgctgtaacatggctgtaatgccagctatacgcggtcttactttgtccaaaagaggcatgccttttgctttgacaagcatgaaactgtaactgattaaattctgtggcaattctctccaaaatttgtccagtcaaaagggggctgcttgcttctagtgcagaggtttctttagaactttgagagtttaagattttttcaattttctcaactgaccgaataacttgtataagcctcaatacacacatcttttttttcctaatgtcctcttgtttagacattcgttcatcaactgcccgaattccttcactgacagacgatctaaggctcagaacctcttctcgtaattgtcccaaaggcacagaaagctggttgagggctttgtccatgccaaccaagtttgttgaaagattgacaaaaatctgcataatccttgttgatgagttcgaccatggctgttttaagaagtttatagtagagctccaggtcatctctcagttcttccagctggacccgcttcctacagtcagacacaaaatgatcgacatcgaaatcttccttcatgaactcgtccttgtcgaagcagagcgtgtccggccccttgggcaggttcatcctacttttctccatcccgccggccaccgcctctcagtgccaagatcccagcgagaaaacgcaggaggatgcgcagaccgactcggcggccgcggccaccgccagtttcc

SEQ ID NO: 60792 - DNA, 696 bp, Homo sapiens
ttttttttttttgggaactgaatataaattaactttattacaaaaagctaaatgtatagtttctcattgtgagtgacccacccacaacaacggtaacagccctggcaggagctgggaccaggataccaattatgccaggttgaggggtacaaaggcccaggttccaggagccgggctgacaggcactgaattcacaacctccaagaggtggggtgttcttccaagggcagttgcccaccccgcttccttaatctgcaagttgcttgttcactgcatgctctgaggcatgggtccccggagtaatgtgcacgtccatcttgaaacgctgaggaagggagcgcagaagcttgaccttgatggacagaccaataagggtggccatgctgcagtgcggaatggttggtgtgaaagccacagccactgtactctcggggtcgctaacctgaacccgcacctgctctactacgttcaactcctctagcgtcagtggatgctccgggtcattgatggagcgaatcagatcgaagatctcgcgtgcgtcgatgctgtcgggaacctgctcgtcctcctcgcctgccgtcacaggccgctccccagagcgctggtagatgagggggttggcattctccaggaggccgccgccgaccccgccgccgcctaccatcgcggaaccaccaccgctgatcctagcaggcg

SEQ ID NO: 60793 - DNA, 2374 bp, Homo sapiens
ttttttttttttcttgtggccattcccaggtttaattacaaaccgatccgaacatcccatctgggtcgacagctgggagggcaggattggggggaagctgctgggcgcagcccaggccaggcaaccacgtccttcccctgctcccaggtggagtaggggcctcacgactgcctcgatatccactgtcttggagcagcctggctaccccgagatcccaggtgacctcaaggctgcctgcacttcagcgccagcatgtatcctggcctgagaaccccaaagcaccttaagcgtcccccctcaaagacaactgtgcacccagtcctcaggtgggaagaggaagcccagccaggcccggaatccgcctcctccccagggtcctgggagctctgactctccggggcgttagaccgaaccagccaggcgagagggggacccacgggccagggctccgaggcagcggctgcttctggatatattttctttaaaggcgaaatggttccgtctttggtatgaacaccctcactccaggcaaaggagggggtgggcaggggccccggcaggaggaggctctgcccagcccggggccagctggaggaaggaccatgccagaggctcatgcggaggaaggagaggcagcggtggttcggcctgaccaggatccaggaggagggctgagagccccaaggccatgacaggcaggagccggggctgagaacaggcaggagccagggctgagaacggtcacctggctcagggctcccgtgagaccacgccacgcaggtgcagctcactctcggcggccacgatgggctgcccgttctgcaggtggtggtcgatcaggtggctgatgctctcaaacagcacgtccttcgtccgtaccacgccctcggggtccacgagcagcaggtgcttgggctgcccggcgtgcatgccggtgaggacatactgcccggggttggtgacgctgtctcgcacaaggaagtccccgtcagctcgaagcatcctctctgccgcccggcggctcatccggccgtggtaccagggctcctgacgcagctgttcctccgtgggggccacaggggcccggcgggtaggggggctgggccactggtcctccaagggaagaggggctgctgtcacgcctgccgccactgagcactcatgcaacttcagggcatcctcaaagggtcgcatgtcaaacagatcctttttggggctgtcctccggctcgggggcgtccagaccctgggtgttgacatacaggtgctcctcgtggtccggggggccccgggcgtccgcctgcacgtagccgtcccccggtggagctgtaccggtggaccccacgtcccatggcaggctgcaggcatctcttagagaaggagatgggccctggtcgagggccgtgagggcgcagggctgtgtcagggccagcctggagtccactagcccgcccagcggcggctccttccccgggatgctgttgtagtaattgtgctccaaagagtcctcctcgtccccccaggccgactcctccggccctgccagcctttctgggggcagcgccaccttgggcgggctgtgcaggtactgcttgaagcgcagctcgaaagcttggccccacggtgctgatgatgctctgtgccaggccctcacagcactccaggatgtggcaggctctctggttgatggggtccttggcgacgtaggccacgtaatccgtcatgtccgtgtctccgcctgacgcgaaggagatggacggcatgtggtggttggcgatgacctggcgcgtggcaggcacggagaggctgaggccatcagtggagatgtggatggagatgctcatgccggcaaagcgaaggttgctcttgcccaggacggacgccagggccttgttgggggcctttttcttccaggatccccggacgccaggcacggcctcatggagccggttgatggcttccctggtcacctgcgtgcgcgtgttaaagtccagggagcgcatagagcggagaacctcgatgcagcccatgtaccgcacgacgtaggagaccccgggccccaggaccctggcgtcggggtgtagccagccgtgcgcgggtttgtggatgaagctgcccttccggatccactcggcggcggcggcggcgtccccggaccccgccgccccccgcccgccccgcgacccccgcgaccccgcgccccgacagcggctgagcgcgggcaggggacagggcgcggcgcagcggggctcgcaggcgcccaggacggcggccgccagcgccgggacgccccccgggcccgccggatcgggttgggggcccgcgccccccgagcccgaggcgcccaccaccttctgcgcgttgctgccccgaat

SEQ ID NO: 60794 - DNA, 4179 bp, Homo sapiens
gcggccgcagcgtggagccgggtgattgtgaccgccgggggagccgggagccggccgcggcgccctctctccgtgtggccccctgagcggcccccctcccctgcccgggagggaggcggggggcacctgtgggcagccagtgaaccccgtcttcgatttgtcccgccggaacccgcaggaggacttcgagctgattcagcgcatcggcagcggcacctacggcgacgtctacaaggcacggaatgttaacactggtgaattagcagcaattaaagtaataaaattggaaccaggagaagactttgcagttgtgcagcaagaaattatcatgatgaaagacttgtaaacacccagagtattgttgcttatttttggaagctatcttcaggcgagataagctttggattttgcatggagtttttgtggaagtgggtcctttacaggatatttatcacgtaactggacctctgtcagaactgcaaattgcatatgttagcagagaaacactgcagggattatattatcttcacagtaaaggaaaaatgcacagagatataaagggagctaacattctattaacggataatggtcatgtgaaattggctgattttggagtatctgcacagataacagctacaattgccaaacggaagtctttcattggcacaccatattggatggctccagaagttgcagctgttgagaggaaggggggttacaatcaactctgtgatctctgggcagtgggaatcactgccatagaacttgcagagcttcagcctcctatgtttgacttacacccaatgagagcattatttctaatgacaaaaagcaattttcagcctcctaaactaaaggataaaatgaaatggtcaaatagttttcatcactttgtgaaaatggcacttaccaaaaatccgaaaaaaagacctactgctgaaaaattattacagcatccttttgtaacacaacatttgacacggtctttggcaatcgagctgttggataaagtaaataatccagatcattccacttaccatgatttcgatgatgatgatcctgagcctcttgttgctgtaccacatagaattcactcaacaagtagaaacgtgagagaagaaaaaacacgctcagagataacctttggccaagtgaaatttgatccacccttaagaaaggagacagaaccacatcatgaacttcccgacagtgatggttttttggacagttcagaagaaatatactacactgcaagatctaatctggatctgcaactggaatatggacaaggacaccaagggtggttactttttaggtgcaaacaagagtcttctcaagtctgttgaagaagaattgcatcagcgaggacacgtcgcacatttagaagatgatgaaggagatgatgatgaatctaaacactcaactctgaaagcaaaaattccacctcctttgccaccaaagcctaagtctatcttcataccacaggaaatgcattctactgaggatgaaaatcaaggaacaatcaagagatgtcccatgtcagggagcccgagcaaagccatcccaagttccacctagaccaccacctcccagattacccccacacaaacctgttgccttaggaaatggaatgagctccttccagttaaatggtgaacgagatggctcattatgtcaacaacagaatgaacatagaggcgaaaacctttcaagaaaagaaaagaaagatgtaccaaagcctattagtaatggtcttcctccaacacctaaagtgcatatgggtgcatgtttttcaaaagtttttaatgggtgtcccttgaaaattcactgtgcatcatcatggataaacccagatactagagatcagtacttgatatttggtgccgaagaagggatttataccctcaatcttaatgaacttcatgaaacatcaatggaacagctattccctcgaaggtgtacatggttgtatgtaatgaacaattgcttgctatcaatatctggtaaagcttctcagctttattcccataatttaccagggctttttgattatgcaagacaaatgcaaaagttacctgttgctattccagcacacaaactccctgacagaatactgccaaggaaattttctgtatcagcaaaaatccctgaaaccaaatggtgccagaagtgttgtgttgtaagaaatccttacacgggccataaatacctatgtggagcacttcagactagcattgttctattagaatgggttgaaccaatgcagaaatttatgttaattaagcacatagattttcctataccatgtccacttaaaatgtttgaaatgctggtagttcctgaacaggagtaccctttagtttgtgttggtgtcagtagaggtagagacttcaaccaagtggttcgatttgagacggtcaatccaaattctacctcttcatggtttacagaatcagataccccacagacaaatgttactcatgtaacccaactggagagagataccatccttgtatgcttggactgttgtataaaaatagtaaatctccaaggaagattaaaatctagcaggaaattgtcatcagaactcacctttgatttccggattgaatcaatagtgtgcctacaagacagtgtgctagctttctggaaacatggaatgcaaggtagaagttttagatctaatgaggtaacacaagaaatttcagatagcacaagaattttcaggctgcttggatctgacagggtcgtggttttggaaagtaggccaactgataaccccacagcaaatagcaatttgtacatcctggcgggtcatgaaaacagttactgagaattgttgtgctttgacagttaactctagaaagaaagaacactaccactgcaacattaatggatgcttgaagctgtacaaaagctgcagtaacctgtcttcagttactttgtaatttattgtggcatgagataagatggggaaaattttgttttaagtggtatggatatatttagcatattgaaccacacaagtgcttaattcattgttatgtaatctttgtacatataggcagtattttttctgtgaaacttcatattgctgaagacatacactaagaatttatgtagataatgtacttttatgagatgtacaagtaagtgtcttatctgtacagatgtaaatgttgatgaaaatgcaattggggttaatattttaagaattctttagtatattcttgggtgtggctatattacaaaatgggatgctggcaatgaaacaatacatttaacactattgtatttttattatatgtaatttagtaatatgaatataaatcttgtaacttttaaaattgtaatggaggctgtaatcattttataatctttttaattttaatgcaagtacactggtgtttatatttgcacagagtattgatatgtgatgtattaagtcacaaaagtaagctgtgacattgtctataagcatttggctccacaaatgtatttggattgttttctatgtgaagcaaaccaattataattaaccacatgttgtagtaactggtctttttatatttaagcagaatcctgtaagattgcttgtctttgcttaaaaacaatacctttgaacatttttgaatcacagaatagcggtaccatgatagaatactgcaattgtggtcagaattacagtatgcacaaagaattaattagcattattaaagagtcctcactaaacatttcatatgatcacactgaagaactgtaacattccatagagtgaagtggttcaaatttctcttggaatttttacttttgttggccttattttatgatccttttcatatttcttttgacttagagtattaatacatggccaaaataatttagttactacctcatacaaacaatataatggttactacacatcacaggaacttagttttggtttaagtcatttttgattgcttttttccaatggaatatgtatataccaggttttagcaaaatgcacacttttggctctttttggtatatgttctttatattttaatgtgagtatatacactaagaacaaactaaattgtgatttatgatcttcatttattttaatggtaatggttttaaaatatgttcctgattgtacatattgtaaaataaacatgttttttaacaaaaaaaaaa

SEQ ID NO: 60795 - DNA, 1033 bp, Homo sapiens
ttttttttttttaaggtagaaggccagaactttataccagtagcacatgatccagcataaaggcagtcttgaaatactgcattatccagggacagggcttcagcagctgatctgtcacacaccaggtgtcccacgtaggaatttcttaaaccacaggtaggatgtagctgcagagagtccataccaggtcacgatgtactgcagatgctcgttcctcagagtaactctggtttgccctccaatgggtcctccagggactgtgctctggaagttggcatcaatgaagatgggctctgcgcctgtgattctggccatagcttccaggtctcgataatgccagtggttcctttctggattgttctcagggacaaaaggctgcctggtttctgtcagcctcaccatcccaatgaggtccacttctccctcaatctggcctttctgccgggtttcaggattcactttcttcctgggaacgaaccctctatttaccaggatggtgactcccaggtcggtgcagtggaagggagtgaccacataggccccactctgagttgaggaggagatgaggccgccctcccgggcctcccggacagggtccaccatggtccggggcatcatatacagctccttggaatggtcaaagcaccccctgaccttcactgggccaatactcagaatttttcagttccattgggtcggctggcagagggacaggctcagccagaactctggactccaactctgcaatcaggttcagcttccacttccgacgctggacctgccatgtccccaagccaaaggcagtcaccagggatgaggagcaggacccactgaagaaaggagtcatcttccgcttttgtggcagatgcttctgctgcagaactgccacatctgcttggcctccaggccacccctgggcgcggggagaccctgaggacgctcctccaggcggcgctggccggggcccgtcccagccccgccgcccgcagccccagctgcaacgcagccaccgccgccatcgcacccggccccg

SEQ ID NO: 60796 - DNA, 5470 bp, Homo sapiens
  misc_feature (1)...(5470): n = a,t,c or g
tttcgtgggctgtaggcgccaaggccatgtccgactcgtgggtcccgaactccgcctcgggccaggacccagggggccgccggagggcctgggccgagctgctggcgggaagggtcaagagggaaaaatataatcctgaaagggcacagaaattaaaggaatcagctgtgcgcctcctgcgaagccatcaggacctgaatgcccttttgcttgaggtagaaggtccactgtgtaaaaaattgtctctcagcaaagtgattgactgtgacagttctgaggcctatgctaatcattctagttcatttataggctctgctttgcaggatcaagcctcaaggctgggggttcccgtgggtattctctcagccgggatggttgcctctagcgtgggacagatctgcacggctccagcggagaccagtcaccctgtgctgctgactgtggagcagagaaagaagctgtcttccctgttagagtttgctcagtatttattggcacacagtatgttctcccgtctttccttctgtcaagaattatggaaaatacagagttctttgttgcttgaagcggtgtggcatcttcacgtacaaggcattgtgagcctgcaagagctgctggaaagccatcccgacatgcatgctgtgggatcgtggctcttcaggaatctgtgctgcctttgtgaacagatggaagcatcctgccagcatgctgacgtcgccagggccatgctttctgattttgttcaaatgtttgttttgaggggatttcagaaaaactcagatctgagaagaactgtggagcctgaaaaaatgccgcaggtcacggttgatgtactgcagagaatgctgatttttgcacttgacgctttggctgctggagtacaggaggagtcctccactcacaagatcgtgaggtgctggttcggagtgttcagtggacacacgcttggcagtgtaatttccacagatcctctgaagaggttcttcagtcataccctgactcagatactcactcacagccctgtgctgaaagcatctgatgctgttcagatgcagagagagtggagctttgcgcggacacaccctctgctcacctcactgtaccgcaggctctttgtgatgctgagtgcagaggagttggttggccatttgcaagaagttctggaaacgcaggaggttcactggcagagagtgctctcctttgtgtctgccctggttgtctgctttccagaagcgcagcagctgcttgaagactgggtggcgcgtttgatggcccaggcattcgagagctgccagctggacagcatggtcactgcgttcctggttgtgcgccaggcagcactggagggcccctctgcgttcctgtcatatgcagactggttcaaggcctcctttgggagcacacgaggctaccatggctgcagcaagaaggccctggtcttcctgtttacgttcttgtcagaactcgtgccttttgagtctccccggtacctgcaggtgcacattctccacccacccctggttcccagcaagtaccgctccctcctcacagactacatctcattggccaagacacggctggccgacctcaaggtttctatagaaaacatgggactctacgaggatttgtcatcagctggggacattactgagccccacagccaagctcttcaggatgttgaaaaggccatcatggtgtttgagcatacggggaacatcccagtcaccgtcatggaggccagcatattcaggaggccttactacgtgtcccacttcctccccgccctgctcacacctcgagtgctccccaaagtccctgactcccgtgtggcgtttatagagtctctgaagagagcagataaaatccccccatctctgtactccacctactgccaggcctgctctgctgctgaagagaagccagaagatgcagccctgggagtgagggcagaacccaactctgctgaggagcccctgggacagctcacagctgcactgggagagctgagagcctccatgacagaccccagccagcgtgatgttatatcggcacaggtggcagtgatttctgaaagactgagggctgtcctgggccacaatgaggatgacagcagcgttgagatatcaaagattcagctcagcatcaacacgccgagactggagccacgggaacacatggctgtggacctcctgctgacgtctttctgtcagaacctgatggctgcctccagtgtcgctcccccggagaggcagggtccctgggctgccctcttcgtgaggaccatgtgtggacgtgtgctccctgcagtgctcacccggctctgccagctgctccgtcaccagggcccgagcctgagtgccccacatgtgctggggttggctgccctggccgtgcacctgggtgagtccaggtctgcgctcccagaggtggatgtgggtcctcctgcacctggtgctggccttcctgtccctgcgctctttgacagcctcctgacctgtaggacgagggattccttgttcttctgcctgaaattttgtacagcagcaatttcttactctctctgcaagttttcttcccagtcacgagatactttgtgcagctgcttatctccaggccttattaaaaagtttcagttcctcatgttcagattgttctcagaggcccgacagcctctttctgaggaggacgtagccagcctttcctggagacccttgcaccttccttctgcagactggcagagagctgccctctctctctggacacacagaaccttccgagaggtgttgaaagaggaagatgttcacttaacttaccaagactggttacacctggagctggaaattcaacctgaagctgatgctctttcagatactgaacggcaggacttccaccagtgggcgatccatgagcactttctccctgagtcctcggcttcagggggctgtgacggagacctgcaggctgcgtgtaccattcttgtcaacgcactgatggatttccaccaaagctcaaggagttatgaccactcagaaaattctgatttggtctttggtggccgcacaggaaatgaggatattatttccagattgcaggagatggtagctgacctggagctgcagcaagacctcatagtgcctctcggccacaccccttcccaggagcacttcctctttgagattttccgcagacggctccaggctctgacaagcgggtggagcgtggctgccagccttcagagacagagggagctgctaatgtacaaacggatcctcctccgcctgccttcgtctgtcctctgcggcagcagcttccaggcagaacagcccatcactgccagatgcgagcagttcttccacttggtcaactctgagatgagaaacttctgctcccacggaggtgccctgacacaggacatcactgcccacttcttcaggggcctcctgaacgcctgtctgcggagcagagacccctccctgatggtcgacttcatactggccaagtgccagacgaaatgccccttaattttgacctctgctctggtgtggtggccgagcctggagcctgtgctgctctgccggtggaggagacactgccagagcccgctgccccgggaactgcagaagctacaagaaggccggcagtttgccagcgatttcctctcccctgaggctgcctccccagcacccaacccggactggctctcagctgctgcactgcactttgcgattcaacaagtcagggaagaaaacatcaggaagcagctaaagaagctggactgcgagagagaggagctattggttttccttttcttcttctccttgatgggcctgctctcgtcacatctgacctcaaatagcaccacagacctgccaaaggctttccacgtttgtgcagcaatcctcgagtgtttagagaagaggaagatatcctggctggcactctttcagttgacagagagtgacctcaggctggggcggctcctcctccgtgtggccccggatcagcacaccaggctgctgcctttcgctttttacagtcttctctcctacttccatgaagacgcggccatcagggaagaggccttcctgcatgttgctgtggacatgtacttgaagctggtccagctcttcgtggctggggatacaagcacagtttcacctccagctggcaggagcctggagctcaagggtcaggcagggcaaccccgtggaactgataacaaaagctcgtctttttctgctgcagttaatacctcggtgcccgaaaaagagcttctcacacgtggcagagctgctggctgatcgtggggactgcgacccagaggtgagcgccgccctccagagcagacagcaggctgcccctgacgctgacctgtcccaggagcctcatctcttctgacgggacctgccactgcacaccagcccagctcccgtgtaaataatttattacaagcataacatggagctcttgttgcactaaaaagtggattacaaatctcctcgactgctttagtggggaaaggaatcaattatttatgaactgtccggccccgagtcactcagcgtttgcgggaaaataaaccactggtcccagagcagaggaaggctacttgagccggacaccaagcccgcctccagcaccaagggcgggcagcaccctccgaccctcccatgcgggtgcacacgaagggtgaggctgacacagccactgcggagtccaggctgctagaggtgctcatcctcactgccgtcctcaggtgggttcgggcttcaccgcctggccctctgtggtcacagaggggctcggtggcccaggtggtggttccgcctccaggggcagggccttgtcctgggtctgtgtcagcgggtgcaccatggacatgtgtacattgaggttgtgggccttctcaaaccgccggccacactggtcacaggcaaagtccagctcagtctcagccttgtgtttggtcatgtggtacttgagggatgcccgctgcctgcactggaacccacagacctcacacctgggggacagaggcagataaaaaggtgcgagggccacagccctggggggggtcctgactcacacttactgcaaaggcttggctcccgaatgtcgcatttggtggacgagaaggtgcttccgctgcttgaaggtttgtccacattcgtcacagatatagttccgcacctctgagaggggagagtccagtgagtccaggcccctgatgctccaacctcccggggggacgacgatgacaatgtgaaaccatcacagctgggaagacatttctgcacatggttcaccatgcagtgggcccaagcaaggggcctatgagggcctcgtttattaagatctttaaactgctttatacactgtcacgtggcttcatcagctgtgtgcatttcaggatggtttttaaagaaacctcagaaagctatttccttaaccacaaaananaaaaaaaaaa

SEQ ID NO: 60797 - DNA, 1913 bp, Homo sapiens
  misc_feature (1)...(1913): n = a,t,c or g
tttcgtccggaacggcggcacggggttgttgtgggggtcagtcccccggggactggagggagacgcggcacgcggcctctgcgaccctatgaactctgaccccagctcccacactgtcgcctatcaccggcccactctccgtgccgcgtgtcccttaaaagctggggcctgggacaggaacgacagacaatgcagccaatggcgtcacgcgcggtgccccgctacccaatcgaaaggcgtggctgagggaaacgcggtgggaaccgcccccgactccaggcgactccttggccgggcgggggagagcgtccccgtcagctgagagcatcctcactcggtcagttcctcgggcgagttacggggacgacctgcgggagcacgcgggcagtggccggacgctgaagcccaggagagcgatggagacgtatgcggaggttgggaaggagggcaagccttcctgtgcatcggtggatctgcagggagacagctccttacaggtggagatttctgacgcagtgagtgagcgggacaaggtgaaattcactgttcaaacaaagagctgcctccctcacttcgcccagaccgagttctcagtcgtgcggcagcacgaggagttcatctggctgcatgatgcctacgtggagaatgaggagtacgccggcctcatcatccccccagcccctccgaggccagactttgaggcttcgagggaaaagctacagaaattgggcgagggggacagctctgtcactcgggaagagtttgccaagatgaagcaggagctggaaggnagtacctggccatctttaagaagacagttgcgatgcacgaagtctttctgcagcgcctgggcggcccaccccaccctgcgtcgagaccacaacttctttgtgtttttgggaatatgggacaggatctgagtgtccgggggaaggaacaggaaggagctcctcggagggtttctgagggatattgttgaagttccgcggatgaagccctcatcacgggcatgtcagggctcaaggaggtggatgacttctttgagcatgagaggacaaacctgttggagtatcacacccgtatccgagatgcctgcctgcggccgaccngtcatgcggcccacaagtgtacgcagggcccaaggggtcctggatccccctgcccctctccccagcggttcaactccttgggggagagaagagagcagggcnagccttgttgtttgtctgtggccacaagcaccaaggcttgacatgcagatgtaggggctctgatgggggctgttccccaacaggcctggcagacgattatatccctatctcagctgcgctgagcagtctgggaacacaggaagtcaaccagctaaggacgagcttcctcaaattggcagagctctttgaacggctgaggaagctggagggccgggtggcttccgatgaggacctgaagctgtcagacatgctgaggtactacatgcgtgactcacaggcagccaaggacctgctgtaccggcggctgcgggcactggccgactacgagaatgccaacaaggcgctggacaaggcgcgcaccaggaaccgggaggtgcggcccgccgagagccaccagcagctgtgctgccaacgcttcgagcgcctctccgactccgccaagcaagagctcatggacttcaagtcccgccgggtctcctcttttcgaaagaatctcattgagctggcagagctggagctcaaacacgccaaggccagcaccctgattctccggaacacccttgttgccctaaagggggagccttagagtagccagagctcagccaggccctaatctgggatctccagtgaccagggtatcccagacccctctctccggcaagatgtctccttccctagcagtgccactagccacactgtatt

SEQ ID NO: 60798 - DNA, 750 bp, Homo sapiens
gctgcgcttccctggtcaggcacggcacgtctggctggccgccaggatgcaggccccgcacaaggagcacctgtacaagttgctggtgattggcgacctgggcgtggggaagaccagtatcatcaagcgctacgtgcaccagaacttctcctcgcactaccgggccacaatcggcgtggacttcgcgctcaaggtgctccactgggacccggagactgtggtgcgcctgcagctctgggatatcgcaggtcaagaaagatttggaaacatgacgagggtctattaccgagaagctatgggtgcatttattgtcttcgatgtcaccaggccagccacatttgaagcagtggcaaagtggaaaaatgatttggactccaagttaagtctccctaatggcaaaccggtttcagtggttttgttggccaacaaatgtgaccaggggaaggatgtgctcatgaacaatggcctcaagatggaccagttctgcaaggagcacggtttcgtaggatggtttgaaacatcagcaaaggaaaatataaacattgatgaagcctccagatgcctggtgaaacacatacttgcaaatgagtgtgacctaatggagtctattgagccggacgtcgtgaagccccatctcacatcaaccaaggttgccagctgctctgggctgtgccaaaatcctagtaggcacctttgctggtgtctggtaggaatgacctcattgttccacaaattgtgcctccaatttta

SEQ ID NO: 60799 - DNA, 1583 bp, Homo sapiens
acgatttcgtgaaaaacaccctgtttcctctccggcccccaccgcggatcatgtaccaggattatcccgggaactttgacacctcgtcccggggcagcagcggctctcctgcgcacgccgagtcctactccagcggcggcggcggccagcagaaattccgggtagatatgcctggctcaggcagtgcattcatccccaccatcaacgccatcacgaccagccaggacctgcagtggatggtgcagcccacagtgatcacctccatgtccaacccataccctcgctcgcacccctacagccccctgccgggcctggcctctgtccctggacacatggccctcccaagacctggcgtgatcaagaccattggcaccaccgtgggccgcaggaggagagatgagcagctgtctcctgaagaggaggagaagcgtcgcatccggcgggagaggaacaagcttggctgcagccaagtgccggaaccgacgccgggagctgacagagaagctgcaggcggagagcacatgaggtgcaggatgaggagtcaggccctgcagaacgacattgctgagctgcaagaaggagaaggagaagttggagttcatgttggtggctcacggcccaagtgtgcaaagattagccccgaggaggcgccgatcgcccccagccgccttgctgcagcccatgcgcagtgggggtggctcggtgggcgctgtagtggtgaaacaggagcccctggaagaggacagcccctcgtcctcgtcggcggggctggacaaggcccagcgctctgtcatcaagcccatcagcattgctgggggcttctacggtgaggagcccctgcacacccccatcgtggtgacctccacacctgctgtcactccgggcacctcgaacctcgtcttcacctatcctagcgtcctggagcaggagtcacccgcatctccctccgaatcctgctccaaggctcaccgcagaagcagtagcagcggggaccaatcatcagactccttgaactcccccactctgctggctctgtaacccagtgcacctccctccccagctccggagggggtcctcctcgctcctccttcccagggaccagcaccttcaagcgctccagggccgtgagggcaagagggggacctgccaccagggagcttcctggctctgggggacccaggtgggacttagcagtgagtattggaagacttgggttgatctcttagaagccatgggacctcctccctcattcatcttgcaagcaaatcccatttcttgaaaagccttggagaactcggtttggtagacttggacatctctctggcttctgaagagcctgaagctggcctggaccattcctgtccctttgttaccatactgtctctggagtgatggtgtccttccctgccccaccacgcatgctcagtgccttttggtttcaccttccctcgacttgaccctttcctcccccagcgtcagtttcactccctcttggtttttatcaaatttgccatgacatttcatctgggtggtctgaatattaaagctcttcatttctgcaaaaaaaaaagtcgacgcggccg

SEQ ID NO: 60800 - DNA, 2340 bp, Homo sapiens
tttcgtccgccctgtaggcccgcctctccagcaacctgacacctgcgccgcgccccttcactgcgttccccgcccctgcagcggccacagtggtgcggccggcggccgagcgttctgagtcacccgggactggaggtaggaacccagccatggtgaacgaagccagaggaaacagcagcctcaacccctgcttggagggcagtgccagcagtggcagtgagagctccaaagatagttcgagatgttccaccccgggcctggaccccgagcggcatgagagactccgggagaagatgaggcggcgattggaatctggtgacaagtggttctccctggaattcttccctcctcgaactgctgagggagctgtcaatctcatctcaaggtttgaccggatggcagcaggtggccccctctacatagacgtgacctggcacccagcaggtgaccctggctcagacaaggagacctcctccatgatgatcgccagcaccgccgtgaactactgtggcctggagaccatcctgcacatgacctgctgccgtcagcgcctggaggagatcacgggccatctgcacaaagctaagcagctgggcctgaagaacatcatggcgctgcggggagacccaataggtgaccagtgggaagaggaggagggaggcttcaactacgcagtggacctggtgaagcacatccgaagtgagtttggtgactactttgacatctgtgtggcaggttaccccaaaggccaccccgaagcagggagctttgaggctgacctgaagcacttgaaggagaaggtgtctgcgggagccgatttcatcatcacgcagcttttctttgaggctgacacattcttccgctttgtgaaggcatgcaccgacatgggcatcacttgccccatcgtccccgggatctttcccatccagggctaccactcccttcggcagcttgtgaagctgtccaagctggaggtgccacaggagatcaaggacgtgattgagccaatcaaagacaacgatgctgccatccgcaactatggcatcgagctggccgtgagcctgtgccaggagcttctggccagtggcttggtgccaggcctccacttctacaccctcaaccgcgagatggctaccacagaggtgctgaagcgcctggggatgtggactgaggaccccaggcgtcccctaccctgggctctcagcgcccaccccaagcgccgagaggaagatgtacgtcccatcttctgggcctccagaccaaagagttacatctaccgtacccaggagtgggacgagttccctaacggccgctggggcaattcctcttcccctgcctttggggagctgaaggactactacctcttctacctgaagagcaagtcccccaaggaggagctgctgaagatgtggggggaggagctgaccagtgaagaaagcgtctttgaagtctttgttctttacctctcgggagaaccaaaccggaatggtcacaaagtgacttgcctgccctggaacgatgagcccctggcggctgagaccagcctgctgaaggaggagctgctgcgggtgaaccgccagggcatcctcaccatcaactcacagcccaacatcaacgggaagccgtcctccgaccccatcgtgggctggggccccagcgggggctatgtcttccagaaggcctacttagagtttttcacttcccgcgagacagcggaagcacttctgcaagtgctgaagaagtacgagctccgggttaattaccaccttgtcaatgtgaagggtgaaaacatcaccaatgcccctgaactgcagccgaatgctgtcacttggggcatcttccctgggcgagagatcatccagcccaccgtagtggatcccgtcagcttcatgttctggaaggacgaggcctttgccctgtggattgagcggtggggaaagctgtatgaggaggagtccccgtcccgcaccatcatccagtacatccacgacaactacttcctggtcaacctggtggacaatgacttcccactggacaactgcctctggcaggtggtggaagacacattggagcttctcaacaggcccacccagaatgcgagagaaacggaggctccatgaccctgcgtcctgacgccctgcgttggagccactcctgtcccgccttcctcctccacagtgctgcttctcttgggaactccactctccttcgtgtctctcccaccccggcctccactcccccacctgacaatggcagctagactggagtgaggcttccaggctcttcctggacctgagtcggccccacatgggaacctagtactctctgctctaaaaaaaa

SEQ ID NO: 60801 - DNA, 1156 bp, Homo sapiens
  misc_feature (1)...(1156): n = a,t,c or g
ttttttttttttgtcgccacagcagcggacacgtttaatggcaggcgcctctacagttacaagacatgcctgaggtcagttcgcccccttagggggcactccccgagctaaacacagatgacagcgacccagggtgctggaggcccggggtcacctgaggactgcagaagtcctgcgctccgctaactgtgtggacacgcggctgccaggggcacaggtaggcaacatggatgggaagagagcccaggccgcccccgtctcacagctgcagagcacgcagaccacggcactgcaggccaaccaggcagagctgctggtgcgacacatcctggggctgggctggtcggggagaagctctccggctgacgctgcctgggcctgcccctgcagggcccgggaaccgagcccaggcctctgtttctctgagaggctggagcagagcccttggtggccctggaaagcggctgcaaggtggccttagtcaggggaggcacgcgggcgtcgcgtccagaatcttctgggctatggaggtgagtgcagcgaaggcggggctcccggggaactcctggatgaagtcgtggccctcctccagggtcctcatgagcgcagggtccaggggcacggagcctaagaagggcaccccggcgagctgggccagctcctctccgccgcccctggagaagacgctggtgcactccgtgcagtgtgggcaggtgaagccgctcatattctccacgattcccatcacccgcaagcccgtcttcctacagaaggtcagctcgcgcctcacgtcccccacggacaccgcctggggcgtggtgaccacgagggcccccaggggctggtagggacgcagggcttctatggtggccatgtgctcatcggaggtccccgggggcgtgtccaccaccaggtagtccagctccccccaggccacgtcggacacaaactgctttatcagcgcttcttgcctgcatggcgcagtgccagggccagctccgtggagatggtgcttttcccaacgcccccctttcctgagaggaccaggatgatgtgcctgacgccggccaggtttccaggcntgccgccgcctccatcccgccgcctccaggagctcgnggctgcacgtccttacccgcggccgtcagcctcccag

SEQ ID NO: 60802 - DNA, 1737 bp, Homo sapiens
tccctggctcgcctcgcgcctgccggcggatccgtggtcatgccaacccagcagccggctgcgccgagtactcgtgcccccaaaccctcccggagtctctctggctcactttgtgccctgttttctgatgcagactcgggatccgggatgaaggcggagcttccccctgggcctggggcagtggggagggaaatgaccaaagaagaaaagctgcagcttcggaaggaaaagaaacagcagaagaagaaacggaaggaagaaaagggggcagaaccagagactggctctgctgtatctgcagcccaatgtcaaggcccaaccagagaactgccagaatcgggcattcagttgggcactcctcgggagaaagttccagctggtcggagtaaggccgaacttcgggctgagcgtcgagccaagcaggaggccgagcgggccctgaaacaggcaagaaaaggggaacaaggaggaccacctcctaaggccagccccagcacagctggagaaaccccctcaggagtgaagcgtctccctgagtaccctcaggttgatgacctacttctgagaaggcttgttaaaaaaccagagcgtcaacaggttcctacacgaaaggattatggatccaaagtcagtctcttctctcacctaccccagtacagcagacaaaactctctgacccagtttatgagcatcccatcctctgtgatccacccagccatggtgcgactcggcctgcagtactcccagggcctggtcagtggctccaatgcccggtgtattgccctgcttcgtgccttgcagcaggtgattcaggattacacaacaccgcctaatgaagaactctccagggatctagtgaataaactaaaaccctacatgagcttcctgactcagtgccgtcccctgtcagcgagcatgcacaacgccatcaagttccttaacaaggaaatcaccagtgtgggcagttccaagcgggaagaggaggccaagtcagaacttcgagcagccattgatcggtatgtgcaagagaagattgtgctagcagctcaggcaatttcacgctttgcttaccagaagatcagtaatggagatgtgatcctggtatatggatgctcatctctggtatcacgaattcttcaggaggcttggacagagggccggcggtttcgggtggtagtggtggacagccggccatggctggaaggaaggcacacactacgttctctagtccatgctggtgtcccagcctcctacctgctgattcctgcagcctcctatgtgctcccagaggtttccaaggtgctattgggagctcatgcactcttggccaacgggtctgtgatgtcacgggtagggacagcacagttagccctggtggctcgagcccataatgtaccagtgctggtttgcctgtgaaacatacaagttctgtgagcgtgtgcatgactgattgccttttgtctctaaatgaagctagatgaccctgatgatctgcaaagtaagcggggagaacaaggttgcgctggctaactggcagaaccacgcattccctacggttgttgaatctaagtctatgatgtgactcccccaagagctttgttggatctggtgatcacggagctggggatgatccctttgcagttctgtacctgttgttctacgagtcaagagcagtgaccagtgacgggggaaacacagggttaataaatgccatactccctaccctcaaaaaaaaaa

SEQ ID NO: 60803 - DNA, 4379 bp, Homo sapiens
gaatcctggtcgacgattcccgcctttccagcatgcaggggctgctcaggtaagggggacgctcctccttgcccgccgcactcattcattaagtggcactgctcagtggtgcgggggtgggcgtgcttccgtgggctgggcgctgggttcgcggcgcgccctcctgctgcctccccggagctcccgggccagtagcgtttagtcacatcaagaaatagaacagaattcagccatggccccaagaaagagaggtggacgaggtatttcattcatcttttgctgtttccgaaataatgatcacccagaaatcacgtatcggctgcgaaatgatagcaactttgcgcttcagaccatggaaccagcattgcccatgccccctgtggaggagctggatgtcatgttcagtgaactggtggatgaactggacctcacagacaaacacagagaagccatgtttgcacttccagctgagaaaaaatggcaaatatactgtagcaagaaaaaggaccaggaagaaaacaagggagctacaagttggcctgaattctacattgatcagctcaattccatggctgctagaaaatctctgctggctttagagaaggaagaagaagaagaaagaagtaaaactatagagagtttaaagacagcactgaggacaaaaccaatgaggtttgtaaccagattcatcgacttggatggcctatcatgtatcctcaactttctaaagaccatggactacgagacctcagagtctcgaatacatacttctctcattggctgtataaaagcgttaatgaacaactctcaaggccgggctcacgtcctggctcattctgagagtattaatgtaattgctcagagtctgagcacagagaacattaaaacgaaggtggccgtgctggaaatcttgggcgccgtgtgcctggttcccgggggccacaagaaggttctgcaggccatgctgcactaccagaagtatgccagcgaaaggacccgctttcagacattaattaacgacttggataaaagcactgggcggtatcgagatgaagtgagtctcaagactgccatcatgtccttcattaatgcagtgctcagccaaggtgcaggagtggagagtttggactttagacttcatcttcgctatgaaatttctgatgttaggaattcaccctgtaatggataaattaaggaaacacgaaaattcaacattagataggcatttagacttttttgaaatgctccgaaatgaagatgaactagaatttgccaaaagatttgaactggttcacatagacacaaaaagtgcaactcagatgtttgagctgaccaggaagaggctgacacatagtgaagcttacccgcatttcatgtccatcctgcaccactgcctccaaatgccttacaagaggagtggcaacactgttcagtactggctactactagatagaattatacagcagatagttatccagaatgacaaaggacaggaccctgactccacacctttggaaaactttaatattaagaatgtcgtacgaatgttggttaatgaaaatgaagttaagcagtggaaagaacaagcggaaaaaatgagaaaagagcacaatgagctacaacagaaactggaaaagaaagaacgagaatgtgatgctaagactcaagagaaggaagagatgatgcagaccttaaataaaatgaaagagaaacttgaaaaggagactactgagcataagcaagtcaagcagcaggtggcggacctcacagcacagctccatgagctcagcaggagggccgtctgtgcttcaatcccaggtggaccctcgcctggagcaccaggagggccctttccttcctctgtgcctggatctctccttcctcccccaccacccccacctctaccaggtgggatgcttccccctccaccgcctcccctccctccaggtggccctcctcctcccccagggcctcctcccttaggggcaatcatgccacctcctggtgctccaatgggcctagcactgaagaagaaaagcattcctcagcccacaaatgccctgaaatccttcaactggtctaaactgcccgagaacaaactggaaggaacagtatggaccgaaattgatgatacaaaagtcttcaaaattctagatcttgaagacctggaaagaaccttctctgcctatcaaagacagcaggatttctttgtgaacagtaactccaagcagaaagaagcagatgccattgatgacactctgagttccaaacttaaagttaaagagctttcggtgattgatggtcggagagctcagaattgcaacatccttctatcgaggttgaaattatccaatgacgaaatcaaacgggcaattctaacaatggacgaacaggaagatctgcccaaggacatgttggaacagctcttgaaatttgttcctgaaaaaagtgacattgacctattggaggaacataaacatgaactggatcggatggccaaggctgataggttcctttttgagatgagccgaattaatcactatcagcaaaggttgcaatcgctgtacttcaaaaagaagtttgcagagcgtgtggcagaagtgaaacctaaagtggaagcaattcgttctggctcagaagaggtgtttaggagtggtgccctcaagcagttgctggaggtggttttggcatttggaaattatatgaataaaggtcaaagagggaatgcatatggattcaagatatctagcctaaacaaaattgctgacacaaaatccagcatcgacaaaaacattacccttttgcactatctcatcactattgtggaaaataagtaccccagtgttctcaatctaaatgaagaattgcgagatattcctcaagctgcgaaagtaaacatgactgagctggacaaagaaataagtaccttgagaagtggcttgaaagcagtagagacagagctggaatatcagaagtctcagcccccacagcccggagataagtttgtgtctgttgtcagccagttcatcacagtagccagcttcagcttctctgatgttgaagaccttctagcagaagctaaagacctgtttactaaagcagtgaagcactttggggaagaggctggcaaaatacaaccagatgagttctttggcatttttgatcaatttcttcaagctgtgtcagaagccaaacaagaaaacgaaaatatgagaaagaaaaaggaggaagaagaacgtcgagctcgcatggaagctcagctcaaagaacaacgtgaaagggaacgtaaaatgagaaaagctaaagagaatagtgaagaaagcggagagtttgatgaccttgtttcagctttacgctcaggagaagtgtttgacaaagacctttctaaattgaaacggaatcgcaaacgtattaccaaccagatgactgacagcagcagagagagaccaatcacaaaacttaatttctaattttccatgaatacttttttttagaaagctcattagcagccctctaaagtgactagaacgtttcattacactgccttgcaatccaaacagtggcaattttttccttcatctgtgagtgaatgtgtgaacgtgtgtatgtaaatgtatgtgtgtatatattaaaaaatgtatatagatgtctgagtgttgtctggagacctatacgtatggttaaaaagatttatgttaatgtatgtgctccaaaacctttcgtgtatgcattcacattgagtgtggctcattttctttccccgaacgccatgactgttcagaagcacaatactatctcctgaaagagataagagacattccctagattcaaaggcaaaacagaagaaacaaacaaacaaacaaacaaagcttgcaaaatattttatggtttccaagcttgatatcctttaaaattattttcattgatggaactggagttgttggaaaaacatagatttaaaatgatttttgatagctgacattgtgatgttgatgtatcacatcagtaaataggaccagctttgaatttctgacattggtgtggggatacagtctgtaaatgtttattgagaaccatcttgcacacaatttgaattatgtagaatgtcaatcaagtttttgbtatatttaaaagttggacatcaattttttcccctgatttcatccaagttatctctgccaagtgctcttgataatttcttcagatttttggaaaaaaacactatataaavtgcawtccatgctttttttaaagaacaacattgccagagtatgcttgttctaacaatatagatatataaaccttaaaaataataaaatatctcacccaagacttaaaggaagaattctctgaagggataaagattactaaaaaaaaaa

SEQ ID NO: 60804 - DNA, 1596 bp, Homo sapiens
tcgtgccggtgaaagtttgctatttatttagtcttagaaaaacactgaaagaaaaaggcaggaaatgtagtacgcagtgtggaagaatggagctggccacatgtagttttagcagctgcagaggaaactggctgagtctaaggttacatatttctgctcagtaagggtatccatggtgataactctcatgatgacggtagtcatcctggtaaccatcctgttctgttttacctccttttttcttcttgctcttctctttctcttgcttgctctttttctcagacttcttcatttgcttttcactcttaagtaacttgtctgcgttctcattcttcatcttttttttcttctccttctctggtttctcaagcttttcatgctttttagactcctttgcttttttaaggggaacattccccacctgcagctcgtcctccagctgagaggcagtaggccggctgaggtcatacttctcctcatactcattactaagaattttgtcctgggccttctttttgggaggtttctcctttgctggcttgggaggacctggcaccacatttgggtctcggtggccatgttcccgcctgtccatgcggttgtcccggaaacggcctgggccagcagcccttgtgctgggttctgagatggtggtgggaggggcatttgtgaagctctccaagctggtggccttgctgggcctcctggttgtctgtggcctctccctgtgctgatccttccgggatggagggtaaagattctctgaaactgagggtctcctggcagtgatcacctcagtggttgtagggggcctgtgggagggtgagggggtccagggcctctgcgtggtgggaaaggcagtggtggtcataggtcttgcagcaactgttaccgcccgggacgtggaccgagtcactgttgtggctggggcaggaggaagggtggtggctctgggggttgagggaggttggggcaaagctggtgcagtggcggccagttttctcaggaccttcacccgactctctctggttggtgggacttgtgctctccttgggtcctctttcttcttctcgctgcccaggcttggccttcctgctccccctccaccgtcattcccctccgccaccacctggccctctacaccagaggccttacatttctggacaaagcccttctgcctgatcttctcgatcctacggatggggccttggtcgatgacctcgtacatggcttccagcctaacgggatatggatagcgctcctccacctgcagcgtcttcttcagcagcaccatgccaaacttgcccttctccagcttcaggaagctcatcagcttagggatgaggctagggtccaggggctgctccaggatctggccctcgctggtgatccttctcaccttgcctccttcctcacctgcctggtggaagagcacaatctgttggatgtgcctctccgccagctcacagtacacatcgtccttcagcaggctcatcatgaggcggtagtagccttccgaggcatgaggggctgagatgacccatactctgtccttgccagctttcgcacgagtggcgtctcctcccaagggctcca

SEQ ID NO: 60805 - DNA, 2526 bp, Homo sapiens
tttcgtctgcggagaccgtccgcctggctcgcccgagctcgcccgctgtccgccagcccgcgggagggaggagagaagcgaagcgtttccgcggttggctactcagtgtcttggtctcaagttgcctcattgcggctggcgttcccaatacagacgcatcgtttcttttttaatactccctaagaaagggaataaccttcaagctggcgggagcaatggttcacataaagaaaggcgagctgacccaggaggagaaggagctactggaagtcatcgggaaaggtactgtccaagaagctggaacattattatccagcaagaatgttcgtgtcaactgtttggacgagaatggaatgactcctctaatgcatgcagcatataaaggaaaactggatatgtgcaaattactactgcgacatggagccgatgtaaattgtcatcagcatgaacatggatacacagccctcatgtttgctgcactttctggtaataaagacatcacatgggtaatgttagaagctggtgctgagacagatgttgtcaactctgtgggaagaacagcagctcagatggcagcctttgtgggtcaacatgattgtgtgaccataatcaacaatttctttcctcgagagagactggattattacactaagccccagggactggataaagagccaaaactgcccccaaagttggcaggcccgctgcacaaaattatcaccacaacgaatcttcatcctgtcaagatcgtgatgcttgtaaatgagaatcctctgctgacagaagaagcagccctgaataaatgctacagagtgatggatttgatttgtgagaaatgtatgaagcaaagagacatgaatgaagtattggctatgaagatgcattacataagctgtatctttcagaaatgcattaacttcttaaaagatggagagaataaactggacaccttgatcaaaagcttgttaaaaggcccgagcttctgatggctttccagtgtatccagaaaagatccttagagaaagtatcagaaaaattcccttactgtgaagctacactcctccagcagctggttcgaagcattgctcctgttgaaattggttctgatcccactgcattctccgtccttacccaagccatcactggccaggtgggttttgtggatgtggaattttgcactacctgtggagaaaagggagcaagtaaaagatgttcagtttgcaaaatggtaatatattgtgatcaaacctgccagaaaacacactggtttactcataagaaaatctgtaagaatctgaaggacatttacgaaaagcaacagttggaggctgccaaagaaaagagacaagaggaaaaccacggcaaacttgatgtcaattctaactgtgttaatgaagagcaaccagaggctgaagtaggtatctctcaaaaggattccaatcctgaagattccggggaaggaaagaaagaatctcttgaaagcgaagctgagttggaaggcttacaggatgctcctgcagggccacaggtgtctgaggagtaaaagccagagcaagtgccagtgtggatggtcctcaccctgcaagaagctggaaaactcctaggaatgcattgtcctcaccttgttatacctgcgtggcaccatggcaggattccacatttcatagaatacaggttttcaagcaaacccctgttgaccatgccctaatttcctattgatttctgttgtataattgaatggatattcctatggaaaattttttgtttcaaaatacaggaaaaacattcctattacctttctgaggctggctttccagcaattgtttcaaaggaaaatagatccccttaaagaaaaaatacaggctttagggaacaaagggacaagcagaacaggtgtggaagagagattttcaggaagggaaaaatttatagctacagagggtagttagaaaaatcataacttatatgtgaataaaatacatataagcagcatttacggtagtggcattctacttattaagatgcaatgaaatgaagaaaggctttatgttcaaggacctttgccatagttcagctaattgtagttttatatagaaatgatcctgaacactctgaacttgacgtagtcctgcggtgatattctatctgcagtatttgtacctccagaatggcagatccctcagcaggaacaaaggcatattgacggttctctcagcgtatgcattaaaaaaggtacttcctgaaacttttgattcaataatgactaaacatactatgtacacaattactgtaaggctaattcacgtgccatactccacctgaaagcctgagttatcttgctataagcttttcatggagcacttcctttccagaaactgatttgtaactcatttagagaatgtcctggcgtcggtttttagcatatgtggtatttaaacagagctagaatgtgatgtctgaagataatgctgcatttctgggtttcttgtgtggattttaaaataaattgtgcctacaaatataaac

SEQ ID NO: 60806 - DNA, 5841 bp, Homo sapiens
cgcgcccctgccgcggcccctagctcgcgcctcagctccctcccctttccgggcaggcccgtcccgtcagcaaggcagtgagcaccgcggccagcagagggcggtccggacccaagtctgcagcggcgccattggcgtgtggaaaatgccaccagatggcgggttaggattgcagctccgttgaaggcgcggcccccgctcccgaacccccggcgaccaccccgtaacaacccccccacatcgggaataacacaccggagacttttggggggaaactaggtcgatggtcggcggcgcccggatgggcagctgaggattgcctttgaggttattttaaaagttttgagttgtacagcacttgattattttgctgcattgtgaaaggacctctccagcaatgattacttcagaattaccagtgttacaggattcaactaatgaaactactgcccattccgatgctggcagcgagcttgaagaaacagaggtcaaaggaaaaagaaaaaggggtcgtcctggccggcctccatctacaaataagaaacctcgaaaatctccaggtgagaagagcagaattgaagctggaattagaggagcaggccgtggaagagctaatggacaccctcaacagaatggggaaggggagcctgtcacattatttgaggtggtgaaactggggaaaagtgcaatgcagtccgtggtggatgactggattgaatcatataaacaagacagggacatcgcacttctggatttaatcaacttttttatccagtgttcaggatgtcgaggtactgtgagaatagagatgtttcgaaatatgcagaatgcagaaatcatcagaaaaatgactgaagaatttgatgaggacagtggtgattatcctcttaccatgcctggacctcagtggaaaaaatttcgttcaaacttttgtgaatttattggagtcctgattcgacagtgtcagtatagcataatttatgatgagtatatgatggacacagtaatctcccttttgacgggtttgtcagactcccaggtcagagcttttaggcatacaagtaccctggctgccatgaagctcatgactgctctggtgaatgttgccttaaacctcagtattcatcaggataatacccagagacaatatgaagccgagagaaataaaatgattgggaagagagccaatgaaaggttggagttactacttcagaaacgcaaagagctgcaagaaaatcaggatgaaatcgaaaatatgatgaactctatttttaagggtatatttgttcatagatacccgtgatgctattgctgagattagagccatttgtattgaaagaaattggagtatggatgaaaatgtatagtgatgccttcctaaatgacagttacctaaaatatgttggctggactcttcatgacaggcaaggggaagtcaggctgaagtgtttgaaagctctgcagagtctatataccaatagagaattattccccaaattggaactattcactaaccgattcaaggatcgcattgtatcaatgacacttgataaagaatatgatgttgctgtggaagctattcgattggttactctgatacttcatggaagtgaagaagctctttccaatgaagactgtgaaaatgtttaccacttggtgtactcggcacatcgccctgttgctgtggcagctggagagttccttcacaaaaagctatttagcagacatgacccacaagcagaagaagcattagcaaagaggaggggaagaaacagcccgaatggaaacctcattaggatgctggttcttttctttcttgaaagtgagttacatgaacatgcagcctactttggtggacagtttatgggagagctctcaagaactgttgaaagactgggaatgtatgacagagttgctattagaagaacctgttcaaggagaggaagcaatgtctgatcgtcaagagagtgctcttatagagctaatggtttgtacaattcgtcaagctgctgaggcacatcctccagtgggaaggggtaccggcaagagagtgctaactgccaaagaaaggaaaactcaaattgatgatagaaacaaattgactgaacattttattattacacttcctatgttactgtcaaagtattctgcagatgcagagaaggtagcaaacttgctacaaatcccacagtattttgatttagaaatctacagcacaggtagaatggaaaagcatctggatgctttattaaaacagattaagtttgttgtggagaaacacgtagaatcagatgttctagaagcctgcagtaaaacctatagtatcttatgcagtgcaagaatataccatccagaacagagttgacatagctcgaagccagctgattgatgagtttgtagatcgattcaatcattctgtggaagacctattgcaagagggagaagaagctgatgatgatgacatttacaatgttctttctacattaaagcggttaacttcttttcagaatgcacatgatctcacaaaatgggatctctttggtaattgctacagattattgaagactggaattgaacatggagccatgccagaacaggtagtcgtgcaagcactgcagtgttcccattattcgattctttggcagttggtgaaaattactgatggctctccttccaaagaggatttgttggtattgaggaaaacggtgaaatcctttttggctgtttgccagcagtgcctgtctaatgttaatactccagtgaaagaacaggctttcatgttactctgtgatcttctgatgattttcagccaccaattaatgacaggtggcagagagggccttcagcctttggtgttcaatccagatactggactccaatctgaactcctcagttttgtgatggatcacgtttttattgaccaagacgaggagaaccagagcatggagggtgatgaagaagatgaagctaataaaattgaggccttacataaaagaaggaatctacttgctgctttcagcaaacttatcatttatgacattgttgacatgcatgcagctgcagacatcttcaaacactacatgaagtattacaatgactatggtgatattattaaggaaacactgagtaaaaccaggcagattgataaaattcagtgtgccaagactctcattctcagtttgcaacagttatttaatgaacttgttcaagagcaaggtcccaacctagataggacatctgcccatgtcagtggcattaaagaactggcacgtcgctttgcccttacatttggattggaccagattaagacacgagaagcagttgccacacttcacaaggatggcatagagtttgcatttaaataccaaaatcagaaaggacaagagtatccacctcctaatctggcttttcttgaagtactaagtgaattttcttctaaacttcttcgacaggacaaaaagacagttcattcatacctagagaaattccttaccgagcagatgatggaaaggagggaggatgtatggcttccactcatctcctatagaaattcattagtcactgggggtgaagatgatagaatgtctgtgaacagtggaagtagcagcagcaaaacctcatcagtaaggaataagaaaggacgacctccacttcataaaaaacgagtagaagatgagagtctggataacacatggctaaacaggactgacaccatgattcagactcctggccccctgccagcaccacaactcacatccactgtactgcgggagaacagtcggcccatgggagaccagattcaagaacctgagtctgaacatggttctgaaccagactttttacacaatcctcagatgcagatctcttggttaggccagccgaagttagaagacttaaatcggaaggacagaacaggaatgaactacatgaaagtgagaactggagtgaggcatgctgttcggggtctaatggaggaagatgctgagcccatctttgaagatgtgatgatgtcatcccgaagccagttagaagatatgaatgaagaatttgaggacaccatggttattgatctgcctccatcaagaaatcggcgagagagagctgagctaaggccagacttctttgactctgcagctatcatagaagatgattcaggatttggaatgcctatgttctgaagtctgaagaaaatttacaaatctggaactctattatttagagctagaggcctatatactgtgatagcttgtatggggaaaaacacttttgatgtgatctgatttgttttttaatcaaatgattaaggtcaatccctttttgcagtgacagaagaggagcatgtaaattacccaagggaatgttggtgaatgtcaactcagaaagactgacctgaaaatcatttgtgtcctactattggacttatcccaatacagatgtgtgtgtttttctggagggaggaagaaattttaaatttttaaaacagctgtcaagataaacactgttatacacctgttttatgaaaactcaacattgagtaaaaaaaaacatatttttaactttattttcctgttgtacaatttaaaaaccgttttaacattttgcctttttatgttttaaaagctaaccatttttattaaacctatgaggtaaggcaggctcatcctaattgcgaagagtgttttgggagttcactggggatttgggttggacctttgtggaacacaaataatgaaggagcagaacattgacaagctaagatgaaattctgacatagtacatctctgccaaaaaccacacaccctctgtggatatggatatgaattcccagattttatatactcttgaataaaggtttatttttatttataagtgggcataaaataagaaatgtccatgcagccatttttccaacagatgctgtacaccgttcattttatatagactagggagattcaaatacagtgcattttctattggtatttgttctgtgcatttttagcaacttctaccagcaaataaagtattctcagtaaaacgaaaatgattctcaagttatcagtttgctgtttttaccacttatttcatgccctgccaaattcaagttacacagacttccattttcttaagataatcaatcatgaagaaatcctttatcaatcattcaaaagtaattttaagtgtaacataactgtgtttacttcccatgcacttaatacccttatgcgctaattttgtgaattaagtttactgattatagaagtatgtgctgcatagaagtctgtgcttagagggtgaagttcctaagcttaccttgaattacagctacatttcagtgttaaatgtgcatattaagaataattcttttggggaaagaaattatgaatcttcaggacagtctacaatggtttagagttacattctgcctagacttttatgacttgctgctattgttttaaaaaccccacttagtctcttcctttctgatttctaaagtaagcctcagaatttccaaaccaattcatccacagctgtttctgggctggtttttaaagtagctgcaacagaatcatgaggctttccctttttatcaaatacgaaaaacattttttaaaattctgcacacccagtgatcatcttttgtgcgggaaagcaagatgatgatggatgattttattcatccttttagtaaagacacaaaacatttttctcaacatttgtacagttctgaaaaaaacctggtcaccaaaaatatcttctctgctaattcagcaattcttgggctccagttaggggagctggggcctcactttctcccaggattgtgggcttcactggaagtga

SEQ ID NO: 60807 - DNA, 4093 bp, Homo sapiens
attggatcgtagactattagtcagagcggtggaattcggcggcggcgcgaggcagtatggtttgaagtggtgaacatggatttttctcggcttcacatgtacagtcctccccagtgtgtgccggagaacacgggctacacgtatgcgctcagttccagctattcttcagatgctctggattttgagacggagcacaaattggaccctgtatttgattctccacggatgtcccgccgtagtttgcgcctggccacgacagcatgcaccctgggggatggtgaggctgtgggtgccgacagcggcaccagcagcgctgtctccctgaagaaccgagcggccagaacaacaaaacagcgcagaagcacaaacaaatcagcttttagtatcaaccacgtgtcaaggcaggtcacgtcctctggcgtcagctacggcggcactgtcagcctgcaggatgctgtgactcgacggcctcctgtattggacgagtcttggattcgtgaacagaccacagtggaccacttctggggtcttgatgatgatggtgatcttaaaggtggaaataaagctgccattcagggaaacggggatgtgggagccggcgccgccaccgggcacaacgggtttttctgcagcaactgcaacatgctgtccgagcgcaaggacgtgctcacggcgcaccccgcggcccccgggcccgtgtcgagagtttattctagggacaggaatcaaaaatgcgacgactgtaagggcaagaggcacctcgacgcgcaccccggtcgggcagggaccctctggcacatctgggcatgtgcaggttacttcttgctgcagattctgcgcaggatcggagctgtgggccaggctgtgtccaggacggcgtggtcggccctttggctggccgtggttgctccagggaaggcagcctctggagtgttctggtggctggggattggatggtaccagtttgttactttgatttcttggctgaatgtgtttcttcttaccaggtgccttcgaaacatctgcaagtttttagtcttgctcatcccactcttccttttactaggtctctccttacggggccaggggcaatttcttttcgttcttgcccgtgttgaactgggcaagcatgcatagaacacagcgggtggatgacccccaggacgtgtttaaacccacgacttctcgcctgaagcagcctctgcagggtgacagtgaggcttttccgtggcattggatgagtggcgtggagcagcaggtggcctctctgtctggacagtgccaccaccatggtgagaatctccgagagctgaccactttgctacagaagctgcaggctcgggtggaccagatggaaggcggcgctgccgggccgtcagcttcggtcagagacgctgtgggacagcccccgagggagactgactttatggcctttcaccaagaacatgaagtgcgtatgtcacacttggaagatattctgggaaaactgagagaaaaatctgaggccatccagaaggaactagaacagaccaagcaaaaaacaatcagtgcggttggtgagcagctcctgcccacagtcgagcacctccagctggagctggatcagctaaagtcagagctgtccagctggcgacacgtgaagaccggctgtgagacagtggatgccgtacaagaaagagtggacgtgcaagtcagagaaatggtgaaactcctgttttccgaagatcagcaaggcggttctctggaacagctgctgcagaggttctcatcacagtttgtgagcaaaggcgacttgcagacgatgctgcgagacctgcagctgcagatcctgcggaacgtcacccaccacgtttccgtgaccaagcagctcccaacctcagaagccgtggtgtctgctgtgagcgaggcgggggcgtctggaataacagaggcgcaagcacgtgccatcgtgaacagcgccttgaagctgtattcccaagataagaccgggatggtggactttgctctggaatctggtggtggcagcatcttgagtactcgctgttctgaaacttacgaaaccaaaacggcgctgatgagtctgtttgggatcccgctgtggtacttctcgcagtccccgcgcgtggtcatccagcctgacatttaccccggtaactgctgggcatttaaaggctcccaggggtacctggtggtgaggctctccatgatgatccacccagccgccttcactctggagcacatccctaagacgctgtcgccaacaggcaacatcagcagcgcccccaaggacttcgccgtctatggattagaaaatgagtatcaggaagaagggcagcttctgggacagttcacgtatgatcaggatggggagtcgctccagatgttccaggccctgaaaagacccgacgacacagctttccaaatagtggaacttcggattttttctaactggggccatcctgagtatacctgtctgtatcggttcagagttcatggcgaacctgtcaagtgaagacactactcattatttttgtacatttttgtatatactgggacagcgtgaaacactggaatccttcatggacgagggcatatacaatgatgggacagtgccacactccttcaataaacgtggctgctggccagaggacgtgagcgtgtgacgggcgccttggcgccacctgttgggtgctcactgcctctgcaggtgcagaggggtcagcagcaggagaagcgtgttgaacacgtggctctcagacactccttgtttttaacgggaagctctttgcatttgcatttcctcaacaaaggagcaaagcagaggaagctgagagtctggcgtgttcttgacgctttggtcttcagccttgcactggctcttctaaaggacttttggagggcagataatttcatctgttaaatccaacacacatttctttcagggaaaaacaatgtcaccaaattttcagagttctaaactcctttccttcaagccggaattttccttttttcagcaccagtaggtactaagtctccagatggggaaataactaaaatgtgtttttctgctttgttcgctcttacttctgaggaaggtttccagtcaggactcgctgtaccaatatccatggaggaatatgggagcgtttcgctctccttgtaggctgaagtcagtctgacttgaaggggcctggtttggatctaagcaaacacccagatggggttctctggtctcagcaaggcttttcctgttgggagtcacagtaaacagaaacccaaaaatctcatcttgggtgttttcagggcttgttttgagttttgctgaatagggagcgcaagacgccctgagcctccctctcactggtggtgataagaggagccgtctggtgtgtcagggtcacgaacccgttacatttcaggacgatcctttttccttcagcagcatttcttactggctgtggctggaatctgccttttatcacagctgtcaccattctcacgtgattcttgtgagactctttttggttataattactatttaatatttagactattttactgagcagactttataaatgagatatctacaaggcacttaaagtgttacagatgttttaccttaagaattatttaagttgtgttgggttaagacagttttcagtgtaccgtaaatgttgtgttttcagaaaaagacaaaacgatggtgctgactggttttctgtatattgcacaacagtcctcaaatacactgatgtatgaaactattcatacatcaagcagcatttttttcactctccttagaattggaactatgcagttaaggcagataaaatgtacagatgtttcatatattacaggttacatatataaatcaaaatttcctatataaaactgatttgggatttggggtggaaatattttgaatattaatttatttttaaagatgcaagataggactttgtgcaatgtatttttgtaaatgcttttcaaaatatctgtctttggtagtgcttctgctgctgccaccaaattgataagatgctattaagaggtttaaataaagagttttaatttttaaaagggaaaaaaaaaa

SEQ ID NO: 60808 - DNA, 1110 bp, Homo sapiens
cctatagttttgtaattttttttttttttttttttaacatgaaaaaacacattttattgcacttaagttataagaaaataaaatttctaagtgaatcaaaccatagacacaatccctttaaaggttgttttcctccatcatgtcaggttgttacataactaaaattaaccaacttgaatctgattgttttaaatcagactataaataaaacaaacaaaaaaataaacagaaggaggaaaaaagatcgcctaggatacagtgttaaaccactttcacagttcagcttgagttgtggctcttggagaatgaggcaaaccatttgactgtttcattcattttgtttgtttgcatgtgacgcctttactacaaaaactgaatagtttctgctttgtcagttactcagagcaataaaactgtaacagttgttttcccaaatactgtaaaacactaagactgaccagcaactttattttaattttgtgttttatatatttttaaaatattttgtcagttttacgatgtacgttcatccattcaccacagccctcaaaaagaaaagtttctccacagaacaggcaagtaatagctctgttccaaggaatgtgttttaatttttgcccagataaaagaaaataagctttgcacacactctcaattctttacttgcaggcaaacttcactctttattatctgaaactcttccattctcagcctcttagaggcacagatggctcaagtttcagtggcaaaaagtcttttttccataaccaaactagagcaaatttggaattcagtctgggactaaaacgtcacagcagaaaaaaaataaaaaaaataatttgcttttttctttctttcatttagcagcataaataagtttggccactgggagtacagtacagggttgggacaacaatcccatatttgaagacctacttctagcaccagcatcaagaattaaatccatctcaggactcacagaacccaggacaacttgccacctttgagcaacatatgcattgaagaatgtatatggaagcaacagtaaatagattaacagaggctaatactgtgattgattgacattggcaatggttggcaaaaaaaaaa

SEQ ID NO: 60809 - DNA, 2522 bp, Homo sapiens
gacacccaatgacagagaaccgccaccccaaagaccaccgtcaagcaggagagcttcgcatttagcccaggaaatcaccagtgctgcttccctcggggaccagacccaaatcctggggtccctcactacagctccagtcattaccagcgccattcgcagcatgccagggatcagcagtcagatcctcaccaatgctcagggacaggttattggaacccttccatgggtagtgaactcagctagtgtggcggccccagcaccagcccaaagcctgcaggtccaggccgtgaccccccagctgttgttgaacgcccagggccaggtgattgcgaccctggctagcagccccctgcctccacctgtggctgtccggaaagccaagcacacctgagtccctgctaaagagtgaggtgcagcccatcaagcccacaccaaccgtgccccagcctgctgtggtcattgccagcccagctccagccgccaagccatctgcctctgctcctatcccaattacctgctcagagacccccaccgtcagccagttggtgtccaagccacatactccaagtctggatgaggatgggatcaacttagaagagatccgggagtttgccaagaactttaagatccggcggctctcgctgggccttacacagacccaggtgggtcaggctctgactgcaacggaaggtccagcctacagccagtcagccatctgccggttcgagaagctagacatcacacccaagagtgcccagaagctaaagccggtgctggaaaagtggctaaacgaagctgaactgcggaaccaggaaggccagcagaacctgatggagtttgtgggaggcgagccctccaagaaacgcaaacgccgcacctccttcaccccccaggccatagaggctctcaatgcctattttgagaagaacccactgcccacaggccaggagatcactgaaattgctaaggagctcaactacgaccgtgaggtagtgcgggtctggttctgcaatcggcgccagacgctcaagaacaccagcaagctgaacgtctttcagatcccttagggctcagcccctggccctgtgttctagcactttgtccatttcccgtggcatccggctgcagccactgccatgacagcacctgtcattttgccacgtgcagctgtgctcaccccaggtcatcagactccaccgtgtgcatgtgcatcaatgtccctcttttctcccacacatctcacatcatggggaggccagagggggccacacgagagctccaggctctgggctggtcactccgaagaagaggatttgtgacgtcacttagagaagcaccttgctagcatggtttctgaagggtgaattctggtggggaaccagaaactccctgtctttggggcagggctaaagcagctcctaaggaccactggccattagctcttgcttttgatggcattctctttccaccttgtcttctcctttgctcctctgtgttagtgtggcaggtatgacaactcatccagtggaaacacagcctcacactgcccttccgccccccacactttgcctgcaggtgcaccgaaaggacctgggagataaaattcaaaaaagtgtgatgtgctgctcagaaggtcagactccatgtctgccttgacctcaaggtcagaaggttcccaaacccctggggctggaacatgggatctcctcttccacctcttcctggttcctttgcggggaaaattgccactaaaacagaaccttttcttaatcccatgttggaaggaagcaacagtgaactctacctgttctggagttctcctgggtctgcagaaggttgggaatttagaaaataaggctgttctttcatattttaatttaatctctgtcaatggccatccctcccacaaaaaaacgtgggttaagagaacttgcagactggatatgcaagcaaacgggcaactctggagaaaaataaggaaaggaatgctgactttctctttctttctcttgtccccacacccattcccaacccaatactggggccttctcaaaaggagcaaattaaacaataaaccagacacgcaaggccctgggggaaaggacaacatcctgaaataaatgatggagcccaggaaggtctcttgtggaagttgacttaactctaattttctttgtaactttaagccttggatacgggaggagaaatctcattttgtcgagtctcagaccatgtctgtgtgtaagcaatccccacagtgtcctctgagccaaggacacccccagatcagattgagttttgcttctagacggggtagctatggtaccttgggggttagctctcatccaagctgttaagtgagtttccagcctcactgtggctggaaagcccctaaaattcagtatgtaactccaggaagtcaggagagaactgagatttgcctagatgaccacaggcttgcggtcgaaattatccctaaagggccccaagtcacgtggggtatcccaccctgtctttcaatc

SEQ ID NO: 60810 - DNA, 1474 bp, Homo sapiens
tccgcggacgcgtgggccgcgatggccgaacctgcgtctgtcgcggctgaatctctcgcgggcagcagggcgcgcgctgcacgcacagtactaggtcaggtggtgctcccgggtgaggagctgctcctgccggaacaggaggacgcggaaggccctgggggtgcagtggagcgaccgttgagcctgaatgctagagcgtgctcgcgggtgcgcgttgtatgcggtccgggccttcggcgctgtggggaccgcctgctggtcaccaagtgcggccgcctccgtcacaaggagcccggcagtggcagcggcggcggtgtttactgggtggactctcagcagaagcggtatgttccagtaaaaggagaccatgtgattggcatagtgacagctaaatctggagatatattcaaagttgatgttggagggagtgagccagcttctttgtcttacttgtcatttgaaggtgcaactaaaagaaacagaccaaatgtgcaggttggagatctcatctatggccaatttgtggttgctaataaagacatggaaccagagatggtctgtattgacagctgtggacgagccaatggaatgggtgtcattggacaggatggtctgctttttaaagtgactctgggcttaattagaaagctattagctccagattgtgaaatcatacaggaagtgggaaaactctatccactggagatagtatttggaatgaatggaagaatatgggttaaggcaaaaaccatccagcagactttaattttggcaaacattttagaagcttgtgaacacatgacgtcagatcaaagaaaacagatcttctccagattggcagaaagttgatataggtggacttttttacaggtcagttgaggcaaaaaactatgggttttttcaggtgaacctcccccatttaaatactcagaagataaggtgtgaatgtatgtattattagagtccgaaagtatttttataagttactggttttcacccacgcttttgtgggagagaaaatcattgcaaaatcattttttttgttcggtacaataaagtttactaaaaaacagtattagggtttatttggagttaactcccttagtaattgctacagcttccataattaactggaggtcagcagtaaaataattttgtgattataacagtaagccaggttcaccagaggaaatgtggaatacctaagtataaagcagcaaagaaatgtcacctgtagtcccattattcagcggggtgatactttgagaccatgtaaatagccggttcctccacaacctttctttcaactgagtcaacaattgtattaggagtgacaaaatgatgattttctaattctattatgcattccttattagctgcattcttctgtaagtagcccctgctcgtattttagatgatcactatggagtcatggaacactaatattttttaaataaattcaattaaattaacc

SEQ ID NO: 60811 - DNA, 2121 bp, Homo sapiens
cattaccccaagcttggcacgaggatcgtggcagccgcctcggccgccgcaatgcagagagaggagaagcagcttgaggcatcattagatgcactgctgagtcaagtggctgatctgaagaactctctggggagtttcatttgcaagttggagaacgagtatggccggctgacctggccatctgtcctggacagctttgccttgctttctggacagctgaacactctgaacaaggtcttgaagcatgaaaaaacaccgctgttccgtaaccaggtcatcattcctctggtgttgtctccagaccgagatgaagatctcatgcggcagactgaaggacgggtgcctgttttcagccatgaggtagtccctgaccatctgagaaccaagcctgaccctgaagtggaagaacaggagaagcaactgacgacagatgctgcccgcattggtgcagatgcagcccagaagcagatccagagcttgaataaaatgtgttcaaaccttctggagaaaatcagcaaagaggagcgagaatcagagagtggaggtctccggccgaacaagcagacctttaaccctacagacactaatgccttggtggcagctgttgcctttgggaaaggactatctaattggagaccttcaggcagcagtggtcctggccaggcaggccagccaggagctgggacgatccttgcaggaacctcaggattacagcaggtgcagatggcaggagctccaagccagcagcagccaatgctcagtggggtacaaatggctcaggcaggtcaaccagggaaaatgccaagtggaataaaaaccaacatcaagtcggcttccatgcatccctaccagcggtgagtgtggctggcaacctcgactccctggtgctctttgcagagttgggcagtgaaattaccttttgctcaaggctcacctagatgggtacaataaaaagaacatgggctttcagcagcagacaaatcccacttccaccactgactagctgtgtgaccttggacaagtgacctaatttttctgagcctgtttctcatttgtaaatggtgataatacctacctcatagggttgttgtgaggatcaaaatgaggaaatgaatgtaaagcacttagtacagtatatgaaataatgggtattcaataaatgatagtttctacagatccttctccccaccaccctccacagtccttgatccagaacttaccctaatctgatactgcctcacgtcaatggtgagctgatggacacaagatcaaataaggctatgcttattttgtgctgccagaaactgtagcaacctctgtgttcttagaggcacactgtttttgcaggccctcctgcctgggtttcattctggctatccctctaaggcgcaaggtgaagaagcttctgggccaggaaggaaaaaaaaatgcccacctgcagctctggtgaagcttgggcctgctctcctttccatcctctaaggagccaacttggcttttacctgtcaaatagtcataaagtcccctatcctttaccccaccttatacacacgaggctttctcaggaagtggctctgccaggcaggactatgtgggaaagggtttttccttagcacacgaaaaagccccttcccctggattcatgtttcttattttggagggagaagggaattgcacttcacactgccatcagggtttagttgacctcataatggtgcccactttctcgactttggccaggatttccttcaaagaaaacgactttccttcatttccctaagcctgtggcccaaatggtggaccagaatgatggtgggagggggcaacccccagtagctttgcctgcttttataaagttgaacaaattgaatttagacattcaggctaacctgcctttcttagtactcctttgttggcatgggcaggggttgagtcagcagaagtggaccaaaggattcctctgaataaagttatttaaaataaaaaaaaaaaaaaggggcggccgttttaaaggatccaattttacttccccgggcttgcaacgtaatattttttttatggggcccccaaaattcaatccccgggccggggtttaacaacgtcgggacgggaaaaaccctg

SEQ ID NO: 60812 - DNA, 2960 bp, Homo sapiens
  misc_feature (1)...(2960): n = a,t,c or g
ccgaggttcctcatctgctcgcgaggatgccttttctcttctgccttgcgaaataacagcagcctagctgtttgcccgtgaccagtgagaaaggcagcgtcgcgagctgattaggtttcacccaaaggtcgcggcgccgaattggtttctaacgagaacttttaaaatgatccgttccaaaaaagggtaggagccgcgagaccctccaactgcccagagaaaacaagtctcgtctgggcaaagttctcggcccacgcggtccgggccaagggcaagcggtccctgcgccccacgttgccgcagcactgcgcgtgcgaagccgctgntcaaacgcgctgacggaggccgagaagagaaaaaggcgggacttcaaattcccgggttgagcaaaatgggcgcgggagaaggagatgcaggagtttcacccgtagcttctttccgaggccgcccggacctcagcacgcttacgcattccatcgtgcggcggaggtacttagctcactcgggccgcagccacctggagcccgaggagaagcaggcactgaagcggctggtggaggaggagccgctgaagatgcaggtggatgaagccgcttccagggaagacaaactggaccttaccaagaagggcaagaggcctcccaccccttgtagcgacccggagagaaaaaggttccgcttcaattcagagtcggagtccggctctgaagcctccagcccagactactttggacccccagcaaagaatggggtggcaagcagaagtcacacccaccccaaagaggagaatccaaggcgagccctcaaaggcagttgaggagagcagtgatgaggaacggcagagggacctgcccgcacagaggggagaggagagcagtgaggaggaggaaaaggggtacaaggggaagactaggaagaaacctgtggtaaagaagcaggcaccaggcaaggcctcagtcagtaggaagcaggccagggaagaaagtgaggagagcgaggcagaacccgttcagaggacagcaaagaaggtggagggaaataaaggaactaaaagcctgaaggaaagtgaacaggagagtgaagaggagatcctagcccagaagaaagagcagagagaggaggaagtggaggaggaagagaaagaagaggatgaggaaaagggggattggaaacccagaaccaggagcaatggccggagaaagtcagctagggaggagaggagctgtaagcagaaaagccaggcaaagaggctcttgggagactcagacagcgaggaagagcagaaagaggcagccagcagtggggatgacagtgggagagatagagaacccccagtgcagaggaagagtgaggacaggacccagcttaagggtgggaagaggttgagtggaagcagcgaggacgaggaagacagtgggaagggggaacccacagctaaaggctctagaaagatggccagactgggcagcaccagtggtgaggaaagtgacttggagagggaggtaagtgacagcgaggcagggggaggcccccagggggagaggaagaaccgctcttccaagaagagctccaggaaaggcaggacacgaagctcctcttcctcctcagatggaagtccagaggccaaaggagggaaggctggctcaggtcgccgtggagaggaccacccggctgtgatgaggctgaagcgctacattcgggcctgtggtgcccatcgaaactacaagaagctgttgggctcctgttgctcacacaaggagcgcctgagtatcctccgggcagaactggaagcgctaggcatgaagggtaccccttccctagggaagtgtcgggccctgaaggagcagagggaggaggcagctgaggtggcctccttggatgttgcgaacatcatcagtggctcgggccggccacgcagacgtacagcctggaaccctttaggagaagcagcacccccaggggagctgtaccgacggaccctggactcagatgaagagcggccccgtcccgcacccccagactggtcacatatgcgtggcatcatcagcagtgatggcgagagtaactgagctctgccacccccaggagggacccttgatacatgtacaaagcatacatagcaccccttgccctgtgtctgtggaacagaagcagcttccttcagagaagactgcagctcccaaggacacaagctgttgggatgctacttctcagcttcacgctgtccctttaaggtgtttattttttaagactcaataaaggagtgtttttaatcacctcatcaaatttggtcccccattctcacctcctgtattttgggccaggaaactgagcagtagtcactgcctccacctcctcccctggcctggttccctttaatttcccccgggttcctggaagaagtccctgcctccagaccctgtcatccaacagccaccagacccttttggagaagggtgtgtggctcctgtgctgcccgcctaccccgtggcccctctgcttttagcctagtctgataacctaatgcccacttgggagagggatagaatgacttgagggcagccagtgcttaagccttctcccttatgcaaacagccactttgtccatgggctgttagcctcaaaggggtggggaaaagcccatacctcctgggccagtcctagccctcctaggcctctggctacaggcccagcctctgcagtcacatgaggtctccactgaactctggctgctgaggcttgcgggaaaattccgtgacccatggagctccctggggtctgtgtgggaggcaaacctaagaatctttgaagtcaaagcaaagaaaacaggaattagaggtcaaggggttgaagaccacctttgagatccgagatctggtcacacctaaagtcatttaaatccctgaaaagttttggttcacaggcccaataaattctctttataaaacacaagcagtaaa

SEQ ID NO: 60813 - DNA, 2430 bp, Homo sapiens
ttttttttttttatctggagactgagttttgcactcgttgcccaggctggagtgcaatggtgcgatctcagctcactgcagtctccacctcagcaggagagcaggaatcttcagtgatccacgggcaaatatgcagccattgtgggcacctgttcctcccgcgacctttgtgcccacgtctctccctccagtacctactgcacggccccccacgtccgcctcctgccattgccagcaggtgccttgcgccggtacctggctgtgcttattcatccattatggtcgctctgtcactggtgccattatgtgctcacatgcccactccctcaggtttagaagtcgtgttgcccggcaacagaacaatctgctggcttagcctttggccaagttggcagctggacgaggacgctcagagcccagctcttgagagttcaagtatccgacagttccccactgctcccaggagcggttacccgggcactctgtgcccctcattcctgtttgggccaaggccgaggacctgcgagtagggctcagttgcctggagccccttcagcccatcccccagttcactttgcttgtgggatctccccgttgctcctgcccctggactgagtggcaggccatcctacaaacacccgcacactcgacatcagtggtgtcaagacaactctaagaaggttttccgtgatcctgcaagacctgtgttccatcctggtgattctgtcttcaatttcactgcacaggtaccacagtaagccagtgctgtgtgctccgagttccagggcatcccccagctcagccactacactgagcacaaggactctgtggggcccaggagcaggtagtcacccctttggggtccacaacacccggctgtccccagacttgtgtccagggaagatagtgttgagggccctcaaggagagcggggcagggatgcctgagcaggacaaggaccccagagtccaagaaaatcctgatgatcagagaacggtccccgaggtcaccggggatgcacggtctgcattttggcccctgcgggacaatggaggcctctctccctttgtgcccaggcccgggcctctgcagacagacctccatgcccagagctcagaaatcagatataaccagacatcccagacatcctggacgagctcgagcaccaaacgaaatgctatctccagctcctacagctccacgggaggcttgccggggctaaagcagaggaggggaccagcctcatcccgctgccagctgaccctcagttactcaaagacagtgagtgaggacaggcctcaggctgtctcttcgggtcacacacggtgtgaaaaggcggcagatacagcaccagggcagacactcgcccccaggggtggctcccccagatcccaggcctctaggccccgtagacgcaagattcccctgctgccaagcaggcgaggggagcctttgatgcttgccacctcccttagagctggggtaccgggtcacggctgaagacctgcacctggaaaaacaggcggcatttccagcgcatcaacagtgcactgcacgttgaggacaaggccatctcggactgcagaccctcacggccttcccacactttgtcctcacttgcaacaggggcttctggtctgcctgccgtttctaaagcacccagtatggatgtacacgcaggagacacacaagtcccaagactgcctgggcctactggcccccttagcatctgctgcaggggtcccctctacagctcccatgtctgggaagaagcacagaccaccaggccccctgttctcctcctcagatccccttcctgccacctcttcccattcccaggactcagcccaggtcacctcgctgattcctgcccccttcccagctgcaagcatggatgcgggcatgagaagaacaaggtgtggcacttctgctcctgcagctgccgcagcagcccctcccccctccacattgaaccccacgttggggtcactactcaatgcagtggatgaaggcccctcacatttctgggccctcagccacagctgcagcaggtgcccagaggtcagaaccagagatcccagacctcccggaccagctcgtgccccaaaatgaaatgccatctcgagcccctacagctctacgggaggcctcccggaacaaaagcggagaagggggccagcctcatcccactgccagctgaccctcagttcctcaaacacagacccagggtgcatgcccatctccagcccagggcagctcccctgtaagctgggtgagctactgaagccaaggtgggaggcagctgacaacaccacccacggcccatgcagaggtggtagaaaggctggactcagcaggaacaccaaatcccggaccaggcagaaaccacccaagactgaggggctcgtgccagagcggtggccacagggc

SEQ ID NO: 60814 - DNA, 3010 bp, Homo sapiens
gcggttgtgccgcatctagagagtcggggagccgcccccgcacccaggccttctcgcgctgcctggtcgctggtgaagcccgcggcgcgcgcctctcccggaccctgcagggtaaaagaatgtcacatgtcagcatttgtacctgaagtcagcatgcaaagttcagggtacatggatgaatgccaacttttgcatttcccatgtgtatcctgtgaccattctatctgggaacatccttcaaagagttcatgcatcttactgaggacacctgaccttttgaagcttcataattcacatctagatgtcaccggtctttcccatgttaacagttctgaccatgttttattatatatgccttcggcgccgagccaggacagctacaagaggagaaatgatgaacacccatagagctatagaatcaaacagccagacttcccctctcaatgcagaggtagtccagtatgccaaagaagtagtggatttcagttcccattatggaagtgagaatagtatgtcctatactatgtggaatttggctggtgtaccaaatgtattcccaagttctggtgactttactcagacagctgtgtttcgaacttatgggacatggtgggatcagtgtcctagtgcttccttgccattcaagaggacgccacctaattttcagagccaggactatgtggaacttacttttgaacaacaggtgtatcctacagctgtacatgttctagaaacctatcatcccggagcagtcattagaattctcgcttgttctgcaaatccttattccccaaatccaccagctgaagtaagatgggagattctttggtcagagagacctacgaaggtgaatgcttcccaagctcgccagtttaaaccttgtattaagcagataaatttccccacaaatcttatacgactggaagtaaatagttctcttctggaatattacactgaattagatgcagttgtgctacatggtgtgaaggacaagccagtgctttctctcaagacttcacttattgacatggaatgatataggaagatgatgcctatggccgaaaagggatgggttgtgggaatgggacagtccttaacaaaaagtttagcagtggctgtccctcggggaagggccaaataatgggtattttgataaactaccttatgagcttattcagctgattctgaatcatcttacactaccagacctgtgtagattagcacagacttgcaaactactgagccagcattgctgtgatcctctgcaatacatccacctcaatctgcaaccatactgggcaaaactagatgacacttctctggaatttctacagtctcgctgcactcttgtccagtggcttaatttatcttggactggcaatagaggcttcatctctgttgcaggatttagcaggtttctggaaggttttgtgggttccgaatttagtacgccttgaattgtcttgcagccactttcttaacgaaacttgcttagaagttatttctgagatgtgtccaaatctacaggccttaaatctctcctcctgtgataagctaccacctcaagctttcaaccacattgccaagttatgcagccttaaacgacttgttctctatcgaacaaaagtagagcaaacagcactgctcagcattttgaacttctgttcagagcttcagcacctcagtttaggcagttgtgtcatgattgaagactatgatgtgatagctagcatgataggagccaagtgtaaaaaactccggaccctggatctgtggagatgtaagaatattactgagaatggaatagcagaactggcttctgggtgtccactactggaggagcttgaccttggctggtgcccaactctgcagagcagcaccgggtgcttcaccagactggcacaccagctcccaaacttgcaaaaactctttcttacagctaatagatctgtgtgtgacacagacattgatgaattggcatgtaattgtaccaggttacagcagctggacatattaggaacaagaatggtaagtccggcatccttaagaaaactcctggaatcttgtaaagatctttctttacttgatgtgtccttctgttcgcagattgataacagagctgtgctagaactgaatgcaagctttccaaaagtgttcataaaaaagagctttactcagtgacttaatatatgttctgtattaaaattaatgtgctttgttggggtttaattttgggattggttttgggttttgtttttagttgttttaatggtaagaattaagacatttgtagattttaaagaaaaatatgaaattgtccattaaatcaagtaaaaatgtgcacaaatgttttcataaaatactgcaagcacttctcttcaagaatatgagtggatattatttttaccttatgttaatcagtgatatgctttagtcaataatatgattgataaaagaataacatggaatcatgctaacttattttcaaaggaacactgagcaataaagtatcgtgggcatttatgcaaaaaaaaaagttaattttttacaccttcatgtaaggatgtccttatttaagccctgtgacctggccaagtgttttgtttggtatgtacaaaatggtcagagctaagttgggagaatgagacatgcttttcccagctgtttggttatttctctggattaactgttcaactggaaaatttttagtttttctagccaggtgtggtggcacacacttgtggtcctagcgacacgggaggtggaggcggggggattacttgggatgggattttgagactctagtgtacttatgattgcacctgtgagccccccctgcactcccaacctgggcaatatagcgagtccctttctcttaaaaaaaattgtagtgtttccacttttcttctgatatttttgtctatttcactactggataatgccaatataaaaatttgggtataatcaagaataagaggtaaactactaaataaaaaaagctttccaactg

SEQ ID NO: 60815 - DNA, 7728 bp, Homo sapiens; identical to SEQ ID NO: 60554

SEQ ID NO: 60816 - DNA, 2227 bp, Homo sapiens
ttttttttttttgcatttataaaaactggcagatttattctgcaggggcccattttcaagaagctaaaggtgaaggtgggaggggagaagtttcctccccttctcctttctccctcatcttatttcctccaaggggtaaaaaaaatggcctggaccccaaaacctacccaaataaaaaatcaaaaaactgaggttccaaaaagttacagcatcttatttcctcatagaaaaggggaaggagccagagggaaggggagtccctggggtggggggatatctcacccccagcccggtgagacatcccctccccttaaatagctgccccaaatggggcaagcccagggctatagcatttaaaaactcccacatcccattttatcaaaaccaaagagaaaaaaaaatttcccttttcccccaaaacccaaatatatatatatttttttttcttaaaaaaaccaaaactttgaaggcattaagcgttaaagtgaatctagaacaagggaatgtgaaattccctccttccttcccccttcctgtggggttcattggtgcatccccagcagagggaccggccccaaggggatggcagaggggaaggaccaaagggagaaaagggcgggggcctccccagccaatcagcagccagtgtgggtgtgagcagggaagccacacccccttggagttttccaagtgggatggggagtgggaacgatgcattcctgtgtagtcttcagccaattccaagtcaagtagaggcagggaaagcagggtgacaggccgggtgtgcggaaaggagaagcgggtcttctgggtccctgtggtcagggagaaccccgcttcctcagctcctggacgaaggcttcaatgatttcctctttcactttctgcaattccttcttcacctcttccagaagctcctgtttcaccctctgtaggtccgagtaatcactggagctgggcgtgcagggttgggtctcggaagtggtcaccgaagaagacgacttcatccttggcaaggttgtgctgttcttctcccagggtctccgcacagattcactctgggccgggactctggcctctggctcctcctgattggcagattcatccttgggggttttctccccaacttgcgtggctttccttctccgggccagcatggcgttcatctcttccatgagtcccccacctccgcttcgaccactttcagctttgggggctgtgggcccccctgaggcctcctcctgcttgctgactttcctgagtttggctccagcaatagctgcggccaggcctggggccccagctcccccaccaccagggccctgtgctgccgggagagggggtgcagggggtggtcctccccctgctccgtgcgctgcagctgggacccccgaagggggcaaacctgggggtggggggggacctggaggagggggaggtcctggtggtgggggtggacccccagcggggggagcaggtgggcctcctgcattggagacccggcgctctatgtgctccgacgggccgggctgctgccttttctgctgctccacctcctccggggaggggccgttcgggaccgaccaggtgggaagtgctgggggtggagggggcccacctcccttccaacgcctctagggcactggccatgccggcggcaaactgggccgcatcctccttgctgccgaagttgaggccccagacctgggcgagcgtcgcgccactgatgggaagttgggggtggcctggttatacttgacaccccggacgatggcacagttgatgaccacctgctggtcgggctgcatcttccggcccacgacgcgaaaggaattggccgtggggttgtggtagatctggacgcggctgaaggcctggggacccgtgccagcagggagccatcgcttgttgccatcatcataaagcatcacagtggcccggctggaacagatgaccgtctcgctcatggctgctcggcgggcggcatgcgtcgcccacgggctggctgctcccggggcgcccctggctggaggttcaggggttcggggctggctccgggctcggctcaggctcccccagggtcccgccccatagagtccggcttcctggggagaatgtggaccgggccggggcgggtctccgggcgccgcttccctcaggcggtctgatgagaggttcctgcagcagaaagggagatgcagcgtccgctccccagcgcgcacccctt

SEQ ID NO: 60817 - DNA, 2636 bp, Homo sapiens
  misc_feature (1)...(2636): n = a,t,c or g
cccctccccctccccctctttcttctcctccctcgtcgccgccgccgccgccgccgcctcagccttcgcctcagccgccgcccgctcccgcccgcgcggcgggattagtgacgatcaatccaggatgctgcagactctggccggggtgaaccttgctgggcaattcgttgcaggggggcatggccctgccgcctcccccgcacggccacgaaggggcggacggcgacggcaggaagcaggacatcggcgacatcctccaccagatcatgaccatcaccgaccagagcgttggaccgaggcgcaagcaaagaaacatgccctgaactgtcacagaatgaaaccagcgctcttcagcgtcctgtgtgagatcaaagagaaaacaggtctcagcatcagaggagcccaggaggaggaccctcccgatccccagctaatgagactggacaatatgcttttggcagaaggggtttcaggtccctgagaaaggtgggggatcggcggcagcagctgcagccgcggcagcctctggaggttcttcagataactctattgaacacttcagattaccgagcccaaatgacccaggatcaggccaaatctatcacacagaactggagaaatattgaacaggcatgtaattgaatttactacacatgtgatggaccttcttccgaggaaccagagttaggaacacgtccccatttcctcccaaaagagattgaaagaaatggtggggcatcatccatccgaaaattttagttccattcagattgcagcttcaaccaaagcactttgttgaagcagttatgattttaagatcaaggttccttgatgccagacggaaaaggcgtaacttcagtaaacaggccacagaaatcttgaatgaatatttttactcacacctcagcaacccctaccccagtgaagaagccaaagaggagctggccaagaaatgcagcatcacagtgtcacaggtatccaattggtttggcaacaaacgaatcaggtacaagaagaacattggcaagtttcaggaagaagccaacctctatgctgcaaagacggccgtgacagctgcacacgcagtagcagcagctgtgcagaacaaccagaccaattcgcccaccacaccaaattccggttcttctggttcttttaacctcccaaattctggggacatgttcatgaacatgcagagtctgaatggggattcttaccaagggtcccaagtcggagccaatgtgcaatcacagggtggataccctccgtcatgttatcaatcagacgggaggctacagtgatggccttggaggaaattcactgtacagtccacataatttaaatgctaatggaggctggcaggacgcaacaactccatcttctgtgacttctcctacaaaaggccccaggaagtgtgcactcggatacctctaacttaatctctggccacacttttccctgagctacatgccttgataagtgcattcagagcaataggaggaaaaggaaagcgtttttgtagcccaccatctacagctttactgtaaaaccttgtcttattcgagaacttgggtaaaatctggnttttttaaaggaatcataatcattgtgtatttatacttaaaaacacacaatgttaaaaaaaaataaagcactttatccaattaggccaagatttaacattgttgacagtcctgtagctattttatcataatttattatcaatattttacattaattgtttcacagttgccaattacttggccttaaggggtaaaaagtaccatatacactaaacctcaacccgttaaaggcagatgcaaaaatttacctcacctaaattggaacttcttggcatattttccattactgacttgggattgtctttctttcatatcacttatgggggttggggaataaggagctgtttgcctattccctgttaatgatggttgtgtttaagaatcttcctcgtcacgtttgtgttcagatctcttatgttataattagatcagagactggtagcatcgtttctctctctgaaagcaccagtgcccagagtctgctcggtaataaaattatgggatccagattgttctgagagacggaggatacttgctgcttgatagaggtgaaaacgagattgatccgtctggggttttacggtgtgcactgggtgctgcacagacttgtcaaggtttgctacgtcctctggggcatctgcaaaaggccctgctctctggagtgttgtatatagtgtagcaaaagagtatttatacatcccaccaatcaaaacacagctttattacctcatgcgaactcatacaaaccaatagaatttcaacatgttctgtagcttagagtgctcacttactacctctgaacaatactcacgctgtagtttgtctctttcttatctttttgcatcttgtaattaactctttgtttcccttcataaaatgtaatgtacattgtaatcttttaaaagaaaaatcagggttgcacttgcaacttttaaaaaaccgagtgtggaaacattgggtcttaattcaacacaggatcggtaaaactgttgtaaatactgagaaacattttgaatgttcttcatcttattactaatccatgcaaaaaaaaaa

SEQ ID NO: 60818 - DNA, 609 bp, Homo sapiens
cgggacgcggatgcagacgcaggcggaggcgctgacggcggggatggccggggtggccacagctggcgcgggggcgtggacacagccgcagctccggccggtggagctcccccagcgcacgcgccaggtccgggcagagacgccgcgtctgcggccagggggtcacgaatgcggccgcacatattcaccctcagcgtgcctttcccgacccccttggaggcggaaatcgcccatgggtccctggcaccagatgccgagccccaccaaagggtggttgggaaggatctcacagtgagtggcaggatcctggtcgtccgctggaaagctgaagactgtcgcctgctccgaatttccgtcatcaactttcttgaccagctttccctgggtgggtgcggaccatgcagcgctttgggccccccgtttcccgctaagcctggcctgggcaaatggagcgaggtcccactttgcgtctccttgtaggcagtgcgtccatccttccctagggcaggaattcccacagttgctactttcctgggagggcctcatgttttatctggttcttaaatgtttgttactacagaaaataaaactgcgctactaaaaaaaaaa

SEQ ID NO: 60819 - DNA, 1533 bp, Homo sapiens
ttttttttttttcacagcttcaagccttttattccattttggtaggtttgtataaaaatactctctttaggaaaataaatagcagctgccctcgctgtggaggcttggattccctggagctgaaggcttctcaaagctgagatccgcagatcagctcatcacagaagccaagggcgcctcctgagctgtgcggttcaggagggggcggcagaatggcctggtccaatcacctgctgctgctggcagtggggctggtgagttagtgttctaggtgggtaaagtggcaccttctgtcaggagatagggttgggtggatcacaggaagagggtgatggagagtgtggcagtgatctggaaggggttagggctccagagcccctctaaggatctacaaagtctgtgggcttccaggattcctccggcagaaatgggaaatattttgtctctgatttagtgcaaattgtgctagagaggccagctctagagaaacaatgggcagctttggtggccccaagctggctctactgtgaagcacaatatggttagtctcattagagggatggagaagcagctgctggagttgggtatgggatactgtccaggccagctggactggtgggggaaggggagcagacgttgcttagggtggcacctgcagggagtaaggctcgggtgcctcacaaagcgaggagggttggagagccaagggggtcagaggatgggtctccgctgctgctgctactcttgcgatgagctgaggcacaaggctcaggagtgctggggtaggtgaagaccaggctgggggtgaaaggagttagggagggtgtggtcatgagtgtgggggtgtgcagtgcctcaggttcaagcacaggccctggggaaagggagatacaaggtacagggcggcagggggctggtgggctgctggtgccactggtactgcctgtgtccccctccttggctccttccgggattttgcagatgggtcggtgggcttccagcaccagctctaggcgctccttctgcttctgcagctcctcaatctctcgctgcagcccagatttctcatcttccagtttgtcagtctccgcctgcaggaagtcggtcagttccttcctccggttcctgcacttggccgcagccagcttgttccgctcgcgccttactcggcggcgctcctcttcctccgggctgatctgttcacaaggccttcgacgtacccctggaggcggccccagggcccggatgacttccttggccggggctgtggggggctgtactgagggtaggtcagaggcctggggtaacctgctgggccccaggaaatgaggctgtaccatccactgcagctcctgactgccactcatggtgttgatgcttggcaccaggtggaacttctgctgggctgcctgcgctgcggccgggggctgcgcggggccgccgtacccgccgccgttcccggagctcgggccgggttccccgaagtctcggaacatgcccggggctggcggctctgcggggtacacggctgct

SEQ ID NO: 60820 - DNA, 2232 bp, Homo sapiens
  misc_feature (1)...(2232): n = a,t,c or g
gcgggccgccgtacgcccggggctgcggctctcccgcgtgggccgcggccgctcggctccgcgggcagccgcgccgtcctgccccgcgcgcgcgctagccgctgtcggccgcaggagccccgggaatctggaggggccgtggggcggagggcggggcctgcgggcggacggcggccgaagccgcacgggagacgacgaggaggagccggaagatgcggacgagaacgccgaggaggagctgctgcggggagagcctctgctgccggcggggacccagcgcgtgtgtctggttcaccctgacgtcaagtggggcccggggaagtcgcagatgactcgagccgagtggcaggtggcggaggccacagcgctggtgcacacgctggacggctggtccgtggtgcagacaatggtcgtgtccaccaaaacgccggacaggaagctcatctttggcaaagggaactttgagcacctgacagaaaagatccgagggtctccagacatcacgtgcgtcttcctgaacgtggagaggatggctgccccgaccaagaaagaactggaagccgcctggggcgtggaggtgtttgaccgcttcacggtcgtcctgcacatcttccgctgtaacgcccgcacgaaggaggcccggcttcaggtggccctggcggagatgccgctgcacaggtcgaacttgaaaagggacgtcgcccacctgtaccgaggagtcggctcgcgctacatcatggggtcaggagaatccttcatgcagctgcagcagcgtctcctgagagagaaggaggctaagatcaggaaggccttggacaggcttcgcaagaagaggcacctgctccgccggcagcggacgaggcgggagttccccgtgatctccgtggtggggtacaccaactgcggaaagaccacgctgatcaaggcactgacgggcgatgccgccatccagccacgggaccagctgtttgccacgctggacgtcacgtgcccacgcgggcacgctgccctcacgcatgaccgtcctgtacgtggacaccatcggcttcctctcccagctgccgcacggcctcatcgagtccttctccgccaccctggaagacgtggcccactcggatctcatcttgcacgtgagggacgttcagccaccccgagggcggagctccagaaatgcagcgttctgtccacgctgcgtggcctgcagctgcccgccccgctcctggactccatggtggaggttcacaacaaggtggacctcgtgcccgggtacagccccacggaaccgaacgtcggtgnccgtgtctgccctgcggggccacggggctccaggagctgaaagctgagctcgatgcggcggttttgaaggcgacggggagacagatcctcactctccgtgtgaggctcgcaggggcgcagctcagctggctgtataaggaggccacagttcaggaggtggacgtgatccctgaggacggggcggccgacgtgagggtcatcatcagcaactcagcctacggcaaattccggaagctctttccaggatgaacggacgcccacagaggcctgcggggtgggggcatcgctgcctggggagctgaggcgttaccgctgtgttgggggcagcttggtgtcaggtgcagcagggtcctccttgtctggttctgcacccgtctcgctcccagccatttgctgggatgaccgtgcaggccggtgacacggccgcacctgccccaaagcgggccgcccgagcgtccactccaagcctgagcatccacacaattccagtgggccctcggtgcctgctgtgaactgctttccctcggaatgtttccgtaacaggacattaaacctttgtttttacttccgtgagcagcatttccagttcctcctgcacctgccgtgagccgtggccctggtgggcaccgacggcccctccgcccggctgtctgtgttcacagatggtctcggtttcccatggtggtgtcggggaaatgacgaaaaatcaggtttcccggcagcacagagaacccttccacaaaagtagaagggaaagcaaatagttttactaaagaagcagcttcaaaccagaccgtgagccaccgcacccggcctccttgagttaacattttctaaagatgcctccggcgtgcttatccttgaaagctgccagaggtgtcttggctgcattggtggtaataaaattcatactcatatttgactttaaaaaaaaaa

SEQ ID NO: 60821 - DNA, 2551 bp, Homo sapiens
  misc_feature (1)...(2551): n = a,t,c or g
caggaagggccatgaagattaataaagatttggactcagggcaaatatttacttagtagcaataactcaaagaattactgttgaataaataagccaattaagcagccaatcacgtactatgcggatgcacacaaatgaaaccctcacttcaacctgaagacattcgcacatgagttacgtagagggacctgcaggaagcggtagagaaaacataaggcttatgcgtttaatttccacaccaatttcaggatctttgtcactgacagcagcactaagacttgttaactttatatagttaagaagaacaaggctgagcgcgatgactcacgcctgtaagcctagaactttgggaggccaaagcaggcagactgcttgagcccaggagttccagaccagcctgggcaacatggcaacaccccatctctacaaaaaaatacaagaatcagctgggcgtggtgatgtgttcctgtaatctcagctactcgggaggcagaggcaggaggattgcttgaacccgggaggcagaggttgtagttagccgagatctcgccactgcactccagtctggacgacagagtgagactcagtctcaaataaataaataaatacataaatataaggaaaaaaataaagctgctttctcctcttcctcctctttggtctcatctggctctgctccaggcatctgccacaaagtgggtgcttacacctgctgcttttgctgggaagctcttgagtgtgttcaggcaacctctgagctctctgtggaggagcctggtcccgctgttctgctggctgagggcaaccttctggctgctagctaccaagaggagaaagcagcagctggtcctgagagggccagatgagaccaaagaggaggaagaggaccctcctctgcccaccaccccaaccagcgtgaactatcacttcactcgccagtgcaactacaaatgcggcttctgtttccacacagccaaaacatcctttgtgctgccccttgaggaagcaaagagaggattgcttttgcttaagggaggctggtattggagaagatcaacttttcaggtgggagagccatttcttcaagaccggggagaatacctgggcaagttggtgaggttctgcaaagtagagttgcggctgcccagcgtgagcattcgtgagcaatggaagcctgatccgggagaggtggttccagaattatgggtgagtatttggacattctcgctatctcctgtgacagctttgacgaggaagtcaattgtccttattggccgtggcaatgagaaagaagaaccatgtggaaaaccttcaaaagctgatggaggtggtgtagggattatagagtccctttcaagataaattctgtcattaatccgtttcaacgtggaagaggacatgacggaacagatcaaagcactaaaccctgtccgctggaaagtgttccagtgcctcttaattgaaggtgagaattgtggagaagatgctcctnagagaagcagaaagatttgttattggtgatgaagaatttgaaagattcttggagcgccacaaagaagtgtcctgcttggtgcctgaatctaaccagaagatgaaagactcctaccttattctggatgaatatatgcgctttctgaactgtagaaagggacggaaggacccttccaagtccatcctggatgttggtgtagaagaagctataaaattcagtggatttgatgaaaagatgtttctgaagcgaggaggaaaatacatatggagtaaggctgatctgaagctggattggtagagcggaaagtggaacgagacttcaacacaccagtgggaaaactcctagagtaactgccattgtctgcaatactatcccgttggtatttcccagtggctgaaaacctgattttctgctgcacgtggcatctgattacctgtggtcactgaacacacgaataacttggatagcaaatcctgagacaatggaaaaccattaactttacttcattggcttataaccttgttgttattgaaacagcacttctgtttttgagtttgttttagctaaaaagaaggaatacacacaggaataatgaccccaaaaatgcttagataaggcccctatacacaggacctgacatttagctcaatgatgcgtttgtaagaaataagctctagtgatatctgtgggggcaatatttaatttggatttgattttttaaaacaatgtttactgcgatttctatatttccattttgaaactatttcttgttccaggtttgttcatttgacagagtcagtattttttgccaaatatccagataaccagttttcacatctgagacattacaaagtatctgcctcaattatttctgctggttataatgcttttttttttttttgcttttatgccattgcagtcttgtactttttactgtgatgtacagaaatagtcaacagatgtttccaaaaaccttagaatgggaaaccccccccatttttaaaaaggcctttaaaaaaaaaaacccctgggaaaaacgggggggggccccccaccccg

SEQ ID NO: 60822 - DNA, 3481 bp, Homo sapiens
ctgctgccgccgccgccgccgccgtccctgcgtccttcggtctctgctcccgggacccggctccgccgcagccagccagcatgtcggggatcaagaagcaaaagacggagaaccagcagaaatccaccaatgtagtctatcaggcccaccatgtgagcaggaataagagagggcaagtggttggaacaaggggtgggttccgaggatgtaccgtgtggctaacaggtctctctggtgctggaaaaacaacgataagttttgccctggaggagtaccttgtctcccatgccatcccttgttactccctggatggggacaatgtccgtcatggccttaacagaaatctcggattctctcctggggacagagaggaaaatatccgccggattgctgaggtggctaagctgtttgctgatgctggtctggtctgcattaccagctttatttctccattcgcaaaggatcgtgagaatgcccgcaaaatacatgaatcagcagggctgccattctttgaaatatttgtagatgcacctctaaatatttgtgaaagcagagacgtaaaaggcctctataaaagggccagagctggggagattaaaggatttacaggtattgattctgattatgagaaacctgaaactcctgagcgtgtgcttaaaaccaatttgtccacagtgagtgactgggtccaccaggtagtggaacttctgcaagagcagaacattgtaccctatactataatcaaagatatccacgaactctttgtgccggaaaacaaacttgaccacgtccgagctgaggctgaaactctcccttcattatcaatatactaagctggatctccagtgggtccaggttttgagcgaaggctgggccactcccctcaaaggtttcatgcgggagaaggagtacttacaggttatgcactttgacaccctgctagatgatggcgtgatcaacatgagcatccccattgtactgcccgtctctgcagaggataagacacggctggaagggtgcagcaagtttgtcctggcacatggtggacggagggtagctatcttacgagacgctgaattctatgaacacagaaaagaggaacgctgttcccgtgtttgggggacaacatgtacaaaacacccccatatcaaaatggtgatggaaagtggggactggctggttggtggagaccttcaggtgctggagaaaataagatggaatgatgggctggaccaataccgtctgacacctctggagctcaaacagaaatgtaaagaaatgaatgctgatgcggtgtttgcattccagttgcgcaatcctgtccacaatggccatgccctgttgatgcaggacactcgccgcaggctcctagagaggggctacaagcacccggtcctcctactacaccctctgggcggctggaccaaggatgacgatgtgcctctagactggcggatgaagcagcacgcggctgtgctcgaggaaggggtcctggatcccaagtcaaccattgttgccatctttccgtctcccatgttatatgctggccccacagaggtccagtggcactgcaggtcccggatgattgcgggtgccaatttctacattgtggggagggaccctgcaggaatgccccatcctgaaaccaagaaggatctgtatgaacccactcatgggggcaaggtcttgagcatggcccctggcctcacctctgtggaaatcattccattccgagtggctgcctacaacaaagccaaaaaagccatggacttctatgatccagcaaggcacaatgagtttgacttcatctcaggaactcgaatgaggaagctcgcccgggaaggagagaatcccccagatggcttcatggcccccaaagcatggaaggtcctgacagattattacaggtccctggagaagaactaagcctttggctccagagtttctttctgaagtgctctttgattaccttttctatttttatgattagatgctttgtattaaattgcttctcaatgatgcattttaatcttttataatgaagtaaaagttgtgtctataattaaaaaaatatatatatatatacacacacacatatacatacaaagtcaaactgaagaccaaatcttagcaggtaaaagcaatattcttatacatttcataataaaattagctctatgtattttctactgcacctgagcaggcaggtcccagatttcttaaggctttgtttgaccatgtgtctagttacttgctgaaaagtgaatatattttccagcatgtcttgacaacctgtactcttccaatgtcatttatcagttgtaaaatatatcagattgtgtcctcttctgtacaattgacaaaaaaaaaaatttttttttctcactctaaaagaggtgtggctcacatcaagattcttcctgatattttacctcatgctgtacaaagccttaatgttgtaatcatatcttacgtgttgaagacctgactggagaaacaaaatgtgcaataacgcgaattttatcttagagatctgtgcagcctatttctgtcacaaaagttatattgtctaataagagaagtcttaatggcctctgtgaataatgtaactccagttacacggtgacttttaatagcatacagtgatttgatgaaaggacgtcaaacaatgtggcgatgtcgtggaaagttatctttcccgctctttgctgtggtcattgtgtcttgcagaaaggatggccctgatgcagcagcagcgccagctgtaataaaaaataattcacactatcagactagcaaggcactagaactggaaaagaccacagaaaacaaagaatccaaccctttcatcttacaggtgaacaaactgtgatgatgcacatgtatgtgttttgtaagctgtgagcaccgtaacaaaatgtaaatttgccattattaggaagtgctggtggcagtgaagaagcacccaggccacttgactcccagtctggtgccctgtctacaccagacaacacaggagctgggtcagattcccctcagctgcttaacaaagttcctcgaacagaaagtgcttacaaagctgccttctcggatactgaaaggtcgagttttctgaactgcactgattttattgcagttgaaaaaaaaaaaaagctattccaaaaatttcaagctgttctgagacatcttctgatggctttacttcctgagaggcaatgttttttactttatgcataattcattgttgccaaggaataaagtgaagaaacagcaccttttaatatataggtctctctggaagagacctaaattagaaagagaaaactgtgacaattttcatattctcattcttaaaaaacactaatcttaactaacaaaagttcttttgagaataagttacacacaatggccacagcagtttgtctttaatagtatagtgcctatactcatgtaatcggttaatcactactgcctttaaaaa

SEQ ID NO: 60823 - DNA, 6601 bp, Homo sapiens
  misc_feature (1)...(6601): n = a,t,c or g
cgtcccggaattctcgggtcgacgatttcgtgtgtcgaagaaacctgactgcgccctgaggagaacagcggagaaggtccaccgagcctggcgaaaggtccgctgagcgggctgtcgtccggagccactccgggctgcggagcacccagtggagaccgcgcctggctcaggtgtgggaccccatccttcctgtcttcgcagaggagtcctcgcgtgaaataagcgggttttgaaaacaaaaaaaagaaggagtggaagagggggccaggatccaggcctccatccccacagaagtgaagctacagctgggaggtctcctcccaccccaaccgtcaccctgggtcccgactgcccacctcctcctcctccccctccccccaacaacaacaacaacaacaactccaagcacaccggccataagagtgcgtgtgtccccaacatgaccgaacgaagaagggacgagctctctgaagagatcaacaacttaagagagaaggtcatgaagcagtcggaggagaacaacaacctgcagagccaggtgcagaagctcacagaggagaacaccacccttcgagagcaagtggaacccacccctgaggatgaggatgatgacatcgagctccgcggtgctgcagcagctgctgccccaccccctccaatagaggaagagtgcccagaagacctcccagagaagttcgatggcaacccagacatgctggctcctttcatggcccagtgccagatcttcatggaaaagagcaccagggatttctcagttgatcgtgtccgtgtctgcttcgtgacaagcatgatgaccggccgtgctgcccgttgggcctcagcaaagctggagcgctcccactacctgatgcacaactacccagctttcatgatggaaatgaagcatgtctttgaagaccctcagaggcgagaggttgccaaacgcaagatcagacgcctgcgccaaggcatggggtctgtcatcgactactccaatgctttccagatgattgccccaggacctggattggaacgagcctgcgctgattgaccagtaccacgagggcctcagcgaccacattcaggaggagctctcccacctcgaggtcgccaagtcgctgtctgctctgattgggcagtgcattcacattgagagaaggctggccagggctgctgcagctcgcaagccacgctcgccaccccgggcgctggtgttgcctcacattgcaagccaccaccaggtagatccaaccgagccggtgggaggtgcccgcatgcgcctgacgcaggaagaaaaagaaagacgcagaaagctgaacctgtgcctctactgtggaacaggaggtcactacgctgacaattgtcctgccaaggcctcaaagtcttcgccggcgggaaactccccggccccgctgtagagggaccttcagcgaccgggccagaaataataaggtccccacaagatgatgcctcatctccacacttgcaagtgatgctccagattcatcttccgggcagacacaccctgttcgtccgagccatgatcgattctggtgcttctggcaacttcattgatcacgaatatgttgctcaaaatggaattcctctaagaatcaaggactggccaatacttgtggaagcaattgatgggcgccccataacatcgggcccagttgtccacgaaactcacgacctgatagttgacctgggagatcaccgagaggtgctgtcatttgatgtgactcagtctccattcttccctgtcgtcctaggggttcgctggctgagcacacatgatcccaatatcacatggagcactcgatctatcgtctttgattctgaatactgccgctaccactgccggatgtattctccaataccaccattggtcccaccaccagcaccacaaccgccactctattatccagtagatggataccgagtttaccaaccagtgagggattactatgtccagaatgtgtacactccagtagatgagcacgtctacccacatcaccgcctgggtgaccctcacatagaaatgatacctggagcacacagtattcccagtggacatgtgtattcactgtccgaacctgaaatggcagctcttcgagattttgtggcaaagaaatgtaaaagatgggctaattactccaacgattgcaccctaatggagcccaaagttctcccaggtgaagagggggtggaaactgcaagtttcttatgattgccgagctccaaacaattttactatccagaatcagtatcctcgcctatctattccaaatttagaagaccaagcacacctggcaacgtacactgaattcgtacctcaaatacctggataccaaacataccccacatatgccgcgtacccgacctacccagtaggattcgcctggtacccagtgggacgagacggacaaggaagatcactatatgtacctgtgatgatcacttggaatccacactggtaccgccagcctccggtaccacagtacccgccgccacagccgccgcctccaccaccaccaccgccgccgcctccatcttacagtaccctgtaaatacctgtcatgtccttcaggatctctgccctcaaaatttattcctgttcagcttctcaatcagtgactgtgtgctaaattttaggctactgtatcttcaggccacctgaggcacatcctctctgaaacggctatggaaggttagggccactctggactggcacacatcctaaagcaccaaaagaccttcaacattttctgagagcaacagagtatttgccaataaatgatctctcatttttccaccttgactgccaatctaactaaaataattaataagtttactttccagccagtcctggaagtctgggttttacctgccaaaacctccatcaccatctaaattataggctgccaaatttgctgtttaacatttacagagaagctgatacaaacgcaggaaatgctgatttctttatggagggggagacgaggaggagggggacatgacttttcttgcggtttcggtaccctctttttaaatcactggaggactgaggccttattaaggaagccaaaattatcggtgcagtgtggaaaggcttccgtgatcctctcgctgcacccttagaaacttcaccgtcttcaaactccatttccatggttctgttaattctcaaggagcagcaactcgactggttctcccaggagcaggaaaaacccttgtgacatgaaacatctcaggcctgaaaagaaagtgctctctcagatggactcttgcatgttaagactatgtcttcacatcatggtgcaaatcacatgtacccaatgactccggctttgacacaacaccttaccatcatcatgccatgatggcttccacaaagcattaaacctggtaaccagagattactggtggctccagcgttgttagatgttcatgaaatgtgaccacctctcaatcacctttgagggctaaagagtagcacatcaaaaggactccaaaatcccatacccaactcttaagagatttgtcctggtacttcagaaagaattttcatgagtgttcttaattggctggaaaagcaccagctgacgttttggaagaatctatccatgtgtctgcctccatatgcatctgggcatttcatcttcagtcccctcattagactgtagcattaggatgtgtggagagaggagaaatgatttagcacccagattcacactcctatgcctggaagggggacatctttgaagaagaggaattagggctgtggacactgtcttgaggatgtggacttccttagtgagctccacattacttgatggtaaccacttcaaaaggatcagaatccacgtaatgaaaaaggtccctctagaggatggagctgatgtgaagctgccaatggatgaaaagcctcagaaagcaactcaaaggactcaaagcaacggacaacacaagagttgtcttcagcccagtgacacctctgatgtcccctggaagctttgtgctaacctgggactgcctgacttcctttagcctggtcccttgctactaccttgaactgttttatctaacctctctttttctgtttaattctttgctactgccattgaccctgctgcaggatttgtgtcattttcctgcctggttgctgagactccattttgctgccacacacagagatgtaagaggcaggctttaattgccaaagcacagtttgagcagtagaaaacaacatggtgtatatctcaaattgcctgacatgaagaggagtctaacggtgaagtttcacttttcatcagcatcatctttcacatgttcattatcatccgctcttattcttgcatgtttaaacacttaaaatttttagtataatttttagtgtgttttgaagtggtgactaggctttcaaaaacttccattgaattacaaagcactatccagttcttattgttaaactaagtaaaaatgataagtaacatagtgtaaaatattcctttactgtgaacttcttacaatgctgtgaatgagaggctcctcagaactggagcatttgtataataattcatcctgttcatcttcaattttaacatcatatataatttcaattctatcaattgggcctttaaaaatcatataaaaggatataaaatttgaaaagagaaacctaattggctatttaatccaaaacaactttttttttccttcaatggaatcagaaagcttgtcaatcactcatgtgttttagagtaattacttttaaaatggtgcatttgtgcttctgaactattttgaagagtcacttctgtttacctcaagtatcaattcatcctccatacatttgaattcaagttgttttttgtcaaatttacagttgtcaattgatcttcaagctgcagggtgcctagaaatgggccgttgtctgtagccctggcatgtgcacacggacatttgccaccactgcaagcaaaagtctggagaagttcaccaacgacaagaacgattagggaaaatatgctgctgtgggttaacaactcagaaagtccctgatccacatttggctgtttactaaagcttgtgattaactttttggcagtgtgtactatgctctattgctatatatgctatctataaatgtagatgttaaggataagtaattctaaatttattattctatagttttgaagtttggttaagtttcctttcactcaattgatttattttgttgttaatcaaatttatgttaattggatcctttaaattttttttggcattttccaacaaaaatggctttattcataagaaaggaaaaaaatcaatggaatttgatatctaaagaagttagaaagggagcaaaataaaaaacataaaggagatagatgaattagtaagcaaatcagtagtcgagtttttcaaactggcaaaattaattaattgacttttagcccaaatttacattgttaattaaatcaagaaggaagaagatctaagagctcccattgataggcaagcctagagagaactagctaaatttatcatgctaggatattgaaacacagaaagtttacatacatttatgaagggtcaatttagtttggacagtgaggtatttgtcttagtggaaaaaaggagaattagtctgatcaaatcgtgaagtaatacagtgaacttgcaggtgcacaaaataagagggccacatctatatggtgcagtctggaattctgtttaagtttgtaggtacctcttggacttctgaattgatccagttgtnattcatccaccacagacatctcacatccagatacagacagttccaagattgacaacagagaacaacctggctggaaaagacctggggcagaaatgggagagccctgcgggaaaccatgctaccatttttcttctaaagagagaatgcacatctgatgagactgaaagttctttgttgttttagattgtagaatggtattgaattggtctgtggaaaattgcattgcttttatttctttgtgtaatcaagtttaagtaataggggatatataatcataagcattttagggtgggagggactattaagtaattttaagtgggtggggttatttagaatgttagaataatattatgtattagatatcgctataagtggacatgcgtacttacttgtaaccctttaccctataattgctatccttaaagatttcaaataaactcggagggaactgcagggagaccaacttatttagagcgaattggacatggataaaaaccccagtgggagaaagttcaaaggtgattagattaataatttaatagaggatgagtgacctctgataaattactgctagaatgaacttgtcaatgatggatggtaaattttcatggaagttataaaagtgataaataaaaacccttgcttttacccctgtcagtagccctcctcctaccactgaaccccattgcccctacccctccttctaactttattgctgtattctcttcactctatatttctctctatttgctaatattgcattgctgttacaataaaaattcaataaagatttagtggttaagtgcaaaaaaaaaa

SEQ ID NO: 60824 - DNA, 4845 bp, Homo sapiens
cggccgcccgacgctctctgctcgcgcttgggctcgcgatggggaagaagtcccgggcggtacccggccgtaggcccatcctgcaactctctccgccgggtcctcggggcagcacgccgggccgggacccggagccggaacccgacactgagccggactcaaccgcggcggtccccagccagcccgccccgtcggcggcgacgaccaccgcggtgactgccgccgcggcctcggacgactcgccttcagaagatgaacaggaagcggtgcaggaggttcctagagttgttcagaatcctccaaaaccagtcatgaccactagacccacagctgttaaagcaacaggcggtctatgcttgcttggtgcttatgctgacagtgatgacgatgacaatgatgtttccgaaaaactagcacaatccaaagagacaaatggaaaccagtcaactgatattgatagtacattggccaacttcctagcggagatcgatgccataacagctcctcagcctgcagctcctgtaggagcttctgctccacctccaactccacctcgaccagagccaaaggaagcagcaacatctaccctttcttcttctacttcaaatggaacagactccacccaaacatctggttggcaatatgatactcagtgttcactggcaggagtcggaattgagatgggcgattggcaggaagtctgggatgagaacacgggatgttattattattggaatacacaaacaaatgaagtgacttgggagttaccccaatatcttgccacacaggtacagggattacagcattaccagcccagttctgtgccaggtgctgaaactagttttgtggtaaatacagacatatattctaaggagaaaacgatttctgtttccagtagtaaaagtggaccagtcatagccaagcgagaagttaaaaaggaagtaaatgaaggaattcaggctctctcaaatagtgaggaggagaagaaaggggtggcagcatcgctgcttgctcctttattgcctgagggaataaaagaagaagaagagagatggagaagaaaagtaatttgtaaagaggagccagtttcagaagtaaaagaaacaagtacaacagtagaagaagcaacaacaatagtaaagccacaggaaattatgttggacaatatagaagacccttctcaggaggatctttgcagtgttgtccaatctggagaaagtgaggaggaagaggaacaagatacccttgaactggagctagttttggaaaggaaaaaagcagagttgcgagccttggaggaaggagatggtagtgtgtcagggtctagtccacgttctgatatcagccagccagcatctcaagatggaatgcgtaggcttatgtctaaaagaggaaaatggaagatgtttgttccgagctaccagttccagaatctaccagtaggagttctagtaaaactggacgagatactccagaaaatggagaaactgcaattggtgctgaaaattcagaaaaaatagatgagaattcagataaagagatggaagtagaagaatctccagagaaaataaaagtacagacaacaccaaaagtagaagaagaacaggatttgaaatttcagattggagaactggcaaataccctgacaagtaaattcgagtttctaggcattaatagacaatccatctccaactttcatgtgctgctcttacagactgagactcgaattgcagactggcgggaaggggctcttaatggaaactaccttaaacgaaaacttcaggatgcagcagaacaactaaaacagtatgaaataaacgccactcctaaaggctggtcctgccactgggacagggatcatagacggtatttctatgtaaacgaacagtcgggcgagtctcagtgggagtttccagatggtgaagaggaagaagaagaaagccaagcacaagaaaatagagatgagactcttgccaaacagaccttgaaagacaaaactggcactgattcaaattcaacagaatcctctgaaacttccacaggttctctttgtaaagaatccttttctggtcaagtttcttcttcatcactcatgcgcagcttcacctccatttctggaccctccttcagtcaaatgttcctgtgcttcaacctccattacccttgggaaatgccaccacccccacctccacctccagaatcacctccaccccctcctccaccacctcctcctgcggaagatggtgagatccaggaggtagagatggaggatgagggaagtgaggagccccctgccccaggaacagaggaagatacccctttgaaaccttcagcacaaaccacagttgtaactagccagagttcagttgattccaccatctctagttcttcttccactaaaggaataaagaggaaagctacagaaattagcactgcagtggttcagaggtcagctaccattggcagttctccagttctctatagccagtcagctatagctacaggtcaccaggcagcagggattggaaaccaggcaacaggaattggacatcagacaataccagttagccttccagcagcaggaatgggtcatcaggccagaggaatgagcctgcagtcaaattaccttggactagcggcagcacctgcaattatgagttatgcagaatgttctgtcccaattggagtgactgctccctcattgcagccagttcaggcccgaggtgctgtgcctaccgctaccattatagaaccaccaccaccacctcctcctcctcctcctccaccaccaccagctcccaaaatgccaccacctgaaaagacaaaaaaaggaaggaaagacaaggcaaagaagagtaagaccaaaatgccatctttggtaaaaaagtggcagagtatccagcgtgagttagatgaagaggacaattctagttccagtgaagaggatcgggaatcaactgcacagaagcgaattgaagagtggaaacagcagcagctggttagtggcatggcagagagaaatgctaattttgaagcccttcctgaggattggagagcaaggctgaagagaaggaaaatggctccaaacacatagtttttaagtttttaaaacttttttgtattattgtttgttttgtgttcagttcaaagtcttaaccagttttattgtcaaataaactataaatgttatgggggagatcttataaatttcctgggcaagagtgtatgcatacaaagttttcacttttgtgaaatgtaatttttctgtttttgcaaagggatgaggtgattggaattgctttgaccatgctgcctttattctcaaactggcaaacttagcatgttaggtgtattaacctcatcagtcttgaagaacatgtggctcatgagtataacacttctgtagaggactccctgacaaaagtgaagaattaacttctcctccagaacaagtgcaattcagaaggcagctctgcattctaccttgcttgactggaattgtctgaagctttttctggcctcttttctctagtcggccacccctgaagtgctgaggtctaagtggtttacctcgtgctgatagatggccacactctttagagtagttctcataagttctagaactggtagctcggtcgtttcgcacactaggtggcatacaggcagcagcaggtgttcatatccttgattttgagaatttcccctcaagtatgtggcagtaaatacaacaagacactctatgtattaatgtctccattgtcttaaccctgttccaaaacaaaattcacctcctttctttatgtgaatgtattctccataaaattccagtatttaaaaagcagtttactgttctgtactttctgttgtatcacaatcaggtaaaagtcactttaaactgaggaaacggcaaattgtgttttaaagctctttgtatttctccagtttctgaccttgtaaatttgtatatatgcactaataaagctttttttataatcctgatgggttatccttttgctcgtcaactcctgttattctgattatgtaaccaggacttgtttttttttctaagcatatacaatgcaaggggcaaacatttaacaacagctttcaagaaaatgagcaggagaatcattgaacccaggaggcggaggttgtggtgggccaatatcacaccactgcaccccaacctgggcaacaagagcaagagtccatctaaaaaaagagctgtatataccactttaatctgtccttgggcttcagacttaaatattctcttaaacagcaaaaatactaactaagttaaatttaaaagcaaggagaagcatcattgtaatacgacatccatgtgtattcaaactagaattttctgatggtcttcgtaagataaaggagataattgtcatttctatgacacagcttttataatttgaataaacttagttggagattggagtatttttattatttattttcatgtgagatgggtaatgtgctgacctcataacaaagtttgagggagacacattgtatgtgagaatttgaagtgcttatgaagtacaaaagcagaggccaggtgctcacatctgtaatcccagcactttgggaggccaaggcacacagatcacttgaggtcaggagtttgagaccagcctggccaacatggcgaaaacccctctcttactaaaaatacaaaaattagctggatgtggtggtgtgggcctgtaatcccagctactcgcgaggctgaggcaggagaatcgcttgaacctggcaggcagaggttgcggtgagccaagattgcgtcactgcactccggcgtggacaagagagtgagactccgtcaca

SEQ ID NO: 60825 - DNA, 3404 bp, Homo sapiens
tctccctgcggacgggcgctgattggcccgtttgaaaatgcgcccaggcgggagctcacctgggctcttagcgtcgccgccggcttcgcagagcaccgcgccttagccgcgaagttctagttcttgctgccggtcctaacgtcccgcagtcttcgccagccagccgtcccgcatgcgcgtttgggcggcgtggagcctgctgccatgaagtcagcgagagctaagacaccccggaaacctaccgtgaaaaaagggtcccaaacgaaccttaaagacccagttggggtatactgtagggtgcgcccactgggctttcctgatcaagagtgttgcatagaagtgatcaataatacaactgttcagcttcatactcctgagggctacagactcaaccgaaatggagactataaggagactcagtattcatttaaacaagtatttggcactcacaccacccagaaggaactctttgatgttgtggctaatcccttggtcaatgacctcattcatggcaaaaatggtcttctttttacatatggtgtgacgggaagtggaaaaactcacacaatgactggttctccaggggaaggagggctgcttcctcgttgtttggacatgatctttaacagtatagggtcatttcaagctaaacgatatgttttcaaatctaatgataggaatagtatggatatacagtgtgaggttgatgccttattagaacgtcagaaaagagaagctatgcccaatccaaagacttcttctagcaaacgacaagtagatccagagtttgcagatatgataactgtacaagaattctgcaaagcagaagaggttgatgaagatagtgtctatggtgtatttgtctcttatattgaaatatataataattacatatatgatctattggaagaggtgccgtttgatcccataaacccaaacctccacaatctaaattgcttcgtgaagataagaaccataacatgtatgttgcaggatgtacagaagttgaagtgaaatctactgaggaggcttttgaagttttctggagaggccagaaaaagagacgtattgctaatacccatttgaatcgtgagtccagccgttcccatagcgtgttcaacattaaattagttcaggctcccttggatgcagatggagacaatgtcttacaggaaaaagaacaaatcactataagtcagttgtccttggtagatcttgctggaagtgaaagaactaaccggaccagagcagaagggaacagattacgtgaagctggtaatattaatcagtcactaatgacgctaagaacatgtatggatgtcctaagagagaaccaaatgtatggaactaacaagatggttccatatcgagattcaaagttaacccatctgttcaagaactactttgatggggaaggaaaagtgcggatgatcgtgtgtgtgaaccccaaggctgaagattatgaagaaaacttgcaagtcatgagatttgcggaagtgactcaagaagttgaagtagcaagacctgtagacaaggcaatatgtggtttaacgcctgggaggagatacagaaaccagcctcgaggtcccacttggaaatgaaccattggttactgacgtggttttgcagagttttccacctttgccgtcatgcgaaattttggatatcaacgatgagcagacacttccaaggctgattgaagccttagagaaacgacataacttacgacaaatgatgattgatgagtttaacaaacaatctaatgcttttaaagctttgttacaagaatttgacaatgctgttttaagtaaagaaaaccacatgcaagggaaactaaatgaaaaggagaagatgatctcaggacagaaattggaaatagaacgactggaaaagaaaaacaaaactttagaatataagattgagattttagagaaaacaactactatctatgaggaagataaacgcaatttgcaacaggaacttgaaactcagaaccagaaacttcagcgacagttttctgacaaacgcagattagaagccaggttgcaaggcatggtgacagaaacgacaatgaagtgggagaaagaatgtgagcgtagagtggcagccaaacagctggagatgcagaataaactctgggttaaagatgaaaagctgaaacaactgaaggctattgttactgaacctaaaactgagaagccagagagaccctctcgggagcgagatcgagaaaaagttactcaaagatctgtttctccatcacctgtgcctttactctttcaacctgatcagaacgcaccaccaattcgtctccgacacagacgatcacgctctgcaggagacagatgggtagatcataagcccgcctctaacatgcaaactgaaacagtcatgcagccacatgtccctcatgccatcacagtatctgttgcaaatgaaaaggcactagctaagtgtgagaagtacatgctgacccaccaggaactagcctccgatggggagattgaaactaaactaattaagggtgatatttataaaacaaggggtggtggacaatctgttcagtttactgatattgagactttaaagcaagaatcaccaaatggtagtcgaaaacgaagatcttccacagtagcacctgcccaaccagatggtgcagagtctgaatggaccgatgtagaaacaaggtgttctgtggctgtggagatgagagcaggatcccagctgggacctggatatcagcatcacgcacaacccaagcgcaaaaagccatgaactgacagtcccagtactgaaagaacattttcatttgtgtggatgatttctcgaaagccatgccagaagcagtcttccaggtcatcttgtagaactccagctttgttgaaaatcacggacctcagctacatcatacactgacccagagcaaagctttccctatggttccaaagacaactagtattcaacaaaccttgtatagtgtatgttttgccatatttaatattaatagcagaggaagactccttttttcatcactgtatgaattttttataatgtttttttaaaatatatttcatgtatacttataaactaattcacacaagtgtttgtcttagatgattaaggaagactatatctagatcatgtctgattttttattgtgacttctccagccctggtctgaatttcttaaggttttataaacaaatgctgctatttattagctgcaagaatgcactttagaactatttgacaattcagactttcaaaataaagatgtaaatgactggccaataataaccattttaggaaggtgttttgaattctgtatgtatatattcactttctgacatttagatatgccaaaagaattaaaatcaaaagcactaagaaatacaaaaaaaaaa

SEQ ID NO: 60826 - DNA, 6302 bp, Homo sapiens; identical to SEQ ID NO: 60596
  misc_feature (1)...(6302): n = a,t,c or g

SEQ ID NO: 60827 - DNA, 4951 bp, Homo sapiens
ttttttttttttaaaggtgaaacatttttatttagtttcattacagaggttaaatagacttttatgacatccatacaaaatatagcaatggttgtgggcataaataagaattgttctaactattctaactgattttataatgcacagctctttcagttgattacaaatatgaagtatatcacctcaggatgcagagatttttgaattctatttagcaatttccaaaagctgaagtctagaaccgaagacacatataaaaagatgatttttaaatggaaccagccaccttgaaaaatattttgaaaaacatgatttaaactttagaaaataaaacttttaatacttaagagataacatgatgcaaacgttgcttgttggcctgactttccaggactaagaccctctgggaatcaatggggctcggtgacatggcgtaacctgctactggggtgtggtctcagacacaaaatcacactggatgttggtctacagaggcaggattctctcattgctggatgactcttgaaatgaagcctttgcctttgttacacatttggctttacaatcttcattgacaaatagttcggcaaagagtagaggagcacggccacgaagagcagcaggataagcaggaacagcaagccgatgatgacccacttaaagcggcgccacacgatgaacttcatggtcttgcatgggttggtgaaccagaggaaggaggtttctggtcgatttggtaagtccagcttggggttcatgttgggttcgtcccgccccttcccggctggcctctcgtcggcctccttctcgttgaggatttccaatgtcatctccactttcccagccattacgcgggcgccatctttctctgcgtagcatggccaccatcctttcatggacttctgctcaaagagggaggctgtcttggctttaagggggttcatggctttgaggtccggaatcatgtccaaaccctgcaatttcctcctggtgatttttgcaggaaatgaatcgtgtgacggcaagtcaaagttctaggaaaacccaagtagtcatccagaggaaaacttgtcattgtccccatatctgaatgatcagccctgggtgggattcgaaattccgtttggtcaatactccagaaatgctcttttttcgcaacgatacagagttgttcggctggaaggtagtcaaacgggaaaacaaatcgccagttaaaattcccttcaccatccaaagatctgtaatggacatctgttttctgtttgttttcttcattgccaggaatccagcctttgacgtagatgtcactcatttcctctcctgtgatgcttttctcgtccaagataacgtccttggtgttccagatgatcacacgcaggtagtatctgggaaatgttgggctggaaggtgctgtgcaaagtccttgtttccacgtgctcagggaccagcccctgagtcctgaggatgtgaagagcaagccgctcttcaggggccccgaggtgctggtgcaggattttgttggcttcaaattcatccaagctgtagtctcgtcctccatatctgattctactcccatcttcggaaaggatgggttgtgggaagcctttgaatctggcgacattttgaagcagcttgtgttggtcctcagtgaatctcgccaggtattgactccagaaacacagtactcctctggtatccccgcagtgggaccccaaagcgggaaagggaatgggttttccagatcaataattgtttctcctactttttcatcccgggtaaaggtgtcataatcatagacagaaattttcaggtctttttcttgaggtaagtagcagctcagttcgtacatcctgccaaagactgggttgagagtgttgggaatgtagtgatctcggtctttcaatgacttttttgcccagtgttatttttatgtaagggtcacacaggccattgttgtcctggggctggagctctaagcctcgaacaatgtaaatcctaaccgtgcattcctgtgggacgctgtcaggtaattcccgaaactgtctgggaggggctggcacgctggggtcatccggcagagggtagatccgaaaggagcccttaaactctccaaccacagaaggatcttcattttcatccgacttgcctcggtacaacttgaacgtatctgagaagtctgtcaggccctcaaattctgctacattttctagttcgcaattatatatcttgagcttggaatagcctttctgaatatactgtccgcatttttcatgttcccctgaggaggcataaaatttactccaccagtccacgatttcttcctccttttctgtcagatgcactgtcgctggagaagccattttgctgagtgctgttgacatactgcttaagcacttagaagccagtaatggtttggtgtcttccatttcgataacgatgtcccggcatggtggggcagacagaagggaggctttgagctgtgggacgatgtcctctttccctgcataagggtcacagcgaaagcgatccaggcgctcgatggtgcactggcctacgacaggcttccgcccaaactgcctgtggtcgatgaccttgatcaccagtgggggcatgtacaattcctccttgggcaagaacactttcatgaagagaacagaacttggaaagttgggtgtcttcttaaggtttttgatcaccaccgattccaccctttctcctccacactccacaacaagactgggggatgtgatagaagccatctggaagtttttcatatttcttaagccccaagctagaatctcaatggcagtgagctggaccacaggcctgatcccctgggggaccatgtatagatttggcgccctttgagggggaagaatgggaaggttggagccatccttgcccctcagaatcagctctgcagttacaagaacatccccgcaggctttgtctccattcattactgggtgccagagaagtttgggtgtgatgtccatttctgagttcagtttcaccacaggagagaaaatgcttcgtcctaaaaattcatctttgcccacttggtcattgtcaaaaagttccatgataactttgggtggattctgtagaactgtttggggttccccatagatttcaacttcatcgaatataattgtttggtcccacgtgggattcagggttgaatggatgatctcagtggttttgctccgatggaggaaacagatatgagcatatggatctgaaaagctatccttatctaaagccaagaggtttctggcttgatagacatagcagcgcagatggtagatgtagtctctgtcaaaattgcaggaaacaatgggggtgtttgctccgaacacagtggtggcactgtgcttctgtttctccaggctcttctcatccccatcttcggtagtgtctgccccaagggcaccttcaagtttaaagatggcagctgcaccatgtgtttctgaaggagccatttttctcctccagcgtctgcggcggaaggtatctgaactacgttgtttccagtgaaatttccagccaattagagaagcatattcccagccctcttggtcttgcaattcctccatggcccctgcggtgcttgaagcagtctgtgttaaatctttcttgcgttttcggaccagccttcgccgtctatgagtgtggtacattttctctgctgcaacccaggatttgggcttatgatcaggaggaatggtgattccatattcccagcctttctcatccaccgctcgatttatgtcataagaccatgcatcatcttcccattcccaacctggaggacaagtcaactcgctgggtgatgctgctttatcgccgttcgcatccgtgtaggtgtcctcggccggcttccagtcgcccccggggtagcggctctcgttctgatagacttcatcagtgaactccgtgtgacctgcatctgcctcagtcagcaagcttctttcaggatcaactatccactctccttcccattcccagccttttggaggcagaaaaaattccctcttgagttttatttttcctgtgacatcagaaaacttatgacgtcctactaatccagaagtaccccattttccaaacatgagagcttgattttcatacatttcagcaaagacggtgaaagttccttctgcgaagctgttaaacttcttctccacagcacttaagcctagccagatgttcactcgcaactccacaggcacctttggcccgttgtttttctcctgtggatacttcagaaagatggtttgggttttcccacagtattttccagatgcattctcaccactggtggagtacaagacctgatgtgcgggaattcgtgcataggccagtctcttctctccccggatcatccagatgatgatgtcaggcatgctgttctgtggctcttcagtcagctgcattaatttatcaagccagtcctcaatttctgccagtgtggacttcacatctgtggcttccgacctcatcctcacagccgcctcatgtatttgggagagagacctggaccgcagctttcggatctgagtatcgagaactgtgacgttggcttttccttctgtgagaggcaacgtgtatctcgtgtcttctataacttcatctatcagcttcagccacaattcagccagctggtttgcaggaattttaccttgtatccctgattttagagcttctatatttgtttgcagccgttctgccatagctaggagagtgttcaccgcatccaggcgatgactaatatcctcccagtatgaagtcagggtaacaactggcttggtgtgggcccaaggcaagtaataatagtagttgccatcaaatacagcacggctgtactgagttgttgatgccaaaggcttacaggtggtgtcaaacttgttgccatagttcccaatgctgacttcaaactgaatggcctcac

SEQ ID NO: 60828 - DNA, 2157 bp, Homo sapiens
cgcttgggtagaggaagccgtgaggccggagcttaggtcgggaagggatggatcgctgagccgatagcgtccgctaggctgtctgcctcggtacctgttactgctgctacttcctcgtttgacaccttcctggaatctctcttgatttttgaggaaatacctagtaacaaacatgactgagttctggcttatatctgctcctggggagaaaacctgtcagcaaacatgggagaaattgcatgcggcaacttcaaagaacaataatcttgctgtcacttccaagttcaatattcctgacttaaaggttggcacgttggatgtcttggttggcttgtcagatgaactggctaaactggatgcatttgtagaaggagtggttaagaaagtagctcaatacatggctgatgtattggaagatagcaaagacaaagttcaagagaatctgttggcttaatgggagtggacttgggttaccttatataaccaaggttcccagtggggacatggccaaatatccaatcaagcagtccctgaaaaatatttctgaaataattgccaagggagtaactcagattgataatgacctgaaatctcgagcatctgcatacaataacctgaaaggaaatcttcagaatttggaacgaaagaatgcaggaagtttgctaactagaagtctagcagaaattgtgaagaaggatgactttgttcttgattcagagtatctcgtcacattactggtagtagttcccaagttaaaccacaacgactggattaagcagtatgaaacactagccgaaatggtagttccaaggtctagcaatgttctttcagaggaccaagacagttacctgtgtaatgtcaccttgtttaggaaggcagttgatgacttcagacacaaagccagagaaaacaaattcattgttcgtgacttccagtataatgaagaggagatgaaagcagataaagaagaaatgaacaggctttctactgataagaaaaaacaatttggaccacttgtacggtggctgaaagtgaattttagtgaagcatttattgcatggattcacgtgaaagcattacgggttttcgttgagtctgttttaaggtatggcttgccagtgaacttccaagcaatgctacttcagcccaataagaaaactttgaagaaactgagagaagtattacatgaattgtataaacatctagacagcagtgcagcagctattattgatgctcctatggatattccaggtttaaacctgagtcaacaagaatactacccctatgtgtactacaagattgattgcaacttgctggaattcaagtgaaaatgggctcctcccccgacaatcctgtccttgtgtttgtgtgtgctaacagaaataagttgcagtatggtcgtacttttaactctagtatcctttgcttgcttcttaccccctttcctaggtgaattctcccacagtggtctgtatctcaacattttctttttaaaggaaaaaatatatatatatagtttctttttattgatcaggtctgtaaatgtgtactaaaaaaatcagagtttatttataaacaaaatagtttatttaaagagaaggtctcttccttattgatatcatggtatgcattaattccatttgttactattgtgcacaaaagccctgttcacaggggaatggtgtaaacatttatactgttttgttcactgtatttagtagacataactgttgaatagttactgaatcatgatgtaaagaatatgtgaccatcttcaggtatgggatttctgaacgtttcaaatttcaatcaatgagcactgtcaacacccacaggagagaataaaattacctgtgcaaaggtgtattgtggtgtgtgtaacttaagagtacagggctgtttgagagttgagtgatgtcatgggtcaggtggtatgctgcttgcaggattttgttatgtgctgaggggtacccatttgtgttgtctgactttcgtatgatttaattgagccaaatttgggtcagaacacaaatttgaagatgacttttcagtatatgatgggtatttacatttgaacactagaattttaggtctctcaaataattaagaatagagccagttttgaataaagtctagcagaactatgaaaaaaaaaaa

SEQ ID NO: 60829 - DNA, 1532 bp, Homo sapiens
ttttttttttttctcattgtaacactcgtttttatataaatattcgcaagtcatgttacagaagaagccccaccagggaaaaaagtcaacgttagggttttgttagattgacccctgccttctaggttgggccccagcctggaggcgcctgctgctttgggaaggctggggttgctgccgtgaggctgccgaagaagctgcctgtgtcgcccacccctgggccgacccccttctttggtgtgtggtacatggtgaccttctctggccacccttagcctgggggagggttttggagaacagggttcagggaagcagggcccaggagtcctgggggcacttggaaatggggtgaaggggactgagccattaagaggtggtggagtctgagatttagaggctgagcctttgggggtgggggcagagtgaacgggaacatgttgggggaaccggggctgtcagccaagtaggaagcttctgcccttccctccagcccaggtccccaggtcctgccccctgttggtcatctcctgctggccccaccttcccagggagaagcctgactgtcccttcccggctcttccccctgcagtcccctttccccacagagaggccagaggctaggaacacagcaccagtctgagggtttaattaaccaggaagggaactgttgggaggggcacccctgtaaaaatgtacaaaaggtcttggggctatgtgaaaggggtgataaatatgtacatggaaccccccttccttgagcccctcctcccccagccctcggagggcatgaggacttgggtggtaggtgaacgggagggggcactttggcctctggcttagtgagcccttggggaggcaggcccagggcctagaggcccttacaggggcaaaggtgtacctcaggaggccccatggcccccgagatgagccacactcccatgcacacgcccctctcccttctctagaggctgtgacctctgctctcccagtgaccctacactccatgtgatgcttggtcttgtgggggttgaggcttctgttcccaggttccatgacctcagaggtggctggtgaggttatgacctttgccctccagccctggcttaaaacctcagccctaggacctggttaaaggaaggggagatggagctttgccccgacccccccccgttcccctcacctgtcagcccgagctgggccagggcccctaggtggggaactgggccggggggcgggcacaagcggaggtggtgcccccaaaagggctcccggtggggtcttgctgagaaggtgaggggttcccggggccgcagcaggtggtggtggaggagccaagcggctgtagagcaaggggtgagcaggttccagaccgtagaggcgggcagcggccacggccccgggtccagttagctcctcacccgcctcatagaagcggggtggccttgccaggcgtgggggtgctgccaaccaggttggctccaggaagccagcacagcgatctggtgggctagggcccagaaacgggggcggcc

SEQ ID NO: 60830 - DNA, 646 bp, Homo sapiens
ttttttttttttctctttacaacagcctttatttccggcccttgatcctgctcggatgctggtggaggcccttagctccgcccgccaggctctgtgccgcctccccgcaggcgcagattcatgaacacggtgctcaggggcttgaggccgtactcccccagcgggagctgaccttcgaggggctttcccctcgaaggtcagccaagaacaggtcgtcctgcacaccctccagcccgctcacttgctgcttcaggtgggccacggtgtgcgtcagccgcacctcgtaggtgctgctgcggcccttgttattcctcaccaggatgttcagaggttcgtcgcatttgtccaccaccagcaggaccgtgctgccggggcccaggccctggctggcaagggggaccctgtcctgcagcgccacaccgctcgggtggacagccagacgctgctggaaggcgtgcacgccgatcttctgggtgatctgcgccttcagctctgacaccgacatggagctgctcagggacacctggaattcgttgcccgccagcatcttcaccgtcaggtcccagcccatggctgtgggctgtgggctgtgggccacggcacgagctcctgtactggcaaagatgagttcgctgcctctcagccg

SEQ ID NO: 60831 - DNA, 3558 bp, Homo sapiens
gcattcccgggtcgacgatttcgtcgccgggacaccagggctccgcgctccgcactcaagaggctcccgcgtcccaacccctcgcgcccgcgcgttcgcggatccaggccgaggaccgaaaggggccgcccgagcccccggggccggcgcccagagagcccagcaaggccggccgccctgccggtgtgccgccggcgggtgcttctggaagggccaatgcgttcgggcagcagcccctgaagccgagcccgaggctaagtgggactgaccggggcccagagtggacgaaccgccagcatggggagagaccagcgcgcggtggccggccctgccctacggcggtggctgctgctggggacagtgaccgtggggttcctcgcccagagcgtcttggcgggtgtgaagaagtttgatgtgccgtgtggaggaagagattgcagtgggggctgccagtgctaccctgagaaaggtggacgtggtcagcctgggccagtgggcccccaggggtacaatgggccaccaggattacaaggattccccgggctgcagggacgtaaaggagacaagggtgaaaggggagcccccggagtaacaggacccaagggcgacgtgggagcaagaggcgtttctggattccctggtgccgatggaattcctggacacccggggcaaggtgggcccaggggaaggccgggctacgatggctgcaacggaacccagggagactcaggtccacaggggccccccggctctgaggggttcaccgggcctcccgggccccaaggaccaaaagggcagaaaggtgagccttatgcactgcctaaagaggagcgcgacagatatcggggtgaacctggagagcctggattggtcggtttccagggacctcccggccgccctgggcatgtgggacagatgggtccagttggagctccagggagaccaggaccacctggaccccctggaccaaaaggacagcaaggcaacagaggacttggtttctacggagttaagggtgaaaagggtgacgtagggcagccgggacccaacgggattccatcagacaccctccaccccatcatcgcgcccacaggagtcaccttccacccagatcagtacaagggtgaaaaaggcagtgagggggaaccaggaataagaggcatttccttgaagggagaagaaggaatcatgggctttcctggacttaggggttaccctggcttgagtggtgaaaaaggatcaccaggacagaagggaagccgaggcctggatggctatcaagggcctgatggaccccggggacctaagggagaagccggagacccagggccccctggactacctgcctactcccctcacccttccctagcaaaaggtgccagaggtgacccaggattcccaggggcccaaggggagccaggaagccagggtgagccaggagacccgggcctcccaggtccccctggcctctccattggagatggagatcagaggagaggcctgccgggtgagatgggacccaagggcttcatcggagaccccggcatccctgcgctctacgggggcccacctggacctgatggaaagcgagggcctccaggaccccccgggctccctggaccacctggacctgatggcttcctgtttgggctgaaaggagcaaaaggaagagcaggcttccctgggcttcccggctcccctggagcccccggaccaaaggggtggaaaggtgacgctggggaatgcagatgtacagaaggcgacgaagctatcaaaggtcttccaggactgccaggacccaagggcttcgcaggcatcaacggggagccggggaggaaaggggacaaaggagaccccggccaacacggcctccctgggttcccagggctcaagggagtgcctggcaacattggtgctcccggacccaaaggagcaaaaggagattccagaacaatcacaaccaaaggtgagcggggacagcccggcgtcccaggtgtgcccgggatgaaaggtgacgatggcagcccaggccgcgatgggctcgatggattccccggcctcccaggccctcccggtgatggcatcaagggccctccaggggacccaggctatccaggaatacctggaacgaagggtactccaggagaaatgggccccccaggactgggccttcccggcctcaaaggccaacgtggtttccctggagacgccggcttacctggaccaccaggcttcctgggccctcctggccccgcagggaccccaggacaaatagattgtgacacagatgtgaaaagggccgttggaggtgacagacaggaggccatccagccaggttgcataggagggcccaagggattgccaggcctgccaggacccccaggccccacaggtgccaaaggcctccgaggaatcccaggcttcgcaggagctgatggaggaccagggcccaggggcttgccaggagacgcaggtcgttgaagggttcccaggacccccagggttcataggaccccgaggatccaaaggtgcagtgggcctccctggcccagatggatccccaggtcccatcggcctgccagggccagatgggccccctggggaaaggggccttccctgggagaagtcctggggagctcagcccgggccacggggagatgctggtgtgcctggacagcctgggcttaaaggccttcccggagacagaggcccccctggattcagaggaagccaagggatgcctgggatgccagggctgaagggccagccaggcctcccaggaccttccggccagccaggcctgtatgggcctccaggactgcatggattcccaggagctcctggccaagaggggcccttggggctgccaggaatcccaggccgtgaaggtctgcctggtgatagaggggaccctggggacacaggcgctcctggccctgtgggcatgaaaggtctctctggtgacagaggagatgctggcttcacaggggagcaaggccatccaggaagccctggatttaaaggaattgatggaatgcctgggacccccgggctaaaaggagatagaggctcacctgggatggatggtttccaaggcatgcctggactcaaagggagacccgggtttccagggagcaaaggcgaggctggatttttcggaatacccggtctgaagggtctggctggtgagccaggttttaaaggcagccgaggggaccctgggcccccaggaccacctcctgtcatcctgccaggaatgaaagacattaaaggagagaaaggagatgaagggcctatggggctgaaaggatacctgggcgcaaaaggtatccaaggaatgccaggcatcccagggctgtcaggaatccctgggctgcctgggaggcccggccacatcaaaggagtcaagggagacatcggagtccccggcatccccggtttgccaggattccctggggtggctggcccccctggaattacgggattcccaggattcataggaagccggctactggggaggccgaggcggaagaatcgctggaacccaggaggcggagg

SEQ ID NO: 60832 - DNA, 2000 bp, Homo sapiens
ttttttttttttagattagaataaaaatttatttttgtaaagaattatattttgtatttgcaaaagctgaaaatgctcataaaaattaccagcccagagcttggatttccaccggatccaccacgtgagacaaaagagtctgtcacttcttcttgccaggtttgagggccttttctagaccttggatgtgttttcgagggagctgatactcttcaagcaatagccagccgaggtggtggacctggtttccctggatctgcacctgaaggctgtccttggccccaggggcaggattgacggtggtgctagcctggcatcgctgctgaaggatggcagccactgagtatgggtccagaccataggcctccaagttccggaccacggtcacctttttattagacgctctttgtgctagggtgatgtcaattggacagattctccctttcttcacaatgggctcttgtccgggaagggtcacttgataggcaggctgtaatttttccaaacacctggtcagaagactgtcccatggaagcttcatgactgtatgctgttcatttttctctaagatgcagtcacataggatgggatccaatctcacaagatttttgttgtctgcatcaaccaggtcatttttcttggcgtagttaatgacgatcgttcggacctcactgccctccagaaagctccccttcttgtggccagactcctggaagagcagggtcatgctggctgggacacagtagaggggttttatatctggagggtgatagggctgttccctgctaccctcctggatagtctgggaggtcggggagggctcgggtatgacgaaagatgtaatcctcgggtgtttccagtccacagccacaatgctctccacccctttgctcagctccttcacctgtataatctgctcctgctgcatttgctgcaggaacttagagagctttttgtagcttgacttctttatgtccagttgtcgtccttcggggcagcaggagaacatgtggctgccaaggaaagtgctggtgagtaaagggaggtcagcctttttgactcggcacttcaaggcatgtaagaagcattgctgtaacagctcatccatttgttcttgaagcgttttgctatctgtggagtcttggttcaggcccctggtgctggtgtcttctggggcttctgagagagacttgtcttcacgtgcctggtgaacctccccattctcctcttccccctccagggtcatgtgcctcatgtctccctgcagggtggagtccatctggacagaccccttctcttcactgagatctgctgaatccagggccagtggagcaatggaaggtggagaggacttgtttccagaccgccacaagtggtcctggtaagtgtggagcacagagaagccccttcccttcaggcctgacgtgagcatctcagctgtggacatggctgcaactccaatggctacaggggctctgttccccaccaaagaaatggcacagaggtcgcccttctgtacctgaggcagaccagcagggggcatcaccagtccaggcagcatcaaatctgctccccctaccagtttctcgagcaccagaggccatgttgtaaaggttggcagaagatcaggataggaccacagcgtgtacactgttggatacagatttttctccagttcaaagaggatggggttaccaccactcacgtacacagtcactgcatcccctttgtgagcatacaacttcacaatgttgagctcctcctttccaggtactaactcagagacttgatcagttccaagggtggggaaagcagttgtcacatcagctcgaagctttctcctgtccgaccccttgatggccgtgttggacttgacccgaaaggccttggcaaacatgtctgctggggtggcctggggaagagagcacagaagccagggaatgtcaagaaagcgagggcgcagcagctgccaggccctcagccgtgggggcagccatgct

SEQ ID NO: 60833 - DNA, 6346 bp, Homo sapiens
gtctcctctggatcttaactactgagcgcaatgctgagccatggagccgggttggccttgtggatcacactgagcctgctgcagactggactggcggagccagagagatgtaacttcaccctggcggagtccaaggcctccagccattctgtgtctatccagtggagaattttgggctcaccctgtaactttagcctcatctatagcagtgacaccctgggggccgcgttgtgccctacctttcggatagacaacaccacatacggatgtaaccttcaagatttacaagcaggaaccatctataacttcaagattatttctctggatgaagagagaactgtggtcttgcaaacagatcctttacctcctgctaggtttggagtcagtaaagagaagacgacttcaaccggcttgcatgtttggtggactccttcttccggaaaagtcacctcatatgaggtgcaattatttgatgaaaataaccaaaagatacagggggttcaaattcaagaaagtacttcatggaatgaatacacttttttcaatctcactgctggtagtaaatacaatattgccatcacagctgtttctggaggaaaacgttctttttcagtttataccaatggatcaacagtgccatctccagtgaaagatattggtatttccacaaaagccaattctctcctgatttcctggtcccatggttctgggaatgtggaacgataccggctgatgctaatggataaagggatcctagttcatggcggtgttgtggacaaacatgctacttcctatgcttttcacgggctgtcccctggctacctctacaacctcactgttatgactgaggctgcagggctgcaaaactacaggtggaaactagtcaggacagcccccatggaagtctcaaatctgaaggtgacaaatgatggcagtttgacctctctaaaagtcaaatggcaaagacctcctgggaaatgtggattcttacaatatcaccctgtctcacaaagggaccatcaaggaatccagagtattagcaccttggattacttgaaactcactttaaagagttagtccccggtcgactttattcaagttacttgttcagctgtgtctctgggtgaactgtctgctcagaagatgggcagtgggcagaacatttccagacaaagttgcaaacctggaggcaaacaataatggcaggatgaggtctcttgtagtgagctggtcgccccctgctggagactgggagcagtatcggatcctactcttcaatgattctgtggtgctgctcaacatcactgtgggaaaggaagaaacacagtatgtcatggatggcacggggctcgtaccgggaagacagtatgaggtggaagtcattgttgagagtggaaatttgaagaattctgagcgttgccaaggcaggacagtccccctggctgtcctccagcttcgtgtcaaacatgccaatgaaacctcactgagtatcatgtggcagacccctgtagcagaatgggagaaatacatcatttccctagctgacagagacctcttactgatccacaagtcactctccaaagatgccaaagaattcacttttactgacctggtgcctggacgaaaatacatggctacagtcaccagtattagtggagacttaaaaaattcctcttcagtaaaaggaagaacagtgcctgcccaagtgactgacttgcatgtggccaaccaaggaatgaccagtagtctgtttactaactggacccaggcacaaggagacgtagaattttaccaagtcttactgatccatgaaaatgtggtcattaaaaatgaaagcatctccagtgagaccagcagatacagcttccactctctcaagtccggcagcctgtactccgtggtggtaacaacagtgagtggagggatctcttcccgacaagtggttgtggagggaagaacagtcccttccagtgtgagtggagtaacggtgaacaattccggtcgtaatgactacctcagcgtttcctggctgctggcgcccggagatgtggataactatgaggtaacattgtctcatgacggcaaggtggttcagtcccttgtcattgccaagtctgtcagagaatgttccttcagctccctcaccccaggccgcctctacaccgtgaccataactacaaggagtggcaagtatgaaaatcactccttcagccaagagcggacagtgcctgacaaagtccagggagtcagtgttagcaactcagccaggagtgactatttaagggtatcctgggtgcatgccactggagactttgatcactatgaagtcaccattaaaaacaaaaacaacttcattcaaactaaaagcattcccaagtcagaaaacgaatgtgtatttgttcagctagtccctggacggttgtacagtgtcactgttactacaaaaagtggacaatatgaagccaatgaacaagggaatgggagaacaattccagagcctgttaaggatctaacattgcgcaacaggagcactgaggacttgcatgtgacttggtcaggagctaatggggatgtcgaccaatatgagatccagctgctcttcaatgacatgaaagtatttcctccttttcaccttgtaaataccgcaaccgagtatcgatttacttccctaacaccaggccgccaatacaaaattcttgtcttgacgattagcggggatgtacagcagtcagccttcattgagggcttcacagttcctagtgctgtcaaaaatattcacatttctcccaatggagcaacagatagcctgacggtgaactggactcctggtgggggagacgttgattcctacacggtgtcggcattcaggcacagtcaaaaggttgactctcagactattcccaagcacgtctttgagcacacgttccacagactggaggccggggagcagtaccagatcatgattgcctcagtcagcgggtccctgaagaatcagataaatgtggttgggcggacagttccagcatctgtccaaggagtaattgcagacaatgcatacagcagttattccttaatagtaagttggcaaaaagctgctggtgtggcagaaagatatgatatcctgcttctaactgaaaatggaatccttctgcgcaacacatcagagccagccaccactaagcaacacaaatttgaagatctaacaccaggcaagaaatacaagatacagatcctaactgtcagtggaggcctctttagcaaggaagcccagactgaaggccgaacagtcccagcagctgtcaccgacctgaggatcacagagaactccaccaggcacctgtccttccgctggaccgcctcagagggggagctcagctggtacaacatctttttgtacaacccagatgggaatctccaggagagagctcaagttgacccactagtccagagcttctctttccagaacttgctacaaggcagaatgtacaagatggtgattgtaactcacagtggggagctgtctaatgagtctttcatatttggtagaacagtcccagcctctgtgagtcatctcagggggtccaatcggaacacgacagacagcctttggttcaactggagtccagcctctggggactttgacttttatgagctgattctctataatcccaatggcacaaagaaggaaaactggaaagacaaggacctgacggagtggcggtttcaaggccttgttcctggaaggaagtacgtgctgtgggtggtaactcacagtggagatctcagcaataaagtcacagcggagagcagaacagctccaagtcctcccagtcttatgtcatttgctgacattgcaaacacatccttggccatcacgtggaaagggcccccagactggacagactacaacgactttgagctgcagtggttgcccagagatgcacttactgtcttcaacccctacaacaacagaaaatcagaaggacgcattgtgtatggtcttcgtccagggagatcctatcaattcaacgtcaagactgtcagtggtgattcctggaaaacttacagcaaaccaatttttggatctgtgaggacaaagcctgacaagatacaaaacctgcattgccggcctcagaactccacggccattgcctgttcttggatccctcctgattctgactttgatggttatagtattgaatgccggaaaatggacacccaagaagttgagttttccagaaagctggagaaagaaaaatctctgctcaacatcatgatgctagtgccccataagaggtacctggtgtccatcaaagtgcagtcggccggcatgaccagcgaggtggttgaagacagcactatcacaatgatagaccgcccccctcctccacccccacacattcgtgtgaatgaaaaggatgtgctaattagcaagtcttccatcaactttactgtcaactgcagctggttcagcgacaccaatggagctgtgaaatacttcacagtggtggtgagagaggctgatggcagtgatgagctgaagccagaacagcagcaccctctcccttcctacctggagtacaggcacaatgcctccattcgggtgtatcagactaattattttgccagcaaatgtgccgaaaatcctaacagcaactccaagagttttaacattaagcttggagcagagatggagagcctaggtggaaaatgcgatcccactcagcaaaaattctgtgatggaccactgaagccacacactgcctacagaatcagcattcgagcttttacacagctctttgatgaggacctgaaggaattcacaaagccactctattcagacacatttttttctttacccatcactactgaatcagagcccttgtttggagctattgaaggtgtgagtgctggtctgtttttaattggcatgctagtggctgttgttgccttattgatctgcagacagaaagtgagccatggtcgagaaagaccctctgcccgtctgagcattcgtagggatcgaccattatctgtccacttaaacctgggccagaaaggtaaccggaaaacttcttgtccaataaaaataaatcagtttgaagggcatttcatgaagctacaggctgactccaactaccttctatccaaggaatacgaggagttaaaagacgtgggccgaaaccagtcatgtgacattgcactcttgccggagaatagagggaaaaatcgatacaacaatatattgccctatgatgccacgcgagtgaagctctccaatgtagatgatgatccttgctctgactacatcaatgccagctacatccctggcaacaacttcagaagagaatacattgtcactcagggaccgcttcctggcaccaaggatgacttctggaaaatggtgtgggaacaaaacgttcacaacatcgtcatggtgacccagtgtgttgagaagggccgagtaaagtgtgaccattactggccagcggaccaggattccctctactatggggacctcatcctgcagatgctctcagagtccgtcctgcctgagtggaccatccgggagtttaagatatgcggtgaggaacagcttgatgcacacagactcatccgccactttcactatacggtgtggccagaccatggagtcccagaaaccacccagtctctgatccagtttgtgagaactgtcagggactacatcaacagaagcccgggtgctgggcccactgtggtgcactgcagtgctggtgtgggtaggactggaacctttattgcattggaccgaatcctccagcagttagactccaaagactctgtggacatttatggagcagttgcacgacctaagacttcacagggttcacatggtccagactgagtgtcagtatgtctacctacatcagtgtgtaagagatgtcctcagagcaagaaagctacggagtgaacaagaaaaccccttgtttccaatctatgaaaatgtgaatccagagtatcacagagatccagtctattcaaggcattgagaatgtacctgaagagctcctggataaaaattattcactgtgtgatttgtttttaaaaacttgcttcatgccctacagaggtgccagctatttctgttgatactatgtataatttattaatctggagaatgtttaaaattttatataatttaaaggtaacagatattattgtacatagttgtattttgtagtttcttctgtaaatatgtatttttcataatgtttaatattaagctttatataatactatttttccacactaaagtgttcatgacttgttctacataaaactaattcaacctgtaaaaaaaaaa

SEQ ID NO: 60834 - DNA, 1398 bp, Homo sapiens
ttttgtgtgaattcttaagcttgttttacaaaactttttattcatcagagctgtagtgaaatatcatcattgtaattgatattctagcactacaaaaggcacaatgaagcgttatttagttccagtactggaaagacagagggaacagcacatccttccttggacatgctttggtgctgctgtaagtggtcatcacagttttgattttctggataagaagttcaccacagcatttgtgcattcatctgatagccatcttccctgaaggacattgcattcttcagcattaacagcgtgtagtttttctctctctcttttcctgattacctcttttgaaattctcaaggcatttgggggaagctttgcaaatgccttcagcctggtccagacttctttctgaaaagtgctatcagggaaaacttcagtaacaagtccttgagcacatgcctctcccgctgttaacttctttccaaaaataagcatctctgttgccttggctgggctcattatcttcggaaaagtgtaagaggagcatccttccggactttggcctaggtgactaaatggtgtatgaaatgttgccctgtcagatgcatacacggcatcgaatagcccaaggagggtgacggagatgcccacagctggaccattgaccactgcaatcagaggcttaggaaaatctataaaacagcccacaaattccctcagtaaaacggcattatttttagctttctcctctactccaccagggggaatatcagtgaagttagtcagatcattcccactactgtaatagtcaccatttcctgttaaaacagtgatgattgagtcatccttgctggcagctttaagtgcacgcataatttcatgatacatctcagtgtttatggcatttttctttttgaggccggttgaacatgatctttgtgatgccatcttcgggaggtcaccaccagagtttccaaacccagttgatttcctgtctgttccaggctccacctggactaggaggattcccaatggaaggactcaaaactggacaccaaatccacatagttctgcctgggcagcttccttggggcaggctgccaagggcattccatgcgtcccatttggccttgttgatcaagtcaaatacacctggtttggggcattttacaagttccttcagtggcctgcttatatagcgcgtagagttttagcttcacttcgtttcctggatcctttttcaagagtttcacttgatttattgaattttcaaagtccttctgactggctctcattgctgttctattcatgtgcagctgaactaccgggaaactagtgacctgcagagaactcggacacgaacgccgcgccagtctccaagccaagtacgccatcgccatccctcgtgcc

SEQ ID NO: 60835 - DNA, 7347 bp, Homo sapiens
ttttttttttttaactgttccatctttattagaaaagcaaccaaaaaaagggtgaggggtgagcctggccctaaaggacccctccactgtgacacaggcagagccggctcatcccggcgtcgaggggtggatatggccagctgggtgtgggcagatttacaaagtcaacacttcatagaaaaggatgccgcctggcgtgcagatggcgaccaatccaccttcacatggctaaggcgggcccctcctcctctgggctcccatgtggtgtggacagcctgacctgggtacagggaggatgccatgaggaggtgggctgggcaggcctgggggctgtgtggggagtggcatccatgtgggcctctggtcctgcccagggtcctgcccagggggcattccaggcctggctggtcccctggggcgtggcggtggggctgcagtggcccctcaaatgtccatgtagtcgtcgtcctcgtctgtctcgctctccagcgaggactcctggctggatgtctccaggacctccagggctggctggcataggctctccttcctcacgttggcagcagactgggcagaaaggatggctgacttcagcttctgcttggtctcctccgagatgctgcctttgggggagagcagggttggggtgggtggcgtgacggtgatctcaggggggaacttggtggcggcggaggggatgaccagctttggcatgttgggcagggggcgggacttagcccggctgggctcaggcttgcctgggtgaccctctggtggctgggcactcccactgctgggggccttggagctggcagctgttgggggagagctcaggggctgagtctcactcgcagcctcctgagcctccccatcccttctcggctcaggcctcagtttcccctcctggctgcaggtgggctcagcgcctgtgcccagggcagcctctgccggccagcagtgtggctctgccggggaacttgtgggggccatcttcacctgcggactgtgccgtggctcctgaggcgggaagctggtgccctctgccactctcgccagctcttctccctctgggcccagagaggccatgctgggggtagcttcaggcctgtgtggccggggaggcccagggtccttggactggtccagggtggaagctgatgctgacggagggcaggtgataatagttgtggcggcagctagtgcagggcgaggcttggtgtgagcatcactgggccgctggacagagtcagctggcacagggtcaggggctgtgggcaccactgtcacaggaaagaagttctctcggctgtctttggggtgctttggagtggtgggggtgtcccccgaggcctgtctctgggcggcagccccaagatggacctggcagaacttcacagcctgctccagcgcagcctcctcatccacctgcttgatgagcatgtaggtctccgacatgatcctctccacacggcccaggtcataggccacacccttctggccctgctgccacacacggtaggcatccaacagaagtgtcttgcctgactctgtgtcctccaggagcttcctcttgcggctgagccgggagagcggctcctccgggtggccccctgccctggtccctgtggtggtggcgggggcgggggcgggggctggctgggctggggtgagcggggtgggctgctgccgggcactgatgctcagctcctccagggacagctcagtgggccggctctcggggccccggtcccttgcggggcgacctggcagcaggggtggtgtccgctccaagtctgagtggcaaacagtggcctcaactcgtgtccaatgggctcagtgggccctgcccgtgggctctctttatccttccgctccccgctttggtctgcactgtctcctgcatccatggccacaggccggtggttgaggaggcccactttgcctcctggctcgggccctggccctgagccatcagccagagggggcttcttcggctgggggaggccctcctggccatcctcaggactggccttgtgtgagacatcggtggtcatcctggctccggggaggccacagaccttgggccctgggcgttctgacccctctgcgagctcgctcagcgtgtcttcgagcaccttcacagtgaggatgaaggcccgctgcgccaggacctggcggtcagcatctcgcagatacttcttgccctggtctggggtccgctgaagcatggaggacaccttcagcagggtgctgtggtcccgcagctgggccagcaccttgagcagcagcacgatggagcggttcatgtgccaggcaaagctgcccggccggtcaatctcgtccacggggatccgccagatgccgttgaagaaattggtcttgttcctctcgcagaagagcccctgtgccggcatgtgctgcagttgttgccacgggatactgctgcctagcaacacgtcgcgggcccactggaggttccggtgggtcttgctgtaggtgtagaggaaggccagacggtagagactcttatagtgctgggggaagcggctcaggcacaggcggaaggaggcgatgcactgctctgtgagaaactgccgctgctcctcagcaccagccggcagcccctgggggaaggccactggctcccctgggaggtcccctctcttcttcccatcccacagggtgggtgtggatgctgagggcttgccagggatgcaagcagaggctggggtttctgcagcaggcttctggacaccttgctctgcagcccggaagccttctgtactctccaatgactcctcgttttttcctctttcttctgtggccccctgaagatctttacccgtcgctcctgcttgggaactgagaatgggcagcctcttctctgtgtaggatttcctggagccttccagtaagctggtgggctcattaaagaagtcctgcgttgagctagagtctgagagtgctacggctgtgctgtcctggcttcggtcgtccggcgttgcctgctggtggggttttttacatttgacgtaatcgtggtcaatcggagtggctgtgtaaggtggggatgtcagacctgggccagaggaggaggggagggaggctccggggcccggcagtgtcccagctgaagagtgggagtcctcgtccaccaggcaggccttctccttttctgaagctttgggtgtgttcttctcctcgcccctggcaaagggtccttctgcagcctccttcataaagttgaccaggacctctgcaccaaccccagaatcgggcttccccaggagcttcaggatggaagcatggagccgaaagtacacctccagggcctccatggccagctcaggtgggttgtggtagtggatcttcttggggtagcgggcagcctcctcgtgcaggtagtggccagcctgcctgtagtgcagcaagtaaacggtgggtggctgctgctgcttctcagccaccttgcccagcatgtagtggatgagccactcctcctcgtcaccatcaccctcgcagcgggctgctgatgtgaaacagtgcttggctgtctctagcatgctgtcgcgccggccctccatctgctgcacgagctcagggggcagctcgcctctccactgcttcaattgacgtgaggcgaatgagtgcaaggcataggacatggtgccatactcaatccatagggacaagttggagctgtcaatctccagggcccgacggaagcagttcaagacgggcgtggcatgcttccaaatgggcccatcactcttcagctcattggagttcagcttgtcctgaatgcggctggcccgggccagagccatgcctgcccaggaatcaaacctattggggcagatgcagatgtcatgcatgtagaacttgatggccttggactgctccttgtttttgaaatgataatcagccaggaggtagtaaagctcgttcaccactggaggggaggggtcagccccctctgggaggcagggtacctcagttgaagttccctcaatgtaggcagagactttgtccaggctaagggctggcctctctgtgcgaggcacaatggtggcaattctcttcagtaggttggccaagtcagcagacacggtgctggtcttatagctgtcaaattcaggaagggtcttgggcttaaaatactcaaacatgaacagtgcatcctcccatataagatccacctgctgggccgagtgttcctccaggtacctggccttactcttcttgctggggaagctgtacaggcagtagaagcactgctccaaggctgtctccagctcctccttgtaagggtgcgtgtcttcagaggtggatgcagccagttccttctggagtactcgcacatagaatcgcagcagagccccatctgaattgcagcaccaggaccttctgcccaaatactcgtgggctgtgttcagcagcatgagggaggatgggagcatgggcgtctctgacatcccttcctccgctgggttttggagctgctgctggtggcacagagaatggaaggtgtcttcctcctgccagatgatccggtgtagaatgatccagggtagcactgaagagacgtggggctccttggcctcctcctgcacagccatgctgcagtcaatgacctggatgaggttgttggtgagccgcacaaggccagtggtggaggatgataccttcaggatgctaccactgctgtccgcagagagggcctgctcgatgcccatcagcagttgggtcactgtggccacccactcctccttggcggcagcctcacctgagttcaccatctgctggacagcctcgttcagagccacatcggaacactcaaaacactgccgatagtccttcagccggagcaaggagtcctgcagaagaagcagctgggctggcctctcaggaatggaagtcataaactccaggtgtttggcccggtcaaacccactggtgcacaaagtggggcggagcagatgcacaacagccttgtagtcgcctgcttcatacagccgctgaatctcctccagggactggcaccgctccagcgacttcaggttcttatcaatctcctccagggaaaccacagagtcattatggaggttgggcagccggatgacaatgtctcttcgttcagcccctgcctccacctggatggcggtggaactctggagcatttctgtgcagatgtcatagttctccagggcctgctccatgtctccctgcagcgccaggaagcgagccttcagccagtaaacacggaccacaaactccagccaaccatcctcgaacaggtcgcgctgggacgaggcaaatgacagctgtaggaggtcacccaggcagtgggtccctgggaagtcaggtccaaatctgccattcaccataccagcagggcagttccgaggagacactgcagagcttctgcctttggtcagcagccactggtccagctggagttccatgcaggagagagacatcagcatcatgtccttgatgtgcttgttgctgcagtccctcagcagcgggttgggcaggctggtgctgtgcctcctccagctgtggtagacgctgagcacgacctccgccaagcctggaggccaccttaccaagaacttgtggcccatggctttcaggtagcgcatcatcagctccaggatgcccccgttggttaggttctccagcaggaactcatgcacgtcctgcttttcagattccatgaatgtggctgagtcaaatgacagcctttgaggcccaatgcttgggaagctttccagtttggcttctgactggacttcatagttattaaaggaatcatcttcctcctcagggtccagctttcttaacctggacggcaagaacttcatcagaagctcctggaagtctactttctcttctttttgcacttggtgtttcggacacgggcagaccgccgctttgctgtttctccactctcttctgaaatcttcttccgttttacccctttcttggatttatctcccccagaaatatcacccacaggagcgcctgtctccaacagaccaggactgtgcagtgggaagctggttgtagccacagaggtgtaggagaccacaggctcggcgacagccacagctgggttggtgctgacagtgcttggctggatcacgttaactggcgtcaccaccatggaggactcaagaggctggctggggtcctggtagtccgacaaatcaatccttttgccaaggctgggacgtgggggctcacaggtggtgagatgattgtacatggccagcaagctctctccgaggcacttccaggtgaagaaaggaatgggctgcacaagtttcaggtccggctccttctcccgcacaatcagcgcttgcctcttttttcgcagccccaaggcctcatctacaatcgcctgtgtctcagctgcactcaccgaaacatcgtgaatcgacatgtcacatttgaggaacattctgagagaggtccttccggagacaaggctgctcctcaaaaatcttctccttgaggaccagccctttgctgtaccggcaatccttctccaaagctttgcaggatgaagtacagacatgttgtgtaatcactgagggtgtacaggacagtgattaggttatccaaacagggccagtggtcaggattgcaccgcagcccttcctcaaaagcatggcgagccagggggatccggatgagcctcagggccacatgtccaatcttataccagaggttgacatctgtggagtccagcatcactgcctctaagtagaactccatggctgtctccagatcctcccgctgggctgccagctgggccaagttcttataagtggaatatttcagtatcagcccagggtgtttcaacccctctttctcatcaccggatgaaactgcctcccgcagcaggctcgcctccaagagctcatggtaggctttggcagactcctcaaaccggtcatgtttctgcagatcaagggccttgtggtacaatgcaaaagcctctgcttcctgagcctcctttgtctgggttttgtgacttttaaagcttccttcatgatcatcctcaatggtggagctggcatttaaggctgcaattcgaatcatattcagagagattcagcactgccacgagcatcacttctcatcactggcaaaggttgccccagtccacaactctccaggcgtctccacagcaacggccagtctgtcccgaccaccgcgccgtccggctgcgcgcctgacaacaaggcgtgctcccattggctccggtgccggttgtgccagccaatcagcgggggcgcacgcaccgctcgctctccgcgggctgcttagctgacgaaa

SEQ ID NO: 60836 - DNA, 1355 bp, Homo sapiens
cgacccacgcgtccgcttgcgcgagccgggctgtcgggtgtgttttgctctccagcctccgtcgtctctgcagcactccgggttctcctccagagcgctagtcccaggagctcggaatgttcgtggaacttaataacctgcttaacaccacccccgacagggcggagcaggggaaactgactctactctgtgatgccaagacagatgggagtttccttgtacaccactttctctccttctatctcaaagctaattgtaaagtctgctttgtggcactcatccagtccttcagccactacagtatcgtgggacagaagctgggtgtcagcctgaccatggcgcgggagcgtgggcagcttgtgttccttgagggactcaagtctgcagtggacgtcgtcttccaggctcaaaaggagccacaccccctgcagtttctcagggaggctaatgctgggaacttgaaaccattgtttgagtttgtacgggaggccctgaagccagtagacagtggagaggctcggtggacgtacccggtgctgttggtggacgacctcagtgtgctcctgagcctgggcatgggggcggtggctgtgctagacttcattcactactgcagagccaccgtgtgctgggaactaaagggaaacatggtggtccttgtgcacgacagtggagatgcggaggatgaggagaatgacatcctgctgaatggcctcagtcatcagagccatctgatactgcgggctgagggcctggccactggcttctgcagggatgtgcacgggcagctgaggatcctgtggaggagaccatcgcagcccgcagtccaccgggatcagagcttcacttaccagtataagatacaggacaaaagcgtgtccttttttgccaaaggaatgtctcctgctgttctgtgacctgatttcggagcagctgaagctacataggactgtttttggacgtggaagatagagcaacatagcaagaatgggtctttctcctctgtagtaatatttcaggctggaccggcgactccactgtgaccagagggttgagtgctgcagtgatggcatgccttggctgccctgggccctgttcagaaaacacaagggaccacaatcctgcctttgctgagagagaggctggatgctagacccaagtgaaaggggtcctttggagcctttgtttaaatatgccttagccccagctgcccatttttggttgacaagcctttcagagccagagtgggtatagatgtgccagccaggagatggcaccggatggcaggtgtgcaaggtgacaactaggataatcatggctggaataaagtaagtttccacactggaaaaaaaaaa

SEQ ID NO: 60837 - DNA, 836 bp, Homo sapiens
gacccacgcgtccgcccacgcgtccggccaggaggcggagtggaagtggccgtggggcgggtatgggactagctggcgtgtgcgccctgagacgctcagcgggctatatactcgtcggtggggccggcggtcagtctgcggcagcggcagcaagacggtgcagtgaaggagagtgggcgtctggcggggtccgcagtttcagcagagccgctgcagccatggccccaatcaaggtgggagatgccatcccagcagtggaggtgtttgaaggggagccagggaacaaggtgaacctggcagagctgttcaagggcaagaagggtgtgctgtttggagttcctggggccttcacccctggatgttccaagacacacctgccagggtttgtggagcaggctgaggctctgaaggccaagggagtccaggtggtggcctgtctgagtgttaatgatgcctttgtgactggcgagtggggccgagcccacaaggcggaaggcaaggttcggctcctggctgatcccactggggcctttgggaaggagacagacttattactagatgattcgctggtgtccatctttgggaatcgacgtctcaagaggttctccatggtggtacaggatggcatagtgaaggccctgaatgtggaaccagatggcacaggcctcacctgcagcctggcacccaatatcatctcacagctctgaggccctgggccagattacttcctccacccctccctatctcacctgcccagccctgtgctggggccctgcaattggaatgttggccagatttctgcaataaacacttgtggtttgcggccaaaaaaaaaa

SEQ ID NO: 60838 - DNA, 3654 bp, Homo sapiens
cttttctaagctttctgtgttacccccggttccgctgtcttttctgtctacagtttgcgatccccgcgtccaggatggagcagctgaacgaactggagctgctgatggagaagagtttttgggaggaggcggagctgccggcggagctatttcagaagaaagtggtagcttcctttccaagaacagttctgagcacaggaatggataaccggtacctggtgttggcagtcaatactgtacagaacaaagagggaaactgtgaaaagcgcctggtcatcactgcttcacagtcactagaaaataaagaactatgcatccttaggaatgactggtgttctgttccagtagagccaggagatatcattcatttggagggagactgcacatctgacacttggataatagataaagattttggatatttgattctgtatccagacatgctgatttctggcaccagcatagccagtagtattcgatgtatgagaagagctgtcctgagtgaaacttttaggagctctgatccagccacacgccaaatgctaattggtacggttctccatgaggtgtttcaaaaagccataaataatagctttgccccagaaaagctacaagaacttgcttttcaaacaattcaagaaataagacatttgaaggaaatgtaccgcttaaatctaagtcaagatgaaataaaacaagaagtagaggactatcttccttcgttttgtaaatgggcaggagatttcatgcataaaaacacttcgactgacttccctcagatgcagctctctctgccaagtgataatagtaaggataattcaacatgtaacattgaagtcgtgaaaccaatggatattgaagaaagcatttggtcccctaggtttggattgaaaggcaaaatagatgttacagttggtgtgaaaatacatcgagggtataaaacaaaatacaagataatgccgctggaacttaaaactggcaaagaatcaaattctattgaacaccgtagtcaggttgttctgtacactctactaagccaagagagaagagctgatccagaggctggcttgcttctctacctcaagactggtcagatgtaccctgtgcctgccaaccatctagataaaagagaattattaaagctaagaaaccagatggcattctcattgtttcaccgtattagcaaatctgctactagacagaagacacagcttgcttctttgccacaaataattgaggaagagaaaacttgtaaatattgttcacaaattggcaattgtgctctttatagcagagcagttgaacaacagatggattgtagttcagtcccaattgtgatgctgcccaaaatagaagaagaaacccagcatctgaagcaaacacacttagaatatttcagcctttggtgtctaatgttaaccctggagtcacaatcgaaggataataaaaagaatcaccaaaatatctggctaatgcctgcttcggaaatggagaagagtggcagttgcattggaaacctgattagaatggaacatgtaaagatagtttgtgatgggcaatatttacataatttccaatgtaaacatggtgccatacctgtcacaaatctaatggcaggtgacagagttattgtaagtggagaagaaaggtcactgtttgctttgtctagaggatatgtgaaggagattaacatgacaacagtaacttgtttattagacagaaacttgtcggtccttccagaatcaactttgttcagattagaccaagaagaaaaaaattgtgatatagataccccattaggaaatctttccaaattgatggaaaacacgtttgtcagcaaaaaacttcgagatttaattattgactttcgtgaacctcagtttatatcctaccttagttctgttcttccacatgatgcaaaggatacagttgcctgcattctaaagggtttgaataagcctcagaggcaagcgatgaaaaaggtacttctttcaaaagactacacactcatcgtgggtatgcctgggacaggaaaaacaactacgatatgtactctcgtaagaattctctacgcctgtggttttagcgttttgttgaccagctatacacactctgctgttgacaatattcttttgaagttagccaagtttaaaataggatttttgcgttcgcgtcacgattcagaaggttcatccagctatccagcaatttacagagcatgaaatttgcagatcaaagtccattaaatcctgtagctcttctagaagaactctacactagtcaacttatagatgcaacaacatgtatgggaataaaccatccaatattttcccgtaaaatttttgatttttgtattgtggatgaagcctctcaaattagccaaccaatttgtctgggccccctttttttttcacggagatttgtgttagtgggggaccatcagcagcttcctcccctggtgctaaaccgtgaagcaagagctcttggcatgagtgaaagcttattcaagaggctggagcagaataagagtgctgttgtacagttaaccgtgcagtacagaatgaacagtaaaattatgtccttaagtaataagctgacctatgagggcaagctggagtgtggatcagacaaagtggccaatgcagtgataaacctacgtcactttaaagatgtgaagctggaactggaattttatgctgactattctgataatccttggttgatgggagtatttgaacccaacaatcctgtttgtttccttaatacagacaaggttccagcgccagaacaagttgaaaaaggtggtgtgagcaatgtaacagaagccaaactcatagttttcctaacctccatttttgttaaggctggatgcagtccctctgatattggtattattgcaccgtacaggcagcaattaaagatcatcaatgatttattggcacgttctattgggatggtcgaagttaatacagtagacaaataccaagataagggacaaaagtattgtcctagtatcttttgttagaagtaataaggatggaactgttggtgaactcttgaaagattggcgacgtcttaatgttgctataaccagagccaaacataaactgattcttctggggtgtgtgccctcactaaattgctatcctcctttggagaagctgcttaatcatttaaactcagaaaaattaatcattgatcttccatcaagagaacatgaaagtctttgccacatattgggtgactttcaaagagaataaaacactatttcccttgccttttcatactagggcagtatctcctctagctagtgcccatacagaaaattctatcaccatacaaaatttaatgcagtatttatgttttaaagcacaggtgtaccgaaaactgtgaaaagtctgaatttatgggttctatgcatgcatttttgcctaacctagagaaagagtttgataaatttttaccagctttgaagatggattaacttttgactttgagctttaaacttttaagtcagacatttcaggactaatttgattttgtagatatcattgtaagaactttatttgaaagactgaataaagggatttgatttgttttcatcatttaagcacagtcttgtgatgatgagaacataagtgtgaaaaaaaaaaa

SEQ ID NO: 60839 - DNA, 5888 bp, Homo sapiens
agtgtggtggaattcgctggagctggtgctgaaaaagggggtttgcagaggctgccctggggctggtgctgaaagaagagcccacagctgacttcatggtgctacaataacctcagaatctacttttcactctcaggagaacccacatgtctaatatttagacatgatggcaaactgggcggaagcaagacctctcctcattcttattgttttattagggcaatttgtctcaataaaagcccaggaagaagacgaggatgaaggatatggtgaagaaatagcctgcactcagaatggccagatgtacttaaacagggacatttggaaacctgccccttgtcagatctgtgtctgtgacaatggagccattctctgtgacaagatagaatgccaggatgtgctggactgtgccgaccctgtaacgccccctggggaatgctgtcctgtctgttcacaaacacctggaggtggcaatacaaattttggtagaggaaaaaagggacaaaagggagaaccaggattagtgcctgttgtaacaggcatacgtggtcgtccaggaccggcaggacctccaggatcacagggaccaagaggagagcgagggccaaaaggaagacctggccctcgtggacctcagggaattgatggagaaccaggtgttcctggtcaacctggtgctccaggacctcctggacatccgtcccacccaggacccgatggcttgagcaggccgttttcagctcaaatggctgggttggatgaaaaatctggacttgggagtcaagtaggactaatgcctggctctgtgggtcctgttggcccaaggggaccacagggtttacaaggacagcaaggtggtgcaggacctacaggacctcctggtgaacctggtgatcctggaccaatgggtccgattggttcacgtggaccagagggccctcctggtaaacctggggaagatggtgaacctggcagaaatggaaatcctggtgaagtgggatttgcaggatctccgggagctcgtggatttcctggggctcctggtcttccaggtctgaagggtcaccgaggacacaaaggtcttgaaggccctaaaggtgaagttggagcacctggttccaagggtgaagctggccccactggtccaatgggtgccatgggtcctctgggtccgaggggaatgccaggagagagagggagacttgggccacagggtgctcctggacaacgaggtgcacatggtatgcctggaaaacctggaccaatgggtcctcttgggataccaggctcttctggttttccaggaaatcctggaatgaagggagaagcaggtcctacaggggcgcgaggccctgaaggtcctcaggggcagagaggtgaaactgggcccccaggtccagttggctctccaggtcttcctggtgcaataggaactgatggtactcctggtcccaaaggcccaacgggctctccgggtacctctggtcctcctggctcagcagggcctcctggatctccaggacctcagggtagcactggtcctcagggaattcgaggccaaccggtgatcccaggagttccaggtttcaaaggagaagctggcccaaaaggggaaccagggccacatggtattcagggtccgataggcccacccggtgaagaaggcaaaagaggtcccagaggtgacccaggaacagttggtcctccagggccagtgggagaaaggggtgctcctggcaatcgtggttttccaggctctgatggtttacctgggccaaagggtgctcaaggagaacggggtcctgtaggttcttcaggacccaaaggaagccagggggatccaggacgtccaggggaacctgggcttccaggtgctcggggtttgacaggaaatcctggtgttcaaggtcctgaaggaaaacttggacctttgggtgcgccaggggaagatggccgtccaggtcctccaggctccataggaatcagagggcagcccgggagcatgggccttccaggccccaaaggtagcagtggtgaccctgggaaacctggagaagcaggaaatgctggagttcctgggcagaggggagctcctggaaaagatggtgaagttggtccttctggtcctgtgggcccgccgggtctagctggtgaaagaggagaacaaggacctccaggccccacaggttttcaggggcttcctggtcctccagggcctcctggagaaggtggaaaaccaggtgatcaaggtgttcctggagatcccggagcagttggcccgttaggacctagaggagaacgaggaaatcctggggaaagaggagaacctgggataactggactccctggtgagaagggaatggctggaggacatggtcctgatggcccaaaaggcagtccaggtccatctgggacccctggagatacaggcccaccaggtcttcaaggtatgccgggagaaagaggaattgcaggaactcctggccccaagggtgacagaggtggcataggagaaaaaggtgctgaaggcacagctggaaatgatggtgcaagaggtcttccaggtcctttgggccctccaggtccggcaggtcctactggagaaaagggtgaacctggtcctcgaggtttagttggccctcctggctcccggggcaatcctggttctcgaggtgaaaatgggccaactggagctgttggttttgccggaccccagggtcctgacggacagcctggagtaaaaggtgaacctggagagccaggacagaagggagatgctggttctcctggaccacaaggtttagcaggatcccctggccctcatggtcctaatggtgttcctggactaaaaggtggtcgaggaacccaaggtccgcctggtgctacaggatttcctggttctgcgggcagagttggacctccaggccctgctggagctccaggacctgcgggacccctaggggaacccgggaaggagggacctccaggtcttcgtggggaccctggctctcatgggcgtgtgggagatcgaggaccagctggcccccctggtggcccaggagacaaaggggacccaggagaagatgggcaacctggtccagatggcccccctggtccagctggaacgaccgggcagagaggaattgttggcatgcctgggcaacgtggagagagaggcatgcccggcctaccaggcccagcgggaacaccaggaaaagtaggaccaactggtgcaacaggagataaaggtccacctggacctgtggggcccccaggctccaatggtcctgtaggggaacctggaccaaaaggtccagctggcaatgatggtaccccaggacgggatggtgctgttggagaacgtggtgatcgtggagaccctgggcctgcaggtctgccaggctctcagggtgcccctggaactcctggccctgtgggtgctccaggagatgcaggacaaagaggagatccgggttctcggggtcctataggaccacctgggtcgagctggaaaacgtggattacctggaccccaaggacctcgtggtgacaaaggtgatcatggagaccgaggcgacagaggtcagaagggccacagaggctttactggtcttcagggtcttcctggccctcctggtccaaatggtgaacaaggaagtgctggaatccctggaccatttggcccaagaggtcctccaggcccagttggtccttcaggtaaagaaggaaaccctgggccacttgggccaattggacctccaggtgtacgaggcagtgtaggagaagcaggacctgagggccctcctggtgagcctggcccacctggccctccgggtccccctggccaccttacagctgctcttggggatatcatggggcactatgatgaaagcatgccagatccacttcctgagtttactgaagatcaggcggctcctgatgacaaaaacaaaacggacccaggggttcatgctaccctgaagtcactcagtagtcagattgaaaccatgcgcagccccgatggctcgaaaaagcacccagcccgcacgtgtgatgacctaaagctttgccattccgcaaagcagagtggtgaatactggattgatcctaaccaaggatctgttgaagatgcaatcaaagtttactgcaacatggaaacaggagaaacatgtatttcagcaaacccattccagtgtaccacgtaaaacctggtgggccagtaaatctcctgacaataaacctgtttggtatggtcttgatatgaacagagggtctcagttcgcttatggagaccaccaatcacctaatacagccattactcagatgacttttttgcgccttttatcaaaagaagcctcccagaacatcacttacatctgtaaaaacagtgtaggatacatggacgatcaagctaagaacctcaaaaaagctgtggttctcaaaggggcaaatgacttagatatcaaagcagagggaaatattagattccggtatatcgttcttcaagacacttgctctaagcggaatggaaatgtgggcaagactgtctttgaatatagaacacagaatgtggcacgcttgcccatcatagatcttgctcctgtggatgttggcggcacagaccaggaattcggcgttgaaattgggccagtttgttttgtgtaaagtaagccaagccaagacacatcgacaatgagcaccaccatcaatgaccaccgccattcacaagaactttgactgtttgaagttgatcctgagactcttgaagtaatggctgatcctgcatcagcattgtatatatggtcttaagtgcctggcctccttatccttcagaatatttattttacttacaatcctcaagttttaattgattttaaatatttttcaatacaacagtttaggtttaagatgaccaatgacaatgaccacctttgcagaaagtaaactgattgaataaataaatctccgttttcttcaatttatttcagtgtaatgaaaaaggtggcttagtatttatgaggaaattcttcttcctggcaggtagcttaaagagtggggtatacagagccacaacacatgtttattttgcttggctgcagttgaaaaatagaaattagtgcccttttgtgacctctcattccaagattgtcaattaaaaatgagtttaaaatgtttaacttgtgatcgagacctacatgcatgtcttgatattgtgtaactataatagagactctttaaggagaatcttaaaaaaaaaaaaaacgtttctcactgtcttaaataaaatttttaaatagtatatattcaggggcattttggaaaacaaagggaatttacttcgacttcttaaatttttgtaaaagactataagtttaaacatctttctcattcaaatttaaagatatctttctcctcttgatcaatctatcaatattgatagaagtcacactagtatataccatttaatacatttacactttcttatttaagaagatattgaatgcaaaataattgacatatagaactttacaaacatatgtccaaggactctaaattgagactcttccacatgtacaatctcatcatcctgaagcctataatgaagaaaaagatctagaaactgagttgtggagctgactctaatcaaatgtgatgattggaattagaccatttggcctttgaactttcataggaaaaatgacccaacatttcttagcatgagctacctcatctctagaagctgggatggacttactattcttgtttatattttagatactgaaaggtgctatgcttctgttattattccaagactggagataggcagggctaaaaaggtattattatttttccttaatgatggtgctaaattcttcctataaaattcc

SEQ ID NO: 60840 - DNA, 2898 bp, Homo sapiens
tttcgtgtcgttccgccacctcccagtcgggttgcggtggaggccgttcctggctttgtagctcgctcaagatggcggcgcagccaccccgcgggatacgcctcagcgcgctttgcccgaagtttttacatacaaattctactagtcacacctggccattcagtgcagttgctgaattaatagataatgcttatgatcctgatgtgaacgctaaacaaatatggattgacaaaacagtgataaatgaccatatatgcttgacattcaccgacaatgggaatggtatgacttctgataaattacataaaatgctaagctttggcttcagtgacaaagtcaccatgaatggtcatgtcccagttggattatatgggaatggcttcaagtcgggttctatgccgtctgggtaaagacgcaatcgtttttaccaaaaatggagaaagcatgagcgtgggccttttgtctcagacctaccttggaagtcataaaagcggagcatgttgttgttccaatagtggcattcaacaagcaccgacagatgattaatttagcagaatcaaaagccagccttgctgcaattctggaacattctctgttttccacggaacagaagttactggcagaacttgatgctattataggcaagaaggggacgaggatcatcatttggaatcttagaagctacaaaaatgcaacagagttcgattttgaaaaggataaatatgatatcagaattcccgaggatttagatgagataacagggaagaaggggtacaagaagcaggaaaggatggaccagattgcccctgagagtgactattccctgagggcttattgcagtatattatatctaaagccaagaatgcagatcatcctacgtggacagaaagtgaagacacagctggtttcgaagagtcttgcctacatcgaacgtgatgtttatcgaccaaaatttttatctaaaacagtgagaattacctttggattcaactgcagaaataaagatcattatgggataatgatgtatcacagaaatagactcatcaaagcttatgaaaaagttggatgtcagttaagggcaaacaacatgggtgttggagtggttggaattatagagtgtaatttccttaagccaactcataataaacaagatttcgactatactaatgagtacagacttacaataacagcactaggagaaaagctgaatgattactggaatgaaatgaaagtgaagaaaaatacagaatatcctctaaatttgccagttgaagatatacagaagcgtcctgatcagacatgggttcagtgtgatgcctgtctaaagtggcggaaattacctgatgggatggatcaacttcctgaaaaatggtattgctccaataacccatgacccacagttcagaaattgtgaggttccagaagaacctgaagatgaggatttggtacatcccacttatgaaaaaacctacaaaaagaccaacaaggaaaaattcaggatcagacagccggaaatgatccctcggattaatgctgaactgttgtttcggccaactggctctttcaactccaagtcttttcttctcctaaggaaagtgtttccaaaagaagcatctttcagaaggaacaaattcttatgcgacaagacttctaaataatcatcaagttccacctcagtctgaacctgagagcaacagcttgaaacggagactttctactcgttcctcaattttgaatgcaaagaatcggagattggagtagtcagttttgaaaattcagtttataaaggtggatgatgatgatgaagatgtcatcatcttagaagaaaacagtacccccaaacctgcagtagatcatgatattgacatgaaatcagaacagagtcacgttgagcaaggtggtgttcaggttgagtttgtgggtgacagtgaaccttgtggccagactggttcaacaagcacctcatcatcccgatgcgaccagggaaatactgcagctacccagactgaagtaccaagtttagttgttaaaaaagaagaaactgttgaagacgagatagacgtaagaaatgatgcagtgattctgccctcctgtgtagaagctgaagcaaagatacatgaaacccaggaaaccaccgataaatctgcagatgatgcaggctgccaattacaagaactgagaaaccagctactccttgtcactgaggaaaaagagaattataaaagacagtgtcatatgtttactgatcaaatcaaagtgttacaacagaggatactagaaatgaatgacaagtatgttaagaaagaaacttgccatcagtccactgaaaccgatgctgtatttttacttgaaagtattaatggcaaatctgaaagtccagaccatatggtatctcagtatcagcaagctttggaagaaatagaaaggctgaaaaaacaatgtagtgctttgcaacatgtaaaggctgaatgcagccagtgttccaataatgagagtaaaagtgaaatggatgagatggctgtgcagcttgacgatgtgtttagacaactggacaaatgcagtattgagagggaccagtataaaagtgaggttgaattgctggaaatggaaaagtcacaaatccgttcacagtgtgaagaactcaaaactgaagtagaacagttaaaatctacaaatcaacagacggcaacagatgtttcaacatcaagtaacattgaggagtctgtaaatcatatggatggagaaagcctcaaactccgatctcttcgagttaacgtaggacaactgctggctatgattgtgcctgatcttgatcttcagcaagtgaattacgatgttgatgtagttgatgagattttaggacaagttgttgaacaaatgagtgaaatcagtagtact

SEQ ID NO: 60841 - DNA, 2123 bp, Homo sapiens
gcgcgtttcctgaaggtcgatggccaggtggtcttcataaactatactgccttgtgatgcctccctagaaatgagaggtctcaataccagctcagaccatgtggaccgcggatgagattgctcagctatgctatgaacactatgggatcaggctgcccaagaaggggaagcctgagccaaaccatgagtggacattattggcagcggtggtgaagatacaatctccagctgacaaggcctgcgacacccctgataagccggtgcaagtgacaaaggaagttgtgtcaatgggaacaggaacaaaatgcataggacagtccaaaatgaggaagaacggagacatcctcaatgatagccatgctgaggtcatagccagaaggagtttccaaaggtaccttctccaccaactccagttggcagccaccctgaaagaggatagcatctttgtcccaggaactcaaaaaggagtgtggaaacttagacgagacctcatttttgtgtttttctccagccatacaccctgtggggatgcctccatcattccgatgcttgagtttgaagatcagccttgctgtcctgtcttcagaaattgggccaacaactcatcagtagaagccagtagtaacctggaagctcctggaaatgaaagaaaatgtgaagaccctgacagtcctgtaaccaaaaagatgaggcttgagcctgggactgcagccagggaggtcaccaacggagcagctcaccatcagagttttggcaagcagaaaagtggcccaatctcaccaggcatccacagctgtgatctcactgtagagggactggctactgtcaccagaatagcccctggtagtgccaaagtgatagacgtttatagaactggagccaagtgtgtacctggagaagctggagactccggaaagccgggtgctgcgtttcaccaggtggggctgctccgagtgaagccaggccgtggagacagaacacgctccatgtcctgtagtgacaagatggcccgatggaacgtcctcggatgccaaggggcactgttgatgcacttgctggaagagcccatctacctgtcagctgtggtcattgggaagtgcccatacagccaggaagccatgcagagagcactgattggaaggtgtcagaaagtggtctgctttaccaaaaggcttcggagttcaagaattaaaaatactgcagtcagatttactatttgaacagagccgcagtgcggtgcaggcaaaaagggctgatagcccaggtcgacttgttccttgtgggggcagccatcagctggagtgcagttcctgagcagcctttggatgttactgccaatggctttccacagggaacaacaaagaaaacaattggaagccttcaggcaagatcccaaatcagcaaagtggaactcttcagatcattccagaagctgctaagcagaattgcaagggacaagtggccacactccctcagggtgcagaagctggatacctaccaggagtacaaggaggctgcgtcctcttaccaggaagcctggagcacactccggaagcaggtgtttggatcctggatcagaaacccaccggattatcaccagttcaagtgagaaggaaatgtttgctctggtagcaggacccttcatcctgaactgccttcctccacgcaggacaagtcttagcttttttggtagttaaatcagggaacattctttctgagctttgcatctctgttgtgtaatacagatggaatctggaacttagagcaagctatacttgattgaagtagctctctgctaaaatggcatctcactaatgacctcactatctgacttccattgtgttttattgcttctctaaaatatgaaatcagagtttggaacatgatgctttgaaagtactctgcagcagctctgttttatgggttcctacattgattcagcaaatatttattgagctgaaatgatgtttgacgctctgcaagttttacagctttgcctagcatagcgaacatatattttgtattcccagcctttctttcttcagggagccattcttttcccattcttcagtgatcctgctctgtgcctcagacttggctgaaggtaaccttactccctggct

SEQ ID NO: 60842 - DNA, 2507 bp, Homo sapiens
agagagagagagatcaagagaaatcacccagcctgtgcctggagctacagcgaataacggaacttgagtctcctacacccctgatttgcatccctgatgataagaacaggttggcaaagaaaatgtttacccaaccaatttgctgtgtttggggagttatcagtcctcacagtccgcgatgctggcgattaccttgtaaataatgcatgggccacttctggttcccagtgtgctggctgtgtgggaaagggcaatgtctgtacgagcaggcagagaagattgcctggcacctactgcggctgttttgctgaacctgttgcccttttgacaggtgcagaacatgtctcaatccatagaggtcttggacaggcggacccagagagacttgcagtacgtggagaagatggagaaccaaatgaaaggactggagtccaagttcaaacaggtggaggagagtcataagcaacacctggccaggcagtttaaggcgataaaagcgaaaatggatgaacttaggcctttgatacctgtgttggaagagtacaaggccgatgccaaattggtattgcagtttaaagaggaggtccagaatctgacgtcagtgcttaacgagctgcaagaggaaattggcgcctatgactacgatgaacttcagagcagagtgtccaatcttgaagaaaggctccgtgcatgcatgcaaaaactagcttgcgggaagttgacgggcatcagtgaccccgtgactgtcaagacctccggctcgaggttcggatcctggatgacagaccctctcgcccctgaaggcgataaccgggtgtggtacatggacggctatcacaacaaccgcttcgtacgtgagtacaagtccatggttgacttcatgaacacggacaatttcacctcccaccgtctcccccacccctggtcggggcacggggtcaggtggtctacaacgggttctattctactttcaacaagttccagagccacatcattcatccaggtttgacctgaagacagagaccatcctcaagacccgcagcctggactatgccggttacaacaacatgtaccactacgcctggggtggccactcggacatcgacctcatggtggacgagagcgggctgtgggccgtgtacgccaccaaccagaacgctggcaacatcgtggtcagtaggctggaccccgtgtccctgcagaccctgcagacctggaacacgagctaccccaagcgcagcgccggggaggccttcatcatctgcggcacgctgtacgtcaccaacggctactcagggggtaccaaggtccactatgcataccagaccaatgcctccacctatgaatacatcgacatcccattccagaacaaatactcccacatctccatgctggactacaaccccaaggaccgggccctgtatgcctggaacaacggccaccagatcctctacaacgtgaccctcttccacgtcatccgctccgacgagttgtagctccctcctcctggaagccaagggcccacgtcctcaccacaaagggactcctgtgaaactgctgccaaaaagataccaataacactaacaataccgatcttgaaaaatcatcagcagtgcggattctgacatcgagggatggcattacctccgtgtttctccctttcgagccggcgggccacagacgtcggaagaaactcccgtatttgcagctggaactgcagcccacggcgccccggttttcctccccgccctgtccctctctggtcaaacaacatactaaagaggcgaggcaatgactgttggccagttctcaccggggaaaaacccactgttaggatggcatgaacatttccttagatcgtggtcagctccgaggaatgtggcgtccaggctctttgagagccatgggctgcacccggccgtaggctagtgtaactcgcatcccattgcagtgccgtttcttgactgtgttgctgtctcttagattaaccgtgctgaggctccacatagctcctggacctgtgtctagtacatactgaagcgatggtcagagtgtgtagagtgaagttgctgtgcccacattgtttgaactcgcgtaccccgtagatacattgtgcaacgttcttctgttattcccttgaggtggtaacttcgtatgttcagtttatgcgatgattgttgtaaatgcaatgccgtagtttggattaataagtggatggtttttgtttctaaaaagaaaaaaaaaatcagtgttcacccttatagagacatagtcaagttcatgttgataataatcaaaggaattactctcttcttgttaaattagctaaatcatgtaaccgcagataggaagggctcgcctggggaaactctggtttccgatgggacaggaaagtcatacgggcaacagtatgcggaaagtacgttttttaagtaaaaaacaaaggcaaactttgtactatccagttatctaaggaacaataaaaacattaggagataaaaaaaaaa

SEQ ID NO: 60843 - DNA, 3994 bp, Homo sapiens
tcactccaacggctgccgggactgatgcacaacttacagacatttttgttggatggaaactttctccaatcccttcctgctgagttggagaacatgaagcagcttagttatctgggtctttctttcaatgaatttactgacattcccgaagtattggagaaattgactgctgtggataaactttgtatgtctggaaactgtgtggagacccttaggctacaggctttaagaaaaatgcctcacattaaacatgtggatctaaggttgaacgtaattaggaagctgatagcagatgaagtggactttctacagcatgttactcagcttgacctacgagacaataagcttggtgatctagatgctatgattttcaacaacattgaagttttacactgtgaaaggaatcaactggtcacattagacatctgtggctatttcctaaaagcgctctatgcctcttctaatgaacttgttcaacttgatgtttacccagttccaaattatctgtcctacatggatgtttcaaggaaccgcttaggaaaatgtgcctgagtgggtatgtgaaagccgaaagctagaagttttggatattggccataatcaaatatgtgaacttcctgcccgcttattttgtaatagcagtctccggaaactactggcaggacacaaccagttggcaaggctgcctgaaaggctagaaagaacctcggtggaggtcttggatgtgcaacacaaccagctccttgagctcccacctaaccttctgatgaaggctgacagcctgagattcctgaacgcctctgcgaacaaactggaaagccttcctccagccacgctttccgaagagacaaacagtatcttacaagagttgtatttgacaaataacagcctcacagacaaatgtgtgcccttgttaacgggacacccccatttgaagatccttcacatggcctataaccgacttcagagttttccagcaagtaaaatggcgaaactggaggaacttgaagaaattgatctcagtgggaataagctgaaagccatcccaacaacgatcatgaattgcaggcgcatgcacaccgtgattgctcactccaactgcatcgaggtctttcccgaagttatgcagctcccagagatcaagtgtgtggacctgagctgtaatgagctaagtgaagtcacattaccagaaaacctgcctcccaaactgcaggagctagacctgactggaaacccgcgccttgtccttgatcacaaaaccctggaactactgaataatatccgctgtttcaagattgatcagccttctacaggagacgcttccggagccccagctgtatggagtcatggttacactgaagcttcgggggtaaaaaacaagttgtgtgtcgcagccctgtcggtgaataacttctgtgacaaccgcgaagccctgtatggtgtgtttgacggagaccggaatgtggaggtgccctaccttctccagtgcactatgagtgacattttggctgaagagctgcaaaaaaaaacaaaaaacgaagaagaatacatggtcaatacattcattgtcatgcaaaggaaacttggaactgctgggcagaagcttggtggtgccgctgtcctttgtcatatcaagcatgaccctgtggatccaggaggatccttcaccttgacctctgctaatgtgggcaagtgccaaacagttctctgtcgaaatggaaagccgctgcctctgtccagatcttacatcatgagctgtgaagaagagctgaagaggattaaacagcacaaggccattatcactgaggatggcaaggtgaacggagtgactgagtccacgcgcatcctgggctacaccttcctccatcccagtgtggtgcctcgcccccacgtgcagtccgtgctcctgactccccaggatgagttcttcatcctaggcagtaaggggttgtgggacagcctgtccgtcgaggaggccgtggaagccgtgcgcaacgtgcccgatgccctggctgctgccaagaagctgtgtaccctggcccagagctacggctgccacgacagcatcagcgctgtggtggtgcagctcagtgtcactgaggacagcttctgctgctgcgagctcagcgccggtggggctgtgccaccacccagtcctggcatctttcctccctcagtgaacatggtgatcaaggatcggccctcagatgggctgggcgtgccgtcctccagcagcggcatggcttccgagattagcagtgagctctccacttctgagatgagcagcgaggtggggtcaacagcctccgatgagcccccgcccggagccctaagcgagaacagccctgcctaccccagtgagcagcgctgcatgctccaccccatctgtctgtccaactccttccagcgccagctatccagcgccacgttctctagcgccttctccgacaacggccttgacagtgacgatgaggagcccatcgagggcgtcttcaccaacggcagccgggtggaggtggaggtggacatccactgcagccgggccaaggagaaggagaaacagcagcacctgcttcaggtgccagcagaggccagtgatgagggcattgtcatcagcgccaacgaggatgagccaggtctgcccaggaaggcagacttctctgccgttgggaccattgggcgccggagggccaatggctctgttgcgccccaggaaaggagccacaatgtgatagaggtggctacagacgcacctcttcgaaagcctggaggctattttgctgccccggctcagccggatcctgatgatcagtttatcatacccccggagctggaagaggaggtcaaagaaatcatgaagcatcaccaggagcaacagcagcagcagcagccgccaccaccccctcagctccagccgcagctgccgcggcactaccagctggaccagctgccagattattacgacacgccactatgacccagccgagctgtttaacaaataaactaaccacaaaagactgagttgcaagagtctcccaggctcacattaaaccaggggttttactccacatccttcccccagacactgttcccaacctgtcatcgcagctaatctgtaggttctctttctttgggttatttttttaagtaatcaccactttcttctagtgatgctttaccaatatgatttacatttgttaacttctccccctaacatatcagatatgtaaagacaaagaacaaaaggtttaatatattacagagaaacagttaatgataatgtaatattttttaaaatggctttttgttgtttgtttggaaggcagggcaggctgccgttgctaaatgatttaataatattgtaattctgtatttctttggggggaaaaggcttttgttttgttttgttttgttttgttttgtttttgtcttgaaaataatagacatttgtagaatatggagactaactcctaggagttgctttactctgtcaggtgacttaagtcactgggattcactaattttctctgagagaacagctgattgagaatttccattgtaaatagctcagtgttgtatagtgaggcttacgatgttttgtagtcttggcgtaaggacacagcccaagtaactgacgtttcccctccccctcccctctgaggagcctgcctgcctcacaactcaccctcacttcactgaatgaggaggctgagcagctgcagtgtttctgtccggaggaaatggatcttaggccactggacaagaacctgcacccaagggccctgaacccattttcctcccctgtcccagccttcccactttgacagacacttttaactgtgttccttactgctgccacaatcagcatggttgtatagtgccccattaggccatttacatacccagagttatactcaagcagaatgcacaaatggacatgtcataatttttgttacaataaatatgaaatttacaagtaaaaaaaaaaaaaagg

SEQ ID NO: 60844 - DNA, 4119 bp, Homo sapiens
ttttttttttttgtgggaaaatattttattgctgccatccccatggtgagccgctgggggtgaggggtgaagctgggtggtggatcacagcatcttctggaatagggcgatggcctcatccaccttcctgagctctgcttctgtctgttggagcttggcttcatctgcctcctggacttcgagcggcaccttgacaggatagcccgaggcagtaacgggtttccagcagacgctgggcccttccgctgggcctcaacttcgcttgggcttgcagcttgcccaagctcccgtgcagggtccaacagccccttgaagctgcaggtgggatggagcagcgatcagaagccagagccacagcgcaaccctgggggggcggggagcccccagggctcagcaacagccaccacaacctgcgcttggccaggtgccttgcacgtagcccgacaccgccgatgccagggcgcccgtggcctcgatccgccacttccaggaaacagtcaggcccgggatccgggtgaaggttgtagtcggcccgcaggaggccgcacggctcgcgtgatgcttagcgccagctcaagggcggcttctgcctcggggtccttccaggagcactctgagggctccgggtagggggtaacacagaggctagggggagcttgcggcatcctccggggcagcctctggaacagctcctccgtcacgaagggcatgaagggtgagagcagccgcaggccaacgtccaggcaagtgtacagggtctggcgggcacactcagctgccacctggtccaccccattcagtacaggtttcaggcactccaagtagacatcacagagctcatagagccagaagctgtactgggcagtggtgacggccgggaagtcgtaggcctggaagccttgattgctgagcctcacagcctctgtcaggcggctgcggatccagcggtccaccaggctctcatggcctccgggctgggaggtgggtgagggcacaaaacccttcccaaggccacgaagggcaaacttggtggcattccagagcttgttgcagaagtggcggtaacccagtatccggttcacatccaggttgatgtcacgaccctgggacatgtaggcacataatccaaaccggagagcatcggtgccacattcaggaatccccgctgggaagtcagctttctgcccttctttggccttctccacctcgctgggatccaggttgctgttcagcagctggttgtggaggccctgcagggagattccatagatgacgtccaggggatcgatgacattgcctagagacttgctcatcttccggccgtgagcatctcgcacgatggcatggaggtagacctctctaaagggcagcctgcccgtgagcttcaggcccagcatgaccatccgggccacccagaagaagaggatgtcatgaccggtctccagcagtgtcccggggtagaacacactcaggtcttctgactggttgggccagcccaaaatggataaggggaagaggccagaggagaaccaggtatccaatacatcctcatcttgctggagactgatcttgtcaggggacactccgaactccttggctgccttctcccgggcctccgcctcattgcgtccactcacccagtaccgcccatcagggtcctccccagggggcaccgctgggtcactgacagtgacaaagtaggctgggatgccgatgggccccaccacagcttgcctgggaacatgcaccacttcccggatgttgtccatccaggcatgccatgtgcgctgatggcgctcaggcaggatgcggaggtcaccccgagtcacagcggcgctggcagcctgggccatctccccgcagcgaacgtaccactgcggccgcagcagaggctctaccacgtccttcgaccggttgcaaagtggcaccaccatggggttgtcctcaatgccacggaacagtccccgctccttcagcgccaccagcaccgctttcctggcctcaaacctgggcaggcccaggaaaggcggaggcacattgatgagggccccccgggagtccatgatgctgatggcctccagcccgtgccgctgcccaacttcatagtcattttggtcatgtgcgggggtgatcttcacagcacctgtgccaaagtccatgtccacaaattcatcgaagacaatgggaaggctccgagacaggaatgggtggatcacgttcttccccttcaggtgctggtatctggtatctttggggtgcacagctacagccacatctcccagcattgtctcgatccgagttgttgccaccaccacctcctcgtcgctatctgagccttggaccttataggcaaaggacacgaggaccccgaactccaccttctccttgtagccaggcacggagagcagggtgcgacctgtcagctccttcttatccacctcaatgtcagagatggcggagttgagggtgcaggaccagttaacaaggcgggtactgcgatagatgatgccttcctcgtgaagccggacaaaggcctctgtcacagctgctgagagtttagggtccatggtgaaacaggctcgatcccagtccaaggagctgccaagcttcttcaactggtggtaaatccggtcacctttctcctccttccacttccagacttcctgtagaaaggcctcgcggcccagctggtgccggctcagtccctgctcacgccatagcttcttctccaccaccacctgggtggcaatacctgcatggtcacagccagggttccacagggtggtctccccacgcatgcggtgccatcgagtcagggagtcctggatggcgttggtgagtgcatggcccaggtgcagggagcctgtcacattggggggtgggatgcacatcatgaagacacctcggggatttgctgctgacacattaggacgcccatactctggcttgaagaagccctgctgctcccaccaagggtaccaggcagcctccacataccgagggctgtaggagtcgggcatggggccactgacatctttcttttccccgggtggggttgggaggtcataggtaatgaccccaggatcccgtttctccctcttctctggttttggtttcttctcccctggaggtggctgctgctgttggatcttctgcttctgttggaatttctctagcttctcccgtttctttgcctctttcttgagctgagcagctgtctttgggagggcaggagcctcggggcctggctgatgagagagaggcctggctcctgagtatagaaccacttctcctagcacggctcggaattctggctgccggacacacgtgacaaaccagcgagtcacattattccagatccggcgggcaggtgggtctaggacgtatcggaaaggcagcagcaaggctgtgacagccgccaggtcagccagagtgggggcctccccggccaagtaggtgtgcagccgaagccactcctccaaggggctcagggccctgcccagggcccccagcacagcctgggggtcctgggccgagcttcggagtcccagggccggcagcgttgctccacaggcagctggtattaactccgtgtcggcgtaactgacccactgttggacaaggacagccgcccggctgccccctgggccccccaggcctgctggccacagcagctgggccacagccgtggccccccacacccagagcccaccgggcccctgctccagggccggcaggcggggtgggggaaagctagtcctgctagtcgggggtggctggagacagatgcgggggtgggctcctccccatccgggaccctccccagcctccccatagcgagcggctatgagggctcggaggctggggaaggcatctgggtgaggggagacgtagagggtggacatagttatgagaaggtccgaacgaagtggaaaaactggagggagatggtcagactgggccgggaatccacctcacagccaggcgccggccgcggctggaccggccgagcggcccgggcggaggagtcgagcgggcagagacggtgggcggctctccaggtgaccctagttccctaagatcgccgccccggcagccggcgcccacgtgttcccccct

SEQ ID NO: 60845 - DNA, 1880 bp, Homo sapiens
ttttttttttttaacagttaaacttttatatttacaatattctcttcatcttttgccaggtttaaaaatgtgtacagagccgcaaagggttggggtagggataagggattgtcgggattgttttggggagaggagctgggcattggagtccgtggctgaatcatggggtcccccagcccccctcccatgccccaattctgagggcatctgtctacagggttcagggcccaggtctctagcatttggagggcatggctgtttggagaggagctagaccaggcaggggaaaggatcagaaaataactaattttccatggatggaggtaggaagagaagggacagtcaagaggcaaagttctgggactcaagaccagggattctggatttgggtgtcagtggaagacagcaccccagcccctattcaagtttggcactaacaccccacaaaatgccagcagatgaggactctcccctcgtccactgtgtcccttaagcccttccagacatcattcttttcccaaatgcccaagcccaaggccctccggggagtcacctcacacatttcaaattattcctgctggtgtctgcccaagccctgtccccactgccccctccatctgttccccagcaccgctgacctcattctcccaacctgtccggtgagacctttctccccactgcctccctccaccattcaaggctcctttctttcagacaaggagggggcgtgggtcagaggagggtggtcagctgaggagaaggctggtctgacactgagatggggacagcttcaaagagggggacggagatgaaggggaacggagaactgaggcagggtgggggagacatggtgaggagaaggggcacaggcgggagccccctcacctgccacatccctcgccctgtatcctgcttgcccttagtttcccctgccctgcctgggaccgggaaattcttggcacattttgggagtctctccgctcaaatccacctacccagtttggcacggatgagcaatgctctgaggcctggggaaaaggctgtcctcggaccacaatgagggctttggtcaaacatgcgtggcctctgcggggggcacgttgccacaccccctccccccaactcgggagcaagggccgggcctccctcggggtttgttcaccctcctcagctcctgccaactagaagtctgtgctcacctgccatgtgaggaggaactgggtgctgggcctgaggcctgggggaggcagggaagtgctgggaagagaggggccgtctgcctggggaaacacacatccacatgcaagaacctgtttccactcagagaaatgcgtcctggccacgggaaaataagcttccaggcagcatcaggatgcgtggactcctccctcccccagcaggaaatctgtgtctgtcctctctggaaggtgagggcctccccggcagaacgtgcttcatctgacttgtgccaaggggggcgtcggggggaacatgcttcgccggggtaggggcaagggaggcaggggcgagggggctgtgatttcctcgctgcttcccaggctccatcctctgtggtcttggtggccaagggtccctgtatgtgaacacaccacttccagggtctccagggggagggaaaggggaggaggtggaaaaagggatgggggaacaggattttggggtacaaatccccacagaaattctttgagggggccaacatgtgtccagggtggcaaaaaaaaacctcaccctgcacatgggaaaacacaccccgttgtgagaaagcacacctccacgcgggaaaataccacattccacacaccgaagactggtgtcccaatgggggggagaaaacgccccccagttgttcaaaggccccc

SEQ ID NO: 60846 - DNA, 2829 bp, Homo sapiens
  misc_feature (1)...(2829): n = a,t,c or g
ttttgagtttaaccccaaaatgtatttgtccttagaaaagaggtccacatactcactgtgtctactctacagaatttgtccattttattacaccacgtgtcaattcaagtttatctggtcactgcaaaaactcgtggctaatatgtgtaatacaacacaggaggaggtattgctcagttcaactactcttatttacttaaaaaaaatacagaaatgtttttgtccacttgaactgtagtccagacataaaagttacatgaaagttttagaaaatggagttattttatttggttgccacagtaccccttgaagccagttacttaaaatgctgaagttgtacatatttccattggtcaggagcagcattggtgaagcttaaacttctctctcgaaagtaatctttttttacttttttgtttgtttgtttgttttgttttgtttttagcacaactgcagtctttcgctttttttttttttgttcatttttggagtaggtttccttggtggtttttaggacatatttgttggtaaacctataacagttgcttttactttcagtgatgtacttttttcttttcctgcttcccagagatttatcagaggaggataaagctcacctaatgcaaaggttggtttctgtaagtaattcctcacatagctgtgtccaccatcacagttcatttctggagagaggcagctgataagacatatcacaccaataatccccagaaggcctccaagacaggccataagtgttgtggtattattcttttcatactctttttgatcagggtgcaaacctttggtggtgacatttacacatttttttctgtttttctgatagatggtgggaatatcaatacaaattttatactcagttgatggattcagatgagtaagattatataccttgacatcagatggtattcgagcactttgcgcagcatgagaattttcagtcttgacaaaggctgtccatttaacactagatttgagaattttagaacttgctttccaggacaccaaaactgaattggcctgaatatctcttattttaatattcaaagagccattgttatcttgtggaaaagatccatccactttgatcataacagacttcaagtcagcgccaactaggttagttgctatacaagtatataaacccccttctttgggagttacgccatttatatctagtgttccctcagaatggacatagaacttgtctgtcaggggtattaggcaagagtttttgaccagaaggtgttatccagtagatttcaggctgtggttcatgcagtagctctacagtgaaaggaaacatagctcccagcttctacatttagattagaaggaaagctctcaggagctataagagggagacaaatttccatcatgtccctgaaatgcacttgccgaacattctgaccttggaattcaggtgggtccacgcaaaacagtgaatctggctccatgaatcgaatgttggttttgttcatgttcatccaacggatgacacagtcacacctgatggggttactgtgtatgctgatttccttgaggtttggcagagactcaatggtaccatggtacagggcactgagagcattgctgttcagcatgagtgattccagcttggggagtctgaaaaatgcattggggtgaatgtaagacaatctagggttgttagtagcttctatttttcttaaatctggcaggttatccacagcaagactatcgatggaaatcagctcaggcatattatttatccccaactcttttaagtgtagcatattgctaaaatcaccccttcgtattctattaataggatttttatttagatccaaaaatttgagatttacaactttttgaagagcaacatggggtactttaataagcctgttatcgtaaaaagagatgctttctaagttttccagtccaaccaaggcgttatctggtatttctgtgaggtttataccagctataaccaggctgcgaagattgataagaggcttaaagttcatgtctttgattctgataattggattttccccaatcatcagaatctctagatttggaagagcatcaaaccacttactgttgatcatctgcaatctatttgaattgagatgaagtcgaagaagattatgtaggccaataaaggctccaggtgaaattgtagaaagcaagttgtgattaatatagagttcttgtaagttgctcagttcggacagacatttttcaggcagttcagtaagtttgttttcctctaggtacacagaaaggagctgaggcatcttttttccattaatattggtgactgaagataaattgttttgagataaatccaggccagtaaggtttactggaaagtctgtggagtattcaatttttgcaatattgttagtctgtaggagaagaatctgtgtgttagctggcaatctggctgggaaagttaaaagacctaaatcattacaatccactgtagatgcttccatataaatggatctgggtgtaaaccaaggcctgatttcacacgtacataaccgtggacaatccacttttttatctacagcttgtactagtgtagtgatagctaggccaagtagcacatgaattcggagtggcatgtccttcatcttagctttcttcttcagaaatgtaatgggcccttaaggattccacagtcagtgctagtaagttcaataggagctgattgataaggaagatgcttgcatttgtcaaatgatgaatgccatagaaccacaaagtttttcttnactgaaataagtgccagtgccacanttgcattgtccaaaaatgtcatgc

SEQ ID NO: 60847 - DNA, 3233 bp, Homo sapiens
tttgacaacgctagtcgatgaccactccagcttggcacgaggggcaaccagggcctggtggcccaccctgccgcctctgtggagaggcctcccgaggccgggccccatcccgagatgaaggggccctcttattgggctcacgtcggccccgccgggatgctgctgagcgatgtgctgcagccctgatggccagccggcgtaagagtgaagccaagcagatgcccagagctgcacctgccactcgggtaacacgccggagcacacaggagagcctgacagcaggcggaacagaccttaagagggagctgcaccccccagccacctcccatgaggctcctggcaccaagcggtcaccttctgctccagcagccacctcctctgcctcttcttctacatcctcatacaaacgggcaccagctagctcagccccacagcctaagcccctaaagcgtttcaagcgagctgcagggaagaagggtgctcgcacccgtcaggggcctggtgcagagtctgaagacctgtatgacttcgtttttattgtggctggcgagaaggaggatggcgaagagatggagattggggaagtggcttgtggagctttggatggatcacatcccagctgcctggggcttccagcactggaagcttcacaaagattccgcagcatctccaccttggagctattcacagttccactctccacagaggcagccctgacactatgccacctgctgagctcctgggtgtcactggagagcctcacactctcctacaatggcctgggctctaacatcttccgcctgctagacagcctgcgggccctgtcaggccaggctggatgtcgcctccgtgccctgcatctcagtgacctgttctcaccactgcccatcctggagctgacacgtgctatcgtgcgagcactgcccctgctacgggtcctctctattcgtgttgaccacccaagccagcgggacaaccctggtgtgccagggaatgcagggccccctagccacataataggcgatgaggagataccagaaaactgcctggagcagttggagatgggatttccacggggagcccagccagccccactgctgtgctccgttctgaaggcctcgggttctctgcagcagctgtccctggatagtgccacctttgcctctccccaggattttgggcttgttttgcaaacactcaaagagtacaacctagccctgaaaagactgagcttccatgacatgaatctcgctgactgtcagagcgaggtgctctttttgctacagaatctgactctgcaagagattaccttctccttctgccgtctgtttgagaagcgcccagcccaatttctgcctgagatggttgctgctatgaagggcaactccacactgaagggcctccggctgccagggaaccgcctggggaatgctggcctgctggccttggcagatgttttctcagaggattcatcctcctctctctgtcagctggacatcagttccaactgcatcaagccagatgggcttctggagttcgccaagcggctggagcgctggggccgtggagcctttggtcacctgcgcctcttccaaaactggctggaccaggatgcagtcacagccagggaagccatccggcggctccgggctacctgccatgtggttagcgactcatgggactcatcccaggccttcgcagattatgttagcaccatgtgatggggcccgtacctcacagtctcatgctcggtaccatcagcttgcaggggctgaagcatgggctgcccagaaccccaaccaccagttctatctttctctttctgtcaccttttttctcttttttccttcttcccttgcactgaggtcctggaggccttgatgaggcccagcaaacaggcattctcacagctgggtttatagtctttgggccccttactcagtatcctggggaaccctgggcccagggaggtttacagtggtcatcataattggttgaaagagatcccctccccctggccctggggttcctgccttccctcctcaagcagggcacccagggctttaggagaagtataggggggcttctttccctgctggggctttaccacatggctcttcagggcctcaaaacccttttcatacctttattcttttttttaaccaaaaaagtttttcttataaaataaattttgggcaaacatcatgcagcccttcttgatgattttttcccaaaaaacaaaattcaacagggccctgtggagcaaggagccccttttccctatctccttcctctaagagctacacccagaccagctggttatcagcggaggccccgctgctcctcatgagaacgctggtggaagacgaaggtgatggcagtggaggcagcatcccaggcagcctggagtacctcatcccggagcccccacttatcagtgcaggggttccaccctgccaggtctgaagtgcagtcagaaccatcagggggtggccggatctgacggctgttgacacaacgtcggcagtgcaacctgtcatgtgtgtcactgaggctagcttcatccaggataaacagctccttcaactcgcccagagagaagtggcgctctacatcctgctcctcatccaccacacagctgctcagtgccttcttgtggctctgacgctggaagatcttctcctcaatggtccctgcagacagcaggcggtagatatagcaagtcttcctttgaccatctcgccagacccgggccatggcttgttcatcattggctgggttccagtcagggtcaaacatgaccagccggttagccccaatgagattgaggccacagcccccagctttgctgctcagcatgaagacaaagtcagggctcgatggactattgaagcgttctacaaccttggctcgcttcttaatggacatcgtgccatccaggcggacgtataagtaccttcgggcacggcacagcttctcaaagagatccaaagtctgggtgtaattcgacaccagcactactttgtcactgctacggcttcgggtcaccgccagaatataatccaggaccagcatcttacctgacagctggggctccagggccttagagctgtaaccaggagggaagaggtccaaggcacccacaaagccatcctcctcttccacacacttatcatagattagagctggatgattacaaagcttctttagcgaggtgatggaagaaagggaag

SEQ ID NO: 60848 - DNA, 5254 bp, Homo sapiens
ttttttttttttcacaatgtcagatcatttatttcagagcagttacacccagcagaaggggaacaggcttaaacgcgggcatataagttttcccgcacgcaagccctgcatggcgttgggctgggaagccggggcgttgcaattctgcaaaacgccacgctctactaggcccccttactcctaattaattgcctgctcaccagactgtgagaaaataattgccactataaattttccctccttctgcataaaatattcgggggaacccagccctaaaaaaacagaccttcatgaaagaaagggcagccaagcgtggatgctgcgccccccacaacccccactgcagaggacacagagaggccaggagccccctttctgggttccccctgggttccaaatgaaacagaaaggctcaaagagctcccaggaatggtcacagctgaaaaaaaagtcgagtgagtggctacatgcggcagccgcttgtgttcacctgccgtccacccaggacagtccccggcagcagcttgtgttcacctgccctccacccaggacagtccccggcagcagcttgtgttcacctgccctccacccaggacagtccccgggctggctccaggctgcagggggtcagcagagggagcctcctgccccatatccttggcaaactcacttctccttctgggaccacacaagagacatgggagaatgttcctaattaggcaagagcacagaacccctaatcccagtctctgcttggcatgagtacccaggcaggcaaggaagatggagacaggtggatttcagctcctggaaggagccccggctcagagtggctgctgagtacccagccttgccctcctctgacgtgggaacgggtgtggctgtgctgccacctggtggcctcttccctcactgcagggtgaaatgatgtggatgccagcccttaggtgtgggctccagctggggtcacagagcatcccagccctcagcactgcccgacatagagggaacccctaccactggccctatgtggcctgggggtgagagaccccccccccaaaagcgagggacttcaggccactgacaccgtggaaggaccacaacagaccccaccccagaccagccgcaggatgacccaaggccgtggggtccagacaccacaccaggaagcctcccaggcagcccaggtgtagcagaggctgtgcagctgcagcggcctgggcagagaagaaagagcaggaaggacagaggaaggcgcctgtggtgaagaccctgcctccctcacgcccccacgcacctgtgctgactgctgctcaaggggtcagcctggaggtcttcccggtgcttggacgaggctgagaagggaggacgtgaaggaacagagtagctggaaaagcccccgcgggtcctgcagctcctgcactcaggctggggctgggctggcgcggggggcaggtgctgcttcctgcctggactgacctgctaccccagcctgaagggcggcttgtccagagcccacggcctctcgctgggcagaggcagggccacagcgcagactgcctcacagccacttccctgcatgcccacagcccggaagagacgccgcagagccaggggctgctgaaaacgctccggagatgacctcacactcagcagcacagtaaattgccaacgccaggaaacacggagcagctggggctggcccacgtggaggcacgaagccagcgccggctggcccagaatgcccactcctcagggaaaagggccttccacactgggaggacggttctccagggcatcctctcccgccatcccgcaggcagccccaccccaggagctgctgtagctcgtcctcatgctcagaaatgtctcggcgcctgctccaaagcctacctgccacaatctaagaccctttctaatagtttcatctgcaggaaagaaaatcatcattctcggcatcagcatcttgcagcctattaggaaatatcctttatggaatgttctgttctcaacttctcccctcctttcattttcacctgggaaccaggtaccgtggggagggacaaggcagaaacagaaagcccgccactcgcctcgcagtgaccaacgctgcgatcccactgcttggtttcctgtttccatcgccccccaccagaaagccacagcactcagcccggggtctcccaccccagccccgggaccgggacctcgctgccactgtggggcacttaggcagggtccagcgcaggccaggggcagacagccgggaagaggccttcagcccgaggccagggagaccacccggccttagcatccgctcatgcaggggctgaataaagcagaactgccctgccccactcggcctgaggtacccggaacccttccttggggacaggctccaccagaaattccatgcgacgatcctggccgggcccggcggcttccaccagcaggtccactatccggtactgggtggcaaaagccaaccccaggaacatgggcatctctggcctcggcagctccctgcccggagagtcatcactcatccctccccagcagtggattcggaagcaacggacttgtgagaggaggaaggaccagtgcagggtgcagctgagctggagcagagcagggggcccctcccgctcagaggcggatggctgccagcggatgtgagagatggtgacggcctgcacctggggcagaggggccagcaggctggcagcgtccaccacctggatctctccaagccgacaggtgaagctctcctcctcccgactacccggcggccgtgagaagcaaacgaggaggtctagcagcaggcacccacgcaggctcacctcgtagcagtgctggacccagcccccactcagctgccggccgcagcggcccacccatctggccagcttggtggggggcacccggaggggtcggaggctgtgtcttgagcttgtttctgcgttcaacactgagatgccaccgatgtggcagctgccggcatcccctgtggtcagctccaaagcaactgtgacgtccgtgggcccctcaagcttatacaccatggacaggtaaatcttgggtggcactggggcctgcggggaaaataacctcacagccacatttccaacctccggtgggatcacaccccggacgagcagggagctgcctccgtgccaggcatcctccaggcagcagtgcgtcctcacccagccccggccatcccctcccagcctgtgttctccaaacaagggctggatctcctgggcgctcaggtggtaccagggccctaccgcctcttcctggccatagcagaccctccgtgcacccatgcccaggcagaaggacgtgacgaaaggcaaggagcagatgctatgtgtgggcagataacgctccagtcggccccagaacttgtcctggttctggaagaaatccttcttctccagacactcatacacccagccgggggcaaacaaagccacggagaagccatgctttcggatcagctccaacgactggaggctgctgggcatcacccccgtcgttccacaagcccgccagaagagggcgcgggagaggcggtcagcgctgctgcaagggcaggggggcaggggctgggccccaactggctgtggctgcgcggtcccattgtcctctggcacacctctcattcgattatcagaatcacgggcagtaaagaggctctttagttattggattaatttactcatttaaagctaaattaagggctgagaacatccctggggctctgggaacgggcaggactgatagaccagaggcaggcagagccctgcgcatcccacgccaggggcaccggcctggccccgctccttcctctgtgctggtgtgacctgccttgccagaaaatgctccctcgtcatgacacctaccgatccccaaaccctgggcacctcccccgtcctcgcccctgagccgcagtgagaggcgctgcaggcccctgtgcgtccccgcaggcttccctcacggggaagatcaaggaacgcagctgggacaggaggcccaggcccgccgaggaccggacagcgggggaacgacgcgcctctgtctggtaacacccacacaaaaatacattatctgattgtagaaatagccgggaaaggggtttcagtggggacatagcttggccggggcaggacacctgtttctcagtgccacgggatccccactctgggaagaacagctgctgtcattcctttgaggtgcagacgggaatggaaggtccatgaggaaatgaggtcccaggggaggcactgggccgctggcccttggacgaaagccaccacccaccttgtctgtgtcgaatcggcctccgaccacgttccctcgagcaaacacatccacgcccacgtacacatcagcccggcgctccccagcctgccccagcatccgctccaagtgctcctcccgccagttatagttagtgaagaagccgtcgcaggaatcaaagaagaccctgttgtgctggttgagttcgtcttgccatttgagctgcccactttgcaccacgctgtcataccagagcaccaggccccctgggacctgccggtgcagctgtgtggtgaggtaccgcaggaaaggaggcatgttccccacagcggccagactcagcgagttctcgatgttgatcagccagccatcaaaacgaaaaaacctgagtgatctggaccagccggtcagccactgcctggtacgagcgctcatccccggccaggaaggcttcacagagccttcccccttcattccactccgtgatgaaagtccccagcacgcagaccccatgcctgtgggcagtgttggtccagcccactgggggaatggtgacggtgtggtggctgaagtacacaaagacgtcgatgcactgccagtggtagaaagcatagggagtctgcaccaccgagccctgaatgaacctgtcatccaggtacccgcccatcatgtcatgacacaacaaagtccggggcctctggctgctcagagggggctggcgacacgccaggggctccagggccacattaaagccatcctccaagcggggcttccacgccaagagctcctccagcgaagacaagtaaaagctgattggtttggtggtgtccttgtcataatatctaactggcagggggtccggggaaaaactgaccacctctcgaaagactgtctcttcttcttcatctttgatgctccttcccggccgcccgggagctctcctgcctcc

SEQ ID NO: 60849 - DNA, 4775 bp, Homo sapiens
aaaggcaaatctaatggtacctggctgttcttaagaatgcatagagaggcttagcaggctgggattgattgaagcttatttcctgcttgaaactgacagtgtttatggccccaacttaaaactgcctattacttcaggccaaagggttccatggcgaaattgaggatttgcagcagtggctgactgacacggagcgtcatctgttggcatctaaaccgctgggaggtttaccggaaacagccaaggagcagcttaatgtccatatggaagtctgtgctgcctttgaagctaaagaagaaacatataagagtctgatgcagaaaggccagcagatgcttgcaagatgcccaaaatctgcagagacaaatattgaccaagacataaataacttgaaagaaaaatgggaatcggtggaaaccaaactcaatgaaagggaaaacttaaactggaagaggctctcaacttggccattggagttccacaattctcttccaagacttcatcaactggcttactcaggctgaacagaccctaaatgtagcttctcggccaagtctcatcttggacacagtcttatttcaaattgacgaacacaaggtttttgccaatgaagtaaattctcatcgtgagcagataatagagctggacaaaactggaacccacctaaaatattttagtcagaaacaagatgttgttctaatcaagaatctacttatcagtgtacaaagtcgatgggaaaaagtggttcaacggttggtagagagaggaagatctttggatgatgcaaggaagagagccaagcagttccatgaagcttggagtaaacttatggagtggctagaagagtcagaaaagtctttggattctgaactggaaatcgcaaatgatccagacaaaataaaaacacaacttgcacaacataaggagtttcagaaatcactcggagccaagcattctgtctacgacaccaccaacaggactggacgttctctgaaggagaaaacctccctggctgatgacaacctgaaactggatgacatgctgagtgaactcagagacaaatgggataccatatgtggaaaatctgtggaaagacaaaacaaattggaggaagcccctgttattttctggacaattcacagatgccctacaggctctcattgattggttatatagagttgaaccccagctggcagaagaccagcctgttcatggagacattgatttggtgatgaatctgatcgataatcacaaggccttccaaaaagagttggggaagaggaccagcagtgtgcaggccctgaagcgctcagcccgagaactcatagaaggcagtcgggatgactcctcctgggtcaaggtccagatgcaggaattaagcacacgctgggagaccgtgtgtgcactttctatatcaaagcaaacacggttagaagcagccctgcgtcaggcagaggaattccactcggtggtacatgccctcttggagtggctggctgaggcggagcaaaccctgcgtttccatggtgtcctcccagatgatgaggatgctctccggactctcattgatcagcataaagaattcatgaagaaactggaagaaaagagagctgaactaaataaagccaccactatgggcgacaccgttttggctatctgccaccccgactccatcactaccattaagcactggataacaatcatccgggcgaggtttgaggaggtgctggcctgggcaaagcaacatcagcagagattagcaagtgctctggctgggcttattgccaaacaggaattgttggaagctttgctggcttggttgcaatgggctgaaactacacttactgataaggataaagaagtcatcccccaggagatcgaagaggtgaaagcactcattgcagaacaccagaccttcatggaggaaatgaccagaaaacagcctgatgttgataaagtaacgaagacctataagaggagagctgctgatccttcctcattacaatcccatattccagtcttggataagggacgagcaggaagaaaacgctttccagcatcaagcttgtatccctctgggtcacagacacaaattgaaaccaaaaatcctagggtaaacttactggtgagcaaatggcagcaagtctggctcctggcgttggaaagaaggaggaaactcaatgatgccttggacagactagaggagctgagggaatttgctaactttgattttgatatctggcgcaaaaaatacatgcgatggatgaatcacaagaaatctcgagtgatggacttcttcaggagaattgataaagaccaggatgggaaaataacgcggcaggaatttattgatggaattctttcctcaaagtttccaaccagtcgcttggagatgagcgcagttgcagacatctttgacagagatggcgatggatatattgactactatgaatttgtagcagcccttcacccaaataaagatgcatataaacctatcacagatgccgacaaaatcgaagatgaggtgacaaggcaggtagctaagtgtaaatgtgcaaagcgatttcaagttgagcagattggtgataataaatacaggttcttcctgggaaatcagtttggagactcccagcaactgcgactggtccggatcctgcggagtactgtgatggttcgtgttggaggtggatggatggcacttgatgagttcttagtgaaaaatgatccttgcagggccaaaggaaggacaaacatggaactgcgtgagaagttcattttagcagatggtgccagccagggtatggctgctttccgaccccgaggccgaagatcccggccatcatcacgaggcgcttcacccaacagatccacttctgtgtccagtcaggctgcgcaggcggcctccccacaggtccctgccaccaccacacccaagattctccatcctttaacacgcaattatggtaaaccatggttgacaaacagcaaaatgtcaactccttgtaaagcagcagagtgctcagactttcccgtgccatctgcagagggaacgccaatacaaggaagcaagcttcgacttccaggatatttatcagggaaaggcttccactctggggaggacagtggcttgataacaactgcagctgccagagtccgaacacagtttgctgattccaagaagactcccagccgaccaggaagtcgagctggaagcaaagctggcagcagggccagcagccgccgaggcagtgatgcatcagactttgacatttcagaaatccagtccgtgtgctcagatgtggaaactgtcccccagacacacagacctacaccccgagcaggttctcggccatccacagcgaagccttcaaaaatccccacgccccagaggaaatcacctgccagcaaattggacaagtcctcaaagagatagtgcaattggttctaccaaggcccttccttgagcatttattatttaagtttgaacgatgtaaaatatggtgtagaaattcttgtgaaatattgcaagaggcgagtttaaaattctgcagatggccttatttgtgtatttgtctttttattttatctgtataattttttttgtcagatattctggggttaaagtcacatcatatgtgaggaggaaaagtttaacatgaactaacatttctgcactgtaacgtgccgggcacacactaaactcagttactgtacctacaggtaagtctacatcctctctgacagccacagcactacatcaatccctgacgttagggatacctcatgacattttcctgtttttatggaaactctgagaagctgaatgatacatgcaggggatattttttgagatgatttaaatgtaaaccaaaagatggaagacaaaaagacaaacacacccacacgcagtctttgcagtatctgacagagaactcacaggaagttacttcaagcacttgccagtactatgatattcaagtaccttgcagcatttctctgccattgctttcaatgaggccagaggcatcctggatattagacctattatactgtaagaatataagtataaagtgcgttcatatacatgtgaggttttcttttgcttgagtggacagtagcacctgtatcattgaactcattttgtatcagagcaattttgcttgcagaaagctatgaaataaaacacgtcccttaactgcattgctatggaattaattttttttccccagggaaaactagtgtatttttttatgagcaatatcaatttggagtgaccaaaagatacttaaaaatgggtttattttgatttctcatctgaaataatcatgttctggatattagacctattatactgtaagaatataagtataaagtgcgttcatatacatgtgaggttttcttttgcttgagtggacagtagcacctgtatcattgaactcattttgtatcagagcaattttgcttgcagaaagctatgaaataaaacacgtcccttaactgcaaaaaaaaaaaaaggggggggcctttaaaaagaacccctggggggcccaaatttaacccgggagggaaaattaaaatttttccccttatggggggctttataataaccgcgtggggaattttggaaagaaaccttcttttggggggggggaaaaaagggaacaccccccccccaaaaattaaggcctcaagggaaaaaaaaaattttaaaggggtaaagggggaaaacaaacccacataccctggctgttaaaaatcaggcaagaccgaaccgc

SEQ ID NO: 60850 - DNA, 1969 bp, Homo sapiens
ttttttttttttccagaaaaggatatttttttttattcaagtaactgcaaataggaataccagagatgggagccccaggctggggaccaaatcatggctacgccctccccaaacagaacagggggaggaggtggcccctacaccctttatggtcgattcgggcccccttgctcactctgctgcagcatcctaggggcagggccccaccttccctgggactggggtagtcggtcacccagcctgccatgccccagcccctcttccccacaaagagtatcttgggggaggggatcgtgggcagaacaggaggcaatgaggatgaacatttggcgctggtagcagcagcaatgacggatgtcgaagaatggaacattgaacaaaaaacaacacaactgtccagaggtagtttgtgaacagaggaaaaatggaaccagaaccttggggggcagggaggagacaggagggggggttgtggagcgggcaggggtgacctccttcttattgggtgccccatcttgaggagggcggaatggctgagatggcggaagcaaagtatgggtatggggagcagcccccaccccacctcaagtggcggccacagggctcttgggcctcacctggacaataagtgactgcatctccatcaccacaatatgtactcagatcccaggcggagggcaagggggctggggcccacgtgaaagagggagtagggggctcacccctcctgccttcctgtaacccaaagggggcttgtccaacctagttacgggaactagggaagttggggaaggatgaaaagtgagccccacgtggtgacaaagacagtttggctgggggaatccctgggggccagcacccccctccattggccacacctgctgctgccagggcagtggagtagggcgtgccaggatgagatggggcttgggccccttttaaggccagggggaaccctcccaggccccactatgggaagccagagggaacagtgaaggaggcagagagggcgcccccaaaccaaaagcccagagagcaatgtccccaccacccagggaagtgggaacgcagcaggtgcagggtgcggctaagtgggatgttagccttgtccaggagggcatgtgtgtatgcgtgggtgggcggggggagctgggaactgaggccaggggaaaactgctccccactcaggcccatgggagcccctgcagcggcctggtgtgctgtgtagtgtggtggtgagggcacaggtggaagatgggggtgtcggccagaggcggtggtgatggtgggcctggggaaggggcgggggcggtgggagccggagcaaagcctgtccagtcccagaaagaaagctgctcctccagtgaggaagcaggcggcacgcatggcgtcactgctcctccttccgagaactcctgcgaaatgccctcctcttcctccttctccagttttttttgggtctgccccttggtttccttcctggagttgtggtggttttccgggtcttggcagcacccttgtttttgcttccctttggtcggccccgaggtctcttaggtgttggcacttcgctgggctccttctgactccctaccagcgctgtcccgggactcaccgcgaggctgcttgcgcggcctgccccggccccgcttctcagtgccgtccttttcctgcttggaggccaagggctgggctggacttcgagctcgactcactcatcttcccttctctaaggagcaggtggaagagtgatggctgggatgcgcgagctcggccgccggcctgcggtgcgcgctccgggttgccgggagcggcggtgatgggcgctgaggaccggcctggctccgccgcggccgccgctggtagcaaatgcggatgccttcttggagcccggccagcgccagaaatagccccggctcggagtcccaattagaggagcgcagcaccggctcaggggagcttaaaaagc

SEQ ID NO: 60851 - DNA, 2113 bp, Homo sapiens
cccaaaacaacagcagatgatatcttccaagtgtctgctcgggacacggcttcagccctctgtggtcccctctccccggggggctttgggattcttgtcaagctccttcaagagcctgcaagcacttaaccagccacccagagttccctcactgaagatctgagcatgacccgggacgaggcactgccggactctcattctgcacaggacttctatgagaattatgagcccaaagagatcctgggcaggggcgttagcagtgtggtcaggcgatgcatccacaagcccacgagccaggagtacgccgtgaaggtcatcgacgtcaccggtggaggcagcttcagcccggaggaggtgcgggagctgcgagaagccacgctgaaggaggtggacatcctgcgcaaggtctcagggcaccccaacatcatacagctgaaggacacttatgagaccaacactttcttcttcttggtgtttgacctgatgaagagaggggagctctttgacttacctcactgagaaggtcaccttgagtgagaaggaaaccagaaagatcatgcggagctctgctggaggtgatctgcaccttgcacaaactcaacatcgtgcaccgggacctgaagcccgagaacattctcttggatgacaacatgaacatcaagctcacagactttggcttttcctgccagcatggagccgggagagaggctgcgagaggtctgcgggacccccagttacctggcccctgagattatcgagtgctccatgaatgaggaccacccgggctacggaaaagaggtggacatgtggagcactggcgtcatcatgtacacgctgctggccggctccccgcccttctggcaccggaagcagatgcttgatgctgaggatgatcatgagcggcaactaccagtttggctcgcccgagtgggatgattactcggacaccgtgaaggacctggtctcccgattcctggtggtgcaaccccagaaccgctacacagcggaagaggccttggcacaccccttcttccagcagtacttggtggaggaagtgcggcacttcagcccccgggggaagttcaaggtgatcgctctgaccgtgctggcttcagtgcggatctactaccagtaccgccgggtgaagcctgtgacccgggagatcgtcatccgagacccctatgccctccggcctctgcgccggctcatcgacgcctacgctttccgaatctatggccactgggtgaagaaggggcagcagcagaaccgggcagcccttttcgagaacacacccaaggccgtgctcctctccctggccgaggaggactactgaggggctggccagtcagggagggctagggggcaggtggggaggggaagccatggaaatacaagtcaaaggggtgagatgcgtgcaggcctctgcagaaggagcacttggccctggccaggaacccctggaactgaggccacgatcccctctcaaaggctgtgcacaagggaagtgggtgttcccaccacacagcaatacctgcaggctggggcaggccctgggtgggcagagatcacacgtggcctgagaaccaggaaccccctgctcctctacttcctagatgagccaccatctccatttctctttaggggaggcccatagttactgacactcaggctttcttcccttagggtcacagggtgaggatcaaagacacaaatgtctgagatacacaattgcaggagattttattggccccatgacatccagtgacagtgtgggagcaggctactctccagggacatgtttttggaggcatatggagaagggggcccaggcgaggtggctcacacctgtaatcccagcactttgggaggtcgaggtgggaggatcgcttgaggccaggagttcgagaccaccctgggcaacagagcgagatcccatcactacaaaaattcaaaaaattagccaggcatggtggtgcacacttgtagtcccagctactcaggaggctgaggtgggagaattgcttgggcccaggaattcaaggctagagtgagccgtgatcaccagtgcactctagcctgggcaacagagaaagaccctgtctcaaaaaaaaaa

SEQ ID NO: 60852 - DNA, 7564 bp, Homo sapiens; identical to SEQ ID NO: 60780

SEQ ID NO: 60853 - DNA, 4407 bp, Homo sapiens; identical to SEQ ID NO: 60605

SEQ ID NO: 60854 - DNA, 2080 bp, Homo sapiens
ttttttatgcttggaatcgaatttcatgaatttattctaacacataaatcaggtaagagagaagtagatggatagatttttttttttttaaagaaattagcctccctggggtacttacagtagattgaggtattgagagatttacaaagatataattctttggaagattacagaagatggaaacaccacccccacctttcactttcaggtactggagttcattaattctttcaccaaaagcacatcactgaaggaaaatcagaagtggttttttagttattattaaagtagttcaagacccagggaaccccttgagatgaaaacaaaacagtattcaacttttcttcacaagactaccttgtactggcaagacttagaggacttctggcttgaaaaatattgcttagaaaacttaaaaaaaaatcaacaacaactatattttggacaaaacaatttttttttaatctgtcttgtaaaatccttacttccttttgagtctctgatggccacaacatttcatttgagatgtttggcagtcacagcttcaggggttatggttactgattatctaaaccccttaggtcagaatgaacaaacacagttcatgtaaacctggctgttattggagtcctctgaccaagagataatagtgaagagtgtggagagcctgaatgcccatggtggaaatgctggaaaaattaaaggtaagaaataaaacatagcacaggagattcagagggctgggatgacttctgagctgctctctatacccaaggccctttcaatttctagctgtgaaagatttttcatgcactgtggtgcctgatgtttcctgcaatttgacaaaaataaatactttacacaagaaaaggatgcaaggcttctacgttacactttggggatgctcaggagccaaggctcctgcttggctttcatttcacagggcctgcagccttgtctctggaaggtgctgattaggactgggaatggcctcctctggtcgagactctctgacccctaagtaaatgaacttgttcccatcccagtctccaaacagatcccaacactacgtttgtttttctatatcctgattgtcacacctggaagactctccttagtatacatgaggcttactgccatgagaccaaatgactagagagcatcttttaagagaagcttgctcattcaggaaaaattaaggatttggtacaaactgcaggccaaagggaagctgacatattgttttggtgtgtattcttgaaaacgcatcattaaatctacagtcccttgtcagcatgctgacttttacgctgcctcaaggagtcttccaccacctctgtgtcagctgggcagggttgctcagagatgccttcttcagcctcctcaggctctacttcctcccgggtcacaccgtcctctcctgggggcccctgatcattggcctcacttctctcctcatccacaccagcagccaagttgtcctcctcctcttcttcctctgcttcatcctcatcgccaagatcttctttctcttcttcatcatctacaaggctgtctttgttttcttcttcatttgaatcatctttttcctcctccgcatcctgcaactgttcagctctatgagcctcctctgatctccgattctgctcagaacgctcagataaatgccttggaagtggcacatagaaacattctgatattaccaccaagaccagacccataaaaaggccaaaaaccaaggtggctatgacgaaaaagacataagaacaccaagcaggaattccaagagtcactgtgaaataagttgtgaaggatgccatatcttgccagagatgctaaaaagaccagccattccagacatcgttagagaagccggggatttccagccagtcagaggctccgactgattgccatttcttctctaagatataattctgcaggtcttcgaagattcctggggccacgataacggcggaatatcccatcctttgcatgaaaaaatgctgggagagtggtgacaaagaagcggccactcaaacctggttcttgaatgacatctaccttccccacacctcgtgcc

SEQ ID NO: 60855 - DNA, 597 bp, Homo sapiens
tatgccatcgtgtgggtgaatggggtcgacgcgctagagcatgagggatctacctcccctttgacaccgacatcagtagcctgttccaggtggggcccctgccctcccgcctccgcatcactatcaccatcggcaacatgctcatctcctccaccctgccaccagggagcatcctcgacatggccgacacctccacgtgggtaccatcctgcttccaccgcagacacccaccttcctgtcccaccccgtggggcattacattagggtaattacattagtgtcaagatatgccataatactgagaatggaggagtctgaggccctggtccatcaactgacagcatgaacttcacgtcaagaagtgagattggtgaataagtgaagacagaaggaaaattggagatacagctggatgtatgaaccctgctctaaaaacactctttaacggtataaggattcttattaacgaattttatttcttttttatctgatcattattttattttgatttatagaggaatatatagagggggatatctatagagacacacacgtttgtgtgtgtatatataaatatatatgtatgtgtaaaaaaaa

SEQ ID NO: 60856 - DNA, 6355 bp, Homo sapiens
ctcactgtccctctccggctctagctctctccatataaaccctcaagattatgtcaattggttagagccagccgggaatttcgtgcgggtgctgaaggagctgcgggagccggagaagaatgaaactgcgtggagtcagcctggctgccggcttgttcttactggccctgagtctttgggggcagcctgcagaggctgcggcttgctatgggtgttctccaggatcaaagtgtgactgcagtggcataaaaggggaaaagggagagagagggtttccaggtttggaaggacacccaggattgcctggatttccaggtccagaagggcctccggggcctcggggacaaaagggtgatgatggaattccagggccaccaggaccaaaaggaatcagaggtcctcctggacttcctggatttccagggacaccaggtcttcctggaatgccaggccacgatggggccccaggacctcaaggtattcccggatgcaatggaaccaagggagaacgtggatttccaggcagtcccggttttcctggtttacagggtcctccaggaccccctgggatcccaggtatgaagggtgaaccaggtagtataattatgtcatcactgccaggaccaaagggtaatccaggatatccaggtcctcctggaatacaaggcctacctggtcccactggtataccagggccaattggtcccccaggaccaccaggtttgatgggccctcctggtccaccaggacttccaggacctaaggggaatatgggcttaaatttccagggacccaaaggtgaaaaaggtgagcaaggtcttcagggcccacctgggccacctgggcagatcagtgaacagaaaagaccaattgatgtagagtttcagaaaggagatcagggacttcctggtgaccgagggcctcctggacctccagggatacgtggtcctccaggtcccccaggtggtgagaaaggtgagaagggtgagcaaggagagccaggcaaaagaggtaaaccaggcaaagatggagaaaatggccaaccaggaattcctggtttgcctggtgatcctggttaccctggtgaacccggaagggatggtgaaaagggccaaaaaggtgacactggcccacctggacctcctggacttgtaattcctagacctgggactggtataactataggagaaaaaggaaacattgggttgcctgggttgcctggagaaaaaggagagcgaggatttcctggaatacagggtccacctggccttcctggacctccaggggctgcagttatgggtcctcctggccctcctggatttcctggagaaaggggtcagaaaggtgatgaaggaccacctggaatttccattcctggacctcctggacttgacggacagcctggggctcctgggcttccagggcctcctggccctgctggccctcacattcctcctagtgatgagatatgtgaaccaggccctccaggccccccaggatctccaggtgataaaggactccaaggagaacaaggagtgaaaggtgacaaaggtgacacttgcttcaactgcattggaactggtatttcagggcctccaggtcaacctggtttgccaggtctcccaggtcctccaggatctcttggtttccctggacagaaaggggaaaaaggacaagctggtgcaactggtcccaaaggattaccaggcattccaggagctccaggtgctccaggctttcctggatctaaaggtgaacctggtgatatcctcacttttccaggaatgaagggtgacaaaggagagttgggttcccctggagctccagggcttcctggtttacctggcactcctggacaggatggattgccagggcttcctggcccgaaaggagagcctggtggaattacttttaagggtgaaagaggtccccctgggaacccaggtttaccaggcctcccagggaatatagggcctatgggtccccctggtttcggccctccagggcccagtaggtgaaaaaggcatacaaggtgtggcaggaaatccaggccagccaggaataccaggtcctaaaggggatccaggtcagactataacccagccggggaagcctggcttgcctggtaacccaggcagagatggtgatgtaggtcttccaggtgaccctggacttccagggcaaccaggcttgccagggatacctggtagcaaaggagaaccaggtatccctggaattgggcttcctggaccacctggtcccaaaggctttcctggaattccaggacctccaggagcacctgggacacctggaagaattggtctagaaggccctcctgggccacccggctttccaggaccaaagggttgaaccaggatttgcattacctgggccacctgggccaccaggacttccaggtttcaaaggagcacttggtccaaaaggtgatcgtggtttcccaggacctccgggtcctccaggacgcactggcttagatgggctccctggaccaaaaggtgatgttggaccaaatggacaacctggaccaatgggacctcctgggctgccaggaataggtgttcagggaccaccaggaccaccagggattcctgggccaataggtcaacctggtttacatggaataccaggagagaagggggatccaggacctcctggacttgatgttccaggacccccaggtgaaagaggcagtccagggatccccggagcacctggtcctataggacctccaggatcaccagggcttccaggaaaagcaggtgcctctggatttccaggtaccaaaggtgaaatgggtatgatgggacctccaggcccaccaggacctttgggaattcctggcaggagtggtgtacctggtcttaaaggtgatgatggcttgcagggtcagccaggacttcctggccctacaggagaaaaaggtagtaaaggagagcctggccttccaggccctcctggaccaatggatccaaatcttctgggctcaaaaggagagaagggggaacctggcttaccaggtatacctggagtttcagggccaaaaggttatcagggtttgcctggagacccagggcaacctggactgagtggacaacctggattaccaggaccaccaggtcccaaaggtaaccctggtctccctggacagccaggtcttataggacctcctggacttaaaggaaccatcggtgatatgggttttccagggcctcagggtgtggaagggcctcctggaccttctggagttcctggacaacctggctccccaggattacctggacagaaaggcgacaaaggtgatcctggtatttcaagcattggtcttccaggtcttcctggtccaaagggtgagcctggtctgcctggatacccagggaaccctggtatcaaaggttctgtgggagatcctggtttgcccggattaccaggaacccctggagcaaaaggacaaccaggccttcctggattcccaggaaccccaggccctcctggaccaaaaggtattagtggccctcctgggaaccccggccttccaggagaacctggtcctgtaggtggtggaggtcatcctgggcaaccagggcctccaggcgaaaaaggcaaacccggtcaagatggtattcctggaccagctggacagaagggtgaaccaggtcaaccaggctttggaaacccaggaccccctggacttccaggactttctggccaaaagggtgatggaggattacctgggattccaggaaatcctggccttccaggtccaaagggcgaaccaggctttcacggtttccctggtgtgcagggtcccccaggccctcctggttctccgggtccagctctggaaggacctaaaggcaaccctgggccccaaggtcctcctgggagaccaggtctaccaggtccagaaggtcctccaggtctccctggaaatggaggtattaaaggagagaagggaaatccaggccaacctgggctacctggcttgcctggtttgaaaggagatcaaggaccaccaggactccagggtaatcctggccggccgggtctcaatggaatgaaaggagatcctggtctccctggtgttccaggattcccaggcatgaaaggacccagtggagtacctggatcagctggccctgagggggaaccgggacttattggtcctccaggccctcctggattacctggtccttcaggacagagtatcataattaaaggagatgctggtcctccaggaatccctggccagcctgggctaaagggtctaccaggaccccaaggacctcaaggcttaccaggtccaactggccctccaggagatcctggacgcaatggactccctggctttgatggtgcaggagggcgcaaaggagacccaggtctgccaggacagccaggtacccgtggtttggatggtccccctggtccagatggattgcaaggtcccccaggtccccctggaacctcctctgttgcacatggatttcttattacacgccacagccagacaacggatgcaccacaatgcccacagggaacacttcaggtctatgaaggcttttctctcctgtatgtacaaggaaataaaagagcccacggtcaagacttggggacggctggcagctgccttcgtcgctttagtaccatgcctttcatgttctgcaacatcaataatgtttgcaactttgcttcaagaaatgactattcttactggctctctaccccagagccccatgccaatgagcatgcaacccctaaagggccagagcatccagccattcattagtcgatgtgcagtatgtgaagctccagctgtggtgatcgcagttcacagtcagacgatccagattccccattgtcctcagggatgggattctctgtggattggttattccttcatgatgcatacaagtgcaggggcagaaggctcaggtcaagccctagcctcccctggttcctgcttggaagagtttcgttcagctcccttcatcgaatgtcatgggaggggtacctgtaactactatgccaactcctacagcttttggctggcaactgtagatgtgtcagacatgttcagtaaacctcagtcagaaacgctgaaagcaggagacttgaggacacgaattagccgatgtcaagtgtgcatgaagaggacataacattttgaagaattccttttgtgttttaaaatgtgatatatatatatataaaattcctaggatgcagtgtctcattgtccccaactttactactgctgccgtcaatggtgctactatatatgatcaagataacatgctgactagtaaccatgaagattcagatgtacctcagcaatgcgccagagcaaagtctctattatttttctactaaagaaataaggaagtgaatttactttttgggtccagaatgactttctccaagaattataagatgaaaattatatattttgcccagttactaaaatggtacattaaaaattcaattaagagaagagtcacattgagtaaaataaaagactgcagtttgtgggaagaattatttttcacggtgctactaatcctgctgtatcccgggtttttaatataaaggtgttaagcttattttgctttgtaagtaaagaatgtgtatattgtgaacagccttttagctcaaaatgttgagtcatttacatatgacatagcatgaatcactctttacagaaaatgtaggaaaccctagaatacagacagcaatattttatattcatgtttatcaaagtgagaggacttatattcctacatcaagttactactgagagtaaatttattttgagttttatcccgtaagttctgttttgattttttttaaaaaacaaacccttttagtcactttaatcagaattttaaatgttcatgttacataccaaattataatatctaatggagcaatttgtcttttgctatattctccaagattatctcttaagaccatatgccccctgttttaatgtttcttacatcttgtttttactcatttctgactggacaaagttcttccaaacaattctgagaaacaaaaacacacacgcagaattaacaattcttttccctgtgcttcttatgtaagaatcctcctgtggcctctgcttgtacagaactgggaaacaacgacttggttagtctcttttaagttacgaaaaagccaattgatgtttcttattctttttaaattttaaatattttgttataaatactcacaggataccttatttccctagctatcatctccttgacttaatgttttttaaacccaccgaatataaatttaattaaagatatatgttgtaaaaaaaaaa

SEQ ID NO: 60857 - DNA, 1465 bp, Homo sapiens
  misc_feature (1)...(1465): n = a,t,c or g
tttttttttttcttgcatgaaatatatttggagacaatataataaaagtaatttttaaagacctataaagaatgaattttctattggactattctaatactatctagcagtttaaatggtttttaaagaagtagactggactataacatacttctacaattctagctataatatattttgagagatactttctacaaaacaaaaacgactaaagggcagaaaaatgattccacactaaggaaggcattggtgcctctaagaagttggcccaatctaaatttgcacaaggattttttcaattttcaaagcattttccttgtttaagtcggtcaatgtagtagcataggcttcacagccgttcccagcttcacccccaagtgcttcagcaacacgtcactcgtgagtaggagcagagccttcccgtcaatttcatggcttctgaagaggtcgacaagagggcataatgcaagaggatctgtttgttttagaaataggaccactgcttccaccgaccaggttgaagggtgcttagtgatgcttccttcctctatgtaaccgtcattttcaactggtgaccttgtaactgaaggtggtgctgcagaagcatggtcagttgagtaagtgttgtggatgctgtcagcccgagggttgccaaggcagagccctgaagaagaaccatacgttgcaccatcagatgcataatacggctgacaattatgctcagagaaatctgagggatgcactggactcggagtgcggctgaggatcgggtcctcctccagctcagctcgctggtattcttccatgcaaaaggatggccttggaaggttgctcggggaattattctcacgccttgacactggtaaagtggggctgtaactttcagggtaggagaatgtctcgtaaacctcatttttcttcattttctggagtttaagctttttaacaagccggtaagaatgctttttatatccatatcgcttatgatttgtccacagggatctcgcatggaaacgttggatttttgaaacctttctacgaatcacatcaatcttcttatccaggttttgcagagcatcatatataacctggcaatgaataaggacatcatcaactgtcttcagttgctcttcagtattacaggatgcgtcagatacaatattcggttcctattttagtgacagagcctgtcacgccggcctccggaggtcgcggtaaaactgctcgcagtagtcctgcctctccgatgggcgacagctgtgaccgttaggccactcgacgcttcggaaaggtcctggcaccggaaaccgggcctggtcacgcgcacgcgagaccagtgatgccctgacccctgagtggatcagagagctcccgcgacgccgaattcccacactcgcgcccacgcgtccgcggacgcgtgggtcgtcccagggtttcagtcggtaccgacggnatcagtgggaag

SEQ ID NO: 60858 - DNA, 2793 bp, Homo sapiens
ctctgactcagtatgtcacatttaacaagaggccagagcttgtccaaaatggctgtccaaaaacgaccccacacttgcgttagaagatgatacctttttcagggacagttttctctcttggctcctgtcccgctggccctctgtctgcctgtgtccctgaccatggctccctgcagtaccctttaacgatttatcagcaagactgttgaacgcataactgcccaagatgcctgtccctccccctccagcacccccgccgcccccgacgtttgcactggccaatacagagaagcctaccttgaataagacagagcaggctgggagaaatgctctcctttctgatatcagcaaagggaagaaactaaagaagacggtcaccaatgacagaagtgcaccaatactggacaaacctaaaggagctggtgctggaggcggtggtggtggctttggtggaggcggcggatttggcggaggaggtggtggcggaggcggtggaagttttggagggggcggacctccaggtctgggaggattgttccaggctggaatgccgaagctgagatccacggccaacagggataatgattctggaggaagccgaccaccattgttgccaccgggaggaagatccacatctgcgaaacccttttcacccccaagtggcccagggaggtttcctgtgccttctccaggccacagaagtggtcccccagagcctcagaggaaccgaatgccgcccccaaggcccgacgtgggctcaaagcctgatagcattcctcctccagtacctagtactccaagacccattcaatcaagtctgcacaaccgggggtccccaccagtgcccggaggccccaggcagcccagccccgggcccactcctccccctttccctggaaaccgcggcactgctttgggaggaggctcaatacgtcagtcccccttgagctcctcctcgcccttctccaaccggcctcccctgccgcctacccccagcagggccttggatgacaaaccccctccaccacctcctccagtgggcaacaggccctccatccacagggaagcggttccccctcctcctcctcagaacaacaagcctccagtgccttccactccgcggccttcggcctcctcacaggccccacctccgccgccacctcccagcaggcccgggccgcctcctctgcctccaagttccagcggcaatgacgaaaccccaagactcccacagcggaatctgtccctcagttcgtccacgcccccgttaccttcgccaggacgttcaggtcctcttcctcccccgcccagtgagagacccccacctccagtgagggacccgccaggccgatcaggccccctcccaccacctcctccagtaagcagaaacggcagcacatctcgggccctgcctgctacccctcagttgccatccaggagtggagtagacagtcccaggagtggacccaggcctccccttcctcctgataggcccagtgctggggcacctcccccacctccaccatcaacatctattagaaatggcttccaagactctccatgtgaagatgagtgggaaagcagattctacttccatccgatttccgatttgccacctccagagccatatgtacaaacgaccaaaagttatcccagcaaactggcaagaaacgaaagccggagtggatccaaccgaagagaaaggggtgctccaccactccctcccatcccgaggtgatctttgcctgctcttctctacccaagctcaagagctgcttctgttgctatctaagaactgcataccctcctccctgcttcttcccttgtgcctcatgtatgggcaggaggaaaggtgggagggggagtgggaatatgcgtgtgtgggtgggaatcggtaagaaatgcacctagcttttcatattgtgtttattctccaggctattgcttgcttcagctgcagcctgcctgtgctggctgctggggtcgataggcttttgtcgtaataggcagagatgacttgcatcccagctttccaccaaccaaattcaaacattcactgcttatttgttacagactgtaattattaaagtccctgagagctgttttctcccgttcctttttcgcatgcttggcctcctctctgtttctatgaaccacagaccacctaagcaagctgctgagtaagggctcactggaaacttgcagtcacaggatgtccaatctttggcagtccgagcttggctctaggacagagctgtccaatagaaatataatgtgagccccatatacaatttttacatttctaatatattttaaacaagtgaagttaatatgcatccaaaatatttcaacctgtaatcaacataaaattttaatgagatattttatattattttttggtactgaatcttcaaaatccagagtgtattttacacttaccgcacatctccattcagactagtcacatttttaagtgctcagtagccacatgtggctggtggctactggattagacagcacgagtctggaagatggaagctagtgcagaaacctcttgtttaaaaaacaaaaaaggcaagatgggcttgagcgattcaagaggcaactaaaaataaaattaggacccagcaccttgtttgacacacagtttgaccttcgattttcctcccttaacttccctcttcccttaatatctgtatacaagtgttgcttcaaagtaccaaggtcagaaattgattcagtacggtttactaaagtcatgtggaataaagccattggaaacaaaaaaaaaaa

SEQ ID NO: 60859 - DNA, 2083 bp, Homo sapiens
  misc_feature (1)...(2083): n = a,t,c or g
tatcgcgtaaatctggatgcgcgcgatataagcaaattaaatggttcgtggccgcatcctagagccctttaattagagttaccatttgtagaaggcctgccgtgcacaatccctcgtttcatctccccccaaaccgagcaggaaagtgaataaacttaattgagaatgtctgaaaaccttgacaagtccaatgtaaatgaagcaggaaaatcaaaatccaatgattctgaggaaggcctcgaagatgctgtggaaggtgctgatgaagccttacaaaaagcaataaagtcagactcctccagcccccaaagagtgcagagacctcactctagtcctcctcgctttgtgacagtagaagaacttctagagacagcgagaggcgtcaccaacatggctctagcccatgaaattgtagtaaatggagactttcagattaaaccagttgaattaccagaaaacagcttgaagaagagagtaaaggagattgtacataaagcgttttgggattgcttgagtgtgcagctaagtgaagatcccccagcatatgaccatgctatcaaacttgtaggagaaatcaaagagactctcttatctttcttgctgcctggtcatactagactgagaaaccagataacagaagtcttggatctggatctgataaagcaggaagcagagaatggggcgctagacatttccaagctggcagaattcattattggcatgatggggacactgtgtgcacctgctcgagatgaggaagttaagaaactaaaggacattaaggaaatagtgccccttttcagagaaattttttctgtgttggacctaatgaaagtggacatggccaactttgctatcagtagcatcaggcctcatctcatgcagcagtcagttgaatacgaaaggaagaagtttcaagagattttggagaggcaaccaaattccctggactttgtcacccagtggctggaagaagcctcagaggaccttatgactcagaagtataaacacgccctgccagtggggggaatggctgctggctctggggacatgcccaggctgagccctgttgctgtccagaattacgcttacctgaagcttctgaagtgggaccacctccagaggccgttccccgaaacagttttaatggaccagtctcgcttccacgagctccagttgcagctgggaacaactgaccatcctgggggctgtgttgctggtcaccttcagcatggcagcgccaggaatttccagccaggccgactttgctgagaaactcaagatgattgtgaagattttgctaacagatatgcacctgccctccttccatctgaaggacgtcctcactaccatcggggagaaggtgtgcctggaggtgagcagctgcctctccctgtgtgggtcctctcccttcaccacggacaaggagaccgtgctcaagggccagatccaggccgtggccagtcccgatgaccccattcgcaggatcatggaatctcgaatcctgaccttcttagaaacctaccttgcctcgggtcatcagaagccattgcccacagtccctgggggactcagtccagttcagagagagctggaggaagttgctattaaatttgctcgcctggtcaactataacaagatggtcttctgtccctactacgatgcaatcctgagtaagatcctcgtccgatcctaacgtgtatgcaccctacagcagcagtattactcactagccacagaatacctgttctgtactctaatgttgcattggaaaatggctatatagtacatgtctatttaacagcaccgattccaaagggaagaatattgtgtatcactgttgaaaagacttgttgagaaatccactgaattctattttgagagattgtatttatgagtgcaagtttacaaatcaaagaagcattttgttctcgagttttacaggtaacactcagctgttgtctccactcctcccccctctagagccaaanaaaaaaaaaaaaaagggttttatgatattgggttgttgagttccttatatatactggttatgaacccccttgtagcaggtgtgtttattcag

SEQ ID NO: 60860 - DNA, 2514 bp, Homo sapiens
tgcggccgcctcctcttcggggtcattaaagccaatgagccgcgcgcctctgccgagcgcagccaactaaatcggcttggatgattcgcgacctgagcaagatgtacccgcagaccagacacccggcaccgcatcagcctgctcaaccctttaaatttacaatttccgaatcctgtgatcggattaaggaagagtttcagtttttacaggctcaataccacagtctgaagctggaatgtgagaaactcgccagtgagaagacagagatgcagcggcattatgtcatgtattatgaaatgtcctatgggttgaatatagaaatgcacaagcaggcagagattgtcaagaggctgaatgctatctgtgcacaagtcattcctttcctgtcccaagagcaccagcaacaagtggtgcaggctgtggaacgggccaagcaggtgaccatggcagaactgaacgccatcattgggcagcaacaactccaggcccagcatttatcacatggacatggtctccccgtacctctgactccacacccttcagggctccagccccctgccattccacccatcggtagcagtgccgggcttctggccctctccagtgctctaggaggtcagtcccatcttccaattaaagatgagaagaagcaccatgacaatgatcaccaaagagacagagactccatcaagagctcttcagtatccccatcagccagtttccgaggtgctgagaagcacagaaactccgcagactactcctcagagagcaaaaagcagaaaactgaagaaaaggaaattgcagctcgttatgacagcgatggtgagaaaagtgatgacaacttggtggttgacgtttccaatgaggatccatcttcccctcgagggagcccagcacattcccccagagagaatggcctagacaagacacgcctgctcaagaaagatgccccgattagtccagcctctattgcatcttccagcagtactccctcctccaaatccaaagaacttagccttaatgaaaaatctactactcccgtctcaaagtccaatacccctactccacgaactgatgcgcccaccccaggcagtaactctactcccggattgaggcctgtacctggaaaaccaccaggagttgaccctttggcctcaagcctaaggaccccaatggcagtaccttgtccatatccaactccatttgggattgtgccccatgctggaatgaacggagagctgaccagccccggagcggcctacgctgggctccacaacatctcccctcagatgagcgcagctgctgccgccgccgctgctgctgctgcctatgggagatcaccagtggtgggatttgatccacaccatcacatgcgtgtgccagcaatacctccaaacctgacaggcattccaggaggaaaaccagcatactccttccatgttagcgcagatggtcagatgcagcctgtcccttttccacccgacgccctcatcggacctggaatcccccggcatgctcgccagatcaacaccctcaaccacggggaggtggtgtgcgcggtgaccatcagcaaccccacgagacacgtgtacacgggtgggaagggctgcgtcaaggtctgggacatcagccacccaggcaataagagtcctgtctcccagctcgactgtctgaacagggataactacatccgttcctgcagattgctccctgatggtcgcaccctaattgttggaggggaagccagtactttgtccatttgggacctggcggctccaaccccacgcatcaaggcagagctgacatcctcggcccccgcctgctatgccctggccatcagccccgattccaaggtctgcttctcatgctgcagcgacggcaacatcgctgtgtgggatctgcacaaccagaccttggtgaggcaattccagggccacacagatggagccagctgtattgacatttctaatgatggcaccaagctctggacaggtggtttggacaacacggtcaggtcctggggacctgcgcgaggggcggcagctgcagcagcacgacttttcacctccccagtcttttctctgggctactgccccaactgaagagtggcttgcagtggggatggagaacagcaatggtggaagttttgcatgtcaccaagccagacaaataccaactacatcttcatgagagctgtgtgctgtcgctcaagtttgcccattgtggcaaatggttttgtaagcactggaaaggacaaccttctgaatgcctgggagaacaccttatgggggccagtatatttccagtccaaagaatcctcatcgggtgcttagctgtgacatcttccgtggacgacaaatacattgtcactggctcttggggataaggagggccacagtttatgaagttatttattaaagacaaatcttcatgcagactggacttctcctcctggtagcactttgctctgtcatcctttttgttcacccccatccccgcatctaaaaccaagga

SEQ ID NO: 60861 - DNA, 2901 bp, Homo sapiens
aacagcctcagctcaagcggtggctccactggaggaaaacacaccccggtctcacattaaagaagccaaactgtcggcttcaaagagaaaaggcaacatcctgtcacaggccatgctctggcaaaaacccacagctccggagcaagccccagccccggcccggccataccagggcgtccgtgtgaaggagccagtgaaggaactgctgaggaggaagcgaggccacgccagcagtggggcagcacctgcacctacggcggtggtgctgccccatcagcccctggcgacctacaccacagtccttcctgcctggacatggaaggttctgtgtctgcagtgacagaggaggctgccctgtgtgccggctggctctcccagtccaccccggccaccctgcagcccctggccccatggacaccttacaccgagtatgtgccccatgaagctgtcagctgcccctactcagctgacatgtatgtgcagcccgtgtgccccagctacacggtggtggggccctcctcagtgttgacctatgcctctccgccactcatcaccaatgtcacgacaagaagctccgccacgcccgcagtggggcccccgctggagggcccagagcaccaggcacccctcacctatttcccgtggcctcagcccctttccacactacccacctccaccctgcagtaccggcctccggccccagccctacctgggccccagtttgtccagctccccatctctatcccagagccagtccttcaggacatggaagaccccagaagagccgccagctcgttgaccatcgacaagctgcttttggaggaagaggatagcgacgcctatgcgcttaaccacactctctctgtggaaggcttttaggcgtggctcccacctgagtcctgttccctgaaactgggattttaaaatgagcctggaattgagccccaggttcatgcttgtttggagtagtcatttcatgactactctttctacgcacagctagaattgtagacctgtaaaccttccttcccttcttccttcccctccctccctcacttcctccctctcccccatccttccattcttcccctccctcccttcttcctttccaaccccttccttccttttcctccctcccttccttccctccttcccttctccctttccaaccccttccttccttttcctccctcccttccttccctccttcccttctccctttccttctttacctccctccctccctcgcttcttctctctttcttacttcttttttcaattctgttccattttgggaggtaattatagggattttagcaataacattttatgtcaaatgttgccaagtctgtggtccatgggctttcatttctgtcacatttcatttcttggaaaaggcctccttcctccagtgcctgctgaaccatcttagggtcactcacaccctctgtaattttaagatgtatgtggtggccggcgggaagaccagccccgacagcacctcctgagaaagtcagccaagggcctaccctgatgccagagtccttgagctgtcagttcccacagttgctcctttgtttgctcttctcagcctcggccagatttacagtccaggcagcaaaatctcaaggcctggggctcagagtagtaaggggtgggaagtgggtggcagggagaaaagaacatcagggtgggtggggacaggccagtgacgaagagagggacagaggagggatgggaacaggctgtgcatcttagttggagagaggggtgtgggaggaagcttgagtttgatgcagggaggaggaaggctgaggaatgacttggctccagattacttggttattaagaagaacaataaactaaaggaaagcattgcttgaagagatggttttgctgctctccttgaggatacgtgcaagggaagttgggctgttgtaaacagggtgaagggtgtgtttggtcggccatttctctctcacctctaggccctctgctggtgctgtggaggccaagaccccattaagcctaaaggtgatgggtcctcgcctaggcttagtgctaccatgtgggttttgtttctttccttccttccttccttccttccttccttccttccttccttccttccttccttccttccttccttctttccttccttccttccttccttccttcctctctctttctttcttttttttggttttttttgggacggagtctcactccgttgcccaggctggagtacaatggtgcgatcttggctcactgcacctctgtctcccaagttcaagtgattctcctgcctgagcctcccgagtagctgggattacaggtgcatgccaccatgcctggctaatttttgtatttttagtagagacggggtttcaccatgttggccaggctggtctcgaactcctgaccttgtgatccgcccgcctcagcctctcagagtgctgggatcacaggcgtgagccaccgcacccagccttttaccatgtgggtttctttagtgtcttaaaagcgtccataagccaccattctgtggaaccaaggccccctccacgcaaacaccctccctcctggggacctctggagcctcagccagaagtaccattaagtttaattttaatttgttttgctggagaaacatcaggtttgtaggagactgagttgttagcaggtgtgcttagctcttgatagtgaacgtgtaccttgggaactggctcacccacctgctaatagcaccatcgtcaccattaagcagacatttcagttggtagaatccatgtagaagtcatggacttttctgggaaatgacttttctgggaaatgacagtttctttgacatattttctttgcccactttaaataaaaactctggagaaagtaaaaaaaaaa

SEQ ID NO: 60862 - DNA, 2705 bp, Homo sapiens
cccagtttattagaaaaggtgtgaacagagttgcaccgacaggagtagccccagccctctgcccaccctcacccacacccatgccactcgcccccaaagggctgtagtgcctctcagggcgcagcctccagtggcctggacagcagggtcccggagtgccggctgctcccgccccagctccctgatagatttattgcacttgagaaaaagaaagctctgatcctctgctcccatccccccaccctgcccggcctgcgctgtctggggctgttctgcgcatctcaaccaccaccagcacgcaccgcctctccggcaccaggctgcctgcccggccctgtgcccggggccacaggggaccatcccaccaccacccaggacgcctgccctccgcagggcaagcctggcccctccagaacaggcgcctgatgtccttggagacctcctcctcctcctgctccccctcctcccattcacccccagagtcttccagtgctgggctcataaatagaagtgcttgagtcacgcgcggagggccactccctgtagctcctgcaccccttgtagtgttgctgtggggggaggggggccccagaatggcccccacccctggcatcctgggcctcaggaaggctggggggaaggtgagcagattctcatggctctggcctcagctcatcgcagaccgaccggaaaaagggaactaaagtgtcacagtgtctcctgcccggattcctgactggcttccagaagcagctcctcgagctccttctcgttcttggagcagctcagttcgtgctccaggccgcagctgccccccttgacctcaggccccgggggcggctcagggggcagtgccagggcgaactcgggcttcaggccgttgggcagtggtggccctgaccgaggcggctccggtggtggctgaggctcagaggaccctgtgtcccgggtgtcaatggccccggagggggtctcgtccctctccccttcctcttcctcctcttcctccccatccgagtccgagtctgagtctgagtccgggctgggtgcggggctgggggccccgttctgcaccccagcggcgggctcgtcgtcgggctggggctcggtggcggtggtctcaggcatggaggccgacagctgtggcggctgctccttctcctccctctcccgcgccagcaccaagttgcgcttgcagccgttctggatctcggccagcagcgccttctgcgtctcgatgaagctcttcaccgcctctttcttgggttcacggtcgaggtccaggcgcagcagtgagtggttcaccttgagggccaacgacagtgccatgagcccgcctgtcttgatctcgttctcccgaaggtccagtctcaggaggcgggggctctcagcgatgaactccgccaccgccaccgcgccctcgcacgtgagcttggtggaggccagcccgaggcgcagcacgctgcggttgctgatgagcccgttcttgaggtgccgcacaccctcgttcccgatggggttgtggcccaggttcagcgtctccaggctctgagtgtgcggcagtgtcatgcccaggaaggccatgcctgtgtgcgtgagctggttgttccacagcacccagggtcaccagccccttcctctgctccttgaggccctcgcagatgtaggccagacccgagtctagcacgtggttgttccggaggtccaggatctgcagggagcagttgaacttgagcaggttacccagctgggccgagtcctgcaggccgttgagcttgttgtccgcccaggtacagctcccgcaggttcatgttcatcttcagggccgtggcgagcagcatgaggggccgccccgacaggctggcgttctccaagtgcagcactgccaggctgctgcggatgcgcagggcacgggccacgaagggcgccgagtggtccagcaggggcgtgttgcgggcgtcccagatactgcaggcagctcgtcttgcgcatcatgtgggcggccgcctgccagccccgggtgccgatgtgcttgttgaaggagatgttgaggtgggtggccgactcgtagtactcgatcatgtcgaagagggccgaggcaccatcttcatccaggtttgtctgctccaggtccacgaccttgaactgcagcctcttgaagacctcttccagggcctcacaggtcttgtagtcaagcttctcacctttcaggtccagacagtcgaggcggtgcccgaggtctgtgaattcctgcagctgcctgaggagcttggggatctgcctgcagttcagcttctggcaggcctgcttgtaggcgccgatgacctcgtccacggtcacattctgggcatgtctccaggggtctttgggctccactgctccagacacgatatcctcgtcggacgggaatgtgacgcgcttggctgcagccttgaggcgcccatcggcggggggcgacgcggggctgggagacccggcctcagctggggcctcttcaatgtcgccgtccgcgcccggcacgggcggcgcctcctgcggcgcgatctccatagccgccgccgcctcctcacgggggccccggggacatgccccgggccccggatttgtctctccgggtccgcccgccgtcccggggcatgggctccgccgccgcttcaggcgccgcctccgtccgctctcctagtggtcgtagtcgtcgccgccgg

SEQ ID NO: 60863 - DNA, 403 bp, Homo sapiens
caagcccgaatttcttaatctgttacctatctcggcataattcttcataaaaacacaggtgctctccctgccgatcctgtccaactgatctctcaaaccccaaccccttctacaaaacaacaactcctttccttcctgggcatggttggatacttttacctttggatacctggttttgccatcctaacaaaaccattatgtaaactcacaaaagaaaacctagctgatgccatagatcctaaatccttttcccactcctctttccgttccttgaagacagcattagagaatgcttccacactagctctccctgactcatcccaaccctttttcattacacacagccgaagtgcagggctgtgtggtcgaaattcttacacaaggactgggaccgctccctgtg

SEQ ID NO: 60864 - DNA, 1415 bp, Homo sapiens
cgccttgcagcgccctgcaagaattcggcacgagccgtgttgtacggcggcttctcgcgcagctgatgacctggaagtgatgcctaaagctgtggaccgcgtgggctcgcctccctgggactaggtttcagcggccgctgcgatgaccaaaataaaggcagatcccgacgggcccgaggctcaggcggaggcgtgttccggggagcgcacctaccaggagctgctggtcaaccagaaccccatcgcgcagcccctggcttctcgccgcctcacgcggaagctctacaaatgcatcaagaaagcggtgaagcagaagcagattcggcgcggggtgaaagaggttcagaaatttgtcaacaaaggagaaaaagggatcatggttttggcaggagacacactgcccattgaggtatactgccatctcccagtcatgtgtgaggaccgaaatttgccctatgtctatatcccctctaagacggacctgggtgcagccgcaggctccaagcgccccacctgtgtgataatggtcaagccccatgaggagtaccaggaggcttacgatgagtgcctggaggaggtgcagtccctgcccctacccctatgaggggctccggtagcacctgggcacctgccgctggaagctattgggctggcagcaggacgactggctgtcctcctgcccacccacactgacggcatcttcccagttccccaaggcacgccttcttcccaggcagctctaacagccctttcatgaaggtaatgctagtcttctgtccatcagtgccatttcctgtagaactaaaggctgttccaagaatgtggggtggggaaagtaaatgctaagactaaaatgtggtgagtctgtgggtgttttcttaagcagcagctgctggttgggccagcgagttggtgggcgggaagagtgaagcagtcttcctcagcagagagcccaaaggactcagagggttctgtgctgatgctcagctgcccagggctgggtgctttggctcaagctgagaactgatcctgctgctatcccagcattttcaactccctcttccagggtagatgggggctgtgaggtaaggcagggggcccagacccacttcatggaagcctaaagcccccacatcaggaacacccccattcctaacttaacccaggagccttaaatgccactgtgaagcttatggaagcaatttacccacccacacagcacattttaaataggaatatgaagctaaaatgcattcccccgagctctcttgcttaacataatggccctagtaacccaatcccttcaagtattttagacttggggccccttcctgctgtcagaggcccagcacaggactcagtatacataacagccaagttcaggcaccctggaataaactggaaatagcacgaaa

SEQ ID NO: 60865 - DNA, 5868 bp, Homo sapiens
agtccaggatgttgttaattcagcatgccaatcagagaacttgctctctgcatgtggcacttcagtggtgtttttgctaatgcatgtattcaacttttaatgcctagccccaggatatagtttgcaggcactttaaattaaatggttgcagatggaatgggaagttagagtaaggtgtagaaaattcatttcttctcccgaccctctcttgcttttctcctaggcttggcactgctgcaccaccaaaggcaaacttcattgaagctgacaagtattttcttccattcgagctagcttgccagtccaagtccccaagggtagtcagcacatcccttgactgcttgcagaaactcatcgcatacgggcacatcactggcaacgcccctgacagtggagcccctgggaagcggctgatcgacagaattgttgaaaccatttgcagttgttttcagggccctcagactgatgaaggggttcagttacaaataattaaggctcttctgactgcagtgacttccccacacattgaaattcatgagggtactatcctgcagacagtgagaacatgttacaatatctatttggccagcaaaaatctcatcaatcaaaccactgccaaggctacccttactcagatgctgaacgtcattttcacccgcatggaaaaccaagtgttgcaggaggccagagaactggaaaaaccaatccagtcaaaaccccagtcccctgtgatccaagctgcagcagtatccccaaagttcgttcgtttgaagcacagtcaggcacaaagcaaaccaacaactcccgaaaaaacagatttaaccaacggtgaacatgccaggagtgattctggaaaagtaagcacagaaaatggagacgcacccagagaaagaggctcatcactgtcagggactgatgacggagcccaggaggtggtgaaggacatcttggaagatgtagtcacatctgccattaaagaagcagcggaaaagcatggtctgacagaacctgagagagttctaggtgaactggagtgccaggaatgtgctattcccccaggagttgatgaaaactcacagaccaacgggatagccgatgacaggcagtccttgtcgtcagcagataatctggaatcggatgcacaaggacatcaagtggctgccaggttctcccacgttctgcagaaggatgccttccttgtgttccgctccctgtgcaagctgtccatgaaaccccttggtgaaggccctccagacccaaaatcccatgagctgcgttccaaggtggtttccctgcagctgctcctctctgtgttgcaaaatgctggccccgtattcaggactcacgagatgttcatcaatgcaatcaagcaatatctctgtgtggccttgtccaaaaacggcgtctcttcagtgcctgatgtctttgagctctctcttgccatttttcttactcttctttcaaactttaaaatgcacttgaaaatgcagatagaggtctttttcaaagagattttcctgaacattttagaaacatcaacaagttcttttgagcacaggtggatggtcattcagactctgacgaggatctgtggagatgcccagtgtgttgtggatatttatgtcaactacgactgtgatttaaatgctgctaacatttttgagcgccttgtaaatgatttatccaaaattgctcagggaagaagtggacatgagctgggaatgacacctctgcaggagctcagcctgaggaagaaaggcctggagtgcctcgtgtccattctcaagtgcatggtggagtggagcaaagacctgtatgtgaatcccaaccaccagaccagcctcggtcaggagaggctcacggatcaggaaataggggatgggaaaggccttgacatggcaagacggtgtagtgtgacgtccatggagtccacagtgtcctcggggacccagacaactgttcaggatgaccctgagcaatttgaggtcatcaagcaacaaaaagaaatcattgaacacggcatcgagctgttcaacaagaaacccaagaggaggatccagtttctccaggagcagggcatgctgggaacgtcagttgaagacatagcccaattcctgcaccaggaggagcgcctggattccacccaagtaggcgattttctgggagatagcgcaaggttcaacaaggaggtgatgtatgcctacgtggaccaacttgacttctgtgaaaaagaatttgtctcagccctgcggacattcctagaaggtttccgcctacctggagaagcccaaaagattgaccgattaatggagaagtttgccgcaagatacatagaatgcaaccaagggcaaactctgtttgctagtgctgacactgcttatgtcctagcgtattcaattattatgctgactacagacttgcacagtcctcaggtaaaaaataaaatgacgaaagagcagtatattaaaatgaatcggggtatcaatgatagtaaagatctgccagaagagtatctctcaagcatctatgaagagatagaaggcaaaaaaattgcaatgaaagaaacaaaagagctaacgattgcaaccaaatctactaagcagaatgtagctagtgaaaagcagcggcggctgctgtacaacttagagatggagcaaatggctaaaacagccaaagctctgatggaggctgtgagccatgccaaagccccgtttaccagtgccactcacctggaccatgtccggccaatgttcaaactggtgtggacgccactattggcagcctacagcatcggactccagaactgtgatgacactgaagtggcctccttgtgtttggaaggcatccgatgtgcaatccgaatcgcctgcatctttggaatgcagctggaacgagatgcctatgttcaggctcttgctcgcttctccctactcacagccagctccagcatcacaaaaatgaagcagaaaaacatcgacaccattaagacgcttatcacagtggctcacaccgatggcaactaccttgggaattcctggcatgagatcttgaaatgcatcagccagctggagctcgctcagctgataggaaccggtgtgaagacgcgctacctgtctggatctgggcgtgaaagagaagggagcctgaagggccacacattggcaggagaagagttcatgggccttggcctcggtaatttggtgagtggcggagtgaataaaagacagatggccagcttccaagaatcggttggtgagaccagctcgcagagtgtggttgtagctgtggacaggatttttactgggtctaccagactggatggaaatgcaatagttgactttgtccgctggctgtgtgctgtgtccatggatgaactggcttccccccaccatcctcgcatgttcagcttgcagaagattgtggagatatcatactacaacatgaatcggatccgactacagtggtctcgaatatggcatgtgattggagatcacttcaataaggttggctgcaaccctaatgaagatgtggctatctttgctgttgactcattaaggcaactctccatgaagtttcttgagaagggtgaattagccaacttccgtttccagaaagattttctgaggccctttgagcatattatgaagaaaaacaggtctcccaccatccgggacatggcgatccgctgcattgcccagatggtgaactcccaggcggccaacatccgctcaggctggaagaacatctttgccgtgttccaccaggcagcctctgatcatgatgggaacattgtggagctggccttccagaccacttgccacattgtcacaactattttccagcaccattttcctgcagccatcgattcctttcaggatgctgtgaagtgcttatcagagttcgcctgcaacgccgcttttccctgacacgagcatggaagcgattcggctcatccgcttctgtggcaattatcttctctgagaggcctcgggtgctactagaatacacaagtgatgacatgaatgtagctcctggtgacagagtctgggtccgaggctggttccccatcttattcgaactctcctgcatcattaatagatgcaagttagatgtacgaacaaggggactcacagtcatgtttgagatcatgaagagctatggccacacctttgaaaagcactggtggcaggacctgttcagaatcgtgtttcggatttttgacaatatgaaactccctgagcaactgtcagagaaatctgagtggatgacaacaacctgcaatcacgcactttatgctatttgtgatggttttacccagttttatgaagctttgaatgaagttcttctttctgatgtatttgcacaattgcagtggtgtgtcaaacaagataatgaacagttggcgcgatcaggtacaaattgcttagaaaacttagtaatatccaatggagagaaattcagtcctgaagtctgggatgaaacctgcaactgtatgttggatattttcaaaacaaccatcccacatgttttgctgacatggagacctgtaggaatggaggaagattcatcagaaaagcatttggatgtggatctggaccgccagtctttaagcagcatagataaaaatccctctgagaggggacagagccagctctctaacccaacagatgacagctggaagggtagaccatacgcaaatcagaaactgtttgccagcctcctcatcaagtgtgtggtccagttggaattgatacagaccattgacaacattgtgttctaccctgcgacgagcaaaaaggaggatgcagagcacatggttgccgcccagcaagacacgctggatgcagatatccacatagagacggaggatcagggcatgtataagtacatgtcttcccagcacctcttcaagctgttggactgtttgcaggaatcccattcattctcaaaggccttcaactccaattacgagcagcggactgtcctgtggcgagcaggttttaagggcaagtctaaacccaatcttctaaaacaagaaaccagcagcctggcctgttgtttgaggatcctgtttcgaatgtatgttgatgagaaccgcagggattcctgggaagaaatacagcagagacttttaactgtttgcagtgaagctcttgcctatttcatcactgtgaattctgagagccatcgggaggcctggacaagtctcttgttgttacttctaactaaaaccctcaaaataaatgatgaaaagttcaaagcacatgcttcaatgtactacccctacttgtgtgaaattatgcagtttgacctgatccctgagctccgagcagttctgcggaagttcttcctacggataggtgttgtgtataagatatggataccagaagagccatcacaggtacccagcagcactgtcaccagtgtggtagccctggctgcccaggccagtgctgcagctctgcagaatgttcagcatgccatttctgactggcacatctcgtgaagtttcatagaaacaaggagttggcatcttggatctcagaatggcctggaaacggatggcctctacgctgttccatcacagtctccaactaaggcttatggtatttcattaaactgttgcatacccagttagcacagtaggtggggagtctgcttcatttctatcattccatttttctgattaaactgtcaaatctgtcattgcatatgccatcgttttctagcaaaatcccatgattggctataaacgttttgtaagaagtcactctccttgaaaatactgaacatagctgtataggtttgtgattattagagaatatgttaataaaacttcttgtaacggctaactgccacctaaaaaaa

SEQ ID NO: 60866 - DNA, 1550 bp, Homo sapiens
ttttttttttttcacacaccagcacgtcccacctcgtgctcacggattttattacacagatagtggcggcaatggcctcagcccagcccaccctcacctgcttttccagcccacaaagggggacgatcacggcccagcaaaagcgatgctgagaggggaaacagtccagagtccaacagcagaacttgggggaagcggtcggggtggccaggaacataaactatgtataggggccgggggcttctgcccagggctcccctggaccaggacgccaggtagggcagggaacctcagtagtcctccacccagccattctcagagatgaatgcgtcaataacctccttcatagccaagttggggatgagctgttcctgggtcagggggctccgggtcacggggtcaaaatgacccacacgctgcaggtgctcctcgatgtccttgcggtcgtaggtgatgccactgggcgtgatgcacggctcccgcatcagctcaaagctgatcttgccacacaggtagtcggggatgtctcgcttcttcctcttctcatccacctgagaaaaaagctcgtccatgtccgccatgtacttgtcgtgcttggcctcaatgcaggcctgctgggcccggacgtggctgtcgtcctcatcaccctcgtggtttcgctggcactcttccagctccctctcaccgctccgcggcaatgagcctggagaggtaggagtgcagctcgctctcctggtggatgcgccgctcctcaatgctgttccagcgcttcttcttcgcgattcgaagagcgctggggatgtcgtccccgaagttcagccgcttgttcctttggccaggctgtaagctcgctgcagattggcgatggcctcatcatagctctccatctccagctggcactgccccaggaagaagtgcgccttcacagactgcccgtccagctccagggcgcgccggcagtcggccagggcctgctcgtgctgctgcatcttcaggtagcacaaggcccggttggtgtaatacacggccaccagcgggttccgggtgatcgcgcggccgtagcaggccgccgcctccgggtactttcggcccacgaacagacgattgccctgctccttgagctcctgcgcgctcgggctcttctcggggcttccgccgccagcgcccagccgtgcgccgccctccttctcctccttgcccttcatggcgccgcgcggcacggcctgggctccgctcccaagctccgcgcctcgcggcccagcgcccgcagccggagccccgcagcccgagcccgcgatccgctcgggcccggcccaggtccccccgccggaacttccggccgggggcgggaccagcggggacgcacgcgtgggggcgagtggggccgcgcgtgcgcccaaccagcctggacggggacactgggcccgcgacgtcgggggctgggaggaacgctccagttccctgtccccgcgctcttaagggtgggcgttcgcgtaggccctggcctgccctgctgaggtctcttcggcacccgcctcggcggcggccgc

SEQ ID NO: 60867 - DNA, 6087 bp, Homo sapiens
gaattccgtgggcggaggtctgggatctcctggctgttgctgtcttctgctctcatcctgcaggtgggactctcagctgacaccatgagtagtgacactgaaatggaagtgttcggcatagctgctcctttcctccggaagtcagaaaaggagaggatcgaggctcagaaccagccctttgatgccaagacgtattgcttcgtggtggactcaaaggaagaatatgccaaggggaaaatcaagagttctcaggatgggaaggtcactgtggaaactgaggacaacaggaccctggtggtcaaaccagaggatgtgtacgccatgaacccccccaagttcgacaggatcgaagacatggccatgctgacgcacctgaatgagccagccgtgctgtacaacctgaaggaccgttacacatcttggatgatctatacctactcaggcctcttctgtgtcactgtcaacccctacaagtggctgccggtgtacaaccccgaggtggtggaaggctaccgaggcaaaaagcgccaggaggccccaccccacatcttctccatctctgacaacgcctatcagttcatgctgactgatcgtgaaaaccagtccattctgatcacgggagaatccggggcaggaaagactgtgaacaccaaacgggtcatccagtactttgcaacaattgcagctactggggacctggccaagaagaaggactccaaaatgaaggggactctggaagatcaaatcatcagtgccaatcccctgctggaggcctttgggaacgccaagactgtgaggaatgacaactcctcccgttttggcaagttcatccgaatccattttggaaccactgggaagctggcctctgcagatattgaaacttatcttctggaaaaatcaagagtcactttccagctgaaggctgaaagaagctaccacatcttctaccagattctttctaacaagaagcctgagctcatagagctgctgcttattacgaccaacccttacgactacccgttcattagccagggggagatcctggtggccagcatagatgatcgagaggagctgctggctacagacagcgccattgacatcctgggcttcaccccagaagagaaatctgggctctacaagctgacgggagccgtgatgcactacgggaacatgaagttcaagcagaagcagcgagaggagcaggccgagccggatggcacagaagtggctgacaaaacagcctatctgatgggcctgaactcttcggacctcctaaaagctttgtgctttcctagagtgaaagttgggaatgagtacgttaccaaaggtcaaactgtggatcaggttcaccatgctgtgaatgctctttcaaaatcagtttatgaaaagttgttcttgtggatggtcactcgcattaaccagcaactggatacgaagcttccaagacaacacttcattggtgttttggacattgcaggctttgaaatctttgagtataacagcctggagcagctgtgcatcaacttcaccaatgagaaactgcaacagtttttcaaccaccacatgttcgtgctggagcaggaggagtacaagaaggaaggcatcgagtggacgttcattgacttcgggatggacctggctgcctgcatcgagctcatcgagaagcctatgggcatcttctccatcctggaagaggagtgcatgttccccaaggcaacagacacctccttcaagaacaagctgtatgaccagcatcttggaaagtccaacaacttccagaagcccaaggtggtcaaaggcagggcagaggctcacttctcactgatccactatgcgggcaccgtggactacagtgtctcaggttggctggagaagaacaaggaccctctgaacgagactgtggttgggctgtaccagaagtcttccaacaggctcctggcacacctctatgccacgtttgccacggcggatgctgacagtggaaagaagaaagttgccaagaagaagggttcttccttccaaactgtctctgcccttttcagggaaaacctgaacaagctgatgtcaaatttaagaactactcaccctcattttgtgcgttgtataattcccaatgaaaccaaaactccaggggctatggaacacagccttgttctgcaccagctgcggtgtaacggtgtcctggagggcatccgcatctgcaggaaagggttcccaaacaggattctctatggagattttaaacaaagataccgagtgctgaatgccagtgcaatcctggagggacaattcattgacagcaagaaagcctgtgaaaagcttctggcatccattgatattgaccacactcagtacaaatttggacataccaaggtgttcttcaaggctggcttgctgggaaccctggaagagatgcgggatgaccgcctggccaaactaatcacccggacacaagctgtgtgcagagggttcctcatgcgtgtggaattccagaagatggtgcagaggagggagtccatcttctgcatccagtacaacattcgctcattcatgaacgtcaagcactggccctggatgaaactcttcttcaagatcaagcccctcctcaagagtgcagagactgagaaagagatggccaccatgaaggaagaattccagaaaaccaaagatgaactcgccaagtcggaggcaaagaggaaggagctagaggaaaaactggtgactctggtccaagagaaaaatgacctgcagctccaagtacaagctgaaagcgaaaatttgttggatgctgaggaaagatgcgatcagctgatcaaagccaaattccagctcgaggccaagatcaaggaggtgacagagagagctgaagatgaggaggagatcaatgctgagctgacggccaagaagaggaaactggaggatgaatgctcagagctcaagaaagacattgatgaccttgagttgaccctggccaaggttgagaaggagaagcatgccacagagaacaaggttaaaaaccttactgaggaactctctgggttagatgaaacaattgcaaagttaaccagagagaagaaggccctccaagaggcgcaccagcaggccttggatgacctccaagctgaagaagacaaagtcaattctttgaacaaaaccaagagcaaactggaacagcaagtggaagacctggaaagctccctagaacaagaaaagaagctccgcgtagacctggaaaggaacaaaaggaaattggaaggagacttgaagcttgctcaagagtccatattagatctggagaatgacaagcaacagctggacgaaaggctcaagaagaaagattttgaatattgtcaacttcaaagcaaagtggaagatgagcagacactgggcctccagtttcagaagaaaatcaaagagttgcaggctcgaatcgaggagctggaagaggagatagaggcggagagggccacccgcgcgaagacagagaaacagcgcagcgactatgcccgggagctggaggagctgagcgagcggctggaggaggcgggaggcgtcacctccacgcagatagagctcaacaagaagcgggaggcggagttcctgaagctgcgcagggacctggaggaggccacactgcagcacgaagccatggtggccacgctgaggaagaagcatgcggatagtgtggccgagcttggggagcagattgacaacctgcagcgggtcaagcagaagctggagaaggagaagagcgagttcaagctggagatcgatgacctctccagcagcatggagagtgtgtcgaaatctaaggcaaatctggaaaaaatctgccgaaccctggaggatcagttaagtgaggccaggggcaagaatgaggaaattcagaggagcctgagcgagctgaccacacagaagtctcgtttgcagaccgaggctggtgagctgagtcgtcagctggaagaaaaagaaagcatagtatcccaactttccaggagcaagcaagcctttacccagcaaacagaagagctcaagaggcagctggaggaagagaacaaggccaagaacgccctggcgcacgccctgcagtcctcccgccacgactgtgacctgctgcgggaacagtatgaggaggagcaggaaggcaaagctgagctgcagagggcgctgtccaaggccaatagtgaggttgcccagtggagaaccaaatacgagacggacgccatccagcgcacagaagagctggaggaggccaagaaaaaacttgctcagcgccttcaagattccgaggaacaggttgaggcagtgaatgctaaatgtgcttcactggagaagaccaagcagaggctgcaaggagaggtggaggatctgatggttgatgttgaaagagccaattccttggccgccgctctggacaagaagcagaggaactttgacaaggtgttggcagagtggaagacaaagtgtgaggagagccaagcagagctggaggcatccctgaaggagtcccgctccttgagcactgagctcttcaaactgaaaaatgcctacgaggaagccttagatcaacttgaaactgtgaaacgggaaaataagaggttagagcaggagatagcagatctcacagaacaaattgctgaaaatggcaaaaccatccatgaactggagaaatcaagaaagcagattgagctggaaaaggctgatatccagctggctctcgaggaagcagaggctgctcttgagcatgaagaagccaagatcctccgaatccagcttgaattgacacaagtgaaatcagaaattgatagaaagatcgccgagaaggatgaagagatcgagcagctgaagaggaactaccagagaacagtggaaaccatgcagagcgccctggacgccgaggtgcggagcaggaatgaagccatccggctcaagaagaagatggagggggacctgaatgaaatcgagatccagctgagccacgccaaccgccaggcggcggagaccctcaaacacctcaggagtgtccagggacagctgaaggatacgcagctccacctggatgatgccctccggggccaggaggacctgaaggagcagctggcgattgtggagcgcagagccaacctgctgcaggccgaggtggaggagctgcgggctactctggagcagacggagagggcccggaaactggcggaacaggagctcctggactccaacgagagggtgcagctgctgcatacccagaacaccagcctcatccacaccaagaagaagctggagacagacctcatgcagctccagagtgaggtagaagatgccagcagggatgcaaggaacgctgaggagaaggccaagaaggccatcacggacgctgccatgatggcggaggagctgaagaaggagcaggacaccagcgcccaccttgagcggatgaagaagaacctggaacagacggtgaaggacctgcagcatcgtctggatgaggccgagcagctggcgctgaagggtgggaagaagcagatccagaaactggagaccaggatccgagagctggagtttgaacttgagggagagcagaagaagaacacagagtctgttaagggcctgaggaattattgagcggagggtcaaggagctgacgttcccagagtgaagaggacaggaagaatgtgctgagattgcaggatctggtggataaactgcaagtgaaagtcaagtcctacaagaggcaggcggaggaggctgatgaacaagccaatgctcatctcaccaaattccgaaaggctcagcatgagctggaggaggccgaggaacgtgcggatatcgcagaatctcaagtcaacaagctccgcgctaagactcgagacttcacctccagcagggtgagtcgctgagctgggaggagcccccctccagggactgtagaaacttcttagctggaaggaacctcagagaaccctttactttagagctggggagtctcaggctcaggaagagaaagtgcttaaagtcacttagctgactggaccctcgctagaatcctggtctgtgagtcacaataaaaaccgccatcctgcacatgtaccg

SEQ ID NO: 60868 - DNA, 1803 bp, Homo sapiens
ttttttttttttcaagtttgagaaatgtagttttattaatagaagggcatgtcttaccatacacactgtccccagataaataaaatcccaacatctttgaaagcacacaaacacacagttttacagggtacaatacaaagtgaactttgatgatgttcttacttgcatttactaaaaatctgagaaagactgtaatcagtctttaaataattatcttgacgtaaagagaaaaagtaggaggcacaatatatatatatcacaaaccaaatcacactctctggtaacatttacaacagggggatttacttaatccaaaaattaaaaggcaaactgggctggagggagggctggtatcattttttttctccaatatttacggctaaatttctatttttgggcatgaaatttattaaacctttttccattagtagggcaaatgtgctctgcaaattctcggatgggcaccacggccaccattacatttgcaaatgtatccaacagccttctgggcagtagaacaggcatcagcaggagcgccacttaggcccactctcttcaagcactcttcatcagacacttcatttccaagatatgccacttctttccagcacaggcccatttcttttctccattcatctacaactgctagcttgtctgatacactgacttccattttgcaatccagttttaaagaagacagcgtctgctttgaacaggccctttctgagattagcctcacctcaataccacttttctttaataaacttatcccaatagcatcttttacatcataagatattatttctttttggtctcctgatacataaatgtggccattggtgagacatccatcaatattgcaaaccaaaagttttatttccttaagcttctctttgccaaaatagccatatcttaatactctttgctctgcaataggccaatcaatatccacatctatatccacactatgttcagctcgcatttcgtagtatgccatttttccaccctgcaagtaacccatctctatcaaatgtcttttagcaaaataaaatgagccattttcatataattctccatcccagtcttgtcgacgaggccgtttagctggatttaaattcagaggttcggtcacttcacgaactcctttctgaatttcactccatcgaaactgatggcgtctcacaacagagaaaacagaatcatatccttcttctcgaatcatttctgcaactttttgaagatcagtaggatgtaaacatggagaagtagcttgaatatttcctacaatgtcaacctcattatgataattaagaaattctatgatggcatctagtgaggtagagctgtcttttgaaacttcagaacttcttcgatgaacttgtgcaccaaattgtttggccacattctcaatttcatcatggtctgtcgaaacccatacactctggaaggcccctgaatccagggccgcacgcaggacccagccaatgagcgggacccccgccaggtgcttaatgttcttcagggggatgcctttgctgcctccccgggccagaattagggctgccaggtgcgggggcttctccacacctcggccctggccgccgcgagagttgcgctgcagcttcggcggccggccccgggacggtcgcccccgcgggttggagacggaggtggcggcccccttctccaccgagtccatcttcctcccacgccttctccccagcttctccacatccgggagctagtccctcaccacctcagctcggcgccgcccctcgtgccaagcttggcgtgtcgatattc

SEQ ID NO: 60869 - DNA, 1447 bp, Homo sapiens
  misc_feature (1)...(1447): n = a,t,c or g
ccggcgccccacagcaagcccgagccgggggcgcaccagcctctggcagcccgcgccccccgccgcgattgacatgatgtttcccacaaagcaggcattcgggctcctcgcacctgagcccagcaactcaaattcaccacctcggactcctgcgaccgcattcaaagacgaatttcagctactgcgagctccagtaccacagccctccagctcgaatgtgacaagttggccagtgagaagtcagagatgcagcgtcacatatgtgatcgtactacgagatggtcctacggcttgaacatccaggattgcacaaacaggctgagatcgtcaaagggttgaccgggtatttggtgcccagctcctgccctacctttcccaaggagcaccagcagcaggtttttgggggccattgagagggccaagcaggtcaccgctccctgagctgaacgtctatcatcctgacagcagctccaagccccaccagctgtcccagcttgcatgccctggggcctgcccttggaccccattacccgctggggctgcaagtcgccttcgctgnccggcngttcagcgcaggcaccggcctcctctcgctgtccgagctgggttcccaggcccacctctccaaggaagacaagaacgggcacgatggtgacacccaccagggaggatgatgggcgagaagttcggatttagcagggggccgggacagggaggttgggaggggggacagaggggagacagaggcacggagagaaaggaatgtttagcacaagacacagcggagctcgggattggctaaactcccatagtatttatggtggccgccggcgggggccccagcccagcttgcaggccacctctagctttcttcctaccccattcccggcttccctcctcctcccctgcagcctggttaggtggatacctgccctgacatgtgaggcaagctaaggcctggagggtcagatgggagaccaggtcccaagggagcaagacctcgcgaagcgcagcagccccggcccttcccccgttttgaacatgtgtaaccgacagtctgcctgggccacagccctctcaccctggtactgcatgcacgcaatgctagctgcccctttcccgtcctgggcaccccgagtctcccccgaccccgggtcccaggtatgctcccacctccacctgccccactcaccacctctgctagttccagacacctccacgcccacctggtcctctcccatcgcccacaaaagggggggcacgagggacgagcttagctgagctgggaggagcagggtgagggtgggcgacccaggattccccctccccttcccaaataaagatgagggtactaaagttgtcttggtttttaattttattattatttttttctttttccagtatactagcttgtctttttaaggaaagggggatattaaaaaaaaaa

SEQ ID NO: 60870 - DNA, 1010 bp, Homo sapiens
  misc_feature (1)...(1010): n = a,t,c or g
ttttttgttccccttctacataaaaacctcagtcacccactcctgagtggagatgggcagaggctctggcccctgctcctctggcttctcagcagcgtgctttcttattgctgcagcaaggcttgaagagatgtgtgtcaatgaggacttccccaaaacggcctttatagatcgatcccacaacatatcttctgtcttttccagtaagtggagatctaaaaagggaaaaactgggtggttccggttagaaccngagaagcccacccctgtatctgagcccgtccatctgaactggttaactgtaaacaagggggattgagctgggggaggcactttgaggtggtactgtgagcatcagaattatgaccgtttaaattccttctgcagtttactgatctgggtgccttttaatcctgttcccagataagagttttcactttctttggtttcaatgtagtctttagaactgggtccagcccttgcatctaccacatgattccagttttttttttgatcctgctggcaacttcttccatcttttcaaaaagcaggacaccaggcattgccagatgtctcctgaaacgagtctcatgcaatccaaaacagctcttggaagtcctttttcatagcgtttactgtcagtgaatcggagaactggaggacttagctcctgaaataccagcacccctctatacttcggtacatctttggcttgtgaaaaccaaacatctttttctttctgggcaatagtaggcctggtctgaagtcttaggtcaaattagctgtccactcagatgttgtcaacttctcgtcctggtttcaggggttgaaggctgtttggtgaatcagagacagggatctttggtgggagtcatggtccattcaggaagttgtgccttccaaaagcaagccgttccacgcgcaataatgtccccgaggtgcggagtgcacgccaggccagtccccctcaagcgctccctcctcatcgactgccttgtctagaaagatag

SEQ ID NO: 60871 - DNA, 3579 bp, Homo sapiens
gcaagatggcggcggcgtggcgctgagaggcgcggcggcccctgcaggtagtggcgcgagccggctccgcgaccagcgggcccggagactctgggctgcgggtgggaactggagcgcagagtccgcggccggcacgggaaaggagaagacagactgctgctttggacctgttggtaatgatggcctgagctaaacatctaactagaagggatacccttccatttcaaagaacagaatgctaaggaagctgtggcaagtgattggagttgtgcttcaaaaatttcagaaattcagcagtattttatctgccaacaataagctctttacttgattgcaccatgagaaagctgctaatgagacttgttgagcacaaaaatggacttgaagaaccaaaagccattgttttcaaatgaagaacactgaacagttttaagcctcgatgctttttaatcaccactgagcttttcctcataacatcagaatggcaagcaggcgaaaatcaacaacaccttgcatggtccttgccagtgaacaagatccagaccttgagttgatatcagatttggatgaaggtcctcctgtgcttacacctgtagaaaacaccagagcagagagtatctcaagtgatgaagaggttcatgaatctgtggattcagacaatcagcaaaataaaaaagttgaaggtggatatgaatgtaaatattgtacttttcaaactccagatctaaatatgtttacttttcatgtggattcggaacatcccaatgtagtgctaaattcatcctatgtttgtgtcgaatgcaattttcttaccaaaaggtatgatgcactttctgagcataatctgaaatatcacccaggagaagagaattttaagttgactatggtgaaacgtaataaccagacaatctttgaacaaacaataaatgatctgacttttgatggtagttttgttaaagaggagaatgcagagcaagcagaatctacagaagtttcttcttcgggaatatctatcagtaaaactcctatcatgaaaatgatgaaaaataaagtggaaaataaacggattgcagttcatcataactcagttgaggacgttcctgaagagaaagagaatgaaatcaaaccagaccgtgaagaaattgtagaaaatccaagttcttcagcttctgaatctaatacaagtacttccattgtaaacagaatacatccaagtactgccagcacggtagtgacaccagcagcagttcttcctggattggcacaggtgataactgctgtatctgctcagcagaattctaatttgattcccaaagtcttaatccctgttaatagcattcccacctacaatgctgcattggataacaatccccttttacttaacacctacaacaagttcccttacccaacaatgtcagaaattacagttctttctgctcaagcaaaatatacagaggaacagatcaagatatggttttcagcccaacgtttaaaacatggtgttagttggactcccgaggaagtagaggaggcaagaaggaaacaattcaatggaacagtgcatactgtacctcagaccataactgttattcctacacacatttccacagggagtaatggtttaccatctattttacagacatgccaaatagttggtcagcctggtctggtccttactcaagtggctggaacaaacaccttgccagttacagcacctatagccttgacagtggcaggcgttccaagtcaaaataatatacagaaaagtcaggtacctgctgctcagcctactgcagaaacaaagccagcaacagcagcagttccaacttctcaaagtgtcaaacatgaaactgcattggtaaaccctgattcatttggcattcgggcaaaaaagacaaaagagcaactggcagaattaaaagttagctaccttaaaaatcagtttccccatgattcagaaattatcagacttatgaaaataacaggcctgacgaaaggagagattaaaaaatggtttagtgacacaaggtacaaccagagaaattcaaagagtaatcagtgcttacatctcaacaatgattcctctaccaccattattatagactccagtgatgaaaccacggaatccccaactgttggtactgcacagcctaagcaatcctggaatccttttcctgactttactccccaaaagtttaaagagaaaactgcagagcagcttcgtgtccttcaggcaagttttctcaacagctctgtacttacagatgaagaattaaataggttaagggcacaaaccaaacttaccagaagagaaatcgatgcttggtttacagagaagaagaaatcaaaagctttaaaggaagagaaaatggaaatagatgaaagtaatgcaggtagttccaaagaagaagctggagaaacttctcctgcagatgaatctggtgcacctaagtcagggagtacaggcaagatatgtaaaaaaacacctgagcagctgcacatgcttaagagtgcatttgtccggacacagtggccatcaccagaagagtatgacaagttggccaaagaaagcgggcttgctagaacagacatagttagttggtttggggacacccgttatgcttggaagaatggaaacttgaaatggtactactactatcagagcgccaattcaagtagtatgaatggtctgtcttcccttaggaaaagagggagagggagacccaaaggacggggaagaggaagaccgcgtgggcggcctagaggaagcaaaagaattaacaactgggacaggggaccatcactcataaaatttaaaactggaactgcaatacttaaggattattacctgaagcacaagtttcttaatgagcaagaccttgatgaacttgttaacaaatcacatatgggctatgagcaggtcagagagtggtttgcagaaagacagagaagatcagaattaggtatagaattatttgaggaaaatgaggaggaagatgaagttattgatgaccaggaagaggatgaagaagaaacagatgatagtgacacttggggaacctccaccgacatgtgaaacggaagctgtctaaatcagatgactgaaatctgcctaaaacgttgaaggagaatcaattcttcaactcaagatgtctgatttactgtgaatttgcccaatctttgatgacattgaaaacgttttggggcatacacactcaaaaagcaggatccaatacccaaaagaaatggaacttaatgttgtgccaaagttaaactactgcagttggtggaagttctgcaatgtaaatagaacactaattaaaaaacaacttgtaaaaatgcaatttaaattttaatacagtacatttttcttctaatatgatggagacattctgaatcttagactttctgagggggtttaatgaccactagagcttgtcctcatattcagtccagtttaatactgtatgtctagtaagatgggctatatattgcctctattctttgagatgtgattaagcttagaactttgaccaaaaattttacagtaaaaattgttaaaaatgggtaaaaaaaaaa

SEQ ID NO: 60872 - DNA, 1943 bp, Homo sapiens
ttttttttttttctttaattactttaatataaaagacagcagtttcacatttcacatatttgaaaaacatttcaaaaccctctaacaagtatttaatgaaaataaatttatcgaagagaaacaatgaccacaaaattaatactaccaaatcattactgagactttttgcattacaatatttggagagtaggtgaagaaaatatagaacagaacatgaacattttaaaatgatattccacccaagctttatctttttgctaaatcttgtggacactagaatatatattcaagatgttggtaaagatattcagcaagccatacttcaaagatgttaaaacagccctccaccaataatatggcattgcaaacccttctatcccatcccttttcagttaaaagagagaatattaacagagatttagtaatagtgaccaaaataagaaatcagtatagtcaagaaagatatgtaattattcaacatcatttggtacggatagatcaatgcaactcactaagtggacaacattgtgaggggagtgggtaacatgattcagagtcctgtgggtaaattcatatgcaataatcttattccaatcaatctgtaaagtaaaagcactacatccacattaacattataacatcttacagtaatataaaagccaaatcattgttggtacgtcattttctttaaagtgaacaatttaagaaaacttcacaagagtctgcactttggaaagatacgatcagagtacacagtagagacaaaacaggcatcttcattgtaattttttttaataaataaaagcacattaacaaaaaaggaaggtaagcagcaccggaagcctttgacgtttgtaactaaatgctggtactcaaatggtctagctggttaagtttcactaggaggcgcaaaaaaggagccgtttttgacttaacattttaattctagtagagataagaagagcttgtgtgggcttacagtccttcacctgactgtccttcaccagtgagtagcataccagttcttcaaatgtcctatactttggaaagcagacccgactctggagcactcgccttaattagattctgaatttccttgaattttggatggtccttatcagctaccagctgaagcagaacagcctcactcgtggtcactatgatcccggttcgagcgagacgctcgagggcaaacatcctgtccatcatgcttcttgatgaggtggcatcagcaacaatgtgaacctcgactcctcggccaactagctccagggcagtttgttggatgcacacatgagtttctactccaaataatacaacactcctgactccgggaatctctgctaatgccgcttctacttctggtaataccattgaaaacttggtctttggaagtaccagttttacacctgttaaatcaatttcttgaaccgtgctcccaagacctttagggtattgttctgttacaataacaggaattcctaaaatccgggccccttgcaacaatctctgtcccacgctaataatatccccaaaatacttgatggctggtctgaacctttcctgcatatcacagcagaaaaacacagtgcttgaaggtgtaagatttcccagggtagtgagctggatctgcagcggcacgaggcgcaccttgcagcgctcgctcaccgcgaagcccttgggcaagtccacgtactggccccactcctcggcgaacagctgcaccacgaatttgcggtgcatgtcgatctggtcgccgtacaggctgaggaacttctggatgagcagctcgtagcccgccccgtgtggcaccgacgagggtcgcgcgaagactgagaaacagaagagcaccgggactgtgcccgacggcgcccccgcgcccccggcgccgctgttggggagcgcaaggaccgccggctccgcagccgccatgttccacgaaa

SEQ ID NO: 60873 - DNA, 2062 bp, Homo sapiens
tttcgtgccggtccagagctgtggggtggcctccgcgcggtctctggcggagtcggggaatcggatcaaggcgagaggatccggcagggaaggagcttcggggccgggggttgggccgcacatttacgtgcgcgaagcggagtggaccgggagctggtgacgatggcggggccgcagcccctggcgctgcaactggaacagttgttgaacccgcgaccaagcgaggcggaccctgaagcggaccccgaggaagccactgctgccagggtgattgacaggtttgatgaaggggaagatggggaaggtgatttcctagtagtgggtagcattagaaaactggcatcagcctccctcttggacacggacaaaaggtattgcggcaaaaccacctctagaaaagcatggaatgaagaccattgggagcagactctgccaggatcgtctgatgaggaaatatctgatgaggaagggtctggagatgaagattcagagggactgggtctggaggaatatgatgaggacgacctgggtgctgctgaggaacaggagtgtggtgatcacagggagagcaagaagagcagaagccactctgcaaaaacaccgggcttcagtgtccagagtatcagtgactttgagaaatttaccaagggaatggatgaccttgggagcagtgaggaggaggaagacgaagagagtggcatggaagaaggggatgacgcggaagactcccaaggcgagagtgaggaagacagggctggagatagaaacagtgaggatgatggtgtggtgatgaccttctctagtgtcaaagtttctgaggaagtggagaaaggaagagccgtgaagaaccagatagcactgtgggaccagctcttggaaggaaggatcaaactacaaaaagctctgttgaccaccaaccagcttcctcaaccagatgttttcccattgttcaaggacaaaggtggcccagaattttccagtgccctgaaaaatagtcacaaggcacttaaagcattgttgaggtcattggtaggtcttcaggaagagttgcttttccagtacccagacactagatatctagtagatgggacaaagcccaatgcgggaagtgaggagatttctagtgaagatgatgagctggtagaagagaagaagcagcaacgaagaagggtccctgcaaagaggaagctggagatggaggactatcccagcttcatggcaaagcgctttgccgactttacagtctacaggaaccgcacacttcagaaatggcacgataagaccaaactggcttctggaaaactggggaagggttttggtgcctttgaacgctcaatcttgactcagatcgaccatattctgatggacaaagagagattacttcgaaggacacagaccaagcgctctgtctatcgagttcttggcaaacctgagccagcagctcagcctgtcccagagagtttgccaggggaaccggagatccttcctcaagcccctgctaatgctcatctgaaggacttggatgaagaaatctttgatgatgatgacttttaccaccagctccttcgagaactcatagaacggaagaccagctccttggatcccaacgatcaggtggccatgggaaggcagtggcttgcaatccagaagttacgaagcaaaatccacaaaaaagtagataggaaagccagcaaaggcaggaaacttcggtttcatgtccttagcaagctactgagtttcatggcacctattgaccatactacaatgaatgatgatgccaggacagaactgtaccgctctctttttggccagctccaccctcccgacgaaggccacggggattgacatcgcccacctccgacacccagtgggcgccttggctggtgcggctgctggtccagatggaggaaaccagtgactttatggggctgagctagtagggaagcccctggaaagatgctgcgttccgaacctgtgcctaatacacgcaagggcgctgtcccgcccaaccccgcctttaaacgccacaaataaagagcattgttaccgcccaaaaaaaaaa

SEQ ID NO: 60874 - DNA, 1860 bp, Homo sapiens
tttcgtggcggtgcactgcgccgccaccgtcaataggtggaccccctcccggagataaaaccgccggcgccggcgccgccagtccctctggctgagacctcggctccggaatcactgcagcccccctcgccctgagccagagcaccccgggtcccgccagcccctcacactcccagcaaaatgggcaaggagaagacccacatcaacatcgtggtcatcggccacgtggactccggaaagtccaccaccacgggccacctcatctacaaatgcggaggtattgacaaaaggaccattgagaagttcgagaaggaggcggctgagatggggaagggatccttcaagtatgcctgggtgctggacaagctgaaggcggagcgtgagcgcggcatcaccatcgacatctccctctggaagttcgagaccaccaagtactacatcaccatcatcgatgcccccggccaccgcgacttcatcaagaacatgatcacgggtacatcccaggcggactgcgcagtgctgatcgtggcggcgggcgtgggcgagttcgaggcgggcatctccaagaatgggcagacgcgggagcatgccctgctggcctacacgctgggtgtgaagcagctcatcgtgggcgtgaacaaaatggactccacagagccagcctacagcgagaagcgctacgacgagatcgtcaaggaagtcagcgcctacatcaagaagatcggctacaacccggccaccgtgccctttgtgcccatctccggctggcacggcgacaacatgctggagccctcccccaacatgccgtggttcaagggctggaaggtggagcgtaaggagggcaacgcaagcggcgtgtccctgctggaggccctggacaccatcctgccccccacgcgccccacggacaagcccctgcgcctgccgctgcaggacggtgtacaagatttggcggcattggcacggtgcccgtgggccgggtggagaccggcatcctgcggccgggcatggtggtgacctttgcgccagtgaacatcaccactgaggtgaagtcagtggagatgcaccacgaggctctgagcgaagctctgcccggcgacaacgtcggcttcaatgtgaagaacgtgtcggtgaaggacatccggcggggcaacgtgtgtggggacagcaagtctgacccgccgcaggaggctgctcagttcacctcccaggtcatcatcctgaaccacccggggcagattagcgccggctactccccggtcatcgactgccacacagcccacatcgcctgcaagtttgcggagctgaaggagaagattgaccggcgctctggcaagaagctggaggacaaccccaagtccccgaagtctggagacgcggccatcgtggagatggtgccgggaaagcccatgtgtgtggagagcttctcccagtacccgcctctcggccgcttcgccgtgcgcgacatgaggcagacggtggccgtaggcgtcatcaagaacgtggaaaagaagagcggcggcgccggcaaggtcaccaagtcggcgcagaaggcgcagaaggcgggcaagtgaagcgcgggcgcccgcggcgccgaccctccccggcggcgccgcgctccgaaccccggcccggcccccgcaccgcccccgcggcgcgcgccgctccggcgccccgcacccccgccaggcgcatgtctgcacctccgctttccagaggccctcggtcagcgactggatgctcgccatcaaggtccagtggaagttcttcaagaggaaaggcgcccccgccccaggcttccgcgcccagcgctcgccacgctcagtgcccgttttaccaataaactgagcgaccccaaaa

SEQ ID NO: 60875 - DNA, 898 bp, Homo sapiens
tgcataggcccccaattcccggttcgacgatctcgtggttgctggcaggccctggcccggacgtccaggggccgggaggctccaggcgatggagccggtctggggagacgccctgctggagaagtggccgggtcccggccgtgcgtgggccggccctgcgccacctgggtgacctcagacacctgggccttggacggcccggctgcccggcggccaacgcctgccctcccggcgccgcggcgggtcctggcggtggattggggccgacccgggcgtgttcgtgtggagcacctgccctgtgcccaacactatcctagatgctttggagggtggaggagcctcctgttgcacggtcttgcctaagaattaaacaaccaccatgtcgagcaaaaaggcaaagaccaagaccaccaagaagcgccctcagcgtgcaacatccaatgtgtttgccatgtttgaccagtcacagattcaggagttcaaagaggccttcaacatgattgatcagaacagagatggcttcatcgacaaggaagatttgcatgatatgcttgcttctctagggaagaatcccactgatgcataccttgatgccatgatgaatgaggccccagggcccatcaatttcaccatgttcctgaccatgtttggtgagaagttaaatggcacagatcctgaagatgtcatcagaaacgcctttgcttgctttgatgaagaagcaacaggcaccattcaggaagattacctaagagagctgctgacaaccatgggggggtccggtttacagatgaggaagttggatgagctgtacagagaagcacctattgacaaaaaggggaatttcaattacatcgagttcacacgcatcctgaaacatggagccaaagacaaagatgac

SEQ ID NO: 60876 - DNA, 3704 bp, Homo sapiens
  misc_feature (1)...(3704): n = a,t,c or g
ttttttttttttgaaaaaacggggtttatatgatgttttaaatctgcaaataggtcgttacacaaaagtttttttttgcttttaaataaatttcacacataagaaagagaaatatgaaagcgacggtagtgaccagccaagaggaataataattacattcatcttaatgtgtgtgtgcccagttcctgtttacattaacattgggaaaactccagacctggtaatccaggaacctcaaatctgttgagtgggaatgtcttgagatgggcccgtggaagtcaaagggtttctctttttttttttttccccttttagaagctatacataaaaagttgttttccttctgtactgtcacagaacttttacatacattctcagtcctagttgtgaaaggcctaaagagaaagagaactcaatttgcagtccaacacaacaggggggaatttctaaaataaataatccaacagtttttgcatttttttaaattaatttttcatttttttaaaataaaataaccaaaaaagtgtaaagttacaaaaaatgtcgttgaagaataatatattaaaactgtggaaaaaaaggaaaaagacacgtcacaaaattttaagattaatatgaagatcataatttaacataaaagaatatattccatgggatttgtcatcccggataaatatgaacaaaattaacaaaaaaaaagcatagtttgggccaataaatacggttttgaaaaggttaaaataagcttttttaatattggatgtgccagtgacaagcaaaatttttgctctcccaatttcctgaaagttatattgaagtttaaaacccagggaagaaagctgggcggntgagtgctctaaggatagacctacggtattctagagcaaaaaccacttaaagctacttctccaggaaatcgttttacacagatattgtatgtggaatgaataccattaactgctcaccccttactttttttttttttagcttttctctcatttttttttttgttgttattttttttaaaaagatgtcacatatgaactggggaactttagcaccaaaatcaagtctctcctagtccatctagcttccccttcctccccacttaaaaaaaagaaaaaattaaaatcacaaagtcccgacttaagtcaaaatcttcgtccgctttttcagccttccttcctgcagacctacacaaacccaggcaagattagtcaacaggggttcagatcgggaagaaaaaggttttgaatgtcaagacaggtttcccccaaaacccctggtctgggcaacaactcttccaaggggcaggggtggggggggtgggggggctggtacagggtggagaggtgccaccggggaagacggggaggaggaataagtgtgcgggagacttgaaatgagggaaggtgcagttgtgtcgccagtggagggggctgctggttccgggtctccaccccgccatgggcagaggctccggggaggcccacgggtgccctctggcgctgaagaaggtaatgtagtcacagtgacaaagttagattacaaggcactaagttgcttctgtaaactgttaactgctttttcctcttgtgaatttggcacttaaagccttaagcccggaaaaaaaaaggcatctactgacaaaatatgggacttgtctgttatgccatggtaagtgggctataaaatcccagggagggggtttcaagcccagaagaagctactgacaaattgacttgtccttatgttaggtggggttatgagggggagagggagggcacattctgaggtgctgggggaaaggggttgagccttaaccttgttaatgtagggcctgtggggaatgggatgggtagggagaagagggtatggggatgtggggtgcagggtaggggtctggagtaggcaggaggtccctccctaccctggcttagtcatctgagatggaaagtctgctgaagatgggcaggcgtcttgagttgtccaaggtcggggagtctgagccactgtggctgctgctggagctgctcaggtagccctcctggtccgagagagaatcctgagggctggggggagagtcaaacatgtgaggggactcggacatgggccggaagaggaaggtggtcggggagccacccccgggcagccccatgctaggggcaaagaggcttgccagctcctggctggagaaggcaaaaggggttattggtgccatcgggcagggtaggtgagcccaggaggtcatcggcgctcagaatagggggtggggtgatggacgtggggctgtccagcagcccggtggcagcggcggtggcagcggcactgggaaacccagcaaagctaaagctatgctggaggcggggacggtcagcggagaggtcccgggccccggccagggcacggcgctcttcagcgttgtggatgaagtggcagcggggcccgtaggggcaaaagccgatggtgtggaaggtgcggcacagctccgtcttgtacttggggtggcgggtcaggctgcggagctcgtggatgccgtgtgcgaactggcacttgtccccgtacttacaggcaccgttttcctcaaaggggcggcacagctccggtcttgtagcggctggagttgacctggccgcccccgggctgcttctgggtgggcagcagccgctcgcccccttccgagaaggagcggtctcggaagcggctgtctcgcgagctcagagcgggggctggctcacccttgaggctgctgaggagctggttctggcggaacttggagctgggcagggtgactgagtgcctccgagggaagcccccaccagcaggggtgcccactggctttctgggcaacaggtaaccccctgcactgggagcactatagttgagcatcttgttaccctggagagagaagagaaggatggtaaggacagaggacatccaccaggatgtccactatgggcagccccctacacaatcacaaacgcccgctctttctcaaagaactcatctctacctcggctctagcaagctcccttccctctctccctcccataggccattcacctgggtttattttggccccatgcgtaagaaaccacaagatccaaactgtgtgacaagcaccctgctccatgctgactcctgcaatgcaacccccatgtcctctgtccccaaagctaccactttaaagttcaacttttttactagtcaaatagattcttcaactcaaaatatctcacacaacccagacctctctagattaccgcacccgccccgccaccgcccgcgacaaaaacaggtaaacctcagaaaggagtctatcataggcacgttaggtccccttccaatcagtctctgcttaattgataccccctccttcaagacctggcctaagactctcaacttcctccttcagaagtgttcccttcctttggcaacaggttttcagactgcctttgctttttcttgtggggaggagattgggggcctggtctgaggttgggggagacagggatgtgattcctgaaaataaaactctttgccctaagttcccggaagagatattttctacaataatctctctcaccatttccactcagccctagcccaccccgcccccttcactgagaagatgcctttgcaattagtcttttggctgcaagagcaagcttggataagagctccagtgtttaatctttaacgca

SEQ ID NO: 60877 - DNA, 3624 bp, Homo sapiens
  misc_feature (1)...(3624): n = a,t,c or g
ttttattttggaattcagattttttatttttggctcttaggaagtagtcagcaaatactgtataatccctagtagggaaccatgtcataaaatatattgacatttctgcaacaaagaatcacactaaaaggaacacatcataattacccatagcttcctatcagtgtaagttcaggtcaggtttggtttcaaatgggttatgaaaatacttttggttttcagagcattgggactttggaaatgaggacctggatcatcctttattagggagaaatagccccaggagccacgtctcagcaattccatggaaacacaggtttctttgccttcaaaattccgttcctaccttctttgtcttccttcccccaaagaaactggacaaaaaaggtcagaactgtatttgttattcatacatttgcgttgatttaaatacattacgtacaatttctacattggattagaagaacgacacagggggcagcaacactctcgcagcccagcctccattccctgacactggaggcagggcctatggctggcagagggacggtgttccatgagtgccacccagaagcctcccccggcattctgggcccctggctcttccagagtccacattcaaggcaacctgagcacaggcttgagggagagtggagaaaggccaggaaaggatgcccacactcttgcctgccaggcccaggaccagctctctcctacactggacccaatttccttctgatcacagagctggtctggatcaagacaatgtggagatctggtgtggaggctgtggccaggtgaggcagccgggctccctgttagacccccaggctctcttgagcaccagatgggcactttaccaacaggtttgggtaaaaatgtctacagagagctatgcacacctgggtccccttctggctcctacagtcaaggggcaagtgttctctcgaacattgttcccaaggccagtgtccgagtcagctgcatgtgattgtcggggctgggattggggcaggcaggcgagctgtaccttcgtccacagggcatgcacatccagctctcagaaattcttcctgtcagccaggtggaagcccgggacaagtggactcttggtggctggactggaaggggaccggcggggaccagcctggaccagctgaccagagggctgcacatctctgctctgcagccgggcaagcagaggacatgcagccatagtcctcactccctttctttggttgtttttcaaaccttcaagatagttactttctgaggttgactgaccaatcgcaaggtgccagaattgtgaaatgtccagtagcacagggcatgaacacagctgcccctccagacacagatggcaccctttttactccctcctgaggccgtactttgctttggtgtagaaatggctcaaacacctggcaagtgggggtggggagtgaggcagcaggggaaaagacacatggaagcaagaagatacgcactgagctgcgcaggacctgggacagtttgaaggcctctctcctttgggcctcacctttctcagggaagccatagagaaatcggcctaggacaagtcagagagaaaagggaaactgccacttatgaggcagaatccacgtcctgttacttccaccaagcagcagcggtagcacagaaaaaagtccaagaacctaatagcctgtcctcttggaagccaagactcatcccagagcccttgcagagacccactcccgaagacaaactgaactcttacatcaaaagagttggggggaaaaaatttaaaacgagaggaacaaatgagaagattgggaccaaggactcaggaagcaaggtgggatatgttcacccatagaccacttagctcccggcatacactccggctgcgtggatcacttttacatgctgggagtcaacttcctattaaaatataaatgctaagactagctcttcctgcctctgcttgagaaacagacaagctgtaggccagcagagagcagagaggttctctatgattgtgtgcggaagtgctggcgggggtaaagcaaaaacctcccttccaggagaactgtttcgaggcttgcagccagcccacagcactgatgggagatggaggaggcttggcaaaaacccaaaagaaaggtgtggcttctgtctgtcccagtgctgtggtactgcgagtcatccagttgccctctgacaccaccttggctcatgggaggaagcaactgcaaggcagctgaatgtcaggtctatgcaaatttaggcctggattaaaggtttctgacatgagatgacccggggttctgctacaagcatttaaagttgtttttgttttgtttgtttttctgatgcagaatataatagggaattgcaatagagcagggtttcagggaaggaagggactgtcccagcctgctaccagcagatgctggaagggagatgttccttcccaggcatctggactacgtgcatggagctccagcctcccccacatcagaagggcgaggagcactcactgttcctgattgtgcttctccctgtgggtggaaagctctgagcagggtggcaagcagagagagagggctcttaaaggtgctgctctccaccggcttctctggcttttcctgcaccccactccccaggcttcctcccaccagtctctgacaatatttcctctgcctgcctctggagctaccaccatgaaaagaagggcttccggctctgaaagctctgtgtgtaggactcgctagaagaccgctggtgggaacgggccgtctcgacaatcacaggtggcatctggacgaggtgcaggggactcttgttgtctttcaaggcctgggtcagatttaagatctgggccccgcatgacagcaatctgcttatggaactggcccctgtcgaaaccaggatctttcttgaagagttcatataggtcctcttccaagtccttgacgaagttagggtccgatatctttggaaggatcagatctttgatctcctgagaaaatgggactttcgcctggggcaaccaggcccagtaaaaaggatatgccctccaggagtcaggatgcttcagtgggaaggccagcccattgtctatggcagccaccttgataacaggctccttcaccaccacccagtctgtgtcccgagagctagaactatccattggacagtcatatttaatcagccagttgtcattgcctcgatcagtgttgcggatgatgtaatccagcaccaacanccgctcaaactggagcagtagttgccggttagtgttctcaggaagaggttctgcttcaaaacgccgcagccaatagtctgcatctttgtagccttcaacaaagagctggaatgaaccaacctttggtggtagccctatgcggttaaaccgctgtccaacttttgacactttctgtagtgcaagccgcttgcccctggacttcactcggtcaatggcgctatagttgaaggtctcgctggccaggtatagtacctttgtacgggaaacaatgttgagttccagttattggtccaccaggctggcccctgcttctgagagatagccccggttaaggncaaggcacaaaactctcaagcagcaagcggacgcgtggg

SEQ ID NO: 60878 - DNA, 1956 bp, Homo sapiens
tttcgtaattcagtcctttcactgcaaccaaagagggtacaaactcatagaataatttaggcttttaagaagcccttaaaatgtttaatgatgcctgtattaaagtgtttttaaggacgtgagttttgtccaatgtaatattcaaccgttttgggagggggggattctgtactttacagataattgaaagatccgccatgatcgtttaagcattgcgttcttggtgttctataaactcccatgtagaatctgtttttttcccataggttgtgcatttctggctctcaaatagtcccagcagcactctcagcctctgccctgccaggccctgatgacacaggggttgctgacctaacggcacgttcatccctggaagaagaggtttaccatgtggatgtaaagattgaggagtatttcgcttttgacagaaaagaggatgatgatgaatgtcttgaacaaaaaccagctcagcccggtaggaaatggcgcgaactcggacttcctcctgtttccccgcgtgactgtgtcaaagatgccgtggcagcagaagtgtttgatcacgtctggacaaatatggtagaacttttggaagagctgattagaaaacactgggaaactacactcacagaagggaaaaaacagagagaaacattgaaagtggctggaaacagatttccgcacgtcctcgttccacgcgctcacgccgatggagccagtggccccccgtccggacacgccgaggctcacggcatctccctggcttctcgtctgaacctgccccagattcatcacttctccagcagtttttatagtgacatgaatggtgtcatgacaattcaagcaaaaccgcttcagcggagacctgcctattttgctgacagaacgcagaatgagaaggaggacaaagcatcgggtggaggggcaggtgctctctcctccgcaccgcacagactgggacgggcctcagacactcatggattatcaccttctgcaaagaaaacaccagtgccctggaggctgccttctcttgcttcagattcacagagactaaaaactcccaacatctatagtgacgaagttcttcggggaacaaaactgccgactggcgtggaccacatggcttccccactggttcaaacgtcacggagcaggttccccccgctagtcacggagaccagggggcagaatacagcagttcctggatgccgccttgtttcttacagaggaaggcatctacaaaaccgtgtgttgagtgccatgcctgacggtacagaacgatcgcgtcttcgagaaagaacagccaccctggaacggttgtcaaggcccagcacaacccacacgttccggcagtcggatacgcctcgaaaaagttcattgacacaaatggaatttgctgctcacacatggacaggtcaaagtattttgacaggttcacaatatgtgcctaaatgcttttcagaggacaactcttgactttcaagaggagattcccaagtgacatcttgaaaccacccctcccagaaccattggagcacctgtggcctcggcacactgcttatcacttgaaaaatggaggaacaagtgttatatttatctgtgtgtctgacagtgtgagatgttagaccgagagaaaagcaaacaaataaatcacttaatcttgaacactttgcactgtaaagagagtgaaagtcaaacccaccaagctgccttgctgaaagcatctccaaggttctgtaggctttgttcagaagcccctgatgtgtgtttgcagtccgtcattttatcaatgatacgcaaacataattagcatgtgtatgtactcacacactaattacatgtaagaatatattatctaggaatatgtcatttgtaactttgtactctgacgtattttctagtctcaccctattagtaattctgtcaaaatcctagacgctagtaaatattagtatttga

SEQ ID NO: 60879 - DNA, 2547 bp, Homo sapiens
ttttttttttttgtgagaaagctctttactgggggtacagcgaggaggagcaaggccatctccccctacctgcccccaccccctcctagggtcctggggtgagggggggtcttccctccaccggaccaccactgtctttggtacaataaatagaaaaaaagggggagaggggcccaagggtccagtccttagtggggagggagcggccaaaaccctctccttgacccccctgccccaggccccaatcagtgcaggcctcacccaccccagctgggtagcagcaattccagtcaaggagagagatgaggatgggagcccagggcccccagatgggggagggtatggcttcaggaggggccccagggagggggcagggtcacgagctggctgctgtgctctggggtacaccacggaggcccaggtgaggccccagagtggcagggtcatcaggaggcgggaggggtggacgacctccagtcatccgagtccggagggctgaggcagccgggtgctggggggcaggcgctgggtgaggtggggagcagtcagcagggccgcccaccaggctcacatccatcagctccgggggtggtggtgaggttggtgatgggggacgaccaaggtatcggggctgggggggtaactgggccccggtcccaggcagtgacgaggcagaggcaggggcttgatgtgtcttgtggggcacatcaccccctgcccagggccgcagcggctgggagggtgggacctgggggctgttcatctcacagtctgtgatagggggcccagggcccccacaatatcggttgctgtagcggtaggtccggttgtcactggaggagccactggagcctccagaactggagatggagctggcggtgctggaagaggggcaggtgtcgaggggcgcgggcgaggtggaggcactgctgcctgccgggcccgtgttggtggcctcgtcggccgtgcggcggaagaagccgtgctgcagagcccccagggggctgatgcgggcggcgggctcatactccagcatgcgcagcaccaggtcctggaagcggaggtagtcggcggggctgtggcccggctcccccgcccgccggcccccgggcccgcccgtctgcacgcccagcacctcctgcagccgccgtgtcccggggccctggtaatccttcctgagttctttcgtccttcgtagggtccagccacccccaggcagccgttcaaagtacttgcgagccttgggcgcctggtccagcatggcggccggtgggatgcccagcacctccacaatgcggttcatctggtcgacctcattggagccactgaagaggggctctccggtgtgcatctccacaaggatgcagcccagggaccacatgtcaatggccaggtcgtagggtgtgcccaggagcacctcaggtgagcggtagaagcggctctggatatactggtagatcctctggccaagctggcaggagctgccgaagtccacaatcttgatggcgttgcgcttggggttgcacagcaagatgttttcgggcttgaggtcgcagtgaatgatgctgagctcaggcgtggccagaaagagcagtgccgtgcagagctgctgcgccagcttccgggtcaggttcagcgagacgccgcggaagtgggtgttgcgcaggaggtcgtacaggttgtaggacagcagctcaaataccaagcacaagtgggttccggaacatgaagtgccgcttcaggtgtactatatagtacttcatctccgtgtcatgctggttcatcagctccagcagccgcagctcaatctgggcctggttcaggaaagcctttttgttcttgatgatcttgatggccacaagctcctgggtctgatgatcataggctttcaccacctggccaaaggagcctttgccaatgagcgagtcaatttcgtagcgctccagccagcgctcgccactgcgcacgatgtagtcatggttgtcgtcatcataaccatggttcaggaccttcttctccttcttgttgctcgaatcctggggtggcgcctgctgggcccgccgcttcttcttcgcatagtatacctcattgatgtgcttgtaggtcttgatgaggtccacagagagcttacgcagcggggctgaggttgcatcccggaaggccaggggcagcctccgaggcagtagccgcacatcaggcaatacctgcgtgtgctcctggggccctgggaagccagagaagggaccatggcccggtgggacggccatggtgggctcagagggccgcaggggagcgaggcctggagcgggagcccggccggggggcgccttcttgcatcctgcacctcggctgccaccgccgctgagacctgaaggagcgggcaaggggactcaaactgctcggggagcccgagctcagacctgcccactggctgagggtatccggcggacgcggcaagccagggccccgattacccagtaatgcaaccagcaaaatggcgaccacaacaaaccggcccccccacgccctggactccgcccccatccc

SEQ ID NO: 60880 - DNA, 1216 bp, Homo sapiens
ttttttttttttaaaccaatgccatattttattttcaaaattattagacttcaacagttaaatgactcagatgcagagcaaccattgggtaaattgtaatttttttattggaaaacaaatatacaacttggaatggattttgaggcaaattgtgccataagcagattttaagtggctaaacaaagtttaaaaagcaagtaacaataaaagaaaatgtttctggtacaggaccagcagtacaaaaaaatagtgtacgagtacctggataatacacccgttttgcaatagtgcaacttttaagtacatattgttgactgtccatattgttgactgtccatagtccacgcagagttacaactccacacttcaacaacaacatgctgacagttcctaaagaaaactactttaaaaaaggcataacccagatgttccctcatttgaccaactccatctaagtttagatgtgcagaagggcttagatatatccagagtaagccacatgcaacatgttacttgatcaattttctaaaataaggttttaggacaatgacagtaagataagggaagaaaacatggaggaatgaagtcctaattactatacatgcatatttttttgacagtagggagaaaccttttacagataagttacaaacaaagaaaaggcaaataaacaattttgtacaagaaatttaacacattctgtacaaggtcttcactttgctgtcatcatttgtacaaactcttcatagtttacttgaccatcaccatcaatatctgcttccctgatcatttcatcaacttcttcatctgttaacttctctcccaagggttgtcatcacatggcgaagttctgcagcactaatatagccattgccatccttatcaaacacacggaatgcttctctaatttcttcttcactggctgtgtcctttcatttttcttgccatcattgtccagaaattcagggaagtcaattgtgccattaccatcagcatctacttcattaatcatgtcctgtaactctgctttctgtgggattctgcccaagaggatctcattacaggtcccaattcctttgttgttatagttccatcaccatctttgtcaaatagtgaaaaagcttctttgaattctgcaagtctgctcttcagtcagtktgggtcagccaatgctgcaaagcggctaccgggttttcccgagacgcgaccacacaac

SEQ ID NO: 60881 - DNA, 4423 bp, Homo sapiens
gccgagagcgggtggctgagccgggacctcgcgtgattctcggaacccgaggagaagcggcgtccggggctatggctgtgactctggacaaagacgcttattatcggcgagtgaagagactgtacagcaattggcggaaaggagaagatgagtatgccaacgttgatgccattgttgtatcagtgggtgttgatgaagaaattgtttatgccaaatcaactgccttacagacatggctctttggttatgaactaactgatactatcatggtcttttgtgatgacaaaatcatctttatggccagcaagaaaaaagtggagttcttgaaacagattgccaacactaagggcaatgagaatgctaatggagcccctgccatcacactgctaatacgagaaaagaatgaaagtaataagagtagctttgacaaaatgactgaagccattaaagaaagcaagaatggcaagaagattggagtgttcagcaaagacaaattccctggagagttcatgaagagctggaatgactgcctcaacaaagaaggctttgacaaaatagatatcagtgcagttgtggcatataccatcgctgtaaaggaggatggggagctcaacctaatgaagaaagcagccagcatcacttctgaagtcttcaacaaattcttcaaggaaagagtcatggaaatagttgatgcagatgagaaagttcgacacagcaaactggctgagtctgtggaaaaggccattgaagagaaaaaataccttgctggggcagacccttctactgtggaaatgtgttaccctcctatcattcagagtggtggcaactataatctcaagttcagtgtggtgagtgacaagaatcatatgcactttggggctatcacttgtgccatgggtattcgcttcaagtcttactgctccaaccttgttcgcactttgatggttgatccttctcaagaagttcaagaaaattataactttttgctccagcttcaagaggagctgctgaaggaattaagacatggtgtgaagatatgtgacgtgtataacgctgtcatggacgtggttaaaaagcagaagccagaactgctgaacaaaattaccaaaaacctagggtttgggatgggaattgaattcccgtgaaggctccctagtaatcaatagcaaaaatcaatacaaacttgaagaaaggaatggttttcagcatcaatttaggattctccagacctgactaacaaggaggggaaaaagccagaagagaaaacctatgccctgtttcattggtgacacagtgcctgtggatgaggatggcccagctactgttctcacttctgtgagaaagaaagtgaagaatgtggggatgttcctaaagaatgaagatgaggaagaagaggaggaggagaaagatgaggcagaggaccttttgggaagaggttctcgggcagcattacttacagaaagaacaagaaatgaaatgactgcagaagagaagcgaagagcacatcagaaagaactagcggctcaactcaatgaagaagcaaagaggcgattgactgaacaaaagggagaacagcagattcagaaagctcgcaagtctaatgtgtcctataaaaacccatctctgatgcctaaggaaccgcatattcgggaaatgaagatctacatcgataagaaatatgagactgtaataatgcccgtgtttggcattgcaacaccgtttcacattgccacaatcaagaatataagtatgtccgtggaaggagattatacttacttgcgaatcaacttttattgcccaggcagtgctctgggcaggaatgaaggcaacatctttcctaaccctgaagcgacttttgtcaaggaaattacataccgagcatcaaatattaaggcacccggagaacagacagtaccagccttgaaccttcagaatgctttccgaattattaaagaagtacagaaacgttataaaactcgagaagctgaagagaaagagaaggagggcattgtaaaacaagactcactggtgatcaatctaaaccggagtaatccgaaactgaaagatctatacattcgcccaaatattgcccaaaagaggatgcaaggctcactggaggcccatgtcaatggcttccgcttcacatctgttcgaggagacaaagtggatattttgtacaataatattaagcatgctttgttccagccctgtgatggagaaatgattattgtcttgcactttcacctcaagaatgccatcatgtttgggaagaagcggcacacggatgtgcagttctacacagaagtgggagagataaccacggacttggggaaacatcagcatatgcatgaccgagatgacctctatgctgagcagatggaacgagaaatgaggcacaaactgaaaacagcctttaaaaatttcattgagaaagtagaggctctaactaaggaggaactggaatttgaagtgccttttagggacttgggatttaacggagctccctataggagtacctgcctccttcagcccactagtagtgcgctggtaaatgctacggaatggccaccttttgtggtgacattggatgaggtagagctgatccactttgagcgggtccagtttcacctgaagaactttgatatggtaatcgtctacaaggactacagcaagaaagtgaccatgatcaacgccattcctgtagcctctcttgaccccatcaaggaatggttgaattcctgcgacctgaaatacacagaaggagtacagtccctcaactggactaaaatcatgaagaccattgttgatgaccctgagggcttcttcgaacaaggtggctggtctttcctggagcctgagggtgaggggagtgatgctgaagaaggggattcagagtctgaaattgaagatgagacttttaatccttcagaagatgactatgaagaggaagaggaggacagtgatgaagattattcatcagaagcagaagagtcagactattctaaggagtcattgggtagtgaagaagagagtggaaaggattgggatgaactggaggaagaagcccgaaaagcggaccgagaaagtcgttacgaggaagaagaagaacaaagtcgaagtatgagccggaagaggaaggcatctgtgcacagttcgggccgtggctctaaccgtggttccagacacagctctgcaccccccaagaaaaagaggaagtaacttctgaactttggccctgagctccattcttcctccagccaacccctgaaaattttacatgacatagaaactgtatttttcctttcgttttcatttgaagttttgccatttgtgtttatgggtttagggggccatttgtgtggaccaatctactcggggaattccaggcccaccaggacacgtgccaatggccccattcagatggcaagggaggaggtgttcttgaagacaggaggaggctcccgctgttaataaatattggttcattcttctctcttcctgtcaccttctgccaagacattgatggcttctgacatcttatttggtgtctcaaagctgtatttccaagacagtggtacaaggtgacccttaattacccgtatcatggttcttgaccagcacattcaatcctccaacctaccctactgccatgaccttccgcacatctctaagttttatctttgcaatactcaaggttctcggaaatttgctaatggttgtgataaaccatacagcttgagccagtgaggcagattgggctggtgccttcgtctgagttttcctgctttcctgcctcgtgcagattctgaggtatatctgctgccttggaagacataagaagcagtgatactccctggctcggttattttctccatacaatgcacacatggtacaatgatagaaggcaaaattgccactgtcttcttttttttctcatatatctaaggaagatatatcaggttgtgcctcatgtaccgcttctagtgaaatgtagaggaaggctcaaaggagtcaacatttagatctggaagggacaagtcatgccttgggcctagaataccctgatgagaaaagagaagaggaagggaggccatatctacaacacagcctctcggcactgctgctccttattttaactttgtcttgcattgtcctgtatttatcacagtttctgttgaacagcttttcaagtatttggggagtttatcttgccatcctccccttctggttctctgcacccacctgtcccactgcagttccttccgtgctctgtgactttaagagaagaaggggggaggggtcccggattttatgtttgtttgttttttctccttagcagtaggacttgatattttcaattttggaagaactaaaagatgaataaactgggttttttttgttgtttgtttttgtaaaaaaaaaa

SEQ ID NO: 60882 - DNA, 2143 bp, Homo sapiens
ttttttttttttcaattaagggcagcatttaattactgttacaataaacgtttcttaaacccgaagagaagataaaggttgtttaaacagattcttttaatacaatgaatacaaaaaccagttgaagatggtacccccacgattacacagctttgaacaagtgaaactatggttaccaaacagctattttttattatagcatctacagtgtctggaaaaggatgtaacaataaataactgtagacgcatcacgagacatccatcttacttaattaccagaagtgggatcttgctacatagtttttcccaatgtcttcatatcttcagattctccagggcttacgaaatgtccatcaatcttcaaaatcattcctaacccatttggtgttgcaagagataatctgttggctttttgcccaatcaagggtttctatgaccatggctggttgcttccatatccatttgtcccccttgtggccaaacagtcggatgccaagagcaggggttcatctccttcacctgtctgggctcgggacttcgggtccataggtctgggatggggattcatggccactgggtttcagagaggggccatggggggatggacctccagtggcgtcgggcaaacgctcctcatgggcatactgtcttaaggtgggggcaccttagtgcgcgtcttggcttaactgccagggcacaggatatctcagcagccccctcctccatacaccacacgattatcgcggatgaggttccggatgacacacaaagcatcgtgaaagggatcgtttcgcctcctcaatgatcatcttatttcctcctctaataaaaatggttaccagctctggagttcttacactgctcgatgaccagcattttaatccttaggtgtccccaaatgagatcctcttgtccagaccagcaaagcccagcttctcggctgtgagctctgagaacctggggacgatccgccctcctgttgcgatggcaatcagctcaatttcaggtcctcctacccagcgaaccgcaggcaagttgttctgaagaagtaagtgatttgcttcatcatcaaagccccactgacaaattgctaggttagcaccagtctctttaatttgttgaatcatctcttcaaatttctccttttcggtatttctgaagggctttataatcttcgacagaggtcacatccagcttatgctttgtttttggtttgggtggttcaaatggacatgtgagaattgcaatcttcgcatcttccacttttttttttggcatctgtgggtgaactgaaatccttggtccacaatcacgcccttaatcagtttagtgtcctccagcctgccgcccaactttgccttctactttgataaagctcaaagtcaaacgtctctccggctccatatctgctacaattgaggacggcattcacaagcaatttcagccatctgtcggtgacaactgttgaccactttggagcccagcgtggtttttgctgtctgaatcaggggttcggtgtcctttatgtcaacaaggacgctatcgctgatcttgccaagggtgttcaatagcaacgcgagcagcctgctcatagccatcggctattctgattggggtgaatgcccctcgggcttagcaattgctccgcttcttctaacaaggcaccagccaggacaaccactcctgtggttccatctccaatttcatcatcctgagacttggacagttccaccatcagcttggcaatctgatgatcaacatccatcatgcttaagatggtggccccatcattagttacagtcacatctccatccttatccaccatcatcttatcaagcccatttggtccaagtgatgttctcattgtatttgctacagcctttgctgccattatatgagacttgagggcctcaagtcccataagacgggacttgcggtcctgatccttgatgatgaggaaagggcgcccatattcatcgaaggcgagggtccccatggacgccatggtgcaacaaccggaattacttccccccaaccggcggagaccgctacggaagcgagaatgcacttccctttctcgggagggcccaaaagcttgcgcacgcgcagcacaagacgcgctcgtgccgaattcgaatcgatg

SEQ ID NO: 60883 - DNA, 1316 bp, Homo sapiens
ccttttttatatatatatcgtatttataactggttacacgttggattcataattaggcatcaccagtagtagttggcacagttttgttatttaagctcagggtcaagttctgtttcattttgtcgttccaaagtacaaaaagaaaaaaaaaaatcaaaggcatttcatctccatggtgttttcttaaatacagtaatgtcataggaaacagtatgtacagatgagcagtgcctcctgacccctcctctgtctcttggagataggggctggggtccgatggagacgggtcaatgcggcctgctgctggactccgatgcctgcctcttgcgtgaaggggtgtagccgttgagacagccattggtctgccggtttggagggccctccattcaggatgtccctggatgtgctgcacgatgaggttgatgggcacccggattatctgcactctctagggatgatcacatcagcatacttcctttggtggcaagcagaattcctcaaagggcaggcttgacgaaacgtaatgtacttgaggataaaatctgctcaagatccctgcctctctcgctgatgtcctttaatactctgcgtgagagccgggtgtccgcatctgtatccacaaaaagcttcatctggaacaggtctcgtacctttcctgggagtagaaggccaggatcccttcaaagagcaccacgtctgcgggatagacagtaactgtctcctccttccgggaatgggagacaaagtcatacacggggatctggactgttttcccttcagtgatttctttgagtgttttgagaatgagttcattgtcaaaggcatccgggtggtcaaagttgaactggcccttcagggctttggccttctgctccgaggtaaggacacggtagaagctatcctggctcaggatgaccacctgcttctggcgatagtccacctcattctgccccaggagctgcacgatcttagcacacacggaagacttgccgctagctgttcccccgctgacgcctataaggaagggctcgccgccgttgggctgctggtggttctgcagggtctgctcgctgtccccggccatggttcggccgcccctcctcccgctgcctgtgcgaacggacgcacgctccccgcccgcgcccgcgtcggactccctccgctttccgcagccgacgctaggcgctgccggggctgacggacgtgtccgtcgcctgcgagccgctcggagcccggtgacggggctgggtttcccgaaggagccaagagccttccttctgcccgcagcggctggtccggtttacatcccaggcaga

SEQ ID NO: 60884 - DNA, 1470 bp, Homo sapiens
  misc_feature (1)...(1470): n = a,t,c or g
tttttgtacgattttaatctacagagtaaattattttatatacattggaaccagttaatgcccttagacaatgtatagttgtttcataaagcaggacagacaatgcagagggaaacaggtgcccaaaagcacagtcacagaggcttcagaaggtctagataccactacaaatcaatgctggagatcacttctaaaacaatcaacgttcaagaggaatgctttaatgtggagaaaataccacgccctccgtcccacccccaaacctcccccacttttttataaccttttcaattcactatcaaaagtcctggctcttcagatatactttaaactataaataaacactgcatagttctcttttgtttgttttgttttttgttttttgaaaaattattgcagtacaattactcctatttggaatttagtaaggagcaaacagcacaggagtgtgggcggtccgaatgggtccaggagctggccgcaggagtgccggaggaagcgcagaagtctggaacagtgttgctgctggagcagttcgaagactgaagggggaactcactgccactgctgctgcggctgctgcagctgctagaggatttggtagaattcgtggagccaatggctttgaaggttcttttgaaaatactaattttacccccagtggatgtgctgtcttctgtagtttgttgtaaggactgtatttaggtttcgggggcttcccagcagctctgtctttgtgccttctactgctaatgtgctgtttaagttgcgtttccgagttgacgtgcacatcacagatttcacagtgaaatgttttattttggaggcctgtgtttcctttattaacaggtcctttgcctttcactcctgccctaggaaaggctttgatagtgccacttccattccgggcttctaacatggttttgtgcttagtaccactgttgtgcgcctccagctgcgaggcagagttgacagcaaccttgcatagcgaacagtaaaagaagccgttttgccttttcttcctcggtctcagtagaaggacatgagctattgccagtggctgtcgttgggcttttttccactttagaggtgatctcagttgtcataacactgcttttgcggatttccacagttgtcgtcgttgatattgctggtgtccctgcagtaccgtctgttttgtcagagctggtattgatggtattggtagtgatggaggtgaaggtagtctttgcgctgtccttggcagttacagatttctgcttatttttcatggcttccagtgctttgagcttcttggcatgtttcgtgcctttgtagtgggccgcagcctggctatcagaattaaatctcaactggcaaatgttgcatgatatgatttgctttcttcggtggggaagaggaaccccgaatgtatggtttctcgtgccgaattcctgcagcgcggacgattntcaaanngngnnggcccca

SEQ ID NO: 60885 - DNA, 4176 bp, Homo sapiens
aaggtaagtataattttctgcttttattgaaaatttatatatgactcagtattgtaataaataaacataaccattttcacaaaaaatgacagtgctatgctaaagaagaaaatattaaatgggggatttacttgtagtggcaagacagactttttatcaatacagaataaatattaacagcatttcgtgagccaatggttgagacccaacaaaatgtagggaatcaagcatgatgtaagaaataattttccagagaaaaaaggatggtgtattctcggatgataagactgtctttgtaaactggggcatatcaattagtcccatcctcacagctcaccttcaaaccacagggcttgtttctggctatgttaaaaggaccctcctctgaggaaaagcagaggagaggaactcccattatccttacagtgaaacgcaaccactgcagaaaaactcccactgggtaaatagaacacagtttaataagtagattggatatgatctaactataaaatttaggtaacagagtaagtgttacatgtggcaggaccggaaaaaaatcatgacatttttcttatccccttgtacccctcccactgtcattatgctattaccaacaacaacaagaataatgtttcaaattttcctctcatcaaaaaatgagagaaaataacgagggaagtgtttttgttctttttcgaacagtttcttgaacacctccaataccaatcactcacaaggtgtctgtgcaaatctatttcacaggatttcaaggaaattgttaactcacaaaaaaatccttaaatgaagctattttggagttctgtatattatttggaaaggagggaggaaaagggtggtggtggtaaagtagaggtaaagtagtacaatccagccaaacaaaatgttaaaagttttaaatcaacaatgagtctgactttttctggtttgggaagcaagactctaaaatgttgggagagattctttctgatctgatggctactgaagaacacatttctcctctttcttggccatcttgcctttgttttgctccagagttcgctccaaatgctcatcttcttcttcggcctgcttctcctgcgcgtccaggtccctgacgagcgcatcgcgcttgttcaccagggccaccagctcatctagcagaagctgttcgcgtcgcttctgggcctcggtcttctgccagtcttcaatggctagcattgccctcaattcccggttcagcagctcataccgtcgttctaaatcatgttctttttccaaaagagagagctgattcattctccttattaaggcatttttcttattaactaacataaaccattcctgcatcatagcttcttcttcttctgtgttccttcctgtgtccatgagatagcgaaggcgcttctccaccagcgcggcacgggtgtcaatttgcttttgctcattctctagtgctgccaattctcctactacatactgactgggagtctttgaaccctttattaagcacttcatcttctgatggcttcctctgagtttcagttatcgctgccttctcctcatttcctttctttgtatcttcctgtattgatctctgccttttcatctctggtctattctcaatatattggctgaaagactgaagttgagtttttctgactgtagaatctttgctgaacacaacaggatttctaaaacgttctgttgttttttgtaatcgttcagtccggagatcttctgtgccacttttcatgtcctgctctgagctctcagttacagctttctgggcagcactggagggtgaatttgccacctgtggctgaacttctaggagcttcttcagcttcaagtccaccaacttactgttttgttcgggagtatcaaggtcattttctaagttagtaagttcatctccacctcctacaacaaagccttcagggatctcctcgttagtatctatctcaatattatcattttcatctccagatgcctttgacctttctttcaacttttctgcagccctttcaccatagctgggaagttctgacatcttccctccagatcgagcttctgctattagctgacgagctctctctctcagctgccgacgtcgctcttcatcttgctgatcacttagctgcctgttgcagaatggggcggctgtgttggtattgtgcttattccccgcctttaaggctgcatctcttcttgcttgctcaagcagaactcttgctctttccttaagttcttcttgtctagataacaatcgatgctggactatttttgatgaatgatctgcatgatttaaagtggttctatcagcatctggatcagactccgtctgcctcagggaagcatgttttttcttagcaaggtctagatctctactatatgagtatccaagtttagaagtaggagataaacttgtttttttgataggagattctggatctgatctgcattctaaggatctggaattctctaatttttctttctccaagttactaccgatgtctagagtttgaagcttttgttcatctgtctcctcacaaataaagggtggagacatatccttcttcttatcactaacatataagtcactcaattctaaagtctcagctttcaatagtctctttttgcctaacaaaacctgtgcttgggttgaatctgtattggaacatattccagggtcatcagatcctgaagtccttccagagctctgctgagacttctggggttctgtgtcacttttagtcctgcgacagtaaggggaggctgtgcttggactaaggtgatcatcaggagtttgatgctcactttctgactctccaaccccgctatcatttacaaatacagagtcatcctgtgataagaagtctactgctccgctgataggctgttgtagttcaggctcccgcttcagatcactaagctctgcatagaatttttcttgatcaacagaactgtttgtatctgtttcatagtttccaactttatatgtgcttttactgctgttttcctctatctgaacgacatttagttcttggccactgaaatgtgcccttatttgatagagataagtcataacagtcagtttatcaggaattgctaataataccatatcagaaggttccaataatcgggaaattcctatgctggcaaatccatcgtatgcctttttgttgttctctttaatatcttgaggattcagagacttgtagtcaattaaatctggtctaaagtggtgtaatattgcacaaaaagataaaccatttctccacgatgtagtaaaattggtgatttttactcctcggtagttctttgtaacttctttacaccatacaagcaaagactgactagcatttggctttcgccccaaaacaggacttggtatagggcttggcttaggagaagtagagagatcttttcctgcagaaactgtgttttcatttaatactcctgtttttggtgagaggactggtggagccggggcctttcttttcactcgcctttcagtttctagttcttgaacaggatttaccaaattatttggaggaggagttgatttaggttcataaaaaggatttgattcatccaattcttcttcttcagttttagaactatcagcatagaggtacttgctcatatccacaggtcttatattttttttttttgtagactggggaggagaatcctttatggtcacaaatgcttctggctcatcgaatgggttcaaatactgtggagtctgcacctctttaaagggattatagctgttattataaaaagagtcttctgtttttctaggtgaagctgtttcagtgataggttcttctgagtcaggatctccaaatggatttaattctgcagcatcaggatcatcaaatggatttgaattcacggtggccaagtccttttctgcttcatccaaaaagttaagtttgttgataagctctgtaattttagctgccttttcttcttggttcactctgttctcatcatcatcttcattatcttcttcgaagtcatctaaattggccaatgtcagcctggcttcatactcatccaactaggccaacctttgcatgtcttcatctgtggcttttccttccctgtgaaaaatgcaagataatgaaaactgaagagcggcagatacaacttttttagataatggct

SEQ ID NO: 60886 - DNA, 1382 bp, Homo sapiens
ggcgcagagtcgcggccgccagctaggggcgcgggaaggcggggctcggatgcaatcgggacctcctcctggactgggccgggggcggactccgggacccagggcgccgggagccggcgggctacctgcgagtcgagttagcgttgtcgccgaaccgaagcctcgctcgccatgggggaggtggagatctcggccctggcctacgtgaagatgtgcctgcatgctgcccggtacccacacgccgcagtcaacgggctgtttttggcgccagcgccgcggtctggagaatgcctgtgcctcaccgactgtgtgcccctcttccacagccacctggccctgtccgtcatgttggaggtcgccctcaaccaggtggatgtgtggggagcacaggccggtctggtggtggctggttactaccatgccaatgcagctgtgaacgatcagagccctgggcccctggccttgaaaattgctgggcgaattgcagaattcttccctgatgcagtacttattatgttggataatcagaaactggtgcctcagcctcgtgtgcccccggtcatcgtcctggagaaccaaggtctccgctgggtccctaaggataagaacttagtgatgtggagggactgggaagagtcacggcagatggtgggagctctactggaagatcgggcccaccagcaccttgtggactttgactgccaccttgatgacatccggcaggactggaccaaccagcggctcaacactcaaatacacccagtgggttggtcccactattggaaccgggccccgctggccctggctcaggcatttccatttccattagtgggaccaacccactgggtgatttgagtgttgagccgctggttggtccagtcctgccggatgtcatcaaggtggcagtcaaagtccacaaggtgctggtgggcccgatcttccagtagagctcccaccatctgccgtgactcttcccagtccctccacatcactctgaaatagtaacccccatggaggtcaaacagcaagtagtgggtccagacacagacttaacagagattgggtctagagaaagacccttggggcagggccaaggacagaggagacccaggagccttgggcttctaagaagaggtagagggagtggggtactcacaagttcttatccttagggacccagcggagaccttggttctccaggacgatgaccgggggcacacgaggctgaggcaccagtttctgattatccaactgagtggacaaagatgggcaagtggcctgcggggatcgggcctgctggatgcttgatgcacgactgcttgatgcttgagtgctgtgggagacaggtgctcagatattgctgcccctgggggacacctcaa

SEQ ID NO: 60887 - DNA, 1931 bp, Homo sapiens
acttgacggcactgcgctgcacgaattcggcacgagctgcagccctggtgcgacccggcccgttgccgtagagatgggcagggctggatggagtggggtgcggtgagctgagctgaccctgcttcgccacggggactgcagtgaccccggcttgccggcagggcgggtaacaggttgagccagggtggggctgctcaggggcgtggagccgaggccaggatttctctgaagacccggcacaggctattcctttctgcgacgagcccattgctatggaaaccaaagcgttaggccagcggggattgaggctgcgggatcatgacgggtctctctcccgaagaaccttgcctaaggcttccccaagcggctacttcctgagcgaacccgcccacccgcctgaaggagagagttttccatggacacagcctagcagaaagacgcagccttcgtgcttcgctgactgctgaccactgacccaccgccttgatgacagcaccctcgtgtgccttcccagttcagttccggcagccctcagtcagcggcctctcgcagataaccaaaagcctgtatatcagcaatggtgtggccgccaacaacaagctcatgctgtctagcaaccagatcaccatggtcatcaatgtctcagtggaggtagtgaacaccttgtatgaggatatccagtacatgcaggtacctgtggctgactcccctaactcacgtctctgtgacttctttgaccctattgctgaccatatccacagcgtggagatgaagcagggccgctactttgctgcactgtgctgctggtgtgagccgctcagctgccctgtgcctcgcctacctcatgaagtaccacgccatgtccctgctggacgcccacacgtggaccaagtcatgccggcccatcatccgacccaacagcggcttttgggagcagctcatccactatgagttccaattgtttggcaagaacactgtgcacatggtcagttccccagtgggaatgatccctgacatctatgagaaggaagtccgtttgatgattccactgtgagccatcccacgagcccctgcattggagtcagaggtacagatctattgttgatcttacaccaagatccaaacttgaacattctacttttgttgatacagaaaaaaacagatgatgccttttatgagcacaaaaaagagttgctgtagcttttaactttataatccattttttttaagattaaactaattgtgagatggtgaagataaattttctgccctgtgagtgacactggccaggggataggttgaggcagatggtgcccagaagaaagagggcagcacccattgcacatggcaggcctggaatcctgcagccctccccaaaaacagattgacccaggaatgaatctgctacaattccacctcattctttcacacccagagccagagccttaagcatcatggtacctcttgcgcttcttacagtgagtgccaatctactagataaatggccttcaggcaggtgctccaggaatcctgggggggtcccagggccacctctggtttccaccttcactataagtgggcccagttctggttttctagattgtacttatgcataagatagtttttaaagaaagcattccactgtgtaaatttttttttgtctttttttgaaactgtcctgctctgtcacccatcctggggtgcagtagtgtgatcatggctcgctgtagccacaacctctcaggctcaagtgatcctcttaccttagcctcctgcgtggctgggactgcagatgtttgccaccatgcccgccccattttttttcttttttttatagagatgagattttgctatgtcgcccagactggtctcgaactcctggcctcaagcaatcctcacgcctcagcctcccaaagtgttgatgagccact

SEQ ID NO: 60888 - DNA, 4213 bp, Homo sapiens
caggacagggaagagcgggcgctatggggagccggacgccagagtcccctctccacgccgtgcagctgcgctggggcccccggcgccgacccccgctcgtgccgctgctgttgctgctcgtgccgccgccacccagggtcgggggcttcaacttagacgcggaggccccagcagtactctcggggcccccgggctccttcttcggattctcagtggagttttaccggccgggaacagacggggtcagtgtgctggtgggagcacccaaggctaataccagccagccaggagtgctgcagggtggtgctgtctacctctgtccttggggtgccagccccacacagtgcacccccattgaatttgacagcaaaggctctcggctcctggagtcctcactgtccagctcagagggagaggagcctgtggagtacaagtccttgcagtggttcggggcaacagttcgagcccatggctcctccatcttggcatgcgctccactgtacagctggcgcacagagaaggagccactgagcgaccccgtgggcacctgctacctctccacagataacttcacccgaattctggagtatgcaccctgccgctcagatttcagctgggcagcaggacagggttactgccaaggaggcttcagtgccgagttcaccaagactggccgtgtggttttaggtggaccaggaagctatttctggcaaggccagatcctgtctgccactcaggagcagattgcagaatcttattaccccgagtacctgatcaacctggttcaggggcagctgcagactcgccaggccagttccatctatgatgacagctacctaggatactctgtggctgttggtgaattcagtggtgatgacacagaagactttgttgctggtgtgcccaaagggaacctcacttacggctatgtcaccatccttaatggctcagacattcgatccctctacaacttctcaggggaacagatggcctcctactttggctatgcagtggccgccacagacgtcaatggggacgggctggatgacttgctggtgggggcacccctgctcatggatcggacccctgacgggcggcctcaggaggtgggcagggtctacgtctacctgcagcacccagccggcatagagcccacgcccacccttaccctcactggccatgatgagtttggccgatttggcagctccttgacccccctgggggacctggaccaggatggctacaatgatgtggccatcggggctccctttggtggggagacccagcagggagtagtgtttgtatttcctgggggcccaggagggctgggctctaagccttcccaggttctgcagcccctgtgggcagccagccacaccccagacttctttggctctgcccttcgaggaggccgagacctggatggcaatggatatcctgatctgattgtggggtcctttggtgtggacaaggctgtggtatacaggggccgccccatcgtgtccgctagtgcctccctcaccatcttccccgccatgttcaacccagaggagcggagctgcagcttagaggggaaccctgtggcctgcatcaaccttagcttctgcctcaatgcttctggaaaacacgttgctgactccattggtttcacagtggaacttcagctggactggcagaagcagaagggaggggtacggcgggcactgttcctggcctccaggcaggcaaccctgacccagaccctgctcatccagaatggggctcgagaggattgcagagagatgaagatctacctcaggaacgagtcagaatttcgagacaaactctcgccgattcacatcgctctcaacttctccttggacccccaagccccagtggacagccacggcctcaggccagccctacattatcagagcaagagccggatagaggacaaggctcagatcttgctggactgtggagaagacaacatctgtgtgcctgacctgcagctggaagtgtttggggagcagaaccatgtgtacctgggtgacaagaatgccctgaacctcactttccatgcccagaatgtgggtgagggtggcgcctatgaggctgagcttcgggtcaccgcccctccagaggctgagtactcaggactcgtcagacacccagggaacttctccagcctgagctgtgactactttgccgtgaaccagagccgcctgctggtgtgtgacctgggcaaccccatgaaggcaggagccagtctgtggggtggccttcggtttacagtccctcatctccgggacactaagaaaaccatccagtttgacttccagatcctcagcaagaatctcaacaactcgcaaagcgacgtggtttcctttcggctctccgtggaggctcaggcccaggtcaccctgaacggtgtctccaagcctgaggcagtgctattcccagtaagcgactggcatccccgagaccagcctcagaaggaggaggacctgggacctgctgtccaccatgtctatgagctcatcaaccaaggccccagctccattagccagggtgtgctggaactcagctgtccccaggctctggaaggtcagcagctcctatatgtgaccagagttacgggactcaactgcaccaccaatcaccccattaacccaaagggcctggagttggatcccgagggttccctgcaccaccagcaaaaacgggaagctccaagccgcagctctgcttcctcgggacctcagatcctgaaatgcccggaggctgagtgtttcaggctgcgctgtgagctcgggcccctgcaccaacaagagagccaaagtctgcagttgcatttccgagtctgggccaagactttcttgcagcgggagcaccagccatttagcctgcagtgtgaggctgtgtacaaagccctgaagatgccctaccgaatcctgcctcggcagctgccccaaaaagagcgtcaggtgggggccacagctgtgcaatggaccaaggcgagaaggcagctatggcgtcccactgtggatcatcatcctgagccatcctgtttggcctcctgctcctaggtctactcatctacatcctctacaagcttggattcttcaaacgctccctcccatatggcaccgccatggaaaaagctcagctcaagcctccagccacctctgatgcctgagtcctcccaatttcagactcccattcctgaagaaccagtccccccaccctcattctactgaaaaggaggggtctgggtacttcttgaaggtgctgacggccagggagaagctcctctccccagcccagagacatacttgaagggccagagccaggggggtgaggagctggggatccctcccccccatgcactgtgaaggacccttgtttacacataccctcttcatggatgggggaactcagatccagggacagaggccccagcctccctgaagcctttgcattttggagagtttcctgaaacaacttggaaagataactaggaaatccattcacagttctttgggccagacatgccacaaggacttcctgtccagctccaacctgcaaagatctgtcctcagccttgccagagatccaaaagaagcccccagctaagaacctggaacttggggagttaagacctggcagctctggacagccccaccctggtgggccaacaaagaacactaactatgcatggtgccccaggaccagctcaggacagatgccacacaaggatagatgctggcccagggcccagagcccagctccaaggggaatcagaactcaaatggggccagattccagcctggggtctggagttgatctggaacccagactcagacattggcacctaatccaggcagatccaggactatatttgggcctgctccagacctgatcctggaggcccagttcaccctgatttaggagaagccaggaatttcccaggaccctgaaggggccatgatggcaacagatctggaacctcagcctggccagacacaggccctccctgttccccagagaaaggggagcccactgtcctgggcctgcagaatttgggttctgcctgccagctgcactgatgctgcccctcatctctctgcccaacccttccctcaccttggcaccagacacccaggacttatttaaactctgttgcaagtgcaataaatctgacccagtgcccccactgaccagaaaaaaaaaa

SEQ ID NO: 60889 - DNA, 3439 bp, Homo sapiens
ggcttatagggctcgagcggccgcccgggcaggtatagaattcagcggccgctgaattctagggttttcaggagcccgagcgagggcgccgcttttgcgtccgggaggagccaaccgtggcgcaggcggcgcggggaggcgtcccagagtctcactctgccgcccaggctggactgcagtgacacaatctcggctgactgcaaccactgcctccagggttcaagcgattctcttgcctcagcctcccaagtagctgggattacagattgatgttcatgttcctggcactactacaagattcatactcctgatgctactgacaacgtggcttctccacagtcaccaaaccagggatgctatactggacttccctactctcatctgctccagccccctgaccttatagttgcccagctttcctggcaattgactttgcccatcaatacacaggatttagcatccagggaagatgtcggagcctcagatgttaattttctaattgagaatgttggcgctgtccgaacctggagacaggaaaacaaaaagtcctttctcctgattcaccaaaaaataaaatactgactaccatcactgtgatgagattcctatagtctcaggaactgaagtctttaaacaaccagggaccctctgcccctagaataagaacatactagaagtcccttctgctaggacaacgaggatcatgggagaccacctggaccttctcctaggagtggtgctcatggccggtcctgtgtttggaattccttcctgctcctttgatggccgaatagccttttatcgtttctgcaacctcacccaggtcccccaggtcctcaacaccactgagaggctcctgctgagcttcaactatatcaggacagtcactgcttcatccttcccctttctggaacagctgcagctgctggagctcgggagccagtatacccccttgactattgacaaggaggccttcagaaacctgcccaaccttagaatcttggacctgggaagtagtaagatatacttcttgcatccagatgcttttcagggactgttccatctgtttgaacttagactgtatttctgtggtctctctgatgctgtattgaaagatggttatttcagaaatttaaaggctttaactcgcttggatctatccaaaaatcagattcgtagcctttaccttcatccttcatttgggaagttgaattccttaaagtccatagatttttcctccaaccaaatattccttgtatgtgaacatgagctcgagcccctacaagggaaaacgctctccttttttagcctcgcagctaatagcttgtatagcagagtctcagtggactggggaaaatgtatgaacccattcagaaacatggtgctggagatactagatgtttctggaaatggctggacagtggacatcacaggaaactttagcaatgccatcagcaaaagccaggccttctctttgattcttgcccaccacatcatgggtgccgggtttggcttccataacatcaaagatcctgaccagaacacatttgctggcctggccagaagttcagtgagacacctggatctttcacatgggtttgtcttctccctgaactcacgagtctttgagacactcaaggatttgaaggttctgaaccttgcctacaacaagataaataagattgcagatgaagcattttacggacttgacaacctccaagttctcaatttgtcatataaccttctgggggaactttacagttcgaatttctatggactacctaaggtagcctacattgatttgcaaaagaatcacattgcaataattcaagaccaaacattcaaattcctggaaaaattacagaccttggatctccgagacaatgctcttacaaccattcattttattccaagcatacccgatatcttcttgagtggcaataaactagtgactttgccaaagatcaaccttacagcgaacctcatccacttatcagaaaacaggctagaaaatctagatattctctactttctcctacgggtacctcatctccagattctcattttaaatcaaaatcgcttctcctcctgtagtggagatcaaaccccttcagagaatcccagcttagaacagcttttccttggagaaaatatgttgcaacttgcctgggaaactgagctctgttgggatgtttttgagggactttctcatcttcaagttctgtatttgaatcataactatcttaattcccttccaccaggagtatttagccatctgactgcattaaggggactaagcctcaactccaacaggctgacagttctttctcacaatgatttacctgctaatttagagatcctggacatatccaggaaccagctcctagctcctaatcctgatgtatttgtatcacttagtgtcttggatataactcataacaagttcatttgtgaatgtgaacttagcacttttatcaattggcttaatcacaccaatgtcactatagctgggcctcctgcagacatatattgtgtgtaccctgactcgctctctggggtttccctcttctctctttccacggaaggttgtgatgaagaggaagtcttaaagtccctaaagttctcccttttcattgtatgcactgtcactctgactctgttcctcatgaccatcctcacagtcacaaagttccggggcttctgttttatctgttataagacagcccagagactggtgttcaaggaccatccccagggcacagaacctgatatgtacaaatatgatgcctatttgtgcttcagcagcaaagacttcacatgggtgcagaatgctttgctcaaacacctggacactcaatacagtgaccaaaacagattcaacctgtgctttgaagaaagagactttgtcccaggagaaaaccggccatgccaatatccaggatgccatctggaacagtagaaagatcgtttgtcttgtgagcagacacttccttagagatggctggtgccttgaagccttcagttatgcccagggcaggtgcttatctgaccttaacagtgctctcatcatggtggtggttgggtccttgtcccagtaccagttgatgaaacatcaatccatcagaggctttgtacagaaacagcagtatttgaggtggcctgaggatctccaggatgttggctggtttcttcataaactctctcaacagatactaaagaaagaaaaggaaaagaagaaagacaataacattccgttgcaaactgtagcaaccatctcctaatcaaaggagcaatttccaacttatctcaagccacaaataactcttcactttgtatttgcaccaagttatcattttggggtcctctctggaggttttttttttctttttgctactatgaaaacaacataaatctctcaattttcgtatcaaaaaaaaaa

SEQ ID NO: 60890 - DNA, 6191 bp, Homo sapiens
ttttttttttttaagaaacaatatattttatttttctgacaccacagctctggcgagtggttttgtaccaaatttaatggaggttacacagaacgtcttacgcatgggagggggaggaaagggaaggaaccacaaaatttaaaacaaacagaaaccaaattcctggatagcttttagcatctgtcccactcccacattaataaaattcacttgggaattcctaataaaaggaaaacaaaaaacaaggtggggcagggaagggtatgatgggaaaggagaaagacttagggggaaaaaagaccagagagcatcccaaggacagacctttccctctcagagccaagaggacgctcggcatggaaggcgaggctttgctagatttatttccccaaaataacactgtgtattgcagctgccaaagggaaagagagagggaagcagagggtcaccagcggggggcacaaaggaaggaaacacttaactgaggagacagagcaaaatcggagagagaaacagagaaaatgtgccagtgggttggtatattgggagacaagacagtgctgaagagcacttgaactgaaaaacaaatgtcctaagagtcattatttttcaaaagaaaaatctcccccctccccccacccctcgctgaacttagttcctttttttgtgcttttcattaatactctgctctgaggtcgtagtttggtttttctatacactgcagttgaaagaaaatagtccaaaggtctgaagatggattctccacctaaagtaaacagcccagcattcctgttctcctcttgccccaaagactaaagtctctgctaaaatcccttttacaatatagtacagtacacagaaaaaaataaagcccaaatcaaaaaaacaaaaacagaaaagaatcctgggagaagccagtccaaaggacgtaaacatacagagaacggtgcaacacatgaccgatggcaattctcaaagcacagctacagattcccaaaagtaggtgccatcattgatacccaagtccacaaaaataatttttaaaaaataaatcttaaaaaaaacacacctgttgattaaatgaataatttgttttcaggtaaatccatacattctcgagttcccccctcccccaaagcagccctcgggtctctgttctcctattgcatgaccaatagtaagtactcctggaactccctcaaagcagctctcaggacctggaatctcatcttgacaaggatcggcacatcccatcttagcagcttaaaacatcatgtttcctgggttgccaggtccttggctaaatccacccatgcccacgtcagcagccatgccccggggcctcatctgtggggggatcatgatgttctgttggggtcccatcatgccctgcatggacatcatcatgcctggagagcccacaggcccagggtgggtgtagagcccggcaggcccccgatccttgccaggaatcatgcccacggcagcagctggattgctcatcagggtgggctggccgggcattgtagattgtgctggtgacatcatccgatggtgaggtcccatcatgccttgttggagaaaggctggtggtctcatggggttgtggcctggcatggatggagctgtaccaagagggatgtccggagttcccactggccctggacctcccatgccaggtaatgctagtcccattctgggggcttgttcgcccatcatcccctgcatgtgtgaaaacccaggtccaggaccctggggctgtttacggcctggaacttcccctcgagggaaatattgcagcgtctggctgggcttctcagatggaataatgcgggatagatcaaactcaggtattccggtggctccaggtcggatgacctcctgcagatctgggtctgtaaacaccgaaggcatgctgttccccaggacagtgaaggagtcaggacccccggggcctccaggcttgcaaagtgctgcatctgctgaactttggggcaggttgctggggcggccaagggggccttctcctgggaaacccatccctcctgggaagctgccctgccccccactggggccattgtgagggaatggaacctgctgtgggggagactgtactggagggaagccctgggggaagcccatccgtccttgaggtaccatcggtggctcttgggacccatgccccatgataggattgtgtgacatcaagccaggccccattgggaccccatgaggaggtatgttgggtcccacggcatttggagagggcatctgattggagtgagaaagtggctgggtcattcccattgggctgagggttggcatcggaaccacggggtttggacctgaaattcgaggattctgtgtattaatgcccattcctggcatattattcattgatggcaagttgggagaacgagctggaggggagtcgtcatctgagctggccacagtcttgatagcatcatggttataaccggggttggaaactgggccattgcaaacttggacattccgagacatccataatagagagtgggttctgggaaagggttggctctggaggcatggtataaggtgtactagagggaagacttcccagggatattcacagaggcaggctggctggctgtaggaggtggggggccacctgactctacatttcccagcatggctggggaggccatggtgaggggtgctttatggtttggagggatcccaggactctgaaggggaggctctggagaagaggtccatccaggtgacggggcaggaagtgatggagacttgaggtggacaggtgaagcagcagcagaccccaaaacagggggggacttaatggaagcagcagcagctgggcccgccagcatgcctgccagctgcgatggagtctggggggacttgaggttccccgagggcgagcccagcattggtgactggacttggtgcatcgtgggagacttcagagggttaatgcctggggaatgcacctggctgcctgccacagatatatccaagggcttccgccccaggccgcgctgaactggaggagctgtgttgaggctggtggggttactggaagggttgagaggtagtggtggcatatgactgagccggctgttagtcctctggtcgggcccaattggttctctgagattccgcaagccactgttgctgcctggaccctgagacatgggaaggaatggtctggggcccatgccatactcctgctgggggtgctcaccaaatggcagtggcaccatcttctgctgagcaggcagcatgtctgagccacctgggcgtaatttcagcatctcctcagggcccgccccagcctctctcatcttctgaggtatcatctgagagttggatcccatgttgacatttagattgacatctcccttcatcccactaggaaccatcccaaactcaagttcccgaccagggcccatctgtgggggaattccttttggaaagtcacccctagaaggactcagagggccctcaactggtattcgagggaaaatggggttattcccaggctccatgtggcgctgggagcctggaatcatcctgttcatctccatgctgggcctgatgccttccatggccatccctggggggagacccagctgtttctctgccagctgctgctgaaacatctcttcagacaatccttgggggtttgggaagcgttcccctcggccaggaccgctgaaaatgccctggccaggaggaaaatttcgaccatctgggatttttggcacatcatctggccaactgactccagaaagacctggtctagatgcagggttggggacattcggcccttccatttcagagtttatcatgcctgcaaatccagggaggcgcatctggctccctggcatgttggggtggggagccatgcccctcgggggcagagaatgtggcatgttgataccatcagaaaatggctctgtacccccaggtgcccagccttcactaggggtcatctggtatggaggggggggtcctcggaccactccccgaggcccgtgctgatggaccatcatgtcctggagggaacactgctggacaaccacttgttccggcttcctcctcttctcttcataaaactcctgctgcagtttcagccacgctatctgctcgggagtcatatggtcaaggtggtcgggtcctatggtcccagactgggagttcatagaaggtggaaccatttcatctggagaaaagggtacatctctatgtccttgagggccaaatggagctcccacgtctgtccggggcccaggtcccttacctaggctttgggattgggccatcatggcctgtattggcccttctggttttttctgaggcccatctaataccccaggattctgctgcggtcccccactttgtgctcctgtgaattctttctcatcaggaaaaagcatgcgctggatatctctgagagtttgtaaggagcgctcccggtgctccagctgctcctgagataggccatcgggattctctcccagtgtggggggctcgccactggacactggtggaggcggaggggctttgggatctgctgaagagctattgctcccctgggagacaggggtcactgccctattgttgggagttgagttgggcccagtaccatctgggggcagtggagtggagctggcaggacttcctacagaaggaatcagtttgttttctaccccaggactctcccggtccaggggacgtgggggtgcggcaggcttgggtgctggtgccggaatgggtggagttggctgcagtctggtattctgggaagaattctggtcctggttggccggagctgggggctgttgtgggagaggtttcggatcattccgaagggcagatatctgtgtgttcagaggcgctgtgcttctctctgtcttgttgttagaaatgttctggatgtggaaagagacgatagtttcaacctggcccttcaaaacagcttctgcagctttattggccatctcagtagaaaacacgtacaccactttggctggagtcttctgagcaggtgtgggctctgtggcagtagtttggccatgggggggggtagaagacctgggggctgtagcatttgatggggtcatcgagtgtggtgtgtgctgggaatcctgggactttatgtggtcagcagaattacattctttaatgtcagagtcatcgtttggagtcccaggatctctctgatcaaaggagtcggcggaaatacttcgctcccttttccccttgcccttggcaccatttccagccccattcttcagccccatgctcccacctgggccagggagtgctttaggggtatggcccccactcttggagtcacagggggatggctgggattggctggctgagcccccctgtttaccctgattggagaatttggaatccagctgggggtttccagatggggacatcactgtagggggacggaccatcacctcctgctttgacttagggctactctgtgtgtttcctgatggagagctcctcactttagggttactggaatgcattgattgaaatcctgagcttgcagtcacaaacgggacaggctcaccgagttcctctcgggttgcagcagaaacagctgctgggggcagtggcactggcccactgcttgctgggtgcgtcccttagcgctcgctgcctgtatgcctttttcctctttgtttttctctgctgtggaagtgggtcctttccccttgcagctccagcattctctgggtgcgtgcctcctgctgccagaggaaaatctcgcatctccagggcatacaaaaccccaagggtcacgacactgcagtgctcatcctggaggtgaggagtccaggaacccccttctcaaagatgacccttgtctttcaatatgtccaatttgctatttcttctacatcgggacacggaagaactttccaaaaatgatctctgccacccaatcagatgggaatgtttaggtcaaagcagaatgacgccaactgggcccacattcagtccttttttatgaggagaaattctggagaatcatttcagaaactgaggggggaaagtgaatgaagacaaaaaagacccttttcccgcaatccctggcctcctggtatcaagacaccaggacaacatcaaagcaacttagggggaacactttaggggccacgaaa

SEQ ID NO: 60891 - DNA, 1454 bp, Homo sapiens
  misc_feature (1)...(1454): n = a,t,c or g
ttttaacctcgatgaccattgtgcagtctggtggaattccgcagcccttcgctcgcccggcctccccctccctggttccgcgttctggttccgccatggaatccaacaaggatgaagctgagcgctgtatcagcatcgccctcaaggccatccagagcaaccagcccgaccgggcgctccgcttcctggagaaggcacagcggctgtatccgacgccgcgagttcgcgccctgattgagtccctcaaccagaaaccacagactgccggtgaccaacccccacccacagacacaacccatgccacccacaggaaagcaggtgggaccgatgccccctcggccaacggtgaagctggaggagagagcaccaaaggctacactgcagaacaggttgcagctgtgaaaagggtcaagcaatgtaaagattactatgagatcctgggggtgagcagaggggcctcggatgaggacctgaagaaggcctaccgcagactggccctcaaattccacccagacaagaaccacgcacctggtgccactgaagccttcaaagccattggcacagcatatgcggtactcagcaacccggagaagaggaagcagtatgaccagttcggcgatgacaagagccaggcggcccggcacggccatgggcatggggatttccaccgtggctttgaggccgacatctcccctgaagacctcttcaacatgttctttggcggcggcttcccttctagtaacgtccacgtctacagcaacggccgcatgcgctatacctaccagcaaaggcaggaccgcagggacaaccagggtgatggcgggctaggggtgtttgtgcagctgatgcctatcctcatcctgattctcgtgtcagctctcagccagctcatggtctccagtccaccctacagtctgagtccaagaccgtccgtgggccacatccacaggcgagtcactgaccacctgggtgtcgtctactatgtgggagacactttctccgaagagtacacaggctccagcctcaaaacagtcgagcggaatgtggaagatgattatatcgccaacctccggaacaactgctggaaggagaagcagcagaaggaaggcttgctgtaccgggcacgctactttggcgacacagatatgtaccacagagcacagaagatgggcacccccagctgcagccgactgtcagaggtgcaggcctccctgcatggatagtcctgggccagccacaccaccgaggtccaaactatgaaatccctggagaatttttggtgacatgcactgagccaaggtgatggactgtatatttgaggaaagacaaacaaagaaacaaaattaaaatggaattggaggccgaacgctgcacanttgccctctctctcacccagtaaatgcagaaagtcttaggacagacagaaaacctgccatgggggtgttccctcctcg

SEQ ID NO: 60892 - DNA, 3884 bp, Homo sapiens
cacggaaaaagatgaaaaaacagctcacaacttggagaacgtactgatacatttctgggaaagactgtcagagatctgtgttgcgaaaatcagtgagccagaagctgatgttgagtccgttttgggtgtatctaacctattacaggtgcttcagaagccgaagggctcattgaagtcaagtaaaaaaaaaaatggtaaggttagatttgctgatgagatacttgaaagcaataaagagaatgaaaaatgtgtatcttcagaaggagagaagattgaatgctgggaattaacaactgaaccttctctcactcataattcttcaggccttttgtctcctctaaggaaaaaacctttggaagacttagtctgtaaactcgcagatataagtattaattatgtcaatgaacgaaagtcagagcaacatctaaggtttctttctactctgcttgactccttttcttcaagccgagtatttaaaatgctacttggtgatgaaaaacagagtattgtccaagccaaacctcttgaaatagccaagcttgtacaaaaaaatcctgcggtgcagtttttataccagaaactgataggttggctaaatgaagatcaaaggaaggattttggtttcctggtggacattttgtacagtgctctccggtgctgtgacaatgatatggaaagaaaaaaagtcttggatgatctaaccaaggtggacttgaaatggaattctcttcttaagattattgaaaaggcatgtcctagttcagataaacatgctttagtaactccttggctcaaaggcgatatccttggtgagaaattggtcaacttggcagattgtctttgtaatgaggacttggaatccagggtatcttcagaatctcacttctcagaaagatggactcttctaagcttggtattatcccaacatgttaaaaatgattacttgattggagacgtatatgttgaaagaatcattgttagacttcatgaaactttattcaaaacaaagaaattatcagaagctgaaagcagtgactcatcagtgtcttttatctgtgatgtggcctataactatttcagctcagcgaaaggatgcttgctaatgccatcatctgaagatttattattaactctctttcagttatgtgctcagagcaaagaaaaaacacatttgccagattttcttatctgtaaactgaaaaatacttggctctctggtgtaaatttattggttcatcaaactgacagttcatataaagagagtaccttcctacatttgtctgctctgtggctgaagaaccaagttcaggcttcatctttggatatcaacagtctccaagtcctcttgtctgctgttgatgatttgctaaatacacttctagagagtgaagattcttatcttatgggagtttatattggaagtgtaatgccgaacgacagtgaatgggaaaagatgaggcagtctcttcctatgcagtggttacatagacctcttttagagggaagattgagtttgaattatgaatgtttcaaaacagattttaaggaacaggacataaagacacttcccagccatttgtgtacttcagcattattgagcaaaatggtcttaattgcactgagaaaggaaacagtcttagaaaataatgagcttgagaaaataattgcagaactgctttattcactgcagtggtgtgaagaattagataacccacctatttttctaattggattttgtgaaatacttcaaaaaatgaatattacgtatgataacttacgtgtacttggtaatatgtcgggccttttgcagctgttatttaacaggtccagagaacatggcacactgtggtctcttattattgctaagttgatcctttcccgaagcatttcatctgatgaagtaaaaccacattataagagaaaagaaagtttttttccactaactgaaggcaatttgcataccattcaaagtctatgtccatttttgtcaaaagaagaaaagaaagaatttagtgctcaatgtatacctgctcttttgggctggactaagaaagatctttgcagcactaatggaggttttggacatcttgccattttcaattcttgtctgcaaaccaaaagtatagatgatggagagctattacatggaatattaaaaatcataatatcctggaagaaagagcatgaagatatttttcttttcagttgtaatctatcagaagcaagtccagaggtactgggtgtaaatatagaaataatccggtttctttccctgtttctgaaatactgctcatcccctttggcagagagtgagtgggacttcatcatgtgctccatgttggcttggttggagacaacaagtgagaatcaggcattgtattctattccacttgtgcaactgtttgcctgtgtcagctgtgatttggcctgtgacctcagtgctttctttgattccacaactctggataccattggcaatcttcctgtaaatctaatcagtgaatggaaagaatttttttcccaaggcatccacagtttgcttttacctattttggtgactgttacaggagaaaacaaagatgtgtctgaaacatcctttcagaatgcaatgctgaaacccatgtgtgaaacattaacgtatatctcaaaggaacagctattgagtcacaaacttcctgcaagattagttgctgaccaaaaaacaaacttaccagaatatctccagactttgttaaatacattggccccattactcctcttcagagctaggcctgtgcaaattgctgtttatcatatgctatacaaattgatgcctgaattaccacagtatgatcaggataatctaaagtcatacggagatgaagaagaagagccagccttgtcaccaccagcagcactgatgtctcttcttagcattcaagaggacttactagaaaatgttttggggtgtattcctgttggacagatagttactattaaaccactgagtgaagacttctgttatgttctgggataccttctcacttggaaattaatactaactttcttcaaagctgcatcatcacagcttcgggctttgtattccatgtatcttcggaaaacaaagagtttgaataaattgctctatcacctgttcaggcttatgccagaaaatccaacctatgcagagacagcagttgaggtcccaaataaggaccctaaaacattctttactgaggagctccagctgagtattagagaaacaacaatgcttccataccacattccacacttggcttgttcagtctatcatatgacattaaaagacttgcctgccatggttaggttgtggtggaatagcagtgagaagcgtgttttcaatattgtggatagatttacaagcaagtatgtcagcagtgttctttcttttcaagaaatatcttctgtacaaacaagtacacaactatttaatggcatgacggttaaagctcgagctactactcgagaggtaatggctacttatactattgaggacatagttattgaacttataatacaactgccttcaaattatccactgggttcaataatagtagaaagtgggaaaagagtaggagtagctgttcagcagtggcggaactggatgctgcagttaagcacttacctcacccatcagaatggaagtattatggaaggcttagctttatggaaaaataacgtagacaaacgttttgagggtgttgaagattgcatgatctgtttctcagtcattcacggtttcaactattcccttcccaaaaaagcctgtagaacatgcaagaaaaaattccattcagccctgcttgtacaaatggtttacatctagcaacaaatccacttgttcactgtgtcgtgagacgtttttc

SEQ ID NO: 60893 - DNA, 2490 bp, Homo sapiens
ggcccacggagcccaccatgccgcgcccggcccccgcgcgccgcctcccgggactcctcctgctgctctggccgctgctgctgctgccctccgccgcccccgaccccgtggcccgcccgggcttccggaggctggagacccgaggtcccgggggcagccctggacgccgcccctctcctgcggctcccgacggcgcgcccgcttccgggaccagcgagcctggccgcgcccgcggtgcaggtgtttgcaagagcagacccttggacctggtgtttatcattgatagttctcgtagcgtacggcccctggaattcaccaaagtgaaaacttttgtctcccggataatcgacactctggacattgggccagccgacacgcgggtggcagtggtgaactatgctagcactgtgaagatcgagttccaactccaggcctacacagataagcagtccctgaagcaggctgtgggtcgaatcacacccttgtcaacaggcaccatgtcaggcctagccatccagacagcaatggacgaagccttcacagtggaggcaggggctcgagagccctcttctaacatccctaaggtggccatcattgttacagatgggaggccccaggaccaggtgaatgaagtggcggctcgggcccaagcatctggtattgagctctatgctgtgggcgtggaccgggcagacatggcgtccctcaagatgatggccagtgagcccctagaggagcatgttttctacgtggagacctatggggtcattgagaaactttcctcttagattccaggaaaccttctgtgcgctggacccctgtgtgcttggaacacaccgagtgccagcacgtctgcatcagtgatggggaaggcaagcaccactgtgagtgtagccaaggatacaccttgaatgccgacaagaaaacgtgttcagctcttgataggtgtgctcttaacacccacggatgtgagcacatctgtgtgaatgacagaagtggctcttatcattgtgagtgctatgaaggttataccttgaatgaagacaggaaaacttgttcagctcaagataaatgtgctttgggtacccatgggtgtcagcacatttgtgtgaatgacagaacagggtcccatcattgtgaatgctatgagggctacactctgaatgcagataaaaaaacatgttcagtccgtgacaagtgtgccctaggctctcatggttgccagcacatttgtgtgagtgatggggccgcatcctaccactgtgattgctatcctggctacaccttaaatgaggacaagaaaacatgttcagccactgaggaagcacgaagacttgtttccactgaagatgcttgtggatgtgaagctacactggcattccaggacaaggtcagctcgtatcttcaaagactgaacactaaacttgatgacattttggagaagttgaaaataaatgaatatggacaaatacatcgttaaattgctccaatttctcacctgaaaatgtggacagcttggtgtacttaatactcatgcattcttttgcacacctgttattgccaatgttcctgctaataatttgccattatctgtattaatgcttgaatattactggataaattgtatgaagatcttctgcagaatcagcatgattcttccaaggaaatacatatgcagatacttattaagagcaaactttagtgtctctaagttatgactgtgaaatgattggtaggaaatagaatgaaaagtttagtgtttctttatctactaattgagccatttaatttttaaatgtttatattagataaccatattcacaatggaaactttaggtctagtttcttttgatagtatttataatataaatcaatcttattactgagagtgcaaattgtacaaggtatttacacatacaacttcatataactgagatgaatgtaattttgaactgtttaacactttttgttttttgcttattttgttggagtattattgaagatgtgatcaatagattgtaatacacatatctaaaaatagttaacacagatcaagtgaacattacattgccatttttaattcattctggtctttgaaagaaatgtactactaaagggcactagttgtgaaatttagggtgttaaactttttaccaagtaccaaaatccccaaattcactttattattttgcttcaggatccaagtgacaaagttatatatttataaaattgccataaattcgccaaaaatctaatgttgtctttttaatgttagtgatccacctgcctcagcctcccaaagtgctgggattacaggcttgaaagtctaacttttttttacttatatatttgatacatataattcttttggctttgaaacttgcaactttgagaacaaaacagtcctttaaattttgcactgctcaattctgtttttcgtttgcattgtctttaatataataaaagttattacctttacataaaaaaaaa

SEQ ID NO: 60894 - DNA, 2375 bp, Homo sapiens
gggccatggggctgggccgggtcctgctgtttctggccgtcgccttcccttttgcacccccggcagccgccgctgagccccacagtcttcgttacaacctcatggtgctgtcccaggatggatctgtgcagtcagggtttctcgctgagggacatctggatggtcagcccttcctgcgctatgacaggcagaaacgcagggcaaagccccagggacagtgggcagaagatgtcctgggagctaagacctgggacacagagaccgaggacttgacagagaatgggcaagacctcaggaggaccctgactcatatcaaggaccagaaaggaggcttgcattccctccaggagattagggtctgtgagatccatgaagacagcagcaccaggggctcccggcatttctactacgatggggagctcttcctctcccaaaacctggagactcaagaatcgacagtgccccagtcctccagagctcagaccttggctatgaacgtcacaaatttctggaaggaagatgccatgaagaccaagacacactatcgcgctatgcaggcagactgcctgcagaaactacagcgatatctgaaatccggggtggccatcaggagaacagtgccccccatggtgaatgtcatctgcagcgaggtctcagagggcaacatcaccgtgacatgcagggcttccagcttctatccccggaatatcacactgacctggcgtcaggatggggtatctttgagccacaacacccagcagtggggggatgtcctgcctgatgggaatggaacctaccagacctgggtggccaccaggattcgccaaggagaggagcagaggttcacctgctacatggaacacagcgggaatcacggcactcaccctgtgccctctgggaaggcgctggtgcttcagagtcaacggacagactttccatatgtttctgctgctatgccatgttttgttattattattattctctgtgtcccttgttgcaagaagaaaacatcagcggcagagggtccagagcttgtgagcctgcaggtcctggatcaacacccagttgggacaggagaccacagggatgcagcacagctgggcatttcagcctctgatgtcagctactgggtccactggttccactgagggcacctagactctacagccaggcggccaggattcaactccctgcctggatctcaccagcactttccctctgtttcctgacctatgaaacagagaaaataacatcacttatttattgttgttggatgctgcaaagtgttagtaggtatgaggtgtttgctgctctgccacgtagagagccagcaaagggatcatgaccaactcaacattccattggaggctatatgatcaaacagcaaattgtttatcatgaatgcaggatgtgggcaaactcacgactgctcctgccaacagaaggtttgctgagggcattcactccatggtgctcattggagttatctactgggtcatctagagcctattgtttgaggaatgcagtcttacaagcctactctggacccagcagctgactccttcttccacccctcttcttgctatctcctataccaataaatacgaagggctgtggaagatcagagcccttgttcacgagaagcaagaagccccctgaccccttgttccaaatatactcttttgtctttctctttattcccacgttcgccctttgttcagtccaatacagggttgtggggcccttaacagtgccatattaattggtatcattatttctgttgtttttgtttttgtttttgtttttgtttttgagacagagtctcactctgtcacccaggctgcagttcactggtgtgatctcagctcactgcaacctctgcctcccaggttcaagcacttctcgtacctcagactcccgaatagctgggattacagacaggcaccaccacacccagctaatttttgtattttttgtagagacggggtttcgccaagttgaccagcccagtttcaaactcctgacctcaggtgatctgcctgccttggcatcccaaagtgctgggattacaagaatgagccaccgtgcctggcctattttattatattgtaatatattttattatattagccaccatgcctgtcctattttcttatgttttaatatattttaatatattacatgtgcagtaattagattatcatgggtgaactttatgagtgagtatcttggtgatgactccccctgaccagcccaggaccagctttcttgtcaccttgaggtcccctcgccccgtcacaccgttatgcattactctgtgtctactattatgtgtgcataatttataccgtaaatgtttactctttaaatagaaa

SEQ ID NO: 60895 - DNA, 1446 bp, Homo sapiens
  misc_feature (1)...(1446): n = a,t,c or g
ttttttttttttccatgcccatcagggtttattgtttctgtaacagcggccacgccctggggcggtggcctgtgcagctggagatctctcagcaccttgggttgggggcggggctgggcgggacatgggatggaggcggtgcctgtggccagacagggtggaccttggggcctgcaggcaggagatgagttcggcggccacagtggcccccagcagcagcagcagcagcgggaggttcagcgggcgcgctcaccgcaccaggtggaaggtgagccagtacatgagcataggctgcgccgccgccaccgccatggtcaggtacatgcgcagctggttccgggccccacgcaccgggaccccctcagctgctgcgtctgccaagatcttcagccgcagcgtccggatcatgaacacaaagatggctacgcagcaccagcccagcaccaggtagtagccaatcttcccgaagagcaggcccatgaggaccccgccaatcatcccgacatatttgtagcccaagaaggccaccaggtcgatggtggtgaggtcggtgttgacagtgaccagatagaggctgagcaggatggccagcacctccagggtcagccaggccagggctgagctcgcttgcagccccaggaggtctggggagaacctatcctgggtccccagcgcaagaccagccaccaaaacgtaggtgatgaaagccattgctggaatgtagaggtccggggcattgacgtcaaagcggggggccaccggggtgtcctgttggtactgcacttcccagtcctggtgtaggtaggggaagaacagcaggcccagctttctgcccacatacatggtgtccacagcaaagtaatacttgagcttggtgatggggatgaagcggtcgatgttcttatccaccagctccttgccctgcgcggccaggctgctcccataggccatggccatgttggacaccgggtcagccaggaaggctgcatggggcgtgggagaggctgcaggataactcaggccaccaggtgcccgctgggccccatagccccggctctgggctgaacttgtgtcatcgaaaagctggtgggggtcggccatgcccggctgggacacagggatcctccgcttcgaggctgcaagggaagagagtgagaaggagctggggacccaggataggtaagggagacctggcgaacctcattcatcccacagctctgcctcctgctgcagaggagggtggtgtcaccattagagacactggctttgatgtcagatggactggcaggtgcaagctctgccattcatccaccaacccacccatctagccaactatccatccactgatacattcatctatgcatccattcatctacccacccatccatcccccganttccnccgcnctgtgctaagntcngcagcngggattcattgggngccgcc

SEQ ID NO: 60896 - DNA, 4810 bp, Homo sapiens
ttttttttttttggtgcagcgatgtttaatggcaattcgtataaaccaagcccatgcacaagtagaaagtgcccgtggagccggcaggaggcccccgccgcgctagagaaccacaagcccggccgtgcagccctccccgcggcgccttaaatagattcttcactatactctgtatgttacagtatgtacaagacccctcccctcgggggacggggcggactccgcaacgcgttcctatgtacaccacctccccttcggccctgaggtcagtggccagagtcgggtgatggggtaagacagggccagagagggaggaaacagacgcaaacatgcggagtcgggtggggacacggtcagccctgaaacacgaggggcgtgcgcagcgaaggcagtggtgggaaccgaggcggatacattcagagacgcgtcgaacaaataaataaggcaagtcaggagggggccgagtcgggtgcaggcaggaggagctggggagcaggggcaggcagggctccggaggtcacagcggaagatgcaggtatgtggggcgcgggttttctggagccaggaccaaaagagacggggcacgaccaggagggacgaggagaggggtgtgggagcaaggcgtggggaggagggaggaggcctacagagggctccaacaaaggtgaacaggaaagctgccgacaggggctccccctgccccagaaagccctctccctgttaagactgcacgaggcgcccccagggtggtgagaaaggcggtggccaggtcatgtggccagtcccggctggggaagcccttccagctcctggttctgcttcagttccctcatcctgtgtcggcagcgccgcaggaatctcatgatcttccgggctgcctggtcctgcttcttggtgagaaaggagcctttgttgcgggcaggcagggtggccgaagtccggtggggagggccgggcctgcggcggtaggagcggtagtgctgctggatgagcacagccgctcggcggctctgctgaaatcgcttctgttcatagtagcttcggaacttgctctggatcaggatggccgcctgggtcatcttcttatagagtgcaaacttaagtgcaatccaggtcagctgcttgtacttccggtaacagcgctggattacagctgctgctacctcctgctgctccttcagccgccggcccttgtactttcggaaggccgtctggatgactcgggcagcctcatacagttcccgctgctcttgaatctgaataatgtcaacaaggcaaaaatcaactttccaatcttgcccactggtggaatgcagagagaaactctgcccaggagggtgctgtaagggacaagcccaggcgacctccgctcaaagggcaagttcgctgggaggggttgagctggggaaatggtccacattctcccaggtagctggccagccaggacatggtctcactgagccccacagcccctgtccgctcccgcattgaggctccagcctcgggcagccccacgaagtcctctcgtttaatccgctccggtgtggcttcgatgatctgcttggctagtgagatcatgtccaccgggatcacatccacagcctgtgggctgtcagcgtcctccggagcagccccatcatctgaagctggtgggagggcaggaagggaggagaggggccccttggagttggtagcctcatagtccatgaggagtaggggggcttctgggacaccagaggaaagctggcctggggccatgtcctccatagtcatctcagaggctggcagaggtgcaggggggggactgccatctggggcactagaataggctgacgtgacggaaaaggtgccatccgacagctccgagggcgaggagacgctgctcagaccagtgtctgggctggaggagggtggcgatagggcaaatgggggctccaccgaaggctcctgtctctgtagttcctcaaggcagcgggcaaggcgcacatgaccccgggaatgagccacagacaatggcagacggcccagagagtcgggaatgctcagtgcctgtcggttccaacggaaaaggagcacagcagcttccaggtgtcccagggcacaagcccacatcagaggggtgcaagagaaatgatccacgttgagcgggtcaacctcctgctctaagtccaagcttccagtctccacactccgccactggctcagggtctcgatgaggcgggcatagccctgggcagcagccaggtgcagaaggctcatgccccggaaggggcttccatgggccagacgttcaggacccttccaggtggagcgtgggatcatgctttctaccaagaccactacccgtgcttcgaacccaggcccctggccttcatcctgaactggaggagcatcaggaccctggcaaggcacctgcccagctgctgcgatctctgccatccgcttctccatctgctccagtcgctctagtatggacatccggaactggttgtcgtccagtgacagccagtcaagttgagtactaggcagagacaggaatcggcgggctcgatactcaaagagcacagaagcagaaaggggcccctcccgccctgccacctgcaaagacaccagccctacctcatgggcgggacagtagcagcgtaagacaccaggctggacaagtgaggctggcactgcgatgtgatcaaagacacaggagtaatgctcggcggcttcggtccaaggacctgtgatgagcaccttgaccccaccctctgggtaggaccactctggggagaagtctgtgatggtgctaagagcaggagacagctggggggttggagcagggatgcttggagcttcgtcactgatgagttctcccataaggtctgggaatgatgaaagactgaagggctccagttcactggccccaacaggtcctccaaacaaggcctctcctcttcctaccctgcttgacggctccaagggggcaggtgagggtgggggtgagggagggggtgaaggtatgggtggggcagccccgtgacccttgagctcctccccactgtcatcatcttggatgaagaagcagtttcctcttctcccacctgctactgactgtggtgggggaccccgagcagctgcctggggctccagggcagcagcaggctctagggcagaacagggggtatgagcggcctctgcctcggggaagtctgggcttactccctgcccccctccatatgtctggcccctctgggggctgttgagaaaacgatcagggtcaaaggcaggactgggaggagctggtggggcagaaggctcagtgcctacaaccactgccaaactcatggaaggcctaggatcagcctgtggagccaagtgcctggtgggcgtcaagcctccagcccgctgctccagtcctgtcaggaggaggatagcagtgcctcctcttgaagaaccccctcgagaagtgggagggctaggtctgatttctaggggctctgcaaaacctgatgaggaggaagaagaggaagaagatggggaggtgtgtgccttggggagctctgggggaagtggggctatcagtggaggaggctctggggggtgagggtgggggatagaggtcagggttaaagctcggggctccactttgggagagatgatgcggtgtttcgtgctgctgcatttgtgggtaaggctcccagaaccaagccccccactgcagagacaggcgtgggttcggggagcaggcttggttgggtgggtgtccaaaatctgctgcaccaggtgttctacagagaactcttctgttccattcccgcagctccacttgatgccatgaaacatgggcttcagctgtcccaacaactcctcccgggaccacttcagccactctcgacggtcgctgctgatggaacaaaagatggggctgcagccctttccacagtcctccagggctgggacgttcaggtagtgcacaaggacgatgtcagggttctggagcagccagtagcagcgccgatggaatgtggggacgatggaagagtgaacgtagcagccatagagacactccatgccctggaccttcagcttcatgtggtcctctcgggtggtcttcccatccttccgcttcttccagaggtaaccatccttccgatatttcaccttcttgcgattgtagaggatgatggagccattctgaggccttgtctttggggcacaagacagccactcatcatgcttctcaaaggtgatcaggtaggatgcaatctcctcatttgtattccaccgtagcctctctggaggcagcagcgggcagcgaggaagacactccagcagcttcttggggagaaagatcttcaggtggtggctgttttcagcaacctcggtggtgtccttggtattcatggtgagggctccagggggcaaggtcacccccggcctgaggggccggggggagggggagtctgtgttttcagacgctgccaactccatcccccagggattgtgaagggggttccttctggctgtgacagtgctgaacgaggccagagagtgcagctgcctggaggcacaagcctcctcctgatccagggggctccagggagaccaaagcagctgggccctgccaggagtgagaaaacggtcctcttcctgtggataggttgctctctcctcttccagatcagggtattcattggtgctggggaatccacagccctcttcgccaagcaccactggctcagatgcagccccagagctgccccactgggccttcaacagtctgaggagactttaggtcgttgatgatgctctgacgacgaaa

SEQ ID NO: 60897 - DNA, 972 bp, Homo sapiens
  misc_feature (1)...(972): n = a,t,c or g
gtgtgtggggagggtgtatatggagaaggagccccaagaaaggatcagaacggagaccactgccacctgatgtttcctgcaggggctgcactgtgtctctggctgaggtcacactgacacctggtggtcactggtcactcgcagtcttaaatctagtagggccgaaagtactagaaggaggttgtccagagaggtctgccctcaaaatgctcctgaaagatgcttgcttatgcttttctttaaaaattatttctggggaagggcggggagtggtcacaggatcttatattctctttatttttacttaatttgcatgttatttttagaactcccctttttaagggtcacattttgcctcagaaaaccctgtctgaatgtctcctgtttgtcggtcaggactgactctgccttttctttccttttccatgtgccactcctgtcctccctttgccctccctgatttctgcactgtcctctcccacctgtctgtctcctcttggttttgcccgtgtcagcctccccttccgtgccctctcccccccttgcagaacaagaccgcgaaaggcagcctcagcacagagcagtcggagcgggggtgaggggggcagtgtgctcgtgggaatggaaaggacagcaagcacaggtgagtcggggccaccgggctccctgcatcctgcccggctcccagcaggcgtcgttgcctctgccctcctgctcgctctatgctttgccaccagcatttcatcctgtggatgacaacgccaggtggatgcagtgttcttccattggttacttagctccccagattatctgtggaaaggagtgggggcttctaaactgtccactgccaatggggtgcagggtgactgttcctgaaggcagcccttcagggcacagctggccaggggtggccttgtgagtngacacaacaggcttttaggtctctttcttgggcaagggcatctcttgcca

SEQ ID NO: 60898 - DNA, 791 bp, Homo sapiens
gcgctggtgggggcaagcgacaaacccgatcgtcccagctatcgcgtgatgaaatatctactcgaccaggggtatcacgtcattccggtttcgccaaaagttgccggcaaaacgctgctgggccagaaggggtatggcacgctggcagacgttccggaaaaagtcgatatggtcgatgttttccgtaattcaaaagcggcgtggggcgtggcacaggaagctattgccattggcgcgaaaactctctggatgcaactgggggtgattaatgagcaagcggcagtactggcacgggatgccgggttaaatgtggtgatggatcgctgcccggctattgagatccctcgcctgggcctggccaaataaaaaatccccggaaggcaaaaaccttccggggatttgttcagggattagttacgcagacgcggggcctggagttgtttgcggatggtctgcgccagctcatccatggatggctgttcagggatgttcatcctgcaattcgctacttagctgggcttcagccaggtaggtatgaaccggtaggccgttatcgtcctccatcactacgtgataccacggagcggcgcgaagctcgtcattcaccgccagctcatcaggcgacggttcagagagcgaataaaccgggtcgatatccacgaccactccgagataacctaacagggaatggcggacctgctggccgataccgaatttgctggcaatcatagtcacctcccgggaaatctttacctttgatataagggtaaaattccacatttcaagtttca

SEQ ID NO: 60899 - DNA, 1818 bp, Homo sapiens; identical to SEQ ID NO: 60531

SEQ ID NO: 60900 - DNA, 2601 bp, Homo sapiens
cgtggggaattcccacgacccgtgacactctgtggaccgcgagcacggagcagggtttctacagctgctccccactttctcggacccggtcctggacccagcccccgactccgacacggctccaccatggaggaggcggaccgaatcctcatccattcgctgcgccaggccggcacggcagttcctccagatgtgcagaccttgcgcgccttcaccactgagctggttgtagaggctgtggtccgctgcctgcgtgtgatcaaccctgcggtgggctctggcctcagccctctgctgcctcttgccatgtctgcccggttccgcctggccatgagcctggctcaggcctgcatggacctgggctatcccttggagcttggctatcagaacttcctctaccccagtgagcctgacctccgagacctgcttctcttcttggctgagcgtctgcccaccgatgcctctgaggatgcagaccagcctgcaggtgactcagctattctcctccgggccattgggagccaaattcgggaccagctggcactgccttgggtcccgccccaccttcgcactcccaagctgcagcacctccagggctcggccctccagaagcctttccatgccagcaggctggtcgtgccagaattgagttccagaggtgagccacgggagttccaggcgagtcccctgctgcttccagtccctacccaggtgcctcagcctgttggaagggtggcctcgctcctcgaacaccatgccctgcagctctgccagcagacgggccgggaccggccaggggatgaggactgggtccaccggacatcccgcctcccaccccaggaggacacacgggctcagcggcagcggctgcaaaagcaactgactgagcatctgcgccaaagctggggcctgcttggggcccccatacaagcccgggacctgggagaactgctgcaggcctggggtgctggggccaagactggtgctcctaagggctcccgcttcacgcactcagagaagttcaccttccatctggagccccaggcccaggccactcaggtgtcagatgtgccagccacctcccggcggcctgaacaggtcacgtgggcagctcaggaacaggagctcgagtcccttcgggagcagctggaaggagtgaaccgcagcattgaggaggttgaggccgacatgaagaccctgggcgtcagctttgtgcaggcagagtctgagtgccggcacagcaagctcagtacagcagagcgtgagcaggccctgcgcctgaagagccgcgcggtggagctgctgcccgatgggactgccaaccttgccaagctgcagcttgtggtggagaatagtgcccagcgggtcatccacttggcgggtcagtgggagaagcaccgggtcccactcctcgctgagtaccgccacctccgaaagctgcaggattgcagagagctggaatcttctcgacggctggcagagatccaagaactgcaccagagtgtccgggcggctgcttgaagaggcccgcaggaaggaggaggtctataaagcagcttgatgtcagagctggagactctgcccagagatgtgtcccggctggcctacacccagcgcatcctggagatcgtgggcaacatccggaagcagaaggaagagatcaccaagatcttgtctgatacgaaggagcttcagaaggaaatcaactccctatctgggaagctggaccggacgtttgcggtgactgatgagcttgtgttcaaggatgccaagaaggacgatgctgttcggaaggcctataagtatctagctgctctgcacgagaactgcagccagctcatccagaccatcgaggacacaggcaccatcatgcgggaggttcgagacctcgaggagcagatcgagacagagctgggcaagaagaccctcagcaacctggagaagatccgggaggactaccgagccctccgccaagagaaaccgcttggcctccttaggccgggtcccgggaggccctgaaggaaccgccggcagaaggtctctccccagcctcaggcagggatttggggtgctggaggcagtgggccaagcacatgccctagctacttcctccgctgtccagttcctcctgctgcggccttggacccagacccctgcccactgaccgcaacccttatatggggtgatagtccagcatgtggggagctcggctgcagtttattggggacggtactgtgggttgggggccttggatccacaaataaatgagtcagttcctctgcagtctaagctgaggcatggatcagggctcagggaatgggagtgaggtgagtggcaggggagacacggggtatttttggcaaggcagtgtgtgtggctgtgtgtgtctgcacgggactcaagagacccactggggggctgtgcgtgtgcatatgcgtgagatacacaggtgaattctaacaggccgtgtgtgtgagcgagcacgtgttgggacctcagatcctgagggtactgacgctgcttctgtgtaggcctctgggcacacccctgtgttgacagtgcccctgtgggccctgaggcttgctgtgggtgcgtgccttg

SEQ ID NO: 60901 - DNA, 1313 bp, Homo sapiens
cccacgcgtccgcgctcgcctccgggatctcgtgagatcacggccacttccgggagtcggaaaggaaagctgtgggaccatcctggcaaccccggtgtttggctgggttctagcgtagccgtctgtgtggccggtgggggacctgcggtcggagtgggagggccagtctgcacccaagaggtggaagaggacgggctttaggctggaagcgccttagaggagccatttttccaggatgcctggtttgcttttatgtgaaccgacagagctttacaacatcctgaatcaggccacaaaactctccagattaacagaccccaactatctctgtttattggatgtccgttccaaatgggagtatgacgaaagccatgtgatcactgcccttcgagtgaagaagaaaaataatgaatatcttctcccggagtctgtggacctggagtgtgtgaagtactgcgtggtgtatgataacaacagcagcaccctggagatactcttaaaagatgatgatgatgattcagactctgatggtgatggcaaagatcttgtgcctcaagcagccattgagtatggcaggatcctgacccgcctcacccaccaccccgtctacatcctgaaagggggctatgagcgcttctcaggcacgtaccactttctccggacccagaagatcatctggatgcctcaggaactggatgcatttcagccataccccattgaaatcgtgccagggaaggtcttcgttggcaatttcagtcaagcctgtgaccccaagattcagaaggacttgaaaatcaaagcccatgtcaatgtctccatggatacagggcccttttttgccaggcgatgctgacaagcttctgcacatccggatagaagattccccggaagcccagattcttcccttcttacgccacatgtgtcacttcattgaaattcaccatcaccttggctctgtcattctgatcttttccacccagggtatcagccgcagttgtgccgccatcatagcctacctcatgcatagtaacgagcagaccttgcagaggtcctgggcctatgtcaagaagtgcaaaaacaacatgtgtccaaatcggggattggtgagccagctgctggaatgggagaagactatccttggagattccatcacaaacatcatggatccgctctactgatcttctccgaggcccaccgaagggtactgaagagcctcacctgggggcattttgtgggtggagggccagagtgtgtatacccaggcttgtctggaaggagaaggcctttgctgcctgaaagtcgcaaaaaaaaaa

SEQ ID NO: 60902 - DNA, 2136 bp, Homo sapiens
gcggccgcggagacctacctgcggcgtcggcagctgctgctccgagataccggggagaccacgacgctgcctcctgggcgccatgagttcctgttcagcttccagctgcccccgaccctggtgacatccttcgagggcaaacacggtagtgtccgctactgtatcaaggccaccctgcaccggccctgggtcccagcacgccgggcaaggaaggtgttcactgtcatcgagcctgtggacatcaacacgccagccctgctggcacctcaagcgggggctcgggaaaaagttgcccgatcctggtactgtaaccgtggcctagtctccctttcggccaagatcgaccgcaagggctacaccccaggagaggtcatccctgtctttgccgagatcgacaacggctccacacgtcctgtgctgcctcgggcagccgtggtgcagacacagacgttcatggcccgaggcgcccgaaagcaggaaacgggcagtggtggccagccttcgcgggcgagccggtgggccccgggcaggcgggcgctgtggcagggccgggcactgcggatccccccagtgggtccttccatcctgcactgccgcgttctacacgtggactacgcactcaaggtctgtgtggatatcccaggaacgtccaagctgctgctggagctgccactggtgatcggcaccattcccttgcacccttttggcagccgttcctccagcgtgggcagccacgccagcttcctgctggactggaggctgggggccttgccggagcggcctgaggctcctcctgagtactcggaggtggtagccgacactgaggaggcagccttggggcagagccccttcccgcttccgcaggaccccgacatgagccttgaaggcccgttcttcgcctacatccaagagttccgctaccgcccgccacccctgtactctgaggaggatccaaacccacccttgggggacatgaggccgcgctgcatgacttgctgaacggcacagggacccctcgaggaacaaggttgcacaccagctttcagccaccatgactgtggggagtggctggaccaagggctgacctccccgactgcatcaaagttggggaaccaagtctcagagtgaggcgggggcctttcggatatcacatgggacagaggaagagcccggctggaatctgacttatctggaccgctgtccttgtgaggcattgaatgcccagtgcagtatccgagagactgtttaataacctgtcttcccagccaattggtggtgctggaatcccctaggagccttcagtctgggagaaacagagccagacatagacagttccagcatcacagaaccagaagaagagacctgcaactgtgagagtccagacaggaagcagagaaggcgtccttgcggaaagggcattttagctgaggctttggagtacgaataggagctcagcaggcagacgaatgaggaataaaggtcagagaaggtcagagctgagtgacgtttggaatccaccccgtttattgtagaactgggggttcagagggcaggtgcctcagagttgaggccacacagtgaggtctggtgggtgaaaggacccaggaacgaggcgttcaggaaagcaggttgtcagagctatgtggagtctgtgggtggcaggggcagccgctccagcctttgaagactttgaaagccagagattcctggcgcaggcttggacttcctgggagctcctccaagtacccaggggcatcagagctgcctgggtgttacatggcccagggaacccaggttcagggtaggacaggcaagaccagatacccaatgtgcaaagtgaaaacactgggctccctgttaaacgatgaagaattcaagacagtgacagcattacgtcacccctggggacagaggtcagcctaaggtgacacacggggactactgtgcttccggaggctccctgtgtcctggaggagaaaagcattagagggggcagctggacaagctcccaactgcagagtcccagccctggctggggcagggccccggcctgggactcagcatttctgatatgccttaagaattcattctgttttgtacaattattttttaaaagtaaacgtgtggagaaagaaa

SEQ ID NO: 60903 - DNA, 1699 bp, Homo sapiens
ttttttttttttctgtaatgaataatatttatgcaggcttgttttctaaagcaaaacaatattctcaatgtacaaagtttggccaccatccccactttaagatgaactatgtcttaatgacagagatacttgaaacgttgctcgaaaactataaactttgggattctaatagctagaaacaaattgtcagcttttactaattccaaagaagttaagagagaacctcataagaagagagttttattcaacattatggcatggccagttgtaattgttccaacaaagggaacctactttggtgccccgaggaaatggctgtttgtgatgctggggaaaagtcaagatgctgacgcctaatggctgttctagcctttccaggtttgtaacatgaagatggggaaggaaatgggcaccactgctgtttgtaatctgaggaactcttgggcagcattcactctccaaaggcagtacaaaacttacaaaggaaggtcaaaaagtcttaacactcccattccccccaggaactcttgtctgtgtcatctgggtagggaggggagggaatccggggttccctcagggtccttgttcatgtttaggctttttgataggcttccaatccaactcggctcgcttcagccttgctgctgggcctgaatgtaatagtgtgtgtcatcccttagtaatcactttgaagaggtttccctggacattccctttaaccccagtgggaacgccattatcttccagagcagacacgagtgaaccacgaagagaaaacccacccactggcctgttctcttctttggaagggtcatagtaatgcaggaaagctggatccttccttagaacaaagcgacgcaccttccagtttttcctcttgtgtccctgcttggccaggtagccttgtttcaccaccgtgccacttaactccacagtgctcaggctaatttcttccttggggcttatcttctttttgtagctctcagcaaaagtgtacagggctgtggagtcatccaggaactgctcggccagatccccagagcgaatggctcccatgcttcggacacccacaggcctgaggaagttctcctccatgagcatggaggccagggtcaccgcctccagacggctggccgtgaagctgttggagatgagccagtccaccagggaggagccgaggaaggtctttttataggtgcttccctgctccatgttggggcttgaacggattccggtgttgctatcgtgcatcttgtccacaatgcgatgcaggctgatgtgcgggggcagcttgaaggagtttctcaggctgtgcagctgctggaccttccccggctgccctgcatgaatagccccggtgatctcaaaggcccaggcatcccgctcctctcgagaacaggcctccaggaagtactccgtggatgtttgagtcttcagcttaatgaggagcggtcggttttcatactccaggcaggggcaggtgatggtgcagccatccaggaggatccggcccttgggaggggtcactctccgacccccctcaagcttgtagtacaccagcgtgttctgccgaaggatgaaccatcgcgccttccagttgtggacaatgtggcccctcttgaccaggaagccctcgttgagcacgccgtcctccatgtcgccgtccgcacgccagggccacgccaggtgcgccacgaaa

SEQ ID NO: 60904 - DNA, 2431 bp, Homo sapiens
  misc_feature (1)...(2431): n = a,t,c or g
ttttttttttttgatgtgacaaacagcatttattccagactccagtgtccacagatgatggggtggggcggaggtagggcgggggcaggagtgggaccaggggctggggtgaggggggggaatccagtgtcagactctgcagcaagacgtcaggtggggggaccagcaggggaggcgggaagggaaaaatatcctccggccagccgaccctcggagcccttgtcccaaggctgggccttgggctttgggtccagggagctattctggggcctgggagagacacattttctgtggaggaggaagggccccttccacccacccaccctccctccctctccttccctcccggaggcagggcagccacctgtgggtccccntccttgccggcagaggaaggaagggagggttttggcagggaagagggaaagagggaaagagggaaggcgtggggagtacttggcgtgagcagggctggattagatgatgcctgaatgctccacggtccagggacagccctttaggaggttcttggctcagcactcggcgtccgaagcccccgctggccacccctggctcctccggaggcacctcccatgagaagggccggtctgctctggttgctccgaccccgagtggctcagccctggctcccctttggcggcggagcccccttctcccgccgctggcggcagcaggggccccctttgcgtctcacgcagtagaagacagcaacgacgaggagcaggaggcccacgctgacggccacggccatgacggccactccagcctgggaggtctgggggctcacggtgccgaagtggaagacatggcgcttgttcccgtgggggttggaggcttcacaggagatgccatcgcggctcagggcgctggtcactttcagggtcagagagctgctcacccaaccctgccgtccggggattggctctgcggggctgccccccaattggctccagctgagtttggggtctggatggccgcgggcagagcagatgagtgtgacttcgtctccttccctccagctgccatctgccttgggctctatttccgctgtctttagctctggcgagccttggaccagcagcgtgaagttctgggtgcggctgaggaccgggactgtgggcagggaggcctcacatacgtaggtgccattggaatcgaaggtgatagaactgagcgacagcatggggccatcgcccaggggagtggagtccttggtccagcgtagggcaggggtgggcaggccgtgcacggagcagttcacgactgccctgctgtttagaggtaaggaaagcaccttcccctcgctgagctccagggggtccagataggccacgcgcagctccagcatcttggagagctgcacgtcatctgccgcgtcgtaatcctccactctgcagccataggtcccgctctggccccgggtcactccctccagggtcaagttcccctcgagattcacattcagcacttcctcctgctcatcctgaaggcggaaaagcgtatactccgggctggggctgccgtccccccggcagagcagctggacagtgtcaccctcgcgtacccagcctgctggggtggacgggctgcccacccagaactgcacgtgctccgtgggatagtgcagggtgaggtggaaggtggggctgtccaggcggccgtggcggccctcgggcaggctgtagtgggcggcgcagtggaagctggcgtctcggtcatccttgcggcacggcaggtagagggtgctggtgagggagagcaggcccgaggcctcccggaccgtgcggctggtcatgtagccctctgggttcatctctacgggcacctccaggcgctgcccgttgcgataccacgtgatcttgggggccgggttcccgttccggctgttgctggtggcgatctcctgggcagagtcctccatcacagacagtgtccctttgttgggggagacctcagtggcctctggctttgcaaacacgttgagccgcgcagcggcctcagcagtgcctgccgcccctgccctcaccacgcacacgtagtctcgctcgtcgcccacctgggcctcagccagcaccaggcgcccctgggagtccagctggtatgggggactgcggccccgggtgtcgtgcattgtgacctggagctcagagccctgcatctcagccgaggctaggcgggggcgagctcccgagcggtcggtaaggaaccattccagcatataatggtcgtgggttcccgtaggggtgcagtccagaatgacagactttcctcgcatcacctccaccagcgggggtacagacaagcgcacctccgcctgggcatctgggtgcgccgccagcaggactgcgagcaacagcagccgcggggccccgcgcgcctgggccggtgcgtccgggggctccatgttcac

SEQ ID NO: 60905 - DNA, 1811 bp, Homo sapiens
acacgcgtccgaggaaacaggcccagagggatggagagccataggtcgcacagtacaccctagcctccaggtaggaatatgggctttccagccagtatttaaggccccactgtgctgcttctttgctgtatggccttgtactacacacttcactccaaactgctttccttatctagaatgtggggatgataacagtgttatctccggggccttatgtgcccagagcttggcatccccaggtaaggcccagtggatggagactggattctgctgctgttctaggagctgctctagacccaggagcttctctagacccaggaggccaggtgcagcgctgaaggggcttctgggagcccctccccacatacacccccccatggccactgtctccctcagggtcggctcgtgctcatcatcctgtgctccgtggtcttctctgccgtctacatcctcctgtgctgctgggccggcctgcccctctgcctggccacctgcctggaccaccacttccccacaggctccaggcccactgtgccgggacccctgcacttcagtggatatagcagtgtgccagatgggaagccgctggtccgcgagccctgccgcagctgtgcccgtggtgtccagctccggccaaatgctgggctcaggcctgggtgctgagatcgacagtgccgagtgcgtgttccgcatgaaccaggcgcccaccgtgggctttgaggcggatgtgggcccagcgcagcaccctgcgtgtcgtctcacacacaagcgtgccgctgctgctggcgcaactattcacactacttccagaaggcccgagacacgctctacatggtgtggggccagggcaggcacatggaccgggtgctcggcggccgcacctaccgcacgctgctgcagctcaccaggatgtaccccggcctgcaggtgtacaccttcacggagcgcatgatggcctactgcgaccagatcttccaggacgagacgggcaagaaccggaggcagtcgggctccttcctcagcaccggctggttcaccatgatcctcgcgctggagctgtgtgaggagatcgtggtctatgggatggtcagcgacagctactgcagggagaagagccacccctcagtgccttaccactactttgagaagggccggctagatgagtgtcagatgtacctggcacacgagcaggcgccccgaagcgcccaccgcttcatcactgagaaggcggtcttctcccgctgggccaagaagaggcccatcgtgttcgcccatccgtcctggaggactgagtagcttccgtcgtcctgccagccgccatgccgttgcgaggcctccgggatgtcccatcccaagccatcacactccactccctgagtaattcatggcatttgggggctcaccccacctccaggtctgtcaagtggcctttgtccctggggctgatggcccccaactcaccagcatcatgaccttgtgccagtcctggtcctccctccccagccgctcctaccaccttttggtgccacacttctcaggctggccgccctggttggggcagccgagagcctggggttcattggtgaaggggccttggagttgtgactgccggggccgtatcaggaacgtacgggtaaacgtgtgttttctggatgctgtctctagcgtggtcatgtgtctgatgtgtttaggggtggagatgagggtttctttccctgtcacagacccagaagcattttttttttgggaagggggttttttctttttccccacccgggtattgctgggggccccttttggcttatttaggc

SEQ ID NO: 60906 - DNA, 2689 bp, Homo sapiens
gttcccgctgggattccccatctccaaccccgcaggcaaggacgccgtgaccttgcaaggcatccctgagggagcctttgatgaagtgacctcatgcctggtgaaggtgccagagaagacagaaggtggcaacaacatggctctggttgagaatgtcaccacccttcagaagagccaggatctgctggaggcagaaggagaaaagaagaccatgataaagaagattatgccacacccagcccaccctgggcatgcgggagaggtcggagctggtgaacgtgtgtgtgcacagcgtgttctccctgccctccgtgcaggcgatgcaggagaaggacgaggccaaggctgagaccatccaggctctttaccatcagaccctggaggccctgcagacactgctcaaagccctctttatcgaggaccccactcctgctgggctgaagagcatcttggaggccctggggccttggatgaactctgggaaggcccatgagcgagcacgggctgtgaacaccaatgtctctgtgttgaaccacatgcttctaactctgcctttctttattgcaatacaaacagatgcccttggggttcccggcgctggggcttctgctggggagactcatccttcacattggggatcctgatgaggagattggctgtgaggctctggacggcatcatcatcctctacactattctggagctccaaaaacgagccagagataaggaagagaccaacaaaaaggagctatatgagagcaacaagcatttcctggggccctacaaccctgtgagcccgtgccagaacattctgcgggtgatcgaggaatttggagacttcctggggccccagcagataaaggacctgctgctggccgccctggaagggctgaaaggcagctcagaggctccagggaaggactccagggagatgatgcagctggcctcggaggtcatgctcagctcggtgctggagtggtaccgccacagggcgctggaggtgatcccagaaatcatgcaaggcatctacatgcagctgagccacatccaggagcctcgggcccgccaggtggccctgctgcccgtctccctcctggctagctccttcatgaccgaggttgtggtggccctgctcatgtgccccctcccactgaacaggcagccagcggcctgtgcgagctcctgtccgtcaacagctgcatgggccgtgtgaggcgcatctaccctcagctgctcctggccctgctcattcaggtccattaccacatcggcctcaacctgcctggctgcgtggctcctcccaaggacaccaagaagggtgcacagccctctcccttcgtacctgtgcgctgggtggtgaaagtggtgaaaaccctgctactgaggatgggctgctcttatgagaccacgtttctggaggaccagggtggctgggagctcatggagcaggtggagagccaccaccgcggagtggccttgctggcaagggccatggtgcagtactcctgccaggagctgtgccgcatcctctacctgctcatcccgctcctggagcgaggcgacgagaagcacaggatcacggccaccgccttcttcgtggagctcctccagatggagcaggtgcgccggatccccgaggaatactctctggggcggatggcagaaggcctgagccaccacgaccccatcatgaaggtgctgtccattcgaggcctggtcatcctggcccgcaggtctgagaagaccgccaaggtgaaggccctcctgccctccatggtgaagggcctgaagaacatggatgggatgctggtggtggaagcggtccacaacctcaaggctgtcttcaaggggcgggaccagaagctgatggacagtgcggtctatgtggagatgctgcagatcctgctgccgcacttcagcgacgcacgagaggacgtgcgctcctcctgcatcaacctgtatgggaaggtggtccaaaagcttcgggcaccacgcactcaggccatggaggagcagctggtcagcaccttggtgcccctactgctgaccatgcaggagggcaactccaaggtaagccagaagtgtgtgaagaccctgttacgctgttcttacttcatggcttgggagttgccaaaaagagcttatagccggaagccctgggacaaccaacagcagacagtggccaaaatttgcaagtgccttgtgaacacccaccgagacagcgccttcatattcctcagccagagcctggagtatgccaagaactcacgggcctccctccggaagtgctcagtcatgttcatagggtccctggtcccctgcatggagagcataatgacagaagatcgtctgaatgaagtgaaagctgctctggataacttgagacatgacccagaagcatcagtgtgcatctacgcagcccaggtccaggaccacatcctggccagctgctggcagaactcctggctgccgcacgggaactcatgggtgtgttactcagccaccacccaccgtctggagccccagctgtgagaacctgcccacttcccaccagcggcgctcctggatcatgcaggcactgggctcctggaagatgtccttgaagaagtgacgtccctgagccccaaaccctcctcagggtggttgagttccagccatgctccctataaatgtcatgtggcttacctctc

SEQ ID NO: 60907 - DNA, 3776 bp, Homo sapiens
gaattccccaaggctgggcccagaacacatagtcctagggtaacagtgaaggggtcgtgaggggacagtgactcccttccaaccccttcttcatagggactgttggcaaacaaagaaaatcaactgggaaaatgaagacctgctggaaaattccagttttcttctttgtgtgcagtttcctggaaccctgggcatctgcagctgtcaagcgtcgccccagattccctgtcaattccaattctaatggtggaaatgaactctgtccaaagatcaggattggccaagatgacttaccagggtttgatctgatctctcagttccaggtagataaagcagcatctagaagagctatccagagagtagtgggatcagctacattgcaggtggcttacaagttgggaaataatgtagacttcaggattccaactaggaatttatatcccagtggactgcctgaagaatactccttcttgacgacgtttcgaatgactggaagcactctcaaaaagaactggaacatttggcagattcaggattcctctgggaaggagcaagttggcataaagattaatggccaaacacaatctgttgtattttcatacaagggactggatggaagtctccaaacagcagccttttcgaatttgtcctccttgtttgattcccagtggcataagatcatgattggcgtggagaggagtagtgctactctttttgttgactgcaacaggattgaatctttacctataaagccaagaggcccaattgacattgatggctttgctgtgctgggaaaacttgcagataatcctcaagtttctgttccatttgaacttcaatggatgctgatccattgtgaccccctgcggcccaggagagaaacttgccatgagctgccagccagaataacgcccagccagaccaccgacgagagaggtcccccgggtgagcagggtcctcccggggcctccgggcccccctggagttccaggcatcgatggcatcgacggtgaccgaggtcctaagggccccccgggccccccgggtcctgcaggtgaaccgggaaagccaggagctccaggcaagcctggcacacctggcgctgatggattaacaggacctgatggatcccctggctccattgggtcaaagggacaaaaaggagaacctggtgtgcctggatcgcgtggatttccaggccgtggtattcctggaccccctggtcctcctgggacagcaggactccctggagagcttggccgtgtaggacctgttggtgaccctgggagaagaggaccacctggcccccctggccccccaggacccagaggaacaattggctttcatgatggagatccattgtgtcccaatgcctgtccaccaggtcgctcaggatatccaggcctaccaggcatgaggggtcataaaggggctaaaggagaaattggtgaaccaggaagacaaggacacaagggtgaagaaggtgaccagggagaactcggagaagttggagctcaaggacctccaggagcccagggtttgcgaggcatcaccggcttagttggggacaaaggggaaaaaggtgctcggggcttagatggtgaacctgggcctcagggtcttcctggtgcacctggtgatcaaggacagcgaggacctccaggagaagcaggtcccaaaggagatagaggggctgaaggtgctagaggaattcctggtctccctgggcccaaaggagacacgggtttgccaggtgtggatggccgtgatgggatccctggaatgcctggaacaaagggtgaaccaggaaaacctgggcctcctggtgatgcaggattgcaggggttaccaggtgtacctggaattcctggtgcaaagggtgttgctggtgaaaagggtagcacaggtgctccagggaagcctggtcagatgggaaattcaggcaaaccgggccaacaggggcctccaggagaggtgggaccccgaggaccccaggggcttcctggcagtagaggagaattaggaccagtgggatccccaggcctaccaggtaaactgggttctctgggtagccctggcctccctggcttgcctgggccccctggacttcctggaatgaaaggtgacaggggtgtagtcggtgaaccgggtccaaagggtgaacagggtgcctctggtgaagaaggtgaagcaggagaaaggggggaacttggagatataggattacctggcccaaagggatctgcaggtaatcctggggaacctggcttgagagggcctgagggaagtcgggggcttcctggagtggaaggaccaagaggaccacctggaccccggggtgtgcagggagaacagggtgccaccggcctgcctggtgtccagggccctccgggtagagcaccgacagatcagcacattaagcaggtttgcatgagagtcatacaagaacattttgctgagatggctgccagtcttaagcgtccagactcaggtgccactgggcttcctggaaggcctggccctcctggtccccccggccctcctggagagaatggtttcccaggccagatgggaattcgtggccttccgggcattaaggggccccctggtgctcttggtttgaggggacctaaaggtgacttgggagaaaagggggagcgtggccctccaggaagaggtcccaacggtttgcctggagctataggtctcccaggtgacccaggccctgccagctatggcagaaatggccgagacggtgagcgaggccccccaggggtggcaggaattcctggagtgcctggacccccgggacctcctgggcttcccggtttctgtgagccagcctcctgcaccatgcaggctggtcagcgagcatttaacaaagggcctgacccttgaaaggcttactgctgcatggctgtctgcatgaaccacgcctggtgaaggagcctgggtgagaaacaccatccaaagctggggcaaagatgattaccttcagcatgattacaatgtattaccttcagtatgattacagaagtcctacttgacaatcacatatagaagaacggtgctattcagtaagttctctttcctttcccttggagggaagacagcagagtcatcagttaaaaaaaaaaaaaagaaaaccaaacacctcccttgaataaatttatactcctgttcccaggatcttgagctttagtgtgctatacctatgtgtcttatcgtgggccactgtgccaataaacaaaaacaactgtttggtttacctcagttgcagtagttattttcatttagaagttgttctcagattattgtttcagttatatagaggattactagaactagttatgaagaaaccccactacattccaatggaattggtgcttaaaatctcatcggatgttgctgttctctggagtgataagaaagggctacgatctcccgaaatgatttctttacgtcatgtattggtttccttcttcaccttggaaccttttggttgaactggtatgtactttaccccaaacctgttaatattttgagcgcttctatgtggaaagcaaagaaataattttaatactctggcgattcataaattttattgatgagattatttattttaaaggtttgaggtaacatctctggttgtaccaaagaagaaataaatatggtttcttaatctcttgcatgttttcttataaataatcatgttcaatgaaaagaagttactgagcttatttagatacattaaacattacttaactactggttca

SEQ ID NO: 60908 - DNA, 1819 bp, Homo sapiens
ttttttttttttcaaactgcaaaacccttttatttttaataaaaggcctcacttccaaggagagcccagcccaggagatccccggtgaatcgtcaagcctgggtcctcggggagccggcgttcctgctgagctgatgttgtacttctgaaggcctgtgatcgctaactgcaccatgaggcagaatgcagggtgctctcaaccagctgggggttggggttcaggctttttttcatctttcggccaaggcagacaacaacggactcatcatcccacgcgactgagtgacgcgaggcttcaaacgcaagcacgagtgtttagaatcctgcattttcaaaggctcttgcccactgggaactacatggagaggagattaagaacaacaaccaaaagaggcagggggtggggcaggcgtgaggtaggggtggggtggggatgacagtcaacacagcttggaccagaagcccatggcgcctggctccctggaaaggcacagggcacagacggatgccgcctttcttgctgggacactcctgccaccatccacagctcccccgtcactccacgttcttgtacttggtgaacaggttgtaaagaaccctcagggtggatttgaggtccaagttaaccacgtcttcaggacgagccttgggtttcttgaggcctccgtccagcatcagctcaaaggcgaaggacacattgtggaccttctgatcgaagctttccggagtcaggtagaagtggtggagaggaacaaagtagtcttccagaaggcccatgagcagaaccaggtacacgccatctgcaaactgggtctccagttccgtcacctccaaattcagcttgttcaggtgcttgttcacaaaagtgatgagagacttcttcaccacgctgagcttatccggggcgtggtcgaacagcgtgtcgaaggcatcccgctcgaaccggcccatcatcatctctgtagttgtggtcagctcctccgagatgtggctggaatgcagcaggccttcccgtttccgcacgaccaccacctgcaccgttacatgctcaggaaggcggatgggggccctgaagtgcatggccagagagaccagcaggtggaggatggccaccaggttcttcccgtgaattgagtccacgctccaccggagcgcccagcctcggggccgcagcaggtcatgtactgcttccagcaccgtctgcagcttctgtttctgccctatttcggactgtgtcacctcagccacattcagcttgcaccctgccagtttttccaagagcttctgcagcacctggccgtcatacaggtcttcctccagctgcttcacaatgatcctctcctccaccagcacgtcattaatccagtcgaggaggaccttgaccagttccttgaacttggggtcttccttggaagtggggtcaatcatcgtgcgctcctcgttctcctcaagctgggtgtcttcagggtgaacatccgccagggcgggggacatcggtgagttgatggcattcttgccttcttcctgcaggtcactcagccaccagctcctcttcccagctggggagggggcatcgggatccttcgcttgggcttaagcaggaacccaaagacatctctgttaaatgaggttttccaggcctctgccaggaaatgacagctttctatgaattttccaacttccatccgtactcagaggggtgtggtttcttcgtagaagctgtaatttatcagaataactaacttcatcaggcacgaaggtcttcttaacagagcagtttttctaaaaataagtccagttgtacttcagtgaagatctt

SEQ ID NO: 60909 - DNA, 5120 bp, Homo sapiens
ttttttttttttgcaacaatttaaaaatttattgcattacagtagcatcacatcagcagtcaataatgccactttaagcaaaagtctttcagtatttccgttacacattctgttaacaagaactcatacattggtaaaattcattctaagaaaacttggcaaataacgctttggcctgtaattggcatttctttctctacttttccttcccaccatttcttccttttaaactacaggatttatattttaaaatgttttatttcagaacattaagatagcagttacattttttaatatttatattattttaaaatgactctttaagatacagttttaaacccatgggctagaaatcatacgactgttaattagccgcattatttggtctaacattttttatcattctgaaactggatttgtgtaatacattgataaattcatacaatttggaagagtcagttgaagttacaaggacccaatatctgccctctttcagtgaatgccggcaaatctgttattccattggcaaaatcgtattgctgctctcctgttaatctcacatttataaaaggatcatgaggctgccaagtgctaaaaatggagatggtctagtaactagaaaactccccaccccagggagcacacctacatatctccctacaacctaataatgtgatgtgttttggaacacagacattagaacttcatgaagttttaactgttgattctttcccaagcatcatcaagttatgatttaggcaatgtatgattgaaatgcattcattcatcatgcataggcacaatcacagaaatattgcacaaagtatgtccctgactgaaaatgagaggtacaaaaacgtatttcactcttcgtaaagaagtttgtgaggaaatacaactctgcgatcgtatagacatgtttcctgataatacagacattcacaaacagtagattgcaccacagtgtgtaaacattttaagttgcataaacttctccttgattttcaaagataatataatactgtctactaaaattcctttttgtttcaactaagtactctcacatatattagtttataataatgtttgttattactttctaaagtgttttccactcaaggaaaagaagtaaattcctatgtcagagtaaccgaggtggttgaagaataggtattagccagagaggtctagatagtaaaatcaaacttcaagcctcaaagaagctccatgaacagagaggaatgccaggtgtcacacagctttccttcactctaattcattcttgactagagcctgtatgcctgattcagagacatttaaactcttaaaggatttcttatgatcttcactaaatacattaagaagaatgccaaccagcgccctttcgtgtactgggacaggtagtcatgtgattaaaacagggaacacgaactctgactttaaaatgtattgtagatacaaatgctctaagctaggaaaggtttttcacacccacagccaatgatggcagcctttcattcctcggaaataagccctttttgaggtcattgaaaaaagagtgcaactgctgcagctcacgatgcaatatcttcatgagcccagagcacatacaaatccaaagggaactgccacagtacactgctcattcttggcaccggaacagatgaaacacactgtatcctgcacatacctgccagagcaggccactttcctcttctgtgagatttagaaagctcccccaaaaggttatcactcccatcaccaatacacagaaaatggaggaaaggctgtttccagttctcggcctttaaacagctctaaatgtcagtactccacagtggcatattacaaagtaataaacagtgccacacttgagggcaaaccgcatattgagctatagaagagctcactgtgattaagatgagatcaaacatcatagcagaacattagcaaattttatctgaattctgtaatggacatccatgctgcaataacattagaaaagcacgggagcctattccaaaccagcgagaacagttttgtgcaaagagtgggtctttgtgtgtttgaactcccaccacgtaagggcaaactcgatatgcatgctaatgacctacaattatgaaatgaaaaaagaaaaatgctgaaggatgccagagtgaacatcagtgagagccacagagacccactctcttttaactttttacaaataaacttaaactataaatgagaaccacaaataatcatgagtagctctaacattcaaatgaagtaaatgaattgtgtaggagattaaccccataactgtgtttcgtttttgaaaatgtcttgagcagctctttgatgatggtggtgtttatctccttcttctcggcagccaagcccagcaaaagcatggcacacagcagttgctgcccaagcctgggtgctcctggtggtcctgcatctcaccaaggagctgcacgattggctgttgcagtagggttgtcctgggaagaaccctccctggcttctccttgtgcaggctccacgctgttggtgaggctcgcctcacaaagatcaccatgcttgtcggcagccccgagctcctggggggctggggctcctggactgggttcagcagcagggttctgggcagcggccaggaatttgccgtgcccctcgctgtagctgccacaagccgcaacaccatctcctgcagctccagcagcttcaccttcctctcctccttgtcctgggccagcctgatgatggcctcctcccggtgacgcatctttggcactgtcccctggctctgttagaaggcgatgtacgttctgatggcatctctctctccggtactggatgaatccaagttccagtttctccacatgctccctcaggtccgccttctcctccaggaggtccataaggccgctagactcgcccccagtccctgaggctgggactgctgcctctggctccttctcggccgaggtgagcgtctccatcacctggcccagcttctcctgcagctcctttacttgctgctccaactgcagtgcgctcttgttctcgtgcttcagctcctccaagtcgctctgtggctcggccagctgctgaagcctcttctcccgttcccgaagcctctcctgctgctcctgaagcctctcctcctgctcgcgaagcctctcccttttgcccacggttcaggagactgatgcactgattgttttccacctgagcctggagctctcctgccactctctccagctccttcctcaggtcttgcagctccacctcagaggacactgctggggcatccgggggcagtggctcagccatctggtttttgagtctggacaagctcctctccagctcctctacccgatgcgtatcatgcttcttctcctccttcaatgtgcaaacctcctgcgacattttcctcatcctctgctgccactgggccctctctccttttatttgttcagcatattgatctctctccagctggacttctttaagcgactccttcaactgtgtcacgtgtcctttcagcagtatctgctcccgtatggactgctctaactgccgcttgagaagtgctttactgcggctcgagaacccatccggcttcttcttctgtgtggcggcgacagcacagagagaccactctaactctcctatacgctgcgatgaacgttgcaggcggccggccagatccttggactcttcttcaaagtatctgagagaatgtttcatgtgatacaggtccgtatttagtttctttttctctatgttcaatctctggatttgaccctctagctccctttcagctttctgtttctcattgtttgctttcttttcttcttccagctgatgttccacttgtttcttctgttgtttcaaagatttgatggtgtcattcagtcgactgatttttatggacctcgagttcaggactgctgcttgttcttggcacgggctctgacgcgcatgcagagaggaggaggcggaggaggacttgggggagaggtagagagaacgatcattagggctgggttgtgtgtgggctgtctcagctggcagaggggcacccagtccccgctgcgggaggaggttggagggctggcctgcggggtcactgcacctccgcccagagcctcctacctccagatccttcagggtagcagatgatgtagggccctccccgtggatacctgttgctgactataagagatgagactgcacatggagatgttctgtccccctcagtgtctgagccctccgacttcctttcttccccatcaactggcaacattttcttttctgcctatcttggaccctttgtcccataactcctttgtgccaacttctctcacggttcttatctccccaccatcccaccctgggggccttgcagtgactcatgatgggaagtggctgttctcattgtcctggcttccccttgagactggggatgaggaaaatcaaacagcaaagaccatatcctgggtgtcctgggtgttgacagcaggccatgtactagggattaacataaaatcgacaattatcaatctcattgaaacttcacaaatacaagtcaaacaataccacctctatcatacagacgtgaaaacagaggcccaaagagctcaagcaacttgccctaaatcatatccctagcagacggagaggcaggattcaaacccagaattcttttcttttttgaaacggagtctctctctgccttccaggctggagtgcagtggcgtgatcttggctcactgcaagctccgcctcctaggttcacgccattctcctccctcagactccggagcagctgggactgcaggcgcccgcccccccgaccggcttttttttttgtattttttagtatttcaccgtgtttgcctggatggtctcgatctcctgaccttgtgatccacctgcctcggtctcccaaagtgtggggattacaggcgtgagccactgtgcccggccaaatccagaatccttcaccagtacccaacagtccatccacaatcttaacgattgccctctactgctccttgggccccctgtccccaaaagcctgtccaggcaagactcacagcctcagatgagtggcaaccaccaga

SEQ ID NO: 60910 - DNA, 3275 bp, Homo sapiens
ccggggcgcgaccatctgcgctgcggcgccggcgactcagcgctgcctcagtctgcggtgggcagcggaggagtcgtgtcgtgcctgagagcgcagctgtgctcctgggcaccgcgcagtccgcccccgcggctcctggccagaccacccctagtcccccctgccccaagtcgcagccatgaactacctgcggcgccgcctgtcggacagcaactttatggccaatctgccaaatgggtacatgacagacctgcagcgtccgcagccgcccccaccgccgcccggtgcccacagccccggagccacgcccggtcccgggaccgccactgccgagaggtcctccggggtcgccccagcggcctctccggccgcccctagccccgggtcctcggggggcggtggcttcttctcgtcgctgtccaacgcggtcaagcagaccacggcggcggcagctgccaccttcagcgagcaggtgggcggcggctctgggggcgcaggccgcgggggagccgcctccagggtgctgctggtcatcgacgagccgcacaccgactgggcaaaatacttcaaagggaaaaagatccatggagaaattgacattaaagtagaacaggccgaattctctgatctcaaccttgtggcccatgccaatggtggattctctgtggatatggaagttcttcggaacggggtgaaggtcgtgcggtctctgaagccggattttgtgctgatccgccagcacgccttcagcatggcacgcaacggagactaccgcagtttggtcattgggctgcagtatgctggaatccccagtgttaactccttgcattctgtctacaacttctgtgacaagccctgggtgtttgcccagatggttcgactgcataagaaactggggacagaagaattccctctaattgatcagaccttctaccccaatcacaaagaaatgctcagcagttacaacgtaccccgtggttgtgaagatggggcacggaacactctggggatggggcaaggtcaaggttgacaaccagcatgacttccaggacatcgcaagtgtcgtggcactgaccaagacgtatgccactgccgagcccttcatcgatgccaaatatgacgtgcgtgtccagaagattgggcagaactacaaggcctacatgaggacgtcagtgtcagggaactggaagaccaatactggctctgcgatgctggagcaaattgccatgtctgacagatacaagctgtgggtggacacgtgctcagagatttttgggggactggacatctgcgcagtggaagcgctacatggcaaggacggaagggatcacatcattgaggtggtgggttcctccatgccgctcattggtgaccaccaggatgaagacaaacagctcatcgtagagctcgtggtcaacaagatggctcaggccctgccccggcagcgacagcgcgatgcctcccctggcaggggctcccatggccagactccgtccccaggggccctgcccttgggccgccagacctcccagcagcccgcagggcccccggctcagcagcgacccccaccacagggcggccctccacagccgggtccaggcccccagcgccagggacccccattgcagcagcgcccgcccccgcagggccagcagcacctttcaggccttggacccccagctggcagccccctgccccagcgccttccaagtcccacctcagcgccccagcagcccgcgtcccaggccgcgccgccgacccagggtcaaggccgccaatcccggccagtggcgggaggccccggggcgcctccagcagcccgcccgcccgcctctccgtctccccagcgccaggcgggccccccacaggctacccgtcagacatccgtctctggcccggctccgccaaaggcctctggggccccaccgggcgggcagcagcgccagggcccgccccagaaacccccaggcccagccggccccacacgccaggccagccaggcgggtcccgtgccccgcactgggccacccaccacgcagcagcctcggcccagcggcccgggccccgctggacgtcccaaaccacagctggcccagaaacccagccaggacgtgccgccacccgccaccgccgctgcagggggacctccgcacccccagctcaacaaatcccagtctctgaccaatgccttcaaccttccagagccagccccgcccaggcccagccttagccaggacgaggtgaaagctgagaccatccgcagcctgaggaagtctttcgccagcctcttctccgactgataccccactctgagaaccccaaaatccctgggcaacccttctctgggccctgaatccatttctcacttttggagtctccaaatcccttgagaacccatctcccggttctccaagattccacctctcattcctcaagatccccgagtaccttgagaaacctgactcctcctggccctaaatccggttctcacatgtggaatccccaagtccttttagaaccccactcgtgggtcacttcaggatctacttctgttttagaacctccacattcctgaagacctccgcccctggtttccccagagggcgttttccttcctgggaagtgcccaaataccaggcaacccattgcagaatcccttcctggagccctgaagttcctgggaaaaccctatttttggtcccaaatctctccagcacacctatttcccatcataattttccaaatcctcaagaaacccctactgttgagccccttcccatggatcttccatccctctgaagatccacatcttcaaatgccacccaacacctagccccacaaggatttcccttcaccagctcccctcaacctcattcaataccttgggagcccctcccacttccaggacccctcggttcccccagggaccccctccccagtttcctgcctctgacagctgtctttaaatatgcaaactccacccatcttcccagaatcctttgcacacggaaggccagtggtctccgcttccccacctttgctgtggtgtctgtgtctgtgactgacgtggcctccttttgtgccgtgcttggcatatgtggtcctcgttcatcgtgccgcctgtggtgatgcgtgcagtgacgctgtttatgtggtccgcacctccccctgaccttcactccttgcctggactcaccccacccctcagcggctctgaaccccaagagaagagtcgggaaacaaaataaacaagcaaaggcccagcaaaaaaaaaa

SEQ ID NO: 60911 - DNA, 1502 bp, Homo sapiens
ttttttttttttccggggtttcctctgtcacttttaattaaaacacaagttgagtaagcagcctccacaggctgtattcccaggcccccgcccaccctgacctttggcccagaagctactgcttcagtgtgtggggtggaggagtgagactgggtccacagtgacattattgctgacctcttctgtgtgaggaaaaaggccacgagaccctttgtggggccagccctgagtgctcctctcccaagttttaaggcagggagggggaaataactgtacagcccttttagcccccagctctggagtggcagacagcaatgaggccacatccctggagctgcccgggggaagtgggtgaggaaccaaagccgtggtccctgtagagcagctgtggggaggggagggccagtcccctgctcagtcctgaccacataagccttggtcacaggtgtaggtggagagggcactgacggacactgccctaaggtgcagtcctgaggcacttaggtgggcgcctatctaggccatgcttctcagttggccttgaccttggcaatacctggagctccattttgctgaagtgcacggggcagccgcttgcccttggtataagagtgataccagaagttggagaacagcatgaagaagatggtgccatacatccagatgaggtgaataatgactgggtactggtagttacagctggacataaagtagtactgggagatgtgcagtgagaccaggacaaactggatcagctgaatggctgtcatgtgctttttccaccaaaggtagggttgtgccacagggccaaaggcagataatccgtagtacaggtacattatgacatgcacggaagagtttatcatggcatggaaagagcccattcctcccggggcaatctttaccccccaccaccagctccagggaagcacagagtgatggaagacatgtaggaaggtcacctgcccgtctttctttcggagaataaagatcactgtgtccatcagctcaatgaacttggagaagaggaagagccagcccacccgaaccatcttaagtgcctcagggctgttggaatagtccacagggtcacagcgccaggtataggtgctcagccagcccgacatcaggaactcatagacaatgtagagggagagtgccaccagtgagaagttgtagacaatcatgaagccacggagctggaagggcttccgattagccatgatgcgaggcccaagtgagagaacgaagtacacgtaggtcaggagaatggaggtcattagcaagggggaccccatcagagggtagccctggatccggggatctgcgtgcttcatcacctcttggtacaagttcacaacagcctccatcctggctaaggactccgtaggggccaggcgggcaacggcggagcgctcggagggagcagggccagagagaagtccccggggccagcctgcctgcctgccacttacaccacgcgtccgcgtacgcgtgggcgt

SEQ ID NO: 60912 - DNA, 827 bp, Homo sapiens
  misc_feature (1)...(827): n = a,t,c or g
ttttttttttttctggctgacaaagatatttattgagggtttactgggtacagcgagaagggctgaatggcttgggatgcagagagagacccctcccctgggatcctgcagctccaggcccctgtgggtggggtgggggctggaacctatgaacattctgcaggggccactgacttctccacggtgctcccttcttgcataacctggcagctgtagcttctgcgggacctccactgctcgggcgtcaggctcaggtagctgctggccacgtacttgttgttgctctgtttggagggcgtggtcttctccacgctctgggtgatgagggtaccatctgccttccaggtcaccatcaagattcccggataaagttattcatgagacacaccagtgtggccttgttggcttggggctcctcacaggacggcaggaacagaatgaccgacggggtagtcttgggctgacctgtgtggacagaggagggggtgagagatggcagagggagtgtggggtgttgtggagcgcctctctctgtctaaagtctctgggagggttcatggtgtggccgtctggtccacccagggcctctccttccctcctcattccctcctttccactggagccctctgcagagcagacagccctgtgccttcctaggagcccttcccaagtcacctttcccaggtgtcctggcccagccctttcctctgcagcctcagtttccccgtgtgtacccagggcaggctgtgctccctccttcctggtttctgggaattccaccgcnctgactaatgtcatcagtgnntcaattnncccccctcccctcg

SEQ ID NO: 60913 - DNA, 1121 bp, Homo sapiens
ggaattcaatgctgcacaagctctgagccctcctggggctgcgaagttcctctgatgggaggtgtgtggtggccatcccatccctgtgtaagacctggggaaaccactcttcaaggttcaggaggagggagggcggcccccgacccttaaccagagcgaggttgttgctttgtgtccacagggaccaggagcgaaccatgatgccaggtaggaggggctgactgggccctgcgagcgcgtgcctttcctgctgggcagaggccctccacatggggccacgcgggccgggcacaggagggcagtcagatgggcagggcctgagagcctccctcctctccctaggtccctaatcatggactccccaagagctggcacccaccagggccccctcgatgcagagacagaggtcggtgctgaccgctgcacgtcgactgcctaccaggagcagaggccccaggtggagcaagttggcaaacaggctcctctctccccagggctgccggcaatgggggggcctggccccggcccctgtgaggaccccgcgggtgctgggggagcaggtgcagggggctccgagcccctggtgactgtcaccgtgcagtgcgccttcacagtggccctgagggcacgaagaggagccgacctgtccagcctgcgggcactgctgggccaagccctccctcaccagggcccagcttgggcaactcagttacctagccccaggtgaggacgggcactgggtccccatccccgaggaggagtcgctgcagagggcctggcaggacgcagctgcctgccccagggggctgcagctgcagtgcaggggagccgggggtcggccggtcctctaccaggtggtggcccagcacagctactccgcccaggggccagaggacctgggcttccgacagggggacacggtggacgtcctgtgtgaagtggaccaggcatggctggagggccactgtgacggccgcatcggcatcttccccaagtgcttcgtggtccccgccggccctcggatgtcaggagcccccggccgcctgccccgatcccagcagggagatcagccctaatgatgctgtgtccatgatgcttttaataaaaacaacccccactgc

SEQ ID NO: 60914 - DNA, 2785 bp, Homo sapiens
tagcagccaggcttggcccccggcgtggagcagacgcggacccctccttcctggcggcggcggcgcgggctcagagcccggcaacgggcgggcgggcagaatgagtctgcaggtcttaaacgacaaaaatgtcagcaatgaaaaaaatacagaaaattgcgacttcctgttttcgccaccagaagttaccggaagatcgtctgttcttcgtgtgtcacagaaagaaaatgtgccacccaagaacctggccaaaagctatgaaggtgacttttcagacacctctgcggggatccacagacagcacaggattctaagtcctagcatggccagcaaacttgaggctcctttcactcaggatgacacccttggactggaaaactcacacccggtctggacacagaaagagaaccaacagctcatcaaggaagtggatgccaaaactactcatggaattctacagaaaccagtggaggctgacaccgacctcctgggggatgcaagcccagcctttgggagtggcagctccagcgagtctggcccaggtgccctggctgacctggactgctcaagctcttcccagagcccaggaagttctgagaaccaaatggtgtctccaggaaaagtgtctggcagccctgagcaagccgtggaggaaaaccttagttcctattccttagacagaagagtgacacccgcctctgagaccctagaagacccttgcaggacagagtcccagcacaaagcggagactccgcacggagccgaggaagaatgcaaagcggagactccgcacggagccgaggaggaatgccggcacggtggggtctgtgctcccgcagcagtggccacttcgcctcctggtgcaatccctaaggaagcctgcggaggagcacccctgcagggtctgcctggcgaagccctgggctgccctgcgggtgtgggcacccccgtgccagcagatggcactcagacccttacctgtgcacacacctctgctcctgagagcacagccccaaccaaccacctggtggctggcagggccatgaccctgagtcctcaggaagaagtggctgcaggccaaatggccagctcctcgaggagcggacctgtaaaactagaatttgatgtatctgatggcgccaccagcaaaagggcacccccaccaaggagactgggagagaggtccggcctcaagcctcccttgaggaaagcagcagtgaggcagcaaaaggccccgcaggaggtggaggaggacgacggtaggagcggagcgggagaggacccccccatgccagcttctcggggctcttaccacctcgactgggacaaaatggatgacccaaacttcatcccgttcggaggtgacaccaagtctggttgcagtgaggcccagcccccagaaagccctgagaccaggctgggccagccagcggctgaacagttgcatgctgggcctgccacggaggagccaggtccctgtctgagccagcagctgcattcagcctcagcggaggacacgcctgtggtgcagttggcagccgagaccccaacagcagagagcaaggagagagccttgaactctgccagcacctcgcttcccacaagctgtccaggcagtgagccagtgcccacccatcagcaggggcagcctgccttggagctgaaagaggagagcttcagagaccccgctgaggttctaggcacgggcgcggaggtggattacctggagcagtttggaacttcctcgtttaaggagtcggccttgaggaagcagtccttatacctcaagtttgaccccctcctgagggacagtcctggtagaccagtgcccgtggccaccgagaccagcagcatgcacggtgcaaatgagactccctcaggacgtccgcgggaagccaagcttgtggagttcgatttcttgggagcactggacattcctgtgccaggcccacccccaggtgttcccgcgcctgggggcccacccctgtccaccggacctatagtggacctgctccagtacagccagaaggacctggatgcagtggtaaaggcgacacaggaggagaaccgggagctgaggagcaggtgtgaggagctccacgggaagaacctggaactggggaagatcatggacaggttcgaagaggttgtgtaccaggccatggaggaagttcagaagcagaaggaactttccaaagctgaaatccagaaagttctaaaagaaaaagaccaacttaccacagatctgaactccatggagaagtccttctccgacctcttcaagcgttttgagaaacagaaagaggtgatcgagggctaccgcaagaacgaagagtcactgaagaagtgcgtggaggattacctggcaaggatcacccaggagggccagaggtaccaagccctgaaggcccacgcggaggagaagctgcagctggcaaacgaggagatcgcccaggtccggagcaaggcccaggcggaagcgttggccctccaggccagcctgaggaaggagcagatgcgcatccagtcgctggagaagacagtggagcagaagacttaaagagaacgaggagctggaccaggattctggcgacgacctcatcttccaagatggagaagatctggacctccacggagccgctgtccccgccccccgcgctcccgtctgtctgtcctgtctgattctcttaggtgtcatgttcttttttctgtcttgtcttcaacttttttaaaaaactagattgctttgaaaacatgactcaataaaagtttcctttcaatttaa

SEQ ID NO: 60915 - DNA, 2413 bp, Homo sapiens
  misc_feature (1)...(2413): n = a,t,c or g
cgaagtttccgaagaagtaaaatagaaagaagaccttttttgaaatgacctgtgttagtcacctctctcaggatgcgtgaggcggacacgttgaggccacctcagctgatggaagtttccgctgacatcatctctaccgttgagttcaaccacacgggagagctgctggccacaggtgacaagggcggccgggtcgtcatcttccagcgggaaccagagagtaaaaatgcgccccacagccagggcgaatacgacgtgtacagcactttccagagccacgagccggagtttgactatctcaagagcctggagatagaggagaagatcaacaagatcaagtggctcccacagcagaacgccgcccactcactcctgtccaccaacgataaaactatcaaattatggaagattaccgaacgagataaaaggcccgaaggatacaacctgaaggatgaagaggggaaacttaaggacctgtccacggtgacgtcactgcaggtgccagtgctgaagcccatggatctgatggtggaggtgagccctcggaggatctttgccaatggccacacctaccacatcaactccatctccgtcaacagtgactgcgagacctacatgtcggcggatgacctgcgcatcaacctctggcacctggccatcaccgacaggagcttcacccccagacatcgtggacatcaagccggccaacatggaggaccttacggaggtgatcacagcatctgagttccatccgcaccactgcaacctcttcgtctacagcagcagcaagggctccctgcggctctgcgacatgcgggcagctgccctgtgtgacaagcattccaagctctttgaagagcctgaggaccccagtaaccgctcattcttctcggaaatcatctccatccgtgtccgacgtgaagttcagccacagcgaccgctacatgctcacccgggaactaccttacagtcaaggtctgggacctgaaacatggaggcaagacccatagagacctaccaggtccatgactaccttcggagcaagctctgttccctgtacgagaacgactgcattttcgacaagtttgaatgtgcctggaacgggagcgacagcgtcatcatgaccggggccatacaacaacttcttccgcatgttcgatcggaacaccaagcgggacgtgaccctgggaggcctcgagggaaagcagcaagccccgggctgtgctcaagccacggcgcgtgtgcgtggggggcaagcgccggcgtgatgacatcagtgtggacagcttggacttcaccaagaagatcctgcacacggcctggcacccggctgagaacatcattgccattgccgccaccaacaacctgtacatcttccaggacaaggtaaactctgacatgcactaggtatgtgcagatcccggcccctgccacccagcctcatgcaagtcatccccgacatgaccttcacgaccgcaatgcaaggaggggaagaaagtcacagcactgatgaggacagctgcagaggtggcagtgtgtggacacaggaagtttgggccccctccctgccccagctttcctaggccagaattgtgtttggcagtaattgtctgtttaaaaaaataaaaaggaaaggaagcgttcaccgccacaaatcataaaatggacatgactgtggagtcttacagttcagggttctttcattcacgtcccttcctgtctcggtctgcggtctttaccacatcaataggactttttatgcgtccgggttaatttttcactccagtgcgtcctgttgcagggaccggagctgatgggagctgcttctcccccatgcctcactggtcccagatcagggctccagggacagatgatgagtctcaaacgagccagccaggggttcttttggttataaatggggcaattcgccctgtctcagagctgatgacctcaccgttgttttttggatggtgaattcatgctgagaatttgcagatgcaagctcctctcctaggtcttctgaatgtcttgaaacatcccaggtcccaggtctggtgcggtttcccgagaggagcggagtggggtttgtcttctgtgtgcctgtgtcctcatctgattcacctgccatttgctgagcctctgctgtgtaccaggcgtggtgctcagccctagaggcagttgacttaccccctgcagccctccctgccgcctcacccttcagcattcactgggcaccttcccggagcggacactgactcccatgcacgattttttggaatcttcctcctgactgtgaggtgggtgttcattcatttcctccataaacaccaacttctcgaagcgtgcctcgtgccaagctggcgtaatgtggttacgatgtcttcattnntcaggcnncgggcctctgacaccc

SEQ ID NO: 60916 - DNA, 1666 bp, Homo sapiens
agcggccgcgaccgccggggacgagcttggaggaaaaggaaccgggagccgcccacccgggggcgctctccggacccccagggtcctagcgcgcggcccttaccgagcctgggcgcccggatttcggcagcggatcgcctttccgggttggcggcccgcctgattgggaacagccggccggttgccgggggaacgcgggagtcgggcccgacctgagccacgcgggcttggtgcccacctgtgcgcgccgcctgcgaagaaggaacggtctagggagaaggcgccgccggccgcccccgtccccaccgcggccgtcgctggagagttcgagccgcctagcgcccctggagctccccaaccatgaagcccaacttctccctgcgactgcggatcttcaacctcaactgctggggcattccgtacttgagcaagcaccgggccgaccgcatgaggcgcctgggagactttctgaaccaggagagcttcgacctggctttgctggaggaggtgtggagtgagcaggacttccagtacctgagacagaagctgtcacctacctacccagctgcacaccacttccggagcggaatcattggcagtggcctctgtgtcttctccaaacatccaatccaggagcttacccagcacatctacactctcaatggctacccctacatgatccatcatggtgactggttcagtgggaaggctgtggggctgctggtgctccatctaagtggcatggtgctcaacgcctatgtgacccatctccatgccgaatacaatcgacagaaggacatctacctagcacatcgtgtggcccaagcttgggaattggcccagttcatccaccacacatccaagaaggcagacgtggttctgttgtgtggagacctcaacatgcacccagaagacctgggctgctgcctgctgaaggagtggacagggcttcatgatgcctatcttgaaactcgggacttcaagggctctgaggaaggcaacacaatggtacccaagaactgctacgtcagccagcaggagctgaagccatttccctttggtgtccgcattgactacgtgctttacaaggcagtttctgggttttacatctcctgtaagagttttgaaaccactacaggctttgaccctcacaggggcacccccctctctgatcatgaagccctgatggctactctgtttgtgaggcacagccccccacagcagaaccccagctctacccacggaccagcagagaggtcgccgttgatgtgtgtgcttaaaggaggccttggacgggagcttgggtctgggcatggcttcaggctcgctggtgggccaaccttcgcatagctatgtgattggcctggggctgcattctcctggcactgctgtgtgtcctggcggctggaggaggggccggggaagctgccatactgctctggacccccagtgtagggctggtgctgtgggcaggtgcattctacctcttccacgtacaggaggtcaatggcttatatagggcccaggctgagctccagcatgtgctaggaagggcaagggaggcccaggatctgggcccagagcctcagctctatgccctactctctggggcagcaggagggggacagaactaaagaacaataaagcttggccctttaaaaaaaaa

SEQ ID NO: 60917 - DNA, 1728 bp, Homo sapiens
gggcaattccggaatcctaggcgcggatctcgcgtttccggccggaaggcttctccagcctttcccggaagctgcgctcgctacccgggtaacgggtcccggctgtggaagctcccgcggcgccgcgatggacctcgaggagtcggaagagtttaaagaacgctgtactcagtgtgctgctgtctcatggggtcttactgatgaaggcaaatattattgcacttcttgccacaatgttacagagagatatcaggaagttacaaacactgatcttattcctaatacccaaataaaagccctcaaccgggggcttaaaaaaaaaaacaatactgaaaaaggctgggattggtatgtgtgtgaaggtttccagtatattctttatcaacaagcagaagccttaaagaaccttggagtaggcccagagttaaagaacgatgttttacataatttttggaagcgctaccttcagaagagcaagcaggcatattgtaagaacccagtttataccactggaaggaaacctacggtattagaagataatctaagtcattcagactgggctagtgagcctgagctgctaagtgatgtcagctgtcctccttttcttgaaagtggagcggagtctcagtctgacatccacactcgaaaacctttccccgtcagcaaagcatcacaatcagaaacgtctgtctgctctggatctctggatggagttgaatactcacaacgaaaggagaagggaatcgtgaagatgaccatgccacagacacttgccttctgttatctgtccttactttggcagagagaagcaataacactttcagatcttttgaggtttgttgaagaggaccatattccttacataaatgcttttcagcattttccagaacagatgaaattatatggacgtgacagaggaatctttggtatagagtcttggcctgactacgaggacatctataaaaaaacaatagaagttggaacatttttagatttgcctcgttttccagacataactgaagactgctatcttcatcccaacatactgtgtatgaaatacttgatggaagtcaacctccctgatgaaatgcatagcttaacttgccacgtggtaaaaatgactggaatgggagaagtggattttctgacatttgatcctatagccaaaatggcaaaagctgttaagtacgatgtacaagctgtagctatcattgtggtggtattgaaactgctctttctaatggatgacagtttcgagtggtctttgtctaatcttgctgaaaagcataatgaaaagaacaaaaaagataagccatggtttgatttcagaaagtggtaccaaattatgaagaaagcttttgatgagaaaaaacaaaaatgggaagaagcaagggccaagtacctgtggaaaagtgaaaagccactctactactcatttgtcgacaaaccagtagcatataaaaaaagagaaatggtggtgaatctacagaaacaatttagcacactggtcgattcaacagcaactgctggaaaaaaaagcccttcaagttttcagttcaactggactgaagaggacactgatagaacgtgtttccatggacacagccttcagggagtcctgaaagagaaaggccaatcactgctgactaagaattcattatattggcttagtacacagaaattctgcagatggtaataatgcttttagaaaaagtcacatataattga

SEQ ID NO: 60918 - DNA, 2496 bp, Homo sapiens
agaagcgtacaccgagtagcttgagcgcctcttccggttaccttttcccagtgccagaggcgcctagggttggggtcctcgctcaggcacagagacccgacaccgagcggcgggtttcccgggatcgagggacgcgcacgccagaggagactaaaggaatccgggttcggaccagatcggaaccactgaccattgcccatggcggccctaggccttaggcagccagaatgtcactgaatacgtcgttcgagttcctaagaatacaacccaaaaattataacatcatggccttttaatgcagccgacaaagtcacactttgctacgtgggaatcaggctcggctggagcgggactttgagcaacaagaaaatctaccaagaggaggagatgcccgaatcgcggcgcgggcagtgagttccaacggcaagcttgggaggaggctcggaggaaagaagtacgggcttcttcttcaaagagtttccggcccgaggatccagccctggcttgctccgggttcaacggcaatatcaggcaggaagtttcaagggtcatcaagaagggtaggcgtaacagagaacacgtcctactacatcttcacccagtgccccgacggggccttcgaggccttccccgtgcacaactggtacaatttcacaccgctggcccggcatcgcacgctcactgccgaggaggccgaggaggagtgggagaggaggaacaaggtgctgaaccacttcagcatcatgcagcagcggcggctcaaggatcaggaccaggacgaggatgaggaggagaaggagaaacgtggccgcaggaaggcgagcgagctgcgcatccacgacctggaggacgacctggagatgtcgtccgatgccagtgatgccagtggtgaggaggggggcagagtccccaaggccaagaagaaggcgccgctggccaagggcggcaggaaaaagaagaagaagaagggttcagacgacgaggccttcgaggacagcgatgatggggacttcgagggccaagaggtggactacatgtcagacggctccagtagctcccaagaagagcctgagagcaaggccaaggcgccgcagcaggaggaggggcccaagggtgtcgatgagcagagcgacagtagtgaggagagtgaggaggagaagccgcctgaggaggacaaggaggaggaggaggagaagaaggcacccaccccgcaggagaagaagcgcaggaaagacagcagcgaggagtcggacagctcagaggagagcgacattgacagcgaggcctcctcagccctcttcatggcgaagaagaagacgccacccaagagagagcggaagccgtcgggagggagctcaaggggcaacagccgcccaggcacgcccagcgcagagggtggcagcacctcctccaccctgcgggcggctgccagcaaactcgagcaagggaagcgggtgagcgagatgcctgcagccaagcggttgcggctggacacgggaccccagagcctgtctgggaagtcgacaccccagccaccatcaggcaagacaacacccaacagcggcgacgtgcaggtgactgaggatgccgtgcgccgctacctgacacggaagcccatgaccactaaggacctgctgaaaaagttccagaccaagaagacagggctgagcagcgagcagacagtgaacgtgttggcccagatcctcaagcgactcaaccccgagcgcaagatgatcaacgacaaaatgcacttctccctcaaggagtgaggcttggtccaatacatggctctgccccccagaacttaaggctctcactgccccttcgccatcctagagtgaggctctgtccaatacatggctctgccctccagaacttcaggctctcagtgacccttcgacatcctgcttgctccctgactcccagggccccgtagttagcaattctggaaaagttaagccatctcctcctctggcccttccttctggaatcttcagatgcctgttaggccttcttattgtcctcctcctcctggctcggcctccctcacactgaccaagggcctgtgctgcccactgggtaacttctacagttctcccttccacttccctaagtctctcttcagctgtgacttatccaccacatagcccagtaagtcttcagttttggctgggcatgatggtgagcgcctgcagtcccagctacttgggaggctaagcccagttcaaggctgcagtgaactatgatggtgccactgcattccagcctgggtgacagaatgaaatcctggcacaaaaaaaaaaaaaagtacccaggcttgggggggggaaccttgttgccccacttttcccgtaggctgaggcacaaaattcacttgaccctggaaggggggggttgctgtgagctgacaccaccccactgcactccagcctgggggacacgtgagactttgtctcattaattaaaaaataataataaattgctcagaaaaaaaaa

SEQ ID NO: 60919 - DNA, 3397 bp, Homo sapiens
ggaattcgcacccccaagttctgtgactccccgaccagtgacctggaaatgcgcaatggccggggtagaggcaaacgcatgcgtcccaacagtaatacacctgtcaatgagacagccacagcctctgacagcaaagggaccagtaacagcagcaaaacccgggcaggagccaatagcaaaggccgtcggggcagccagaattcttcagagcaccgcccacctgccagcagcacttctgaggatgtcaaggccagcccttcctcagctaataagcggaaaaacaaacccctttcagacatggagctgaattctagctcagaggactccaaagggagcaagcgtgtccgtactaattccatgggctcagccactggcccccttcctgggacaaaggtagaacccactgttctggacagaaactgcccctcccccgtcctaattgactgtccccacccaaactgcaacaagaagtacaagcacatcaatggacttaagtaccaccaagctcatgcccatacagatgatgacagcaagccggaagcggatggggacagtgagtacggagaggaacctattctccatgcagatcttgggagctgcaacggtggcatctgtctcacaaaaaaggttccttgtcccctgcccgctcagctacccccaaagttcgacttgtagagccccatagcccttctccttcaagcaaattcagcacaaaaggcctctgtaagaaaaagttgagtggggaaggggacacagaccttggggccttatccaatgatggctctgatgatggaccctcagtgatggatgaaacaagcaatgatgcctttgattctttagaaaggaagtgtatggaaaaagaaaaatgtaaaaaaccctctagtttaaaacctgaaaagattccttccaagagcctaaagtcagcccgtcccattggcccctggccatccccccacagcaaatctacaccttccagacagccaccttcacagcagcgagcccaggctcttcctcaggcttgaccgccacagtggcacaagccatgcccaacagtccccaactcaagcccattcagcccaagcccactgttatgggagaacctttcacagtcaaccctgccttgactccagccaaggacaagaaaaagaaagacaaaaaaaagaaggaatcttcaaaggaacttgaaagtcctctgacccctgggaaggtgtgtcgagcagaggaaggcaaaagcccattcagggaatcttcaggaaatgggatgaaaatggaggggctcctaaatggctcatcagacccccaccaaagccgactggctagcatcaaggctgaagccgacaagatctacagtttcacggacaatgcccccagcccttccattggaggcagtagccgccttgaaaacactacccctactcagcccctgactcccttacatgtggtgacccagaatggagctgaagccagctcagtcaaaaccaacagccctgcatactctgacatctctgatgctggggaggatggggagggcaaggtagacagtgtcaaatcaaaggacgccgaacagttggttaaagaaggggctaagaaaactctttttccccctcagcctcagagcaaagactcaccatattaccaaggctttgagagttactattctccaagttatgcacagtccagccctggggctctgaaccccagcagccaggcaggagtggagagccaggccctgaagacaaaaagggatgaggaacctgagagcatagaagggaaagtgaagaacgatatctgtgaagaaaagaagcccgagctgagcagttccagtcagcagccctcggtcatccagcagcgtcccaatatgtacatgcagtccctgtactacaaccagtatgcctatgtacccccctatggctacagcgaccagagttaccacacccaccttctgagcactaacacggcttaccggcagcagtacgaagaacagcagaaacgccagagcttagagcagcagcagcggggagtggacaagaaggcagagatgggcctgaaggagcgggaggcagcactcaaggaagagtggaagcaaaagccgtcaattccaccaactctcaccaaggcccccagcctgacagacctggtgaaatcaggacctggcaaggccaaggagccaggggctgacccagccaaatcagtcatcattcccaagttagatgactcttcaaaactcccgggccaggcccctgaaggccttaaagtgaagctgagtgatgccagccacctaagcaaggaggcctctgaggccaagacaggtgctgagtgtggtcgacaggcagagatggatccaatactctggtaccgacaggaggcagagccccggatgtggacatatgtttatcctgccaagtactcagacatcaagtcagaggatgagcggtggaaggaggagcgggaccgcaaattgaaggaggaaaggagtcggagtaaggactctgtccccaaggaagatgggaaggaaagcacaagtagtgactgcaagctgcccacgtcagaggagtctcgccttgggagcaaggagccccggccaagtgtccatgtgcctgtgtcctccccacttacccagcaccagtcctacatcccctacatgcacggctattcctacagtcagtcctacgaccccaaccaccccagctaccggagcatgcctgctgtgatgatgcagaactacccaggttcctacctgccttccagctactctttttccccatatggcagcaaggtctcaggtggtgaagatgctgacaaggcacgagccagccccagtgtgacttgtaaatccagctcagagtccaaagccctggacatcttgcagcagcatgccagtcactacaagagcaagtctcccacgataagtgataaaacttctcaggagagagatcgaggaggctgtggggtggttgggggtggtggcagctgtagcagcgtcgggggagcaagtgggggtgaacggagtgttgaccggccccgcacctctccttcccagcgcctgatgtccacacaccaccaccaccaccacttggggtactcattgctcccagcacagtacaacttaccctatgcagcagggctttcttctacagccattgttgccagccaacaaggctcaactccctcactctacccaccccccaggaggtgagaatgacaccaagtgcccggataaagtcagcttcacgggcccggactggcttacccaaggaggtgctgaaggtgccgtttagacatcagttaaatggtgttgatcatcctgtttgccgtttccaccatgactgaaggcagacccttggctatctcacctccaccaagacctccgggactacctgaccctacctcttcctca

SEQ ID NO: 60920 - DNA, 1432 bp, Homo sapiens
tggggcgacccacgcgtccgggccggagacagagacttcacgactcccagtctcctcctcgccgcggccgccgcctcctccttctctcctcctcctcttcctcctcctccctcgctcccacagccatgtctgcttagaccagagcagccccacagccaactagggcagctgccgccgccacaacagcaaggacagccgctgccgccgcccgtgagcgatgacaggagtgtttgacagaagggtccccagcatccgatccggcgacttccaagctccgttccagacgtccgcagctatgcaccatccgtctcaggaatcgccaactttgcccgagtcttcagctaccgattctgactactacagccctacggggggagccccgcacggctactgctctcctacctcggcttcctatgggcaaagctctcaacccctaccagtatcagtatcacggcgtgaacggctccgccgggagctacccagccaaagcttatgccgactatagctacgctagctcctaccaccagtacggcggcgcctacaaccgcgtcccaagcgccaccaaccagccagagaaagaagtgaccgagcccgaggtgagaatggtgaatggcaaaccaaagaaagttcgtaaacccaggactatttattccagctttcagctggccgcattacagagaaggtttcagaagactcagtacctcgccttgccggaacgcgccgagctggccgcctcgctgggattgacacaaacacaggtgaaaatctggtttcagaacaaaagatccaagatcaagaagatcatgaaaaacggggagatgcccccggagcacagtcccagctccagcgacccaatggcgtgtaactcgccgcagtctccagcggtgtgggagccccagggctcgtcccgctcgctcagccaccaccctcatgcccaccctccgacctccaaccagtccccagcgtccagctacctggagaactctgcatcctggtacacaagtgcagccagctcaatcaattcccacctgccgccgccgggctccttacagcacccgctggcgctggcctccgggacactctattagatgggctgctctctcttactctcttttttgggactactgtgttttgctgttctagaaaatcataaagaaaggaattcatatggggaagttcggaaaactgaaaaagattcatgtgtaaagcttttttttgcatgtaagttattgcatttcaaaagaccccccctttttttacagaggactttttttgcgcaactgtggacactttcaatggtgccttgaaatctatgacctcaacttttcaaaagacttttttcaatgttattttagccatgtaaataagtgtagatagaggaattaaactgtatattctggataaataaaattatttcgaccatgaaaagcgg

SEQ ID NO: 60921 - DNA, 1428 bp, Homo sapiens
cccgcttctcgctggagtgcgcaccgagcggcagtgacttcgccgctgctgtagttccccggctggatgcggtgactggtgccagtgctcaggcgcccgctgcccttgacctcccgccccgcgagccctaactcagcgcaggaggaccggctgccgccgccgccgccgccagcagagccaagcacagtgggaactttcagaaagcactggttgaaggaacgctggaatccctgggacttactgcgtagcatgtagtagttgctcctctacaaaagtttcaccttatgaagtatagcaggctctgatgctggtgtctggtagaagaagattactcacagctctgctgcaggctcagaagtggccctttcaaccctccagagacatgagactagtgcagttccgggcaccccacctggtggggcctcacttgggcctggagacagggaatggtggaggggttatcaacctcaatgcctttgaccccacactcccaaagacgatgacgcagttcctagagcagggagaggccaccctctcagtggcaagaagagccttggctgcccagttgccagtcctaccatggtcggaggtaaccttcctggctccagtcacatggccagataaggtggtgtgtgtgggcatgaattatgtggaccactgcaaagaacagaacgtgcccgtgcccaaggagcccatcatcttcagcaagtttgccagctccatcgtggggccctatgatgaggtggtcctcccaccacagagccaggaggtagattgggaagtggagctggccgtggtcattggaaagaaaggcaagcacatcaaggccacagatgccatggcccacgtggccggcttcactgtggctcatgacgtgagtgctcgtgactggctaacaagacgcaatgggaaacagtggctgctgggaaaaaccttcgacaccttctgccctctgggccctgccttggtgaccaaggacagtgtagcagatccacacaacttaaagatctgctgccgagtgaatggggaagtcgtcccagagcagcaacaccaaccagatggtattcaagacagaggacctgatagcctgggtctcccagtttgttaccttttacccaggggatgtcatcctaactgggacccccccaggtgtcggtgtattcaggaaacctcctgtctttctcaagaagggggatgaagtccagtgtgagattgaagaactaggtgtcatcatcaacaaggtggtgtgatggctcctgcacaggcccgacataggatgagggcatctgctcccactcagcctagcccagggaaaggcccagtggcaggtgtgggcaggtgccagccctgcaagccgcctcttctcggtagaagggagaaggacagagctctcttcaataaatgcgtcgggtcaaagcaaaaaaaaaa

SEQ ID NO: 60922 - DNA, 3380 bp, Homo sapiens
ctgataccccagcttggcacggggacgcagccatggcggaggcggctttggaagccgtgcggagcgagttacgagaattcccggccgctgcaagggagctctgcgtgcctcttgctgtgccctacctggacaaacccccaactccgctccacttctaccgggactgggtctgccccaacaggccgtgcattatccgcaacgctctgcagcactggccggccctccagaagtggtccctcccctatttcagagccacagtgggctccacagaggtgagtgtggccgtgaccccagatggttacgcggatgccgtgagaggggatcgcttcatgatgccagctgagcgccgcctgcccctgagcttcgtgctggatgtgctggagggccgggcccagcaccctggagtcctctatgtgcagaagcagtgctccaacctgcccagcgagctgccccagctgctgcctgatctggaatcccatgtgccctgggcctccgaagccctgggaaagatgcccgatgctgtgaacttctggctgggggaggcggctgcagtgacttctttgcacaaggaccactatgagaacctctactgcgtggtctcaggagagaagcatttcctgttccatccgcccagcgaccggcccttcatcccctatgagctgtacacgccggcaacctaccagctaactgaagagggcacctttaaggtggtggatgaagaggccatggagaaggcagaggtgtccaggacctgcctgctcacggttcgtgtcctgcaggcccatcgcctaccctctaaggacctagtgaccccctctgactgctacgtgactctctggctgcccacggcctgcagccacaggctccagacacgcacggtcaagaacagcagtagccctgtctggaaccagagctttcacttcaggatccacaggcagctcaagaatgtcatggaactgaaagtctttgaccaggacctggtgaccggagatgaccctgtgttgtcagtactgtttgatgcggggactctgcgggctggggagttccggcgcgagagcttctcactgagccctcagggtgaggggcgcctggtaagttgaatttcgcctgcagagtctggctgaccgtggcgagtggctcgtcagcaatggcgttctggtggcccgggagctctcctgcttgcacgttcaactggaggagacaggagaccagaagtcctcagagcacagagttcagcttgtggttcctgggtcctgtgagggtccgcaggaggcctctgtgggcactggcaccttccgcttccactgcccagcctgctgggagcaggagctgagtattcgcctgcaggatgcccccgaggagcaactaaaggcgccactgagtgccctgccctctggtcaagtggtgaggcttgtcttccccacgtcccaggagcccctgatgagagtggagctgaaaaaagaagcaggactgagggagctggccgtgcgactgggcttcgggccctgtgcagaggagcaggccttcctgagcaggaggaagcaggtggtggccgcggccttgaggcaggccctgcagctggatggagacctgcaggaggatgagatcccagtggtagctattatggccactggtggtgggatccgggcaatgacttccctgtatgggcagctggctggcctgaaggagctgggcctcttggattgcgtctcctacatcaccggggcctcgggctccacctgggccttggccaacctttatgaggacccagagtggtctcagaaggacctggcagggcccactgagttgctgaagacccaggtgaccaagaacaagctgggtgtgctggcccccagccagctgcagcggtaccggcaggagctggccgagcgtgcccgcttgggctacccaagctgcttcaccaacctgtgggccctcatcaacgaggcgctgctgcatgatgagccccatgatcacaagctctcagatcaacggggaggccctgagtcatggccagaaccctctgcccatctactgtgccctcaacaccaaagggcagagcttgaccacttttgaatttggggagtggtgcgagttctctccctacgaggtcggcttccccaagtacggggccttcaatcccctctgagctctttggctccgagttctttatggggcagctgatgaagaggcttcctgagtcccgcatctgcttctttagaaggtatctggagcaacctgtatgcagccaacctccagggacagcttatactgggcctcagagcccagccaattctggggaccgctggggtcaaggaaccaggccaacctgggacaaggagcaggtcccccttctgaagatagaagaaccaccctcaacagccggcaggatagctgagtttttcaccgatcttctgacgtggcgtccactggcccaggccacacataatttcctgcgtggcctccatttccacaaagactactttcagcatcctcacttctccacatggaaagctaccactctggatgggctccccaaccagctgacaccctcggagccccacctgtgcctgctggatgttggctacctcatcaataccagctgcctgcccctcctgcagcccactcgggacgtggacctcatcctgtcattggactacaacctccacggagccttccagcagttgcagctcctgggccggttctgccaggagcaggggatcccgttcccacccatctcgcccagccccgaagagcagctccagcctcgggagtgccacaccttctccgaccccacctgccccggagcccctgcggtgctgcactttcctctggtcagcgactccttccgggagtactcggcccctggggtccggcggacacccgaggaggcggcagctggggaggtgaacctgtcttcatcggactctccctaccactacacgaaggtgacctacagccaggaggacgtggacaagctgctgcacctgacacattacaatgtctgcaacaaccaggagcagctgctggaggctctgcgccccaggcagtgcaaacggaaggcggcagcgcaaggcccccactgatggccggggcccctgcccaccccctaactctcattcattcccctggctgctgagttgcaggtgggaactgtcattcacgcagtgcttcagagcctcgggctcaggtggcactgtcccagggtccaggctgagggctgggagctcccttgcgcctcagcagtttgcagtggggtaaggaggccaagcccatttgtgtaatcacccaaaaccccccggcctgtgcctgttttcccttctgcgctaccttgagtagttggagcacttgatacatcacagactcatacaaaaaaaaaa

SEQ ID NO: 60923 - DNA, 2021 bp, Homo sapiens
ttctgttgtgacgcggctgcatgaattcagcacgaggattccgtgggtggtggtgcatggccgttcttagttggtggagcgatttgtctggttaattccgataacgaacgagactctggcatgctaactagttacgcgacccccgagcggtcggcgtcccccaacttcttagagggacaagtggcgttcagccacccgagattgagcaataacaggtctgtgacgcccagtatgagggagatcgtgcacatccaggccggccagtgcggcaaccagatcggggccaagttctgggaagtcatcagtgatgagcatggcatcgaccccagcggcaactacgtgggcgactcggacttgcagctggagcggatcagcgtctactacaacgaggcctcttctcacaagtacgtgcctcgagccattctggtggacctggaacccggaaccatggacagtgtccgctcaggggcctttggacatctcttcaggcctgacaatttcatctttggtcagagtggggccggcaacaactgggccaagggtcactacacggagggggcggagctggtggattcggtcctggatgtggtgcggaaggagtgtgaaaactgcgactgcctgcagggcttccagctgacccactcgctggggggcggcacgggctccggcatgggcacgttgctcatcagcaaggtgcgtgaggagtatcccgaccgcatcatgaacaccttcagcgtcgtgccctcacccaaggtgtcagacacggtggtggagccctacaacgccacgctgtccatccaccagctggtggagaacacggatgagacctactgcatcgacaacgaggcgctctacgacatctgcttccgcaccctcaagctggccacgcccacctacggggacctcaaccacctggtatcggccaccatgagcggagtcaccacctccttgcgcttcccgggccagctcaacgctgacctgcgcaagctggccgtcaacatggtgcccttcccgcgcctgcacttcttcatgcccggcttcgcccccctcacagcccggggcagccagcagtaccgggccctgaccgtgcccgagctcacccagcagatgttcgatgccaagaacatgatggccgcctgcgacccgcgccacggccgctacctgacggtggccaccgtgttccgcgggccgcatgtccatgaaggaggtggacgagcagatgctggccatccagagtaagaacagcagctacttcgtggagtggattcccaacaacgtgaaggtggccgtgtgcgacatcccgccccgcggcctgaagatggcctccaccttcatcggcaacagcacggccatccaggagctgttcaagcgcatctccgagcagttctcagccatgttccggcgcaaggccttcctgcactggttcacgggtgagggcatggatgaaatggagttcaccgaggcggagagcaacatgaacgacctggtatccgagtaccagcagtaccaggatgccaccgccaatgacggggaggaagcttttgaggatgaggaagaggagatcgatggatagtcggaatagagccgccccaactcagatcctacaacacgcaagttccttcttgaaccctggtgcctcctaccctatggccctgaatggtgcactggtttaattgtgttggtgtcggcccctcacaaatgcagccaagtcatgtaattagtcatctggaacaaagactaaaaacagcagagaattgcgggttctacccagtcagaagatcacaccatggagactttctactagaggacttgaaagagaactgaggggccacaaaataaacttcaccttccattaagtgttcaagcatgtctgcaaattaggagggagttagaaacagtctttttcatcctttgtgatgaagcctgaaattgtgccgtgttgccttatatgaatatgcagtatgggactttgaaataatgattcataataaaatactaaacgtgtgtcttcaaaaaaaaaa

SEQ ID NO: 60924 - DNA, 3139 bp, Homo sapiens
gcggccgcggctcccgagctcctcgggctctgggtcccggcgcccctccggccgcgagtcccacgcgccacccccgggcgccctcgacggtggatctagcggcggcgaggaggcgggtcccggccccggcgaaccccagtcccggcccccggccccgggcccagcttcggcatggatgtgaggttctaccccgcggcggccggggaccctgccagcctggacttcgcgcagtgcctggggtactacggctacagcaagtttggaaataataataactatatgaatatggctgaggcgaacaatgcgttcttcgctgccagtgagcagacattccacacaccaagccttggggacgaggaattcgaaattccaccaatcacgcctcctccagagtcagaccctgccctaggcatgccggatgtactgctaccctttcaagccctcagcgatccattgccttcccagggaagtgaattcacaccccagtttccccctcaaagcctggacctcccttccattacaatctcaagaaatctcgtggaacaagatggcgtgcttcatagcagtgggttgcatatggatcagagccacacacaagtgtcccagtaccggcaggatccctccctgatcatgcggtccatcgtccacatgacctgatgctgcgcgttctggggtcatgcctcctgcccagctcaccaccatcaaccagtctcagctcagcgcccagttggggttgaatttgggaggtgccagtatgcctcacacatctccttcacctccagcaagcaaatcagccactccctcccccttccagctccatcaatgaagaggatgctgatgaagccaacagagccattggagagaaaagagctgctccagactctggcaagaagcccaagactccaaagacaaagcaacagaaagatcccaatgagccacagaagccagtgtcagcatatgccctgtttttcagagacacacaggctgcaattaaaggtcaaaaccccaatgcaacctttggagaggtctcaaaaattgtagcatctatgtgggacagccttggagaagaacaaaagcaggtatataaaaggaaaacagaagctgccaaaaaaagaatacctgaaggccctggcggcatacagggccagcctcgtttctaaggctgctgctgagtcagcagaagcccagaccatccgttctgttcagcagaccctggcgtcgaccaatctaacatcctctctccttctcaacactccactgtctcaacatggaacagtgtcagcatcacctcagactctccagcaatccctccctaggtcaatcgctcccaaacccttaaccatgagactccccatgaaccagattgtcacatcagtcaccattgcagccaacatgccctcgaacattggggctccactgataagctccatgggaacgaccatggttggctcagcaccctccacccaagtgagtccttcggtgcaaacccagcagcatcagatgcaattgcagcagcagcagcagcagcaacaacaacagatgcaacagatgcagcagcagcaactccagcagcaccaaatgcatcagcaaatccagcagcagatgcagcagcagcatttccagcaccacatgcagcagcacctgcagcagcagcagcagcatctccagcagcaaattaatcaacagcagctgcagcagcagctgcagcagcgcctccagctgcagcagctgcaacacatgcagcaccagtctcagccttctcctcggcagcactcccctgtcgcctctcagataacatcccccatccctgccatcgggagcccccagccagcctctcagcagcaccagtcgcaaatacagtctcagacacagactcaagtattatcgcaggtcagtattttctgaagacgcatatggcagacggatttgcgtataccaaggagagtggcataggagggaaaagcatatgtggctgaaacctgtaagttggtgttggttatgcagaaatgtgtaacagatcaaacggtcctctcaagtgtctattagataggcaataagaactgcagtgtagctgagtaacatcttttagctgactataaatcactttgtttttaaacaagaaaagctgtgctcttttatgtgatgccttttttatttattcaggctatacctacaatatgtgaatcaaactgtttaatgaatcctgggacatactgatgactataaactggcctctctgagtcatagaaaaatggccttatttctccagaagtgagtaaaccacacttccaggctatctgaactcctgaagccctaaaaataaaaagcacagttgtaactacctgaaatatgaagatccagtttcatacaaacattttgtatgacgtgaatagttgatggcatttttttgtcatgaaaaaaataatgtaaatcacaggacttttgccaaagctcttattttttttcctaaatctctccagaaaaaaaaatgcaagtgactaaattcaattattgactaatttccactttttatccatgacttctccaaatcaaaccacagtatatgttgtaacaaatatctatgaccactgttagcccattatattcattccaattagaagaaaagaaatgtgaatactatattccgtgttttgagtgacaagtttcgaaaaataaaaacactgtatttttaaaagggaaatgcacttaaatgaaaacagttattaccaaaagttaaggatttaaaaaggaaaagcaaggagtttttattatggatgtaataccagtagaatatttaaaaggcacaccacatctgaataatcaatgtaaatattttctttcaaagttgtaagttttcatatcatgtgctgtaaagttttcctaaatgaggctttaacgtaaaacactggtgacataaaccattcattgctacgttgcttattgtgtttttatgctgttttatacttttttatgagttatgatagcagcaattaagttgtttgtattttgcttaactaaaacaaaaatgcttttatcttgctatagaataaacacatttcagtaaaaactgtggactgtattttgatgcaacaacaaagaaactgttcacttttcaaataaaatgatatgtcagaaaaaa

SEQ ID NO: 60925 - DNA, 1483 bp, Homo sapiens
gcggcacggaggagctcaacatgcgtgagtgtatctctatccacgtggggcaggcaggagtccagatcggcaatgcctgctgggaactgtactgcctggaacatggaattcagcccgatggtcagatgccaagtgataaaaccattggtggtggggacgactccttcaacacgttcttcagtgagactggagctggcaagcacgtgcccagagcagtgtttgtggacctggagcccactgtggtcgatgaagtgcgcacagggacctacaggcagctcttccacccagagcagctgatcaccgggaaggaagatgcagccagtaattacgccaggggccattacaccatcggcaaggagattgttgacctagtcctggaccggatccgcaaactggcggatctgtgcacaggactgcagggcttcctcatcttccacagctttgggggcggcactggctctgggttcgcatctctgctcatggagcggctctcagtggattacagcaagaagtccaagctagagtttgccatttacccagccccccaggtctccacagccgtggtggagccctacaactccatcctgaccacccacacgaccctggaacattctgactgtgccttcatggtcgacaatgaagccatctatgacatatgtcggcgcaacctggacattgaacgtcccacgtacaccaacctcaatcgcctgattgggcagatcgtgtcctccatcacggcctccctgcgatttgatggggccctgaatgtggacttgacggaattccagaccaacctagtgccgtaccccggaatccaatttccccatggcacacttacgccccaatcatctcagctgagaaggcctaccacgagcagctgtctgtggccgatatcaccaatgcctgcttcgagccagccaatcaaatggtcaagtgtgaccctcgccacggcaagtacatggcctgctgcatgttgtacaggggggacgtgggtccccaaagacgtcaacgcggccatcgccaccatcaagaccaagcgcaccatccagtttgtggattggtgcccgactggatttaaggtgggcattaactaccagccccccacagtggtccccgggggagacctggccaaggtgcagcgggccgtgtgcatgctgagcaacaccacggccattgcggaggcctgggcccgcctggaccataagttcgatctcatgtatgccaagcgggcctttgtgcactggtacgtgggagaaggcatggaagagggagagttctctgaggcccgcgaggacctggcagctctagagaaggattatgaagaggtgggcgtggattccgtggaagctgaggctgaagaaggcgaagaatactgaggggagggtgtggtgggttctccactccactgccacccccatgcgtggctgctttcaagttctttgcaattaaaggttctgtataaaaccaagaaaaaaaaaaaaaa

SEQ ID NO: 60926 - DNA, 4380 bp, Homo sapiens
agagaccgtgctggagttcgccctgccggaaagcagcacgccgccgcggcattttacgacgtcggcggtgacaggccctgggactctgggaatacccagcttcctccccgcaacccggtgaaagccaacgcaatgttcggtgcgggggacgaggacgacaccgatttcctctcgccgagcggcggtgccagattggcctcactttttggactggatcaggcagctgctggccatggaaatgaatttttccagtacacagccccaaaacagcctaagaaaggccagggaacggcagcaacaggaaatcaggcaacaccaaaaacagcaccagccaccatgagcactcccacaatactggtcgcaacagcagtccatgcatatcgatacacaaatggtcaatatgtaaagcagggcaaatttggtgctgcagttctggggaaccacacaaccagagagtataggattcttctttatatcagtcaacaacagccagttacggttgctaggattcatgtgaactttgagctaatggttcggcccaataactatagcaccttttatgatgaccagagacagaactggtccatcatgtttgagtcggaaaaggctgctgtggagttcaataagcaggtgtgcattgctaagtgcaacagtacctcttccctggatgcagtgctctcccaggacctcattgtggcagacggccctgctgtagaagttggagattctttggaagtggcctataccggctggctctttcagaatcatgtgctgggccaggttttcgactccactgctaacaaagataagttgcttcgcttgaagttaggatcaggaaaagtcatcaagggctgggaggatggaatgctgggcatgaaaaaaggaggaaagcgattgcttattgtccctccagcctgtgctgttggctcagaaggggtaataggctggactcaagcaacggactcgatcctggtgttcgaggtggaggttaggcgggtgaagattgccaaagattctggctctgatggtcacagtgttagttcccgcgattctgcagctccgtctcccattcctggtgctgacaacctctctgctgatcctgttgtgtcaccacccacatcaatacctttcaaatcaggggagccagctcttcgtaccaaatctaactccctcagtgaacaacttgcaataaatacaagtcccgatgcagtcaaagccaagttgatctctcggatggctaaaatgggccagcccatgctgcccatccttccaccacagctggattccaatgattcagaaatcgaagatgtgaacactctgcaaggaggtgggcagcctgtggtgactccgtccgtccagccctctcttcagccggcccatccagcgttaccacagatgacctcacaggcacctcagccatctgttactgggctccaggcaccttctgctgccttaatgcaagtgtcatctctcgattcccactcagctgtatctggaaatgcccaatcctttcagccctatgcaggtatgcaagcctacgcttatccccaggcatctgccgtcacctcccagctgcagcccgttcggcctttgtacccagcaccgctctctcagcctccccatttccaaggatcaggtgatatggcttcatttctcatgactgaagcccggcaacataacactgaaattcgaatggcagtcagcaaagtggctgataaaatggatcatctcatgactaaggttgaagagttacagaaacatagtgctggcaattccatgcttattcctagcatgtcagttacaatggaaacaagcatgattatgagcaacatccagcgaatcattcaggaaaatgaaagattgaagcaagagatccttgaaaagagcaatcggatagaagaacagaatgacaagattagtgaactaattgaacgaaatcagaggtatgttgagcagagtaacctgatgatggagaagaggaacaactcacttcagacagccacagaaaacacacaggcaagagtattgcatgctgaacaagagaaggccaaggtgacagaggagttagcagcggccactgcacaggtctctcatctgcagctgaaaatgactgctcaccaaaaaaaggaaacagagctgcagatgcagctgacagaaagcctgaaggagacagatcttctcaggggccagctcaccaaagtgcaggcaaagctctcagagctccaagaaacctctgagcaagcacagtccaaattcaaaagtgaaaagcagaaccggaaacaactggaactcaaggtgacatccctggaggaggaactgactgaccttcgagttgagaaggagtccttggaaaagaacctctcagaaaggaaaaagaagtcagctcaagagcgttctcaggccgaggaggagatagatgaaattcgcaagtcataccaggaggaattggacaaacttcgacagctcttgaaaaagactcgagtgtccacagaccaagcagctgcagagcagctgtctttagtacaggctgagctacagacccagtgggaagcaaaatgtgaacatttgttggcctccgccaaggatgagcacctgcagcagtaccaggaggtgtgcgcacagagagatgcctaccagcagaagctggtacaacttcaggaaaagtctgtttgttttgcagtgtttagccctccaggcccaaatcacagctctcaccaagcaaaatgaacagcacatcaaggaactagagaagaacaagtcccagatgtctggggttgaagctgctgcatctgacccctcagagaaggtcaagaagatcatgaaccaggtgttccagtccttacggagagagtttgagctggaggaatcttacaatggcaggaccattctgggaaccatcatgaatacgatcaagatggtgactcttcagctgttaaaccaacaggagcaagagaaggaagagagcagcagtgaagaagaagaagaaaaagcagaagagcggccacgaagaccttcccaggagcagtcagcctcagccagttctgggcagcctcaagcacccctgaatagggagaggccagagtcccccatggtgccctcagagcaggtggtcgaggaagctgtcccgttgcctcctcaggccctcaccacttcccaggatggacacagaaggaaaggggactcagaagctgaggcactctcagagataaaagatggttcccttccacccgaactgtcttgcatcccatcccacagagttctagggcccccgacttcaattccacctgagcccctaggccctgtatccatggactctgagtgtgaggagtcacttgctgccagcccaatggcagctaaagcccgacaacccatcagggaaaggtctgtgtcagggaagtagcaccagatggcccactacaagaaagctccacaagactgtccctgacttcaggaccccgaggagggggacccactggccttagggcctgaaagcccaggagagcctcagcctccacagctcaagaaagatgatgtcactagctccaccggtccccacaaggagctgtcaagcacagaggcaggttccacagttgcaggagcagccctcagacccagccatcattcccagcgttccagtctctctggggatgaagaggatgaactgtttaaaggggcaactctgaaagctctgaggcccaaagcacagcctgaggaggaggatgaagacgaggtgagcatgaagggacgcccgcccccaacgcccctttttggagatgatgatgatgacgatgacattgactggctgggatgaagacccaggaaactggtgcaaaggtttctctgcaacccttccctaagcatgattttgcacagccaaccctgggtctaggcgagccacagggtgaggtcaaggtgagcattctgggaacaatatttgggctcagagggtgggttggccaccttctgagccccacccccgccagacctggtgaagaggatcataaccctgtcttcaagaacactgggatttcagcagcaagttggaagaaggactggtaggttcccctccaagccagtcacctgtaagagtcctgtcctctgccagactttttaatctcttcattaactctcagactgacctgggagccctctacctgaatccagtgctcaactgtgccccggcaacaagacctgggctgaggtctccctggtagaactaagggagattacaccatctaaatcccagtgcagtcaacagcctggcctatagtcctgggacatgtatcttcttctttgccttaaatctgatacaagaggtcaatgactttgaaaataaaactaaaataaatgtctataatgaaacttgaaaaaaaaaaaaaa

SEQ ID NO: 60927 - DNA, 1312 bp, Homo sapiens
ttttttttttttcctcttttaaggtttaacttttaatcagccaaacatcttgcgcagaccctgagccagccctgcatcctggttcttcccctgaatgaccaccttccccagttcctcctgggctgcccggtttttgggacctatcgccagcaccttcttgaggtcagcagttgctttttccaggttcccaagggcagcctgggcaacccccgcttcggtataaggcctttaaatggccaggctcccgctccaacacccggtcacagctctgggctgccaactgaggctgccctagcaacaactgacaggcagccagattggcatgaaggacagttcgttctggagggccacggtgggggtaaagtcaggagcagccgaagagccccgtccatagcatcgggcagctccttacaggggttcccagctcgaaataggtttctgtgccccttggcacggttcttccttgggcaggggcttccttctcgctagtctccagcttccaggaggtctcggccttgagtgaaggatgccagtgtgagcctgacaggaggtccagagtggcccaggcagctgaagctctgcttcctcaccttgacacatggactccaagcatttctctatgagctccccccaagtttcctccctccatggccctacgcccatagttagctctgtccagccctctggcggccctgatccgaaaggaaaccccaaagccagtacccggcagcaggagcctagtttgggtttgtccaagccatggccacggattacgatcttcttgacaaagctcccatcggggcagtaccagagatcagaagcttgaagggcctctggcatctgactggttgatccatgagacttatgagagtctccttcaagttcagcaaccagtttttcagctccttgagtatgctctagaatttggctggctggatctgggcttacttccagctcaagcgtttcggtaggagggtctcggggctgctgcctaatctgaataactgaatcaaggttctcccgaaggttcttttcccactcttgttgcggctgagaggtgtccttttctccaattgtattgactggtggcgtctccatatggatgcttagtcccttccacggtgagtgaacagttttggtcagaaagggatgaaccaggttcaggtcagcacctgcgcggccaaagtgcctagcatggtgacaggaggagccgggccattcgaatcacctctccttccaaagctaaatggctactgaatgctgccctcggagccttgccccacgcggagagggcagccggagaggggccgtc

SEQ ID NO: 60928 - DNA, 5615 bp, Homo sapiens
tttcgtgcggcccggagcgcggtggcgcggcgcgggaggggttttctggtgcgtcctggtccaccatggccaaaccaacaagcaaagattcaggcttgaaggagaagtttaagattctgttgggactgggaacaccgaggccaaatcccaggtctgcagagggtaaacagacggagtttatcatcaccgcggaaatactgagagaactgagcatggaatgtggcctcaacaatcgcatccggatgatagggcagatttgtgaagtcgcaaaaaccaagaaatttgaagagcacgcagtggaagcactctggaaggcggtcgcggatctgttgcagccggagcggccgctggaggcccggcacgcggtgctggctctgctgaaggccatcgtgcaggggcagggcgagcgtttgggggtcctcagagccctcttctttaaggtcatccaaggaattacccttccaacgaaagaccttcacgaaaaggctggaggttttcaaggccctcacagacaatgggagacacatcacctacttggaggaagagctggctgactttgtcctgcagtggatggatgttggcttgtcctcggaattccttctggtgctggtgaactttggtcaaattcaataagcttgttaccctcgacgaagtacaatcgcaaaggaatgggttcaagatgatctgtctgcttgtgcgtccggaccgcgtcctcttgtggacatagaggtctccctggcaggtgctggacgccgtggtctgctacaactgcctgccggctgagagcctcccgctgttcatcgttaccctctgtcgcaccatcaacgtcaaggagctctgcgagccttgctggaagctgatgcggaacctccttggcacccacctgggccacagcgccatctacaacatgtgccacctcatggaggacagagcctacatggaggacgcgcccctgctgagaggagccgtgttttttgtgggcatggctctctggggagcccaccggctctattctctcaggaactcgccgacatctgtgttgccatcattttaccaggccatggcatgtccgaacgaggtggtgtcctatgagatcgtcttgtccatcaccaggctcatcaagaagtataggaaggagctccaggtggtggcgtgggacattctgctgaacatcatcgaacggctccttcagcagctccagaccttggacagcccggagctcaggaccatcgtccatgacctgttgaccacggtggaggagctgtgtgaccagaacgagttccacgggtctcaggagagatactttgaactggtggagagatgtgcggaccagaggcctgagtcctccctcctgaacctgatctcctatagagcgcagtccatccacccggccaaggacggctggattcagaacctgcaggcgctgatggagagattcttcaggagcgagtcccgaggcgccgtgcgcatcaaggtgctggacgtgctgtcctttgtgctgctcatcaacaggcagttctatgaggaggagctgattaactcagtggtcatctcgcagctctcccacatccccgaggataaagaccaccaggtccgaaagctggccacccagttgctggtggacctggcagagggctgccacacacaccacttcaacagcctgctggacatcatcgagaaggtgatggcccgctccctctccccacccccggagctggaagaaagggatgtggccgcatactcggcctccttggaggatgtgaagacagccgtcctggggcttctggtcatccttcagaccaagctgtacaccctgcctgcaagccacgccacgcgtgtgtatgagatgctggtcagccacattcagctccactacaagcacagctacaccctgccaatcgcgagcagcatccggctgcaggccttttgacttcctggttgctgctgcgggccgactcactgcaccgcctgggcctgcccaacaaggatggagtcgtgcggttcagcccctactgcgtctgcgactacatggagccagagagaggctctgagaagaagaccagcggccccctttctcctcccacagggcctcctggcccggcgcctgcaggccccgccgtgcggctggggtccgtgccctactccctgctcttccgcgtcctgctgcagtgcttgaagcaggagtctgactggaaggtgctgaagctggttctgggcaggctgcctgagtccctgcgctataaagtgctcatctttacttccccttgcagtgtggaccagctgtgctctgctctctgctccatgctttcaggcccaaagacactggagcggctccgaggcgccccagaaggcttctccagaactgacttgcacctggccgtggttccagggctgacagcattaatctcttaccataactacctggacaaaaccaaacagcgcgagatggtctactgcctggagcagggcctcatccaccgctgtgccagccagtgcgtcgtggccttgtccatctgcagcgtggagatgcctgacatcatcatcaaggcgctgcctgttctggtggtgaagctcacgcacatctcagccacagccagcatggccgtcccactgctggagttcctgtccactctggccaggctgccgcacctctacaggaactttgccgcggagcagtatgccagtgtgttcgccatctccctgccggacaccaacccctccaagtttaatcagtacatcgtgtgtctggcccatcacgtcatagccatgtggttcatcaggtgccgcctgcccttccggaaggattttgtccctttcatcactaaggcgcctgcggtccaatgtcctcttgtcttttgatgacacccccgagaaggacagcttcagggcccggagtactagtctcaacgagagacccaagagtctgaggatagccagaccccccaaacaaggcttgaataactctccacccgtgaaagaattcaaggagagctctgcagccgaggccttccggtgccgcagcatcagtgtgtctgaacatgtggtccgcagcaggatacagacgtccctcaccagtgccagcttggggtctgcagatgagaactccgtggcccaggctgacgatagcctgaaaaacctccacctggagctcacggaaacctgtctggacatgatggctcgatacgtcttctccaacttcacggctgtcccgaagaggtctcctgtgggcgagttcctcctagcgggtggcaggaccaaaacctggctggttgggaacaagcttgtcactgtgacgacaagcgtgggaaccgggacccggtcgttactaggcctggactcgggggagctgcagtccggcccggagtcgagctccagccccggggtgcatgtgagacagaccaaggaggcgccggccaagctggagtcccaggctgggcagcaggtgtcccgtggggcccgggatcgggtccgttccatgtcggggggccatggtcttcgagttggcgccctggacgtgccggcctcccagttcctgggcagtgccacttctccaggaccacggactgcaccagccgcgaaacctgagaaggcctcagctggcacccgggttcctgtgcaggagaagacgaacctggcggcctatgtgcccctgctgacccagggctgggcggagatcctggtccggaggcccacagggaacaccagctggctgatgagcctggagaacccgctcagccctttctcctcggacatcaacaacatgcccctgcaggagctgtctaacgccctcatggcggctgagcgcttcaaggagcaccgggacacagccctgtacaagtcactgtcggtgccggcagccagcacggccaaaccccctcctctgcctcgctccaacacagtggcctctttctcctccctgtaccagtccagctgccaaggacagctgcacaggagcgtttcctgggcagactccgccgtggtcatggaggagggaagtccgggcgaggttcctgtgctggtggagcccccagggttggaggacgttgaggcagcgctaggcatggacaggcgcacggatgcctacagcaggtcgtcctcagtctccagccaggaggagaagtcgctccacgcggaggagctggttggcaggggcatccccatcgagcgagtcgtctcctcggagggtggccggccctctgtggacctctccttccagccctcgcagcccctgagcaagtccagctcctctcccgagctgcagactctgcaggacatcctcggggaccctggggacaaggccgacgtgggccggctgagccctgaggttaaggcccggtcacagtcagggaccctggacggggaaagtgctgcctggtcggcctcgggcgaagacagtcggggccagcccgagggtcccttgccttccagctccccccgctcgcccagtggcctccggccccgaggttacaccatctccgactcggccccatcacgcaggggcaagagagtagagagggacgccttaaagagcagagccacagcctccaatgcagagaaagtgccaggcatcaaccccagtttcgtgttcctgcagctctaccattcccccttctttggcgacgagtcaaacaagccaatcctgctgcccaatgagtcacagtcctttgagcggtcggtgcagctcctcgaccagatcccatcatacgacacccacaagatcgccgtcctgtatgttggagaaggccagagcaacagcgagctcgccatcctgtccaatgagcatggctcctacaggtacacggagttcctgacgggcctgggccggctcatcgagctgaaggactgccagccggacaaggtgtacctgggaggcctggacgtgtgtggtgaggacggccagttcacctactgctggcacgatgacatcatgcaagccgtcttccacatcgccaccctgatgcccaccaaggacgtggacaagcaccgctgcgacaagaagcgccacctgggcaacgactttgtgtccattgtctacaatgactccggtgaggacttcaagcttggcaccatcaagggccagttcaactttgtccacgtgatcgtcaccccgctggactacgagtgcaacctggtgtccctgcagtgcaggaaagacatggagggccttgtggacaccagcgtggccaagatcgtgtctgaccgcaacctgcccttcgtggcccgccagatggccctgcacgcaaatatggcctcacaggtgcatcatagccgctccaaccccaccgatatctacccctccaagtggattgcccggctccgccacatcaagcggctccgccagcggatctgcgaggaagccgcctactccaaccccagcctacctctggtgcaccctccgtcccatagcaaagcccctgcacagactccagccgagcccacacctggctatgaggtgggccagcggaagcgcctcatctcctcggtggaggacttcaccgagtttgtgtgaggccggggccctccctcctgcactggccttggacggtattgcctgtcagtgaaataaataaagtcctgaccccagtgcacagacatagaggcacagaaaaaaaaaa

SEQ ID NO: 60929 - DNA, 4190 bp, Homo sapiens
tttcgtggcgaaggcagcggcaggtcgggagcaagatggcgctgcggccaggagctggttctggtggcggcggggccgcgggagctggcgcggggtccgccgggggaggcggcttcatgtttcctgttgcaggtgggataagaccccctcaagcaggcctgatgccgatgcagcaacaaggatttcctatggtctctgtcatgcagcctaatatgcaaggcattatgggaatgaattacagctctcagatgtcccaaggacctattgctatgcaggcaggaataccaatgggaccaatgccagcagcgggaatgccttacctaggacaagcacccttcctgggcatgcgtcctccaggcccacagtacactccagacatgcagaagcagtttgccgaagagcagcagaaacgatttgaacagcagcaaaaactcttagaagaagaaagaaaaagacgccagtttgaagagcagaagcaaaagctcagacttttgagcagtgtgaaacccaagacaggagagaagagtagagatgatgctttggaagccataaaaggaaatttagatgggttttccagagatgcaaaaatgcaccctactccagcatcgcaccccaagaaaccaggcccttccttggaggagaagttcctagtatcttgtgatataagtacatctgggcaggaacaaattaaattaaatacttctgaagttggccacaaagccctaggcccaggttccagtaagaagtatcccagtttaatggccagtaacggggttgctgtagatggatgtgtaagtggtaccaccactgcagaggcagaaaatacttcagatcaaaacctgtcaattgaagagagtggtgtgggagtatttccctcacaggatcctgctcagcccagaatgcctccttggatttacaatgagagtttggttccagatgcctataagaaaatcttagaaaccacaatgactccaactggaatagatactgccaaactgtatcccattctgatgtcatctgggcttcccagggaaactcttggacagatatgggccttagctaatcgaactacacctggcaaacttacaaaagaagaactttataccgttctagccatgatagcggtaacacagaggggcgttcctgcaatgagtcctgatgctttaaaccagttcccagcagctcctattccaactttaagtggcttttctatgactctgcctacaccggtgagtcagccaactgtgataccttcaggtcctgcgggctccatgcccctcagccttggacagccagtcatgggcattaaccttgttggaccagtgggtggagctgcagcccaggcttctagtggtttcataccaacctaccctgcaaatcaggtagtaaagccagaagaagatgacttccaggattttcaagatgcttctaagtcaggatcccttgatgactcattcagtgatttccaagagttgcctgcttcttcaaaaacaagtaactcccagcatggaaacagtgccccttctttgttgatgccacttcctggaactaaagcattgccttcaatggacaaatatgctgtgtttaaaggaattcagctgacaagtcctctgaaaatactgttccacctggagatcctggtgataaatatagtgctttcagagaacttgaacagacagcagagaataaacctttaggagaaagctttgcagaattcagatctgcaggaactgatgatggtttcaccgattttaaaacagccgatagtgtatcaccactagagccaccaacaaaagacaaaacttttccaccatccttcccctcaggaactatacaacagaaacaacaaacacaagtgaaaaaccctctgaacttagcagacctagatatgttttcctcagttaattgcagcagcgagaaaccattgtctttttcagctgtgtttagcacatcaaaatcagtttctacaccacagtcaacaggttctgctgctactatgacagcattggcagcaacaaaaacttctagtttggctgatgattttggagaattcagcctttttggggaatattctggtctagcacctgttggggagcaggatgactttgcagattttatggctttcagtaatagctctatttcatctgagcaaaagccggatgacaaatatgatgcccttaaagaggaagccagtcctgttcctctaaccagcaacgtgggcagcacagtgaagggtggacaaaactcgactgctgcgtctaccaagtacgatgtcttcagacaactttctctggaagggtctggactaggtgttgaagacctgaaagataacactccttcaggaaaaagtgatgatgattttgctgacttccactccagtaaattttcttccataaactcggacaaatccctgggagagaaagcagtggctttcagacacaccaaagaagactctgcatcagtgaagtccttagatctcccttccattggtggcagcagtgttggcaaggaggactctgaagatgcactctctgttcagtttgacatgaaattggctgatgtgggaggagatcttaagcatgtcatgtctgatagctctttggatttaccaacagttagtggccagcatcctcctgctgcagatatagaggacttaaaatatgctgcttttggaagctacagtagcaattttgcagtgagcacacttacaagctatgactggtcagacagggatgatgcaactcagggcagaaaactctctccatttgtcctctcagcaggaagtggatccccctcagccacctcaattcttcaaaagaaagagacttcatttggcagttctgaaaacatcaccatgacatctctctccaaagtaacgacctttgtaagtgaagatgctcttccagagaccaccttcccagctcttgccagttttaaagacacgattcctcagaccagtgagcaaaaggaatatgaaaacagagactataaagatttcacaaaacaggacctgcctacggctgaacggagccaggaggccacgtgtcccagcccagcgtccagtggtgcctctcaagaaaccccgaacgaatgttcggatgactttggagagtttcaaagtgaaaagcccaaaatcagcaaatttgacttcttagtagccacttcacaaagcaaaatgaaatccagtgaagaaatgatcaaaagtgagctggcaacctttgacctttctgttcaaggatcacacaagaggagtttgagccttggtgataaagaaataagccgttcttctccttctccagctttggagcagcctttcagagaccgttccaatactctgaatgagaagcccgccctgcccgtcatccgagacaagtacaaagacctgacgggagaggtggaggaaaatgagagatatgcatatgaatggcagagatgcctggggagtgccctgaatgtcattaagaaggcaaatgataccttaaatggaatcagtagtagttctgtttgcacagaagtaattcagtcagctcaaggcatggaatatttattaggtgttgttgaagtgtacagggtaaccaagcgtgtggagctggggataaaagccactgcagtgtgcagtgagaaactccagcagttgctgaaggacatcgataaagtatggaataacctaatcggcttcatgtcactcgccacactcacaccagatgaaaactcgctggatttttcctcctgtatgttacggcctgggattaaaaatgctcaggagcttgcctgtggagtgtgcctcttgaatgtggactcgaggagccggaaagaagagaagcctgcagaagaacatcctaaaaaagcattcaactcagaaacagacagtttcaagctggcctatggagggcaccagtatcacgccagctgtgccaacttctggatcaactgtgtcgaaccaaagcctcctggcctcgtcctgcctgacctgctctgaacaactcctctgtgaagcattgactttttttttttctgtgacaccccacggggggacagggaccaataaataaaatgcgagcactgcacagttcgcttccctgaatcgatatgaaaaacaccgcaggggacggggcccccgtcatccccatggccagtctgcaggacttcaggtaaaattgtcccacccaaactgcacgtggcaccagaag

SEQ ID NO: 60930 - DNA, 2148 bp, Homo sapiens
tttcgtgtaaggcagatgcccacgtgatcctggcctgcagttgggtggctgcggtgagatacctgggttcctgaagggcgggtggttaggtcgtaactactgcccccgccggctgagtctccgagcggccgggctcggaagccacgagccagctgaggcgttctccgcttagtgcctacggcatgggtcagctctttctgccacctccgccttcgcggtcctcacctctttgcgggtgaagttacctttgggtttccagaccttgggggcctgaggcccaaactcgggacgaacccctaacccacctctcttttcctgtcattctccaactcttactttgtaccacggaatcacttggccttaaagctagccagctcggccgtgccttgaggccaggttcgagagataaaggtaaccgtggggaaagcggccccccagtggacaaaggcggaggcaagaatagagcaggcctgagggccataggcgatgagaataggcagttgaggggtgaaaaagaaaacaaacaaacaacaacaacaaaccctgaagagtactgaagatttagaagggactggaaaggacttgttgcgcaatggaagaatctgactctgagaaaacgacggagaaagaaaatctggggccgagaatggatccaccactaggggaacccgggaggatcgcttgggtgggtgctaccaaatacagccatgaaaaaaaaggtgctgttgatgggtaaaagtgggtctggtaagaccagcatgaggtctattatctttgcaaattatattgccagagacacacgtcgccttggcgcaacaatactagaccgtatacatagtcttcaaattaatagcagtttgagcacctactctctcgtagactctgttggaaatacaaagacatttgatgtagaacattctcatgttcgatttctgggaaacctggtattgaacctgtgggattgtggtgggcaagacaccttcatggaaaattatttcactagccaacgggacaacatcttccgaaatgtggaggttctgatttatgtctttgatgtggagagccgcgaactggaaaaggacatgcactattaccaatcatgcctggaggccattctgcagaattctccagatgccaaaatattttgcttggtacacaaaatggatctggtacaggaggatcaacgggacctgatttttaaagagcgagaagaagatttgaggcgtttgtctcgcccattggaatgttcttgtttccgaacatctatctgggatgaaaccctctataaggcttggtccagcatagtttatcagctgattcccaatgttcagcagctggaaatgaacctaaggaattttgctgaaattatcgaagctgatgaagtacttctttttgagagagctacttttctggtaatttctcactatcagtgtaaagagcagcgtgatgcccatagatttgagaaaataagcaacattattaagcagttcaagctgagctgcagcaagctggctgcctctttccagagtatggaagtcaggaactctaacttcgctgctttcattgacatctttacatccaacacttatgtgatggttgtgatgtctgatccgtccattccttctgcagctactctgatcaacatccgcaatgccaggaaacactttgaaaagctggaaagagtggatggaccaaagcagtgtcttctcatgcgctaaacattgatgaatattgtttcacacaaaaattaaaagtttcctaattaatgttgtattcatatatgtaggctctgaaatgttgtgatgcttattgcttctgtatttcttctctactccctagtcttaatgtttaaccttgaatgctattaacttaaatagccattgaggagttagaagatgaattgttcatgaagtcggtgttacataaaagtaggtgatatgtaagttttctgataacaaggttctaatagtgtttaaatgtactggtaacctggttccaatagttgtgtttgcccaagcctttctcggcatcatcttgtattccttatcagatagtaagtaacctgtaagtttggagtattactgttttctcagcatgcattaaaaatattccttaacttcaattgtaaataaacttttggtgttaggg

SEQ ID NO: 60931 - DNA, 3143 bp, Homo sapiens
  misc_feature (1)...(3143): n = a,t,c or g
ttttttttttttctttttttacttatttaaaaaggccttggtggcaggaatatagtgtaaaaatcatttggataaaccaaaaggcatcgatacatatccgaatatacattttgtacataaattacatttcctttagtctttctgagtgaggtcctgattcagtactgaggtctagtaattaagaggtcccggggagnctgcacgttcagggccgggcatagtccaccatgttacattgggccattgcacgagtgaggatctgggttgggccgatgccacttgaatccgggttaggagggacgagggaaggagggaaggacgagggagggaaggagggagaacgggaattttcctttcccgagacccgcttttctctttgcgcttgggggaatgctgctgtctttggctggcaccttggcatcattgcagatttctgcaaagggttggagctggttaatgatgaccatgcggacatgctctcgggccttcaggatcttctccagccggtggatgtcgtacgtgttggggttccggaaggggatgtcatcaggcagacccgtgacctccacggcgtctgggctgtcccggattagtttataagggaccagcaccggccggttcaggcccagggcctcaccgtatttctcgttgaagagttccttcacctgctcccgcaggatcaccttctccccgagtctgttggcgtcatcttcatcaggctttgggatgagtccttggaaaggcctggtgactgtgaacttgatcttgtcagccacagcaagaatcctctccaggttctgggagccgaaggtacagggctttcggaacgggattcctgggggcagcccctcgatgatcacggagccggggttactcttgatccgcttgtaggggacctggaccgggtacttgatgcccaaggcttccccgtatttcttattgaaaaggtcctggacctgctcccttagtgtgttggcgatgtcgatccgtgagagcctcgcgtcataattttcttgaaagccctgtctcttcaggctctcgtccaccagagggtccccggaatccctctcttgactatccatgatgggctctttgactccctcagtgagcagctcgggcctcttgatgacaaactggatgctgttgctggcctccagaatcttccggagcttggcgatcccgaagcagttgggcctgcggagggagatgccttcaggcagtcccaccacaaacagctcctccgggtgcatcagaaacttggagtacggcaccttgacgggctccgagatgccaatggccttggcgtatcgtgtgttgaagagcagctccacctgcttccgcaggggccggatcacgtcaccgtggctgtcctccacgggcctctcctcgggccgcgcgtcctcactcagacctttgtctgtcagcatctccatcccataaccagaatcctccgatggcaggtgcccaggcatcgagtctgtcatttcctcagaggttggcgaggggtctgggacggtgacctgaatgatgtccagatcctctggctcaattttgatcggcctcagcccgcccagctccccggaggttcctggcccacagtcttcagacatgctgcccttgtctgaccgagcattcccagcaaggtcaaggaccggtggcccatagagacctctgccagaggtgtcctctggcgggctggctggctccagcttcgtggtgtctttggtaaacttgttccctgtgaaaattcgctcatcaaacatcctcttaatgatgaagtggatactatggcgctcctccaggatccgcttcagcttggggactccataagtgcaggggcgcttgaaggggatcttgtccgggatgcccacgatctccacagcctccgggtcacaggcaatcttccggtagggcacggggaccatgtggtccaggcccagggcttccgcatatctgctgttaaacaggatctgcacacactcccggagcgtgttgatgtcctcggtttcctttatgaaggcgtcccacttctctgacttgtcatggacgatggagaagagaatgcgcttggaggcatggacgttctggatgagaggcccaccaggcccagtgggcttctgtccacaacagtcggagaagtcttgggcaccggtggccttgggctctggcatgggccgactcaggcccaggtcgctgggggcaagggggcaggaaggtgcttcctgcttgagctctcggatggcgtggttggggagcgccgtgctgtacaggaagctggccatggaggaggaggtggcggttgggggcaggtcctggggtggcaccttgggggcctggccatgcaggccacagtcccgtgaccccttgggaatcagggagacaccgttcagctccaccagggccttcgagtcccgcccgccatcctcaagtggcctcttgagcttgaagcggatgcggtggctgtgttccaggatggccatgagggccttggggtcatactcggctggccttcggaaggccaggccttcgggcagcccctgcacggccagcagccctggctccctgagcagcctctcatagggcagtggcaccacactggcccttcccagggcctcgctataaagaacatcaaacacctcctctaccatcttccgcagaaggtacacatctgagccatgttccagggaggaccgagggaggttacggcctccaccctcgccccgctgcaccttcttggggtgctctgcctccggatccttccacgggggccctcggcagaacctgaggaagtctgactgtagctccttccgggcattcaggaacattctccccttctctgtgcccaccacaaaggcgctctcatcgtgcacggcgacacaggccacctcggcgttcagtttggacagcgctgagcacatggagtctaaggcagacacgaggctggtgatgatctcgtctttgcgggtgaacgcggagttccagcggtcgggtccgcagccgttggtggggacgtcacagcgcttacccagcaaggccatggtcgccttggaggatccccaagcgctcctgccagcggcgccccggccccggcccgcggccaggaatcagcctcctaatannntncttaattaatccggacgaaa

SEQ ID NO: 60932 - DNA, 1134 bp, Homo sapiens
gacaggtcctcactcttaccacaaagctcaagtcagcttggcctctcaagtggagagataatcgttctatagcaagaagtacaaagattctctgcagacaaaaccagctagccaaggttccacaacatgtgtacacgtataagtctgatggatcagaagaaatatgtacccgggaatcagatgtagccagcccacatactaacaaacatcaaagcaagcctagtcagattgagtcccatttgaacaatctttataaaggtttcttcatgttatttacaattcaaagtaaatttactttataagcagctagggaattctttatttagtaatgtcctaacataaaagttcacataactgcttctgtcaaaccatgatactgagctttgtgacaacccagaaataactaagagaaggcaaacataataccttagagatcaagaaacatttacacagttcaactgtttaaaaatagctcaacattcagccagtgagtagagtgtgaatgccagcatacacagtatacaggtccttcagggaggcaagagacctttcgactggtctgcaggtgcctccaaatgctggtcctgtggaacttctttctgagtctcgttttcttccaacgcagtctgtggtctgacactcaagtgttcggatttccgggaaacgtgactacctccgtgttgagtccttgcttcgcctactcgtcttaaaatgacaccttctgccaataaagccttccctgtttccacaaataacttctcttcatctgtttctccaagtttctgtagctcagtgtacttctccacaaaccgttgacaggtagacttgaagtttggattgaatagatcaaaagctctttgaccagacccatacactgaataaaacttcgctctaatccgatcctcgtggtaccagatgtcttggatgggagctttggctttgccatatcgcactcgaggcctttggaagacgggctccctcagcgggggaaaggcgtcatatacgtcaaaccacaggggcttctccttcagcaccccggcccgaaccaggtcccgagtccgagagaagatgctccctacggtttccagccggctgcctgccatgatctgcgcctggtaccgagcgtgacctcgt

SEQ ID NO: 60933 - DNA, 1359 bp, Homo sapiens
aaaaatggcagccgccgctccggactcacgtgtgagtgaggaagaaaacctgaaaaagaccccaaagaagaagatgaaaatggtaactggagccgtagcgtcggtgctggaagacgaggccacagacacttctgatagtgaaggaagctgtggatcggaaaaggaccacttttattctgatgatgacgcaatagaagctgacagtgagggtgatgctgagccctgtgacaaagaaaatgaaaatgatggagaatcaagtgttgggactaatatgggctgggcagatgctatggctaaagtcctcaacaagaaaactcctgaaagtaaacctactattctggtcaaaaataagaagctggaaaaggaaaaagaaaagttaaagcaagaaagactagagaaaataaaacagcgtgataagaggctggagtgggaaatgatgtgcagagtaaagccagatgttgtccaagacaaagagacagagagaaatcttcagagaattgcaacaaggggtgtggtgcaattatttaatgctgttcagaaacatcaaaagaatgttgatgaaaaggttaaggaagctggaagttctatgagaaagcgtgctaagttgatatcaactgtttccaagaaagatttcatcagtgttttgagagggatggatggaagtacaaatgagactgcttcaagcaggaagaaaccaaaaagccaaacagactgaagtgaaatcagaagaaggcccaggttggacgattcctacgtgatgatttcatgatgggagcatctatgaaagactgggacaaggaaagtgatgggccagatgacagcagaccagaatctgcaagtggactctggatacataaagcatcataggggaataccaattgccagtcgttttatttttttcttggaaaatttgtccatcccctgatagttggggaatttataaggatacccatttgtaagaaagcccaaaagacttttgcccagatttcatatttccccttttcatgtacactttatatatacttcattaaaattatattttaaacccttgtataattttaagcattgttcctcagaacatttgtaaaaggatatatttctgcttgaccagcgagatgtgcattttgccaggatcatattggtcatgtctattggtgtattatttcagtatcaccaatgttttcagaaatacagtactaattcatcattaaactctttgaagttaatatttttctgccttctaacttatagactcaactatgtatctgtagtttttgggaatggttggtgttttttgctttgtgttgggaagttattgagaaaacctatataataaaatttaaaattataaaaaaaaaa

SEQ ID NO: 60934 - DNA, 2967 bp, Homo sapiens
cagaagagaagaacatttctgagtcctcacgaaactatttcagttacatacagtgaattagacaaattaagtgtataccttgatgagtatacatgtgacacacccaacccaaggtgcagaatatttataatacctaagaagaatcctttgtatgtgccccttgaaggtgaaattttccaaagttttaacaaaaggttagagaagacagcaagttcaaaaaaggagagggaaagaaagaaagagaaatagagagagaggaatatctttgaccatcagtctgtgacctgccccttctctttacatgcagccgctctctgctccctgccccaatgaacatctgcactaggcccaagccttggagtaattcacctgaagagtgacaccattgattttgaaactactgaagaaacccaagacagctgaaaaccagaaggcatctgaggagaatgagattactcagccgggtggatccagcgccaagccgggccttccctgcctgaactttgaagctgttttgtctccagacccagccctcatccactcaacacattcactgacaaactctcacgctcacaccgggtcatctgattgtgacatcagttgcaaggggatgaccgagcgcattcacagcatcaaccttcacaacttcagcaattccgtgctcgagaccctcaacgagcagcgcaaccgtggccacttctgtgacgtaacggtgcgcatccacgggagcatgctgcgcgcacaacgctgcgtgctggcagccggcagccccttcttccaggacaaactgctgcttggctacagcgacatcgagatcccgtcggtggtgtcagtgcagtcagtgcaaaagctcattgacttcatgtacagcggcgtgctacgggtctcgcagtcggaagctctgcagatcctcacggccgccagcatcctgcagatcaaaacagtcatcgacgagtgcacgcgcatcgtgtcacagaacgtgggcgatgtgttcccggggatccaggactcgggccaggacacgccgcggggcactcccgagtcaggcacgtcaggccagagcagcgacacggagtcgggctacctgcagagccacccacagcacagcgtggacaggatctactcggcactctacgcgtgctccatgcagaatggcagcggcgagcgctctttttacagcggcgcagtggtcagccaccacgagactgcgctcggcctgccccgcgaccaccacatggaagaccccagctggatcacacgcatccatgagcgctcgcagcagatggagcgctacctgtccaccacccccgagaccacgcactgccgcaagcagccccggcctgtgcgcatccagaccctagtgggcaacatccacatcaagcaggagatggaggacgattacgactactacgggcagcaaagggtgcagatcctggaacgcaacgaatccgaggagtgcacggaagacacagaccaggccgagggcaccgagagtgagcccaaaggtgaaagcttcgactcgggcgtcagctcctccataggcaccgagcctgactcggtggagcagcagtttgggcctggggcggcgcgggacagccaggctgaacccacccaacccgagcaggctgcagaagcccccgctgagggtggtccgcagacaaaccagctagaaacaggtgcttcctctccggagagaagcaatgaagtggagatggacagcactgttatcactgtcagcaacagctccgacaagagcgtcctacaacagccttcggtcaacacgtccatcgggcagccattgccaagtacccagctctacttacgccagacagaaaccctcaccagcaacctgaggatgcctctgaccttgaccagcaacacgcaggtcattggcacagctggcaacacctacctgccagccctcttcactacccagcccgcgggcagtggccccaagcctttcctcttcagcctgccacagcccctggcaggccagcagacccagtttgtgacagtgtcccagcccggtctgtcgacctttactgcacagctgccagcgccacagcccctggcctcatccgcaggccacagcacagccagtgggcaaggcgaaaaaaagccttatgagtgcactctctgcaacaagactttcaccgccaaacagaactacgtcaagcacatgttcgtacacacaggtgagaagccccaccaatgcagcatctgttggcgctccttctccttaaaggattaccttatcaaagcacatggtgacacacacaggagtgagggcataccaatgtagtatctgcaacaagcgcttcacccagaagagctccctcaacgtgcacatgcgcctccaccggggagagaagtcctacgagtgctacatctgcaaaaagaagttctctcacaagaccctcctggagcgacacgtggccctgcacagtgccagcaatgggaccccccctgcaggcacacccccaggtgcccgcgctggccccccaggcgtggtggcctgcacggaggggaccacttacgtctgctccgtctgcccagcaaagtttgaccaaatcgagcagttcaacgaccacatgaggatgcatgtgtctgacggataagtagtatctttctctctttcttatgaacaaaacaaaacaacaacaaaaaacaaacaaacaaaaaagctatggcactagaatttaagaaatgttttggtttcatttttactttctgtttttgtttttgtttcgtttcattttgtactacatgaagaactgttttttgcctgctggtacattacatttccggacgcttgcggtgaataatagttttcccagtctccctcggatggtggccttaaggcctgcgtagtgcttcaagaggtccactggttggatctctagctactggcctctaaatacaacccttctttacaaaaaaatcttttaaaaaaaagtaaaaaaaaaa

SEQ ID NO: 60935 - DNA, 2550 bp, Homo sapiens
tgcccgcctgctgaattcggcacgaggacacgctgaacagaattcacctcacgtccagtatgagatgggagtatgaacaaacagtcatgcagagtgatgagtgcaaacatggactataaagcggccatagagaatgaactgtgtttgtgtttagagaagacacactccccacccctgaacaggcttcttaaaagtactagaaaggaacagaaatgaataaaagtcgctggcagagtagaagacgacatgggagaagaagccaccagcagaacccttggttcagactccgtgattctgaagacaggtctgactcccgggcagcacagcccgctcacgattccggccacggtgatgacgagtctccgtcaacctcgtctggcacagctgggacctcctctgtgccagagctacctgggttttactttgaccctgaaaagaaacgctacttccgcttgctccctggacataacaactgcaaccccctgacgaaagagagcatccggcagaaggagatggagagcaagagactgcggctgctccaggaagaagacagacggaaaaagattgccaggatgggatttaatgcatcttccatgctacgaaaaagccagctgggttttctcaacgtcaccaattactgccatttagcccacgagctgcgtctcagctgcatggagaggaaaaaggtccagattcgaagcatggatccctccgccttggcaagcgaccgatttaacctcatactggcagataccaacagtgaccggctcttcacagtgaacgatgttacagttggaggctccaagtatggtatcatcaacctgcaaagtctgaagacccctacgctcaaggtgttcatgcacgaaaacctctacttcaccaaccggaaggtgagattcggtgtgctgggcctcgctgaatcacttggattcccacattctgctatgcctcatgggactcgcagagactccaggctgtgccaccctgctcccagcatcactgttcgtcaatagtcacccagcaggaatagaccggcctgggcatgctctgcagtttccggatccctggtgcctggtcctgtgcctggtccctgaatatccaagcaaataactgcttcagtacaggcttgtctcggcgggtcctgttgaccaacgtggtgacgggacaccggcagtcctttgggaccaacagtgatgtcttggcccagcagtttgctctcatggctcctctgctgtttaatggctgccgctctggggaaatctttgccattgatctgcgttgtggaaatcaaggcaagggatggaaggccacccgcctgtttcatgattcagcagtgacctctgtgcggatcctccaagatgagcaatacctgatggcttcagacatggctggaaagatcaagctgtgggacctgaggaccacgaagtgcgtaaggcagtacgaaggccacgtgaatgagtacgcctacctgcccctgcatgtgcacgaggaagaaggaatcctggtggcagtgggccaggactgctacacgagaatctggagcctccacgatgcccgcctactgagaaccataccctccccgtaccctgcctccaaggccgacattcccagtgtggccttctcgtcgcggctggggggctcccggggcgcgccggggctgctcatggctgtcgggcaggacctttactgttactcctacagctaattctgcagggcacagcccagagccatgtggatttgacttacgggagtaaagcgtaactttttactgcatctaatgagggtgttttaagtgacactcagtgtacacagatcccatcctctggctgctaggagagaagtgctgaatgttccgtgtggagatgctcaggaaagttatttgagttaaattgctggctgagagagcttggaagtccttttcataaaaggtacctctttccttttcttattgaattcttagaacttagttaaccctccctgccttttcttaacaaaaaggacttttctaaggactgaagattggcaaaaacgaaaagcttcttcctccaagagcccattgaagaagcccagtgatgagacggtgagatggtttgagtcctcggtgcctgggtagcaggaagaaagacctgcatcctgcatctgtacttggggaagccagcggagaggacggggaggttacttctctaagtttctgcagaaatattgaaggctggagtttggaatccttaaacttggccttctcaaactcagcagcagatctccgggattctgctgttattatccaaaggcggtggaagggaaagatggatcttcttacatgctagaagttttaaacggtccttaacatgcctttgttcaagcaccttccagaatgtaaggttcagcagctctggtttctattacggtgacttgaatgtcagattcaagggcccggcgtcaaaggaaattggttttgactttttgtaatctaggagcgacagttcgtgagatgtttattcagtgttaaagagcctgtttttctaccaaacaataaaaccaagagaagaaaaa

SEQ ID NO: 60936 - DNA, 3003 bp, Homo sapiens
tttcgtggacgtccacgatctctttcgccggctcggcgcgggggccaaattcgacacgagacgcttctcggcagacgcagctcgattccagataggaaaaaggaaatatgactttgattcttcggaggtgcttcagggactggacttttttggaaacaagaagtctgtcccaggtgtgtgtggagcatcacaaacacatcagaagccccaaaatggagagaaaaaagaagagagcctaactgaaaggaagagggagcagagcaagaaaaaaaggaagacgatgacttcagaaattgcttcccaagaagaaggtgctactatacagtggatgtcatctgtagaagcaaagattgaagacaaaaaagttcagagagaaagtaaactaacttccggaaagttggagaatctcagaaaagaaaagataaacttcttgcggaataaacacaaaattcacgtccaaggaaccgatcttcctgacccaattgctacatttcagcaacttgaccaggaatataaaatcaattctcgactacttcagaacattctagatgcaggtttccaaatgcctacgccaatccaaatgcaagccatcccagttatgctgcatggtcgggaacttctggcttctgctccaactggatctggaaaaacattagcttttagcattcctattttaatgcagctgaaacaacccgcaaataaaggcttcagagccctgattatatcaccaacacgagaacttgccagccagattcacagagagttaataaaaatttctgagggaacaggattcagaatacacatgatccacaaagcagcagtggcagccaagaaatttggacctaaatcatctaaaaagtttgatattcttgtgactactccaaatcgactaatctatttattaaagcaagatccccccggaatcgacctagcaagtgttgagtggcttgtagtagacgaatcagataaactgtttgaagatggcaaaactgggttcagagaccagctggcttccattttcctggcctgcacatcccacaaggtccgaagagctatgttcagtgcaacttttgcatatgatgttgaacagtggtgcaaactcaacctggacaatgtcatcagtgtgtccattggagcaaggaattctgcagtagaaactgtagaacaagagcttctctttgttggatctgagaccggaaaacttctggccgtgagagaacttgttaaaaagggtttcaatccacctgttcttgtttttgttcagtccattgaaagggctaaagaactttttcatgagctcatatatgaaggtattaatgtggatgttattcatgcagagagaacacaacaacagagagataacacagtccacagtttcagagcaggaaaaatctgggttctgatttgtacagccttgctagcaagagggattgattttaaaggtgtgaacttggtgatcaactatgactttccaactagctcagtggaatatatccacaggataggtcgaactggaagagcagggaataagggaaaagcaattacatttttcactgaggatgataagccattattaagaagcgttgctaatgttatacagcaggctgggtgtcctgtaccagaatacataaaaggttttcagaaactactaagcaaacaaaagaaaaagatgattaagaaaccattggaaagggagagcattagtacaactccaaaatgtttcttagaaaaagctaaggataaacagaaaaaggtcactggtcagaacagcaagaagaaagtagctcttgaagacaaaagttaaaaacagactttaaaaatactgtcccagaaatgtaattttatgatcccagcatgaatgttattttcatggaatacttgaagtcttacagtcacctgtaccaaacatttgaaatcaactacaagtacatgggactggtgataaatgatcctaaactatcaagtcagtttcaatttgtaggtgccttttttttttcctgtaaagatgagggtcttgccatgttgtccaggctggtcttgaactcctgacctcacacaatcctcctgccttagcctcctgagtaactgaaattacaggcacaagctgctgcacccagcctctgtaggggacttttaaatgattatacaatggaaataacattcattgacatttctgtggtttgaatcccagagagatacttcttatagaaaaacaaatgtttatgctaaaaataacaccaaaatgtggttgaactcttaaggacttttcccttcaagtgtgaaggaaggtgtgatgaatgctgtggagaggcatctggaacagaaattcaaaataaagccttgacattaaataccccttccactgctcactttgtggatggtagcatgagctgtctaccaagaagaaacctgctgctctcttaattttaatatttcctaatttgttgatggccttttgtgttgtgaaccacaacaaagagaggcctcttttgtggctggttattccagttccctgggattttaaattctttggtctattaagtatccttgtattggatacgtaataccttagtgctgtcataatgttgtacaagatcatgatcagcttctccctttcttcattttctgtgatttaaccatgttctttcctgtctctttccatttaagatattttatttgaatactgataaacattttatcctgataaggaagaatgttcttgttacttgatatacctctgtcttcattctcttacagcttatctttccttaggttgatggtgcctcatttaataagtagatctctacttaagctaaaggattatgatcatatggtgttggagactattagctattagatttttctcaaaatatgagaattgtacaatggaatgaaaaagtgacttcatatacgtaagactggtgcctaagaatgacttgaatgttatcagtactaccacagaactataatatacattgccttttctcagcaaaaaaaaaaaaa

SEQ ID NO: 60937 - DNA, 2801 bp, Homo sapiens
  misc_feature (1)...(2801): n = a,t,c or g
ccccccattgctcgcctgcaggaattcggcacgagccgacgccacatggcggcgcccagtggcgtccacctgctcgtccgcagaggttctcatagaattttctcttcaccactcaatcatatctacttacacaagcagtcaagcagtcaacaaagaagaaatttcttttttcggagacaaagagatatttcacacagtatagttttgccggctgcagtttcttcagctcatccggttcctaagcacataaagaagccagactatgtgacgacaggcattgtaccagactggggagacagcatagaagttaagaatgaagatcagattcaagggcttcatcaggcttgtcagctggcccgccacgtcctcctcttggctgggaagagtttaaaggttgacatgacaactgaagagatagatgctcttgttcatcgggaaatcatcagtcataatgcctatccctcacctctaggctatggaggttttccaaaatctgtttgtacctctgtaaacaacgtgctctgtcatggtattcctgacagtcgacctcttcaggatggagatattatcaacattgatgtcacagtctattacaatggctaccatggagacacctctgaaacatttttggtgggcaatgtggacgaatgtggtaaaaagttagtggaggttgccaggaggtgtagagatgaagcaattgcagcttgcagagcaggggctcccttctctgtaattggaaacacaatcagccacataactcatcagaatggttttcaagtctgtccacattttgtgggacatggaataggatcttactttcatggacatccagaaatttggcatcatgcaaacgacagtgatctacccatggaggagggcatggcattcactatagagccaatcatcacggagggatcccctgaatttaaagtcctggaggatgcatggactgtggtctccctagacaatcaaaggtgtcggcgcagttcgagcacacggttctgatcacgtcgaggggcgcgcagatcctgaccaaactaccccatgaggcctgaggagccgcccgaaggtcgcggtgacctggtgcctttttaaataaattgctgaaatttggctggagaacttttagaagaaacagggaaatgaccggtggtgcggtaacctgcgtggctcctgatagcgtttggaagaacgcgggggagactgaagagcaactgggaactcggatctgaagccctgctggggtcgcgcggctttggaaaaacaaatcctggccctggactcggtttcccagcgcggtcaacgcatctggaggggactggaggaaacccccttgttggaagagattccaagagaagcacggttttctctttcccttgccctgactgttggagtaaaaaacctcttaaatccattgtatcagaggtccttacctctctgacagttacaatgatctttgtatctgaactttgcacgtctgccgaaaaatccgaacctgttgactgggatttttaacaatccctttcccccttttgtgtattccatattggccggccccaaggatgctcgcagaagccagcccccaaccccagcccttccgtatctttcccctccatcgcggctttgcgatgaaagattagcccgcgaacagaggcattgattacaaacatgtccttggcagtggactctgggcctggcattcttcaggtttctgtcaatccagaaacgcgactttcctggacccctgcggctctgtccttcccgcccacatccagccctccaaggccagtccagaggtgaagtttgaggccctccccccacccaccccacacgcacgcaggcacgctagaccgtttgctgcactaggaattcgagcttgggccccactcgcccaggtgtgaacagtggctgattagtgggcggtctagtctctaaaatgacccctccccagactggcccttctcgcatcgggacccgcgcttgcacgctgcaggagccgcaaacgtcagctgttctggaaaccgagagggtcccagagagaggagatacgggcgcatttgagagcaagggcctacttggccgggactgaagcttgcgagttgagctccagttcggccggcagttccatcccgcttcaggaacaggaatccaagggcccacgctctgtctgccaagggccattcctgcccggagcaccctcctttcccttgcgcttgctctccggtacctgttccgcacctgagctcaagggcagggagaggccgggcctctggcagtccacgaaggaagccgtctgccttcggttatgattttaggaacaagtccaacgagggtgttcaagcagttaatggttgtgctaactcttgtttctactgaagcgggttttgcaaagctgacatcccttaaagataacttgggctttcggaagcggcaaggaaatggcacctgtagttgccaggacaggtggtgtcctcggccaggactaagagccagctcatctttgtaacattcataatacgggaaactgaggaccaggtggctcggaaaagagatgagttccaagcttttacctaacacagggttctctcgtcgtcccccaacccctccagctcggcttctttgtgtccagggttgtagatttttggatagaggtgtttctgattctaagtgagtctgagaactggaaaagaccaaggaggggttgatgatttacnaggtccatagaaaaactttttgtgtggtcggaagttggccaagcagaggcccacagcctgatgctactgcccccacccccccaaaga

SEQ ID NO: 60938 - DNA, 896 bp, Homo sapiens
ttttttttttttgggggatgtgatagagaggatttattcatttgataatagttagaacacataacctctgagatctctgtaatctcagatactttagttctataattctaaatccaagggtctctatagataggcttgagacaagtgtaaacaaactcatgatctcagagaaatcttcaagtggcatgtttcaatggtatgcttattaaacaaatgctcatgacagattttcacaacagtaacgaatgttattttcacaacatccaaatcttccttcctcagggaagaaatgacatttaataagaaggttgatggatttggattatttttcatgtttcctggaggtaaaaccagtgtcctcacttgttttcctctttttcctcattttgaagactatttgttttcatttttctttgcctcctctcgggctatgtgtccccggaaggcagcttggattttgacagcagcaacctcttctttttccttatcttcctcagaagagtctaagatggtgactgatgtctcttcctccttcccagatatctgagactcttcttgtttaggatcacttttctcaggtggttcttgctcctcgaatgcatgattgttatagaagcggtcttctaccttactcccccattctgctggatcaaagttggttttctctcttttctctagaaggctctcaaaataggctgctgcaaaagctggtatattgtccggttgctctctcagaatctcgcgtgtcagcccttcaagaagattcccaaatccttgtggaattcggtagtgggtgttggagaatggaatcgacatcttcttggtaagaactgcctatggaacctcctttctctccgagctggtcccgccggttccggtctcgtgccgctcgtgca

SEQ ID NO: 60939 - DNA, 1609 bp, Homo sapiens
agggtaaaaaaaactcgcacgcctgctgaattcgccacgagctgcgagacccaaggctcactgcagcgcgctcctgacccctccctgcaggggctacgttagcagcccagcacatagcttgcctaatggctttcactttctcttttgttttaaatgactcataggtccctgacatttagttgattattttctgctacagacctggtacactctgattttagataaagtaagcctaggtgttgtcagcaggcaggctggggaggccagtgttgtgggcttcctgctgggactgagaaggctcacgaagggcatccgcaatgttggtttcactgagagctgcctcctggtctcttcaccactgtagttctctcatttccaaaccatcagctgcttttaaaataagatctctttgtagccatcctgttaaatttgtaaacaatctaattaaatggcatcagcactttaaccaatgacgtttgcatagagagaaatgattgacagtaagtttattgttaatggttcttacagagtatctttaaaagtgccttaggggaaccctgtccctcctaacaagtgtatctcgattaataacctgccagtcccagatcacacatcatcatcgaagtcttccccagttataaagaggtcacatagtcgtgtgggtcgaggattctgtgcctccaggaccaggggcccaccctctgcccagggagtccttgcgtcccatgaggtcttcccgcaaggcctctcagacccagatgtgacggggtgtgtggcccgaggaagctggacagcggcagtgggcctgctgaggccttctcttgaggcctgtgctctgggggtcccttgcttagcctgtgctggaccagctggcctggggtccctctgaagagaccttggctgctcactgtccacatgtgaactttttctaggtggcaggacaaatcgcgcccatttagaggatgtggctgtaacctgctggatgggactccatagctccttcccaggacccctcagctccccggcactgcagtctgcagagttctcctggaggcaggggctgctgccttgtttcaccttccatgtcaggccagcctgtccctgaaagagaagatggccatgccctccatttgtaagaacaatgccagggcccaggaggaccgcctgccctgcctgggccttggctgggcctctggttctgacactttctgctggaagctgtcaggctgggacaggctttgattttgagggttagcaagacaaagcaaataaatgccttccacctcaccgcaaaccttctgctaaattgcatgaccaggctttccaaaaacaagacattctcatgtcatcaggtgatccatctcctggggaccttagaatcaggttaccggtgcctacaaaagaattttgagcagaagggcctcgagacatcgggaaaggggtgcgctggctccattctgctacctcccaccggggagcagctctccagagcctgccgggttctgcagctgcagaggtggcagcaccgagctccctgtgggataggactggtgctggggtctggcttctctcaccccaggaaccaaagatgctctgaaagttgggtgtc

SEQ ID NO: 60940 - DNA, 4038 bp, Homo sapiens
  misc_feature (1)...(4038): n = a,t,c or g
cccgttgttaaaccccggccagggaaatgaatttagggggccccataaaaaaaatattaccttgccagcccgcggacgtaaaattggatcctttaaaacggccgcccccttttttttttttttcattttataagcacttggttttattgcacagaagcaattgaaagtgaactccagtggaaagtgcgccctggcataattcagtggccagtccccggccccacctggaccgctcttccagaatagagagctctgggcaagggcttgaccactcctttggaaaacagaaggcatttgggaataggttaagacatctcaagcataatgtatttctaactgctcattcattattgcggtcatctgtcagttgcacatagaggcaataaatgcacttatttggaaaggaggggggcagtttttatagtcaagtgtttacgtgtggcattcggcatgtatcacattcagctacataagctatcataattgtccatcgcctggggagggcatgggggcaggggcctgggagtgccctctcttgctaacatattgctaacagaaattcctgtttgaagaaggaggccccgtcatctaagcagtttcttcttacataaagacagaaaaagtgaaaattgtgttactctgatccttgagctccgggactcttctgagtttctttggctgttccggatgttcctttctccctgccttacttccccttggcggccttgtcttctgtggccttctctggaggcttgctgtctttttggtctgtgctggaggatttttcagccttttctgccttaggcttgctaggctcttttgagagggtcttgtcatcttccttggctttggcctctgtcttgggtttctcctcaggcttcttggccttctcctccttggtgtcttttttctccggtgctgcctccttcttctctgctggtttgctgggttccttggccttggcatcatctggttccttcttggccacctctgtcttttctttgggtttagcgtcttccttcacctccaccttggcaggagcctccttctctggggtggggacttttttcttatcttcagcctcttccttcttggcttcaactttggattctttgggcttttcgacagcaggttccttcttctcctccaccttgggctttggagcctccttcttgggtgcctcctctttcttgctgtccttcttctcctctgtttttggtgtggcaggggctttctcttcctctgccttctttgggggctctttgactttcacctcctggggcttctcctcctccttcactggggacttcacctcttccttttttgggatctccttctcaggggccttggcatcctccttcaggggagatttcgccttctctggggacttgacctcctccttgacagggcttttggccttttcagggaatttgtctgcaggggaccttgcttcgtccgtcggtggagtcttggcttctggagacttcacatcaagagtcttggccttctctggggacttggccttctctggggacttggcttcttccttcactggggacttggccttctcgggggtctttgcttcttccttcactggggacttggccttctcaggggactttgcttcttccttcactggggacttggccttctcaggggactttgcttcttccttcactggggacttggccttctcaggggactttgcttctgccttcactggggacttggccttctcaggggactttgcttctgccttcactggggacttggccttctcaggggacttggcctcttccttctctggggacttggccttctcaggggacttggccttctcaggggactttgctttcctccttcgttggagacttggccttttccggggacttgacctcagctggagattttgcttcttccttcactggggacttggcctcagccggtgactttgcttcttccttcactggggacttggccttctctggagacttggcctcggcgggntgactttgcctcttcctttgctggggacttggccttctcgggggacttgacctcagcttggaaattttgctttccatccttctctggggacttggccctcaggcggtgactttgcctcttcctttgctggagacttggccttctcaggggacttgacttcggctggggattttgcttcctccttctctggggacttggcctcagccggtgactttgcctcttcctttactggtgacttggcttccttctctggggatgcagcctcttctactgggggagactttgtttcttcttctcccccttctgcctcctcttcttcacccccttcttcctccttgccctcctcctctttggcctctttatcctcttcttcagtcacttcttcagtcacttgggtctcctctgtctgttcctccacaatcacagtttctttctcagacttctccaccactttgatcttctcttcgcttttcacctttatgtgagtggacacagagggaattttggggagtccttctggaagcgagaaaggaattgggccaaagccaatccgacactcttcaccttccaggagttttctgtaagcggctatctctatatccagagccatcttgacattgagcaggtcctggtattctcgcagctgggcggccatctcccacttggtgttcctcagctcagcgtccagctgctgaatggcttcctggtaggaggcaatgtcggcctgatgacggtcctccagctcagagcgctgcctctccagtgagtccttggtgcttttcagtgcctccagctctgtggtcctggcctgcagctgacgccggtactcagttatctcctcctgcgctgagcgcatagcgtctgtgttcaccttggctgcctccgacagtcggtccagcctcactcggaaccactcctcggactgcagcgtgctctgcaccgcgtggccttcaagctgcgcgcgaatctcgcgcagcgccgacgtcacgtcgcacttcagggcgtcgcgcgtctcggcctgcatctgcgcctgcgcggcgccggagccctggatctggccgagcagctcgcccacctcttcctggtggtggcgccgcaggtagccgcactcctcctgcagcgcctgcgccttcttctgcaggtccacgcgcgccgcctcggcctcctgcgcgaagcgcgccagcgcgcgggccgccgcctcggcctcctctcgctgccgggcctcgtcgtctaggcgctggcgcacgtgcgcgatgtcctcgagcaggtgctcctgctccaggcgtagctgaccgcgcgccgcgcccaggcgcagcaccgcgccgcgcatctcgcggacctcgcgctcgtacagctcgcccatagcggagcggcccgcctgctgctgccgcagcgccgcagcctcgccctccaggctgcggttgtgcgcctccagctgccgcaccttgtcgatgtacccggcgaagcggtcgttcagcgcctgcagctgctccttctcactgcgtgaggtggccaccgccaccatgcagccctccggcccgttgctcagcgtgtccagcgagtcggtgcttgaggcggcgcctgcgccacggaagcggctgggcgaggcggacacggagctcacggacgtccgtgtccacgagtggaagccgctggaggagccagcggcggagcgcgtcccgcctgcgccaccctttcgggctagcgcgtagtggaggctgccgccgccatgcagcggcgcgaacggggcgcccagcagcgcgtccgcgccgccgaagctcatcatggcctgagcagtgggggcttatttggcctccccaggatggactggagcatcagtagtgcccgggtttatcacaggacagatactcaagacactcttatcaccattaggtggacttggaggagcaaaaaacaagtgcagtggctcctcagcagagacactcctgaatgtatagacatgggaaccaccttcagcatcaaaaaaggaaacgttctgcatgcccatatccagaaaaatccccactcgct

SEQ ID NO: 60941 - DNA, 5451 bp, Homo sapiens
aattcccgggtcgacgatttcgtggccagcaaggcagggatcgaacgagtgtctggcagccgggagcccagcgaagagagcgagcaagcttaggaaaacgagcgaagtaaagggagtaggggagactgagactgaccggtagccaggcaggcggacggacgcacgcccggacagactgagcaggcgccggagaaccactcacaggttccccccgcctttccctttgaaagctaggattttgcctttcccgtggcgcccgagagagaatgctggactctgccgacttcagcgcaagctaagatttctcagctagggacaaacgatcagcccaatcctgagaaggggggaaccaagcaccccgtccccatccccctcccctcccccgactaaactcgggcgccaaacccagcccttctctaaccaccctacttcctcctctcctttctagcatggtggctgtatggacagtctgacagaacagagactgacatctcccaatctgccggccccccacctggaacactacagtgttctgcattgcaccatgaccctggatgtgcaaactgtagtcgtttttgccgtgattgtagtcctcctgcttgtcaatgtcatactcatgtttttcctgggaacgcgctgaatggagtccagccacctgagctgtcgcgaactctcgctttgatttcatcccgagagccaccgagaaaaaaaaaaaaatcacagacagagacggggaaagagagagaaagaacaagctttcttactcaggggggaaaacgttttgagcttcaacatggcctcgctgggatatgtatgacgttgctgatcactggagattccatcgttagtgctgaggcagtatgggatcacgtcaccatggccaaccgggagttggcatttaaagctggcgacgtcatcaaagtcttggatgcttccaacaaggattggtggtggggccagatcgacgatgaggagggatggtttcctgccagctttgtgaggctctgggtgaaccacgaggatgaggtggaggaggggcccagcgatgtgcagaacggacacctggaccccaattcagactgcctctgtctggggcggccactacagaaccgggaccagatgcgggccaatgtcatcaatgagataatgagcactgagcgtcactacatcaagcacctcaaggatatttgtgagggctatctgaagcagtgccggaagagaagggacatgttcagtgacgagcaactgaaggtaatctttgggaacattgaagatatctacagatttcagatgggctttgtgagagacctggagaaacagtataacaatgatgacccccacctcagcgagataggaccctgcttcctagagcaccaagatggattctggatatactctgagtattgtaacaaccacctggatgcttgcatggagctctccaaactgatgaaggacagccgctaccagcacttctttgaggcctgtcgcctcttgcagcagatgattgacattgcttatcgatggtttccttttgactccagtgcagaagatctgcaagtatcccttacagttggctgagctcctaaagtatactgcccaagaccacagtgactacaggtatgtggcagctgctttggctgtcatgagaaatgtgactcagcagatcaacgaacgcaagcgacgtttagagaatattgacaagattgctcagtggcaggcttctgtcctagactgggagggcgaggacatcctagacaggagctcggagctgatctacactggggagatggcctggatctaccagcccctacggccgcaaccagcagcgggtcttcttcctgtttgaccaccagatggtcctctgcaagaaggacctaatccggagagacatcctgtactacaaaggccgcattgacatggataaatatgaggtagttgacattgaggatggcagagatgatgacttcaatgtcagcatgaagaatgcctttaagcttcacaacaaggagactgaggagatacatctgttctttgccaagaagctggaggaaaaaatacgctggctcagggctttcagagaagagaggaaaatggtacaggaagatgaaaaaattggctttgaaatttctgaaaaccagaagaggcaggctgcaatgactgtgagaaaagtccctaagcaaaaaggtgtcaactctgcccgctcagttcctccttcctacccaccaccgcaggacccgttaaaccacggccagtacctggtcccccgacggcatcgctcagtcgcaggtctttgagttcaccgaacccaagcgcagccagtcaccattctggcaaaacttcagcaggttaacccccttcaaaaaatgatacctacagggaggcagataattttaaaataaagtaaataaaattatatttatagatggaccttttttcggagaagcactgttgaaatttatacacacacacacacacagagacccttgagtacacatacacacacacacacacagacacacacacacacacacacacacacacacacacagagagataaggaacaaaagtgttttctgttgttttggggaagtgaaatatgtggttggtaggaagaggtaccaatgacttccaaacatgtgattccgtcttaaaagttttccatttttaccctgtcccccttccctttgctttcagaagttgacatttctattcattgcttttcttgttaagataatctctttactcccctgtgagtgattcactgccttgtcattattacgatagatgtgtttgtattgttttttttctgatgatactgatgttgatgaatttttaattttatttgatgtggtagagttgggaggtttcagggttttttcccctcttttactttccattgaggaagggaatgagctcctttctcctctccttcagccaatcattatcaaatgttccttcagccctgcagttgccccaaataaccttttttcagcatcctctgtcctcagtcatgccagtctggacatgctctgttgtgccctgtgacaaaactgctcagtattcctattgcttttactgtgttttaggggactgtgaaggggatcaaaaaaccaaacagaagcaagggagtatcagactatgatgatgctggagtggacttctgttcagggaacattttgcattcaggctgtttcttctatcactggggtttcccatgttgcagcacttctgggtcgttgcaattttgcatctaggagttagtttgatcgagttattctcttttttcaagtcacttttgttataggtctccccctaggcctgtctctcccttagcccaaaagatctgaactggaagcagaggttgagattctgcctcccaggagagggatttacctgccccctagtaccagataggtttagggcagtgatctctacagcaatcagttcagtgtcctggttgtccctgctcccatttacagatgtttgggcagcattgatagaacgtatggaggggttcaagacacgacgcccacctgatcaagatcatcagctaccttcaaattattgacctggacagggtccaagtctgatagtaaccttttaacaagaaagaacagggatgggaatggaaagagatagccttgaatccacagtattgtaccatgcattttctaccaccctaaaattgtgtgagacttctcccattgttaacagattgcatggacaatcttccctgggcttctttctttccctctctctttcttctttctcctgccatcctaggcacaggaggatttttttggtattgatatagttaaagctgttctggcactcaaagaaggccgtgtttccaacatcctctcatcccaggacatttggggcaagtgagttaggggcccaggggcaattttccctctgaataacgtgtctgaggcagggatgctaccctcaggctcgcttttggccagctttttgcttgggaaaatctaacttctttcacaaggaggcaggcttcctatggatgttggagtacctgtttttcctccacacatagcccttttcatggatagaccttgaacaacaaaaagggtataagggaataaggatgaactctgctgtgaagagcaagccactgtagtgaggaatgtggagactgggagtctgtcctaaaccccatgggagaagacttcatcatgacaggacttcagcttaccaaggcagccagccatagctgtgtggaggcttcagcatagctagcatgtttactgctctatgcctcctgatccagaccaggcattgcccagcctgggaatcttttctttgtgggaatcaaattacaagctatttaagtttatattccatcacaaccaagtcagacttgtattataagtcaaggatgagcctgatctggggagagggccggggctcgggactggccaccactgttcagcacatgacctaactacgtaagcctctttggcaagggtcctggtgcccagcacccaggctaaaatatcctgtctggcagagtgttttggtagctatgcaggcctcccttcagtgtacctctttttccaacttctcactcctccttactaggcttggccttgacatgcttcttcgagggttggcagcacaccgggaggggatgcttggacaagtttctgggcctacatttcttgactaggccctctcatttcctccctccttggggcttctgcccagggctccaggatcagggatattacttctcaacccgcacttctcctctactgaacccactggcatcacctgatgccactaatttgtgaacaacaagaaatcatttccccattggttggagtattccctcagcctatagcatcaaagcagaccagtggccaacagccccaaggggagcccaattaaatacctgggttcagtatcctaacctgttatgtcctgacagcaatggtaaccccagtaattctgtaatgttgtaatttccgcatggccctgagctcccttttcctcaactcagtgaggccaggatttgctctccaaaaggctttgctagtgtgttcaatgggacctgctgtggggagtcctaagacagacatctaattattctctctttttccccccctctctatgtgtatatttctaatggatctataagaacagcaacaagagagttctaacaattctagtgtgaagccaaatagtgatcttttagtgctttggggatggggtgggctggggtggatggatgggcaacagtgactttgattacccttgctgctctgcatttgccagtttattcttttgtttcttttatctgactgactctgtcaaacaagtgtcaaagttgtgtgttaaaaaatgtttaacaaaaaaaatgttgtaatgacacaaagccttatgaaaatatttatggagttcaataaaagaagtaaaaagacaaaaaaaaaa

SEQ ID NO: 60942 - DNA, 3501 bp, Homo sapiens
acggtggaattctcgacgggagggtgaggcgcggcgcagtgatcgggcggccggggtcctgtgcgcgtgcgcagcgaacagctgtcacctagtgcggaacaagtctcccaaatttcccaaatctccctgggccggaggccactgtcttctcttcctcctccaccgagtcgtgctctcgccccaacccgcgcgccagacactgccctaaccatcatggaggtggccgaggtggaaagtcctctgaaccccagctgtaagataatgaccttcagaccctccatggaggagttccgggagttcaacaaataccttgcatacatggagtctaaaggagcccatcgtgcgggtcttgcaaaggtgattcctcctaaggagtggaagccaagacagtgctatgatgacattgataatttgctcattccagcaccaattcagcagatggtcacagggcagtcaggactgttcactcagtacaacatccagaaaaaagcgatgactgtgaaggagttcaggcagctggccaacagtggcaaatattgtactccaagatacttggattacgaagatttggagcgcaagtactggaagaacttaacttttgtggcacctatctatggtgcagatattaatgggagcatatatgatgagggtgtggatgaatggaacatagctcgcctcaatacagtcttggatgtggttgaagaagagtgtggcatttctattgagggtgtaaataccccatatctctattttggcatgtggaagaccacgtttgcatggcacaccgaagacatggacctctatagcattaattatctccactttggagagcccaagtcttggtatgctatacctccggagcatggaaaacgacttgaaagactagctcaaggttttttcccaagcagctcccaagggtgtgatgcatttcttcgccacaagatgacattgatttctccatcagtattgaagaaatatggtattccctttgacaagataacccaggaggctggagaattcatgatcactttcccatatggctaccatgctggttttaatcatggtttcaactgtgcagaatctacaaattttgctactgtcagatggattgactatggaaaagttgccaaattgtgcacttgcaggaaagacatggtgaagatttcaatggatatctttgtgaggaaatttcagccagacagatatcagctttggaaacaaggaaaggatatatacaccattgatcacacgaagcctactccagcatccacccctgaagtaaaagcatggctgcagaggaggaggaaagtaagaaaagcatcccgaagcttccagtgtgctaggtctacctctaaaaggcctaaggctgatgaggaagaggaagtgtcagatgaagtcgatggggcagaggtccctaaccccgactcagtcacagatgacctcaaggtcagtgaaaagtcagaagcagcagtgaagctgaggaacacagaagcatcttcagaagaagagtcatctgctagcaggatgcaggtggagcagaatttatcagatcatatcaaactctcaggaaacagctgcttaagtacatctgtaacagaagacataaaaactgaggatgacaaagcttatgcatatagaagtgtaccttctatatccagtgaggctgatgattccattccattgtctactggctatgagaagcccgagaaatcagacccatccgagctttcatggccaaagtcacctgagtcatgctcatcagtggcagagagtaatggtgtgttaacagagggagaagagagtgatgtggagagccatgggaatggccttgaacctggggaaatcccagcggtccccagtggagagagaaatagcttcaaagtccccagtatagcagagggagagaacaaaacctctaagagttggcgccatccacttagcaggcctccagcaagatctccgatgactcttgtgaagcagcaggcgccaagtgatgaagaattgcctgaggttctgtccattgaggaggaagtggaagaaacagagtcttgggcgaaacctctcatccacctttggcagacgaagccccctaacttcgcagctgagcaagagtataatgcaacagtggccaggatgaagccacactgtgccatctgcactctgctcatgccgtaccacaagccagatagcagcaatgaagaaaatgatgctagatgggagacaaaattagatgaagtcgttacatcggagggaaagactaagcccctcataccagagatgtgttttatttatagtgaagaaaatatagaatattctccacccaatgccttccttgaagaggatggaacaagtctccttatttcctgtgcaaagtgctgcgtacgggttcatgcaagttgttatggtattccttctcatgagatctgtgatggatggctgtgtgcccggtgcaaaagaaatgcgtggacagcagaatgctgtctctgcaatttgagaggaggtgctcttaagcaaacgaagaacaataagtgggcccatgtcatgtgcgccgttgcggtcccagaagttcgattcactaatgtcccagaaaggacacaaatagatgtaggcagaatacctttacagaggttaaaattgaaatgcatcttctgcagacaccgggttaagagggtctctggagcctgcatccagtgttcctacggtcgctgcccggcctccttccatgtcacttgtgcccatgctgctggggtactgattggagcctgatgattggccttatgtggtgaacattacatgctttcgacataaggtcaaccccaacgtgaagtccaaggcttgcgagaaggtcatttccgtgggtcaaacggtcatcacgaagcatcggaacacccggtattacagttgcagagtgatggctgtgacatcgcagaccttctatgaggtcatgtttgatgatggctcctttagcagagacacatttcctgaggatatcgtgagccgagactgtctgaagctgggcccacctgctgagggagaagtcgtccaagtcaagtggcccgatggcaaactctatggagcaaaatattttggatcaaatattgcccacatgtaccaggttgagtttgaagatggatcccagatagcaatgaagagagaggacatctacactttagatgaagagttacccaagagagtgaaagctcgatttgtaagtgctggcagatgccacttggggacctgccaagtgaattccttgtcctcacctcatgtttcccaagcccagcaggaaacatacttgggcttttggattaattctaaaaaaagccaatgcaacattttccttagtggaacctattgaatgcacacttcaaattcaaccaaaatcggggaaattaatgcatgtgctttacttttcttctaatgaagtcacatgatgcttctttgtgttgacatttattggtgcacaaaaatacttactgaatgtgtgctctgtgtaaaaca

SEQ ID NO: 60943 - DNA, 1366 bp, Homo sapiens
tggggcagaggttgggaagatggcgtggcgaggctgggcgcagagaggctggggctgcggccaggcgtggggtgcgtcggtgggcggccgcagctgcgaggagctcactgcggtcctaaccccgccgcagctcctcggacgcaggtttaacttctttattcaacaaaaatgcggattcagaaaagcacccaggaaggttgaacctcgaagatcagacccagggacaagtggtgaagcatacaagagaagtgctttgattcctcctgtggaagaaacagtcttttatccttctccctatcctataaggagtctcataaaacctttattttttactgttgggtttacaggctgtgcatttggatcagctgctatttggcaatatgaatcactgaaatccagggtccagagttattttgatggtataaaagctgattggttggatagcataagaccacaaaaagaaggagacttcagaaaggagattaacaagtggtggaataacctaagtgatggccagcggactgtgacaggtattatagctgcaaatgtccttgtattctgtttatggagagtaccttctctgcagcggacaatgatcagatatttcacatcgaatccagcctcaaaggtcctttgttctccaatgttgctgtcaacattcagtcacttctccttatttcacatggcagcaaatatgtatgttttgtggagcttctcttccagcatagtgaacattctgggtcaagagcagttcatggcagtgtacctatctgcaggtgttatttccaattttgtcagttacctgggtaaagttgccacaggaagatatggaccatcacttggtgcatctggtgccatcatgacagtcctcgcagctgtctgcactaagatcccagaagggaggcttgccattattttccttccgatgttcacgttcacagcagggaatgccctgaaagccattatcgccatggatacagcaggaatgatcctgggatggaaattttttgatcatgcggcacatcttgggggagctctttttggaatatggtatgttacttacggtcatgaactgatttggaagaacagggagccgctagtgaaaatctggcatgaaataaggactaatggccccaaaaaaggaggtggctctaagtaaaactgggattggacagtagtggtgcatctggtccttgccgcctgagagccccaggagacatcggctagagtgaccatggctatgctcccgtctggaagatgccagcatctggcctcccactgttttcagctgtgtcccccagtccgtgtctttttagaatgtgaatgatgataaagttgtgaaataaaaggtttctatctagtttgt

SEQ ID NO: 60944 - DNA, 2122 bp, Homo sapiens
  misc_feature (1)...(2122): n = a,t,c or g
gtcttgctgtcacccagactggagtgcagtggcatgatcatagctcactgcagactcaaactcccggactcaagcaatccactcacctcagcctcctaactgggactacaggtgcacaccaccatgctcagataattttttaactttttgtagagaaagggtctcactatgttccccaggctggtctcaagcgatcctcccatctcagtctcccaaagtgctgggattacaggcatgagccaccactgtgcctggcctaaaaattttttgttaaaaatgctttccaccggccgggtgcagtggctcatgcctataatttttttgttttttcagaagatgggaggcaacatggtaggttcacaattaaaattgtcttgaaagtatttattgtttaataattctttctcccctcagccccatccggccactctctctttctgcttttctgatcatcctaaaggctgaatacatcctcctcatgtgtggaggacacgaagcaatactaaaatcaatacactcgatcaggtcttcatcagataccacgtcactgtggggtagagtgctagttttcaacaaatggtgggtgttcttatgggctccacaaggtagtcctttctcaaggtcgctggggccactcatggagttgaaatgccgctgcccatctaagtacaacatggactctccatatgtttttgggaaaaccagtggcacttctttttccgacatgaacgtgaaatgaaagacattggtggttgtatgctgcttctcctgcagggaggccacttcactgtgtactctgacttgaatataattattctgagtaaagcatacctgtgaagaaagaaagagcaatgagccaacctcaacaggtttctgaaacatgatgtcatctactgctaccacaaacggtcgagaaccaccaaagctacaagcagtagcccacgcaagttcatatgccttcctcataaggaaaccaccaaagatccgattgaaaatgttccgctcctgagggtggcaaatttccaaactcttcagttttgaattctccatccacactgcattagagggtaaaactcgactccgaaaacttatagtctttggatccagtgtgctgagaaacatctcatgtatggtggtcctctcctcagcgctgggggccattttcagtaacgacgtggagctgaaggcaattcttctccccttgttcaattccccttgtctaaagagctcctcttcctctgggctttcagggatgagtggatttacaaatgccggccctttattttcagaatcacgagccaccattacaaatgttgcatccaaaacaggacaaaattcatcaccatgtaactggaacatttgcatcttcacttccatggatgtcttcccgacccagctaacatggccactgaacttaatgtcctgttctgggctcaagctcttcttacacatatcaatcttatccaccagggctgtaactatcgataaaggagacatcttggcggagtggattttgttgtgcatgtaacaaataagaactcccaagctgtcaagatcctcaagaatcctgccaaatcttacggtgttttgaacagtcaaatatttctcttgtaattcaggctcactgcccaaaggcaagagaacttcaatataactgtccttcattctcctaggaggcagtccatcctgtgatttagccaagaaactatgaagtaatttcctttcttccattgccttcacatggtctctccagtttgtggatgctcctactatctcccgcaacttatctcgaacttcatgaatgtggaagattccctgtttcttggggttctggggtccttgagtcagtcctcttccaggagtaagctgccctttgcccaaggcacaaagccgcagtgctgcccgcctcattgcgctaggctgccgtgcgcgcgatggagaaccgggccccgcgcgctagtcggcggagggaaactgaggcgataaaagacgcacgagtaccagaccgcgcccttgctgaggacagcccgggagccggacagcggcccggctcgagcggccgctcgagccgggaattccaccgcnctcctataatggtcttctatgggggggggggggggcg

SEQ ID NO: 60945 - DNA, 2036 bp, Homo sapiens
  misc_feature (1)...(2036): n = a,t,c or g
ttcgtggcgcgcctgaaggagcaggaaggggaaggaggcctgggaccccgaaaagagaaggggagagcgaggggacgagagcggaggaggaagatgcaactgactcgctgctgcttcgtgttcctggtgcagggtagcctctatctggtcatctgtggccaggatgatggtcctcccggctcagaggaccctgagcgtgatgaccacgagggccagccccggccccgggtgcctcggaagcggggccacatctcacctaagtcccgccccatggccaattccactctcctagggctgctggccccgcctggggaggcttggggcattcttgggcagccccccaaccgcccgaaccacagccccccaccctcagccaaggtgaagaaaatctttggctggggcgacttctactccaacatcaagacggtggccctgaacctgctcgtcacagggaagattgtggaccatggcaatgggaccttcagcgtccacttccaacacaatgccacaggccagggaaacatctccatcagcctcgtgccccccagtaaagctgtagagttccaccaggaacagcagatcttcatcgaagccaaggcctccaaaatcttcaactgcccggatggagtgggagaaggtagaaccggggccgccggacctcgcttttcacccacgacccagccaagatctgctcccgagaccacgctcagagctcagccacctggagctgctcccagcccttcaaagtcgtctgtgtctacatcgccttctacagcacggactatcggctggtccagaaggtgtgcccagattacaactaccatagtgataccccctactacccatctgggtgacccggggcaggccacagaggccaggccagggctggaaggacaggcctgcccatgcaggagaccatctggacaccgggcagggaaggggttgggcctcaggcagggaggggggtggagacgaggagatgccaagtggggccagggccaagtctcaagtggcagagaaagggtcccaagtgctggtcccaacctgaagctgtggagtgactagatcacaggagcactggaggaggagtgggctctctgtgcagcctcacagggctttgccacggagccacagagagatgctgggtccccgaggcctgtgggcaggccgatcagtgtggccccagatcaagtcatgggaggaagctaagcccttggttcttgccatcctgaggaaagatagcaacagggagggggagatttcatcagtgtggacagcctgtcaacttaggatggatggctgagagggcttcctaggagccagtcagcagggtggggtggggccagaggagctctccagccctgcctagtgggcgccctcagccccttgtcgtgtgctgagcatggcatgaggctgaagtggcaaccctggggtctttgatgtcttgacagattgaccatctgtctccagccaggccacccctttccaaaattccctcttctgccaagtactccccctttaccaccccattgctgatggcacacccatccttaagcttaagacaggacgattgtggtccttccccaacactaaagccacaagcccatccgcgtgcttgtgtgtcccttctttccaccccaacccctgcttggctccttctgggagcatccatgtcccggagaggggtccctcaacagtcagcctcacctgtcagaccggggttctcccggatctggatggagccgccctctcagcagcgggcacgggtggggcggggccgggccgcagagcatgtgctggatctgttctgtgtgtctgtctgtgggtggggggaggggagggaagtcttgtgaaaccgctgattgctgacttttgtgtgaagaatcgtgttcttggagcaggaaataaagcttgccccggggcactggagtcagagttgtccaaggaaagggcctcaggcatcccttggtncaggaagaatttctctgatggccgcagacattttgcttgagacccaagtggcagggatccaaccg

SEQ ID NO: 60946 - DNA, 1689 bp, Homo sapiens
cacccgcttccgtcagcctcactggggcttccttccgtctcgctcggagtttccctctgcgttcgctccgcgctgctggaggctgtcgtcccaatgctccccaaacggcggcgagcgcgggtcgggtcccctagcggcgatgccgcttcctccacgccgccctcgacgcgcttcccgggagtcgccatctacctggtcgagcctcgcatgggtcgcagccgccgggccttcctcacaggcctggcgcgctccaaaggcttccgcgtccttgacgcctgcagctccgaagcgacacatgttgtgatggaagagacctcagcagaggaggccgtcagctggcaggagcgcaggatggcagctgctcccccgggttgcacccccccagctctgctggacataagctggttaacagagagcctgggagctgggcagcctgtacctgtggagtgccggcaccgcctggaggtggctgggccaagcaaggggcctctgagcccagcatggatgcctgcctatgcctgccagcgccctacgcccctcacacaccacaacactggcctctccgaggctctggagatactggccgaggcagcaggctttgaaggcagtgagggccgcctcctcaccttctgcagagcagcctcggtgctcaaggcccttcccagccctgtcacaaccctgagccagctgcaggggcttccccactttggagaacactcctctagggttgtccaggagctgctggagcatggagtgtgtgaggaggtggagagagttcggcgctcagagagctcttcacccagatcttcggggtcggtgtgaagactgctgaccggtggtaccgggaaggactgcgaaccttagatgacctccgagagcagccccagaaactaacccaacagcagaaagcgggtgagccctccagagaggctgggccctgggcttccctaaactgcaccctggatccctcagcatcaactccctagagggaagggagcagtctggtgcagagggtttggtggcagctttgtgtggtgggcttcctggggtctccacccagtgcagtcaggatctatcaaagccttttctcagtggacgatgctgaccacagcaacttccatgatatgccaggggcttgtgtctgcctactggttagactttgaccagtgaccagggacagcctgggccttgggcacactgcccagtgtggtgcttggtacatggaggcctgcagaggtggcactgagcagcagaaagaacatcagctttcaagtttgttaggcctgggtttgagtcttatctaccatttgccaggtaggtgaccattgcccaagaaataacctctctgagtctgttacattttctgtaaaatggagaaggaaggctgggcatggtgactcacacctgtaatcccagcactttgggaggtcaaggtgggtagatcgcttgagctcagcagttcaagaccagtctgggcaacagggtgaaaccctgtctctacgagaaatacaagagttagccaggcgtgatggtggatgcccgtagtaccaggctactcatgaggccgaggtacaaggatcgctcgagcccgggaggtcaagccttgaggccaaggtggaagttgcaatgagctgagattgagccactgcactccagcctgagtgacagagcaagaccctatctcaaaaa

SEQ ID NO: 60947 - DNA, 4327 bp, Homo sapiens
ccagcaggacttcgagtctctggcagacctgacggaccaccgggcccaccgctgtcctggagatggtgatgacgacccacaactctcctgggtggcctcgtctccctccagcaaggatgttgcgtcacccacgcagatgatcggagatggttgtgacctcggcctcggcgaggaggaagggggcacgggcctgccatacccttgccagttctgcgacaagtccttcatccgcttgagctacttgaagaggcacgagcagatccacagcgacaagctgccgttcaagtgcacctactgcagccgcctcttcaagcacaagaggagccgtgaccggcacatcaagctgcatacgggcgacaagaagtatcactgccacgagtgcgaggcagccttctcccgcagcgaccacctcaagatccacctgaagacccacagctccagcaagcccttcaagtgcactgtgtgcaagcgcggcttctcctccaccagctcgctgcagagccacatgcaggcccacaaaaagaacaaggagcatctggccaagtcggagaaggaagccaagaaggacgacttcatgtgcgactactgcgaggacaccttcagccagacggaggagctggagaagcacgtgctcacccgccacccgcagctgtccgagaaggcggacctgcagtgcattcactgccctgaggtcttcgtcgacgagaacacactgctcgcccatatccaccaagcccacgccaaccagaaacacaagtgccccatgtgccctgagacagttctcctcagtggtaaggtgtctactgccacctggacagccaccggcagcccgactccagcaaccacagtgtcagtcccgaccctgtactgggcagcgtggcctccatgagcagcgccacacccgactccagcgcctctgtggagcgtggctccaccccggactccaccttgaagccgctgcgggggcagaagaagatgcgggatgacgggcagggctggaccaaggtggtctatagctgcccctattgttccaagcgggactttaacagcctggccgtgctggagatccacctgaagaccatccacgcggacaagccccagcagagccacacatgtcagatctgcctggactccatgcccaccctctacaacctcaacgagcacgttcgcaagctgcacaagaaccatgcctaccctgtgatgcagtttggcaacatctctgccttccactgcaactactgccccgagatgttcgccgacatcaatagcctgcaggagcacatccgcgtctcccactgcggccccaacgccaacccctctgacggtaataatgctttcttctgcaaccagtgctccatgggtttccttactgagtcctccctcaccgagcacattcaggcagggcccactgcagtgtgggcagtgccaaactagagtctccggtggtgcagcccacgcagtccttcatggaggtctattcctgcccctactgcaccaactcccccatctttggctccatcctgaaactcaccaagcacatcaaggagaaccacaagaacattccactggcccacagcaagaagtccaaggccgagcagagcccagtctcgtccgatgtggaggtgtcttccccgaagcggcagcggctctcagcaagcgccaactccatctccaatggggagtatccttgcaatcaatgcgacctcaagttctccaactttgagagcttccagacccacctgaagctgcacctggagctgctgctgcggaagcaagcgtgcccccagtgcaaagaggactttgactcccaggagtccctcctgcagcacctgacagtgcattacatgaccacgtcgacccactatgtgtgcgagagctgcgacaagcaattttcctcggtggatgaccctgcagaagcaccctgctggacatgccacaccctttgtgttgtacccactgcacccctgtgtcaggaggtcttcgactcccaaggtgtccatcccaggtgcacctggcggtgaagcacagcaatgagaagaagatgtaccgctgcacggcctgcaactgggacttccgcaaggaggctgacctgcaggtgcacgtcaaacacagccacctgggcaacccggccaaggctcacaagtgcatcttctgtggggagaccttcagcaccgaggtggagctgcagtgccacatcaccacacacagcaagaagtataactgtaagttctgcagcaaggccttccacgccatcatcctgctggagaagcacctgcgggagaagcactgtgtgtttgatgctgcgaccgagaacggcacggccaatggggtacccccaatggccaccaagaaagctgagcctgctgacctgcagggcatgctgcttaagaaccctgaggcacctaacagccatgaggccagcgaggatgacgtggacgcgtcggagcccatgtacggctgtgacatctgcggggcggcctacaccatggaggtgctgctgcagaatcaccggctgcgggaccacaatatccggccgggcgaggatgatggctcacgcaagaaggctgagtttatcaagggcagtcacaagtgcaacgtttgttcacggactttcttctcggagaacgggctacgggagcacctgcagacgcaccggggccctgccaagcactacatgtgtcccatctgtggtgagcgcttcccttcgctgctgacgctcaccgaacacaaggtgacccacagcaagagcctggacacgggcacctgtcgcatctgcaagatgcccctgcagagcgaggaggagtttattgagcactgccagatgcaccctgacctgcgcaactcactcacgggcttccgctgtgtggtctgcatgcagacagtcacttccacgcttgagctcaagatccatggcaccttccacatgcagaagctggcgggcagctcagcggcgtcctcccccaatggccaggggctgcagaagctctacaagtgcgccctgtgcctcaaggagttccgcagcaagcaggacctggtgaagcttgacgtcaatgggctgccctacggcctctgcgccggctgcatggcccgcagcgccaacggacaggtgggtggcctggccccgcccgagcccgccgaccggccctgtgccggcctccgttgccccgagtgcagtgtcaagtttgagagtgccgaagacctggagagccacatgcaggtggaccaccgtgacctcacgccggagaccagtgggccccggaaaggcacccagacatcgccagtgccccggaaaaagacataccagtgcatcaagtgccagatgaccttcgagaacgagagagagatccaaatccacgttgccaaccacatgattgaggaaggcatcaaccacgagtgtaagctgtgcaaccagatgttcgactccccggccaagctcctctgtcacctcattgagcacagcttcgagggcatgggcggcaccttcaaatgccccgtgtgtttcacagtcttcgtccaggccaacaagttgcagcagcacatctttgccgtgcacgggcaggaggacaagatctacgactgctcacagtgccctcagaagttcttcttccagaccgagctgcagaaccacacgatgagccagcacgcacagtgagggatcgctcaacaggacacctctccgcagaaggcttgccggagacgccgtggggagggccatttgaacattacatccaatcaaagtgtcatttgcaacccagatgtaaaactctaatgatttggccatgaggcgctgctattataagcagctggaaatgaatattaatggcagagattaaaagtattccatgctcagtattttttattgtcctgctacagctagtgtgcttttagactttccgccgcagactacatttctagagttagagaaacctgctttttaaggctattgtcctttgttccttcatgtattatattgatagtttttaaaaaagaattagtgtgattttttttctttgcttcttttttctctttcttgtttttcttcccccccacccccccacccccttcggttaactactttttaattgcaattctaggtaattgtgcatcgtgatgtgattgcttggctattgtctgaatatttccttttaattttttaattaaagactaatgctttgattggatttgccagttcaccggacagtgattaaaactatgtaatgaatataatcggtttcagtgcaactggatggtctgcttttaaatgtgacttaatctgactgcagtaactagtacagttcaataaagggaatccatgcgaaaaaaaaaa

SEQ ID NO: 60948 - DNA, 2149 bp, Homo sapiens
gcaggctaattttttttttatttttgttttgtagagctagagtttcatcatgttgcccaggttggttttgatcacgggagtgatcctcctgtggtggcctcctaaagtgctgggatgacaaccaccatggccagctggtttgtttcaatttgagtgacaaaatttaggaatcggggctccagcttttcactgcagacatttattgtgggtcatcttccctaaggcaccagcagagggggaacgggccacagcagggctgcagccacggtctccagatattgcccagcctgtccagctgcagaggaactgggctgagtgtccgctggtgttcccacaccgcctgctggacttcgttccatcacctgatagaaaacgggctctgaggctggtgtgaggatgtgggtctcagaagggtctcttgagaggtcaaagaagcaagggtgggatcgtggtggactacttttttccccaaagcacgggcagaccttttctttccatagcaggcaccggctccctcttggctggaaaacaggcgtcacaaagtggactttccacattgttcctctgtcccgttgatgccacctggctgcgtgcagaaacctctcacaataatgcatcaggaactcgtggtctgagtgttgggctgtccccaggagcaagggcagaaggtcttggccgtcaatcactctgtcctggggcacctcgctgcccgccagccggaccacggtggggaacacgtccatcagactcgtgggctcgccaatcactcggccggccgggagcaccccgggccagcggaagatcccgggcacgcggatcccaccttcccatcctcccatgcccttcccacctttataaattccattccagccaccatactgggtgtttccaagttgattctctagggaaccgccgtgatccgacgtaaaataaatgagggtgctgttgctcaaaccctccacgtccaaagtgtcaaggatccgtcctaccatccagtccatctcctttacgttgtccccatacagcccgtggagactcttcccgaggaagttctccatagtgataagagggatgtgaacgtgtagaaaggaaacaaagaggaggaaaggcccatgcttattccttttgagaaaggacgcaacctcctgcagaataaggggtgtcgttctttggaagcacatgggctgctccgtgatggtgtggtttctcatcagaaagcaatcggcatggacaatcagagcacccacaaaataggagcttgcgaggaggaggacggccgaaagggctgaccagatgaccggcatccacgagacgggtatcaggtgtgtgagcttccctgctaccagtgtgagggcaaccaaggccaggacttggaagaggaagttgagtttttgttccaggttgacacgcttctctgagagttcccagcgggcgcaatcacccatcaaggagaaaggcattccgtagaaatggtcaaagccatgatggagagggtggtggcaatgatcactggctgactcacagttgagacccagatgccattttccaatgagtccagtggcatagcctttctcttccagtatttttgcaaaagttgtctcatttgttggaagacctccagatgctccggtccactgaagaacacggtaaccaatgctggaaaccatccctgatcgcacagggtatctgcccgtgaggaaggcggctctgcttggggtgcacaaagatgcggcagagatgtgttgggtcagcttcacgccgtcctctgcaaggcggtcaatattcggagtcctcatggtgttgttgccatagcagccaatgtccccaatgccaaggtcgtccgccatcagaagaaggatgttcggtcgggaggcggaaatgtcgctggaagctgatggtgccaaacttagcagtacagcgagcatcgctggcagccagctcctgaaacacaaacaagaatggtgcagatgtaacatgttgtctctctctctacttcctctgctcctgggctccttcctgaatccccgatcaagaagaggaaggttctctcccaaaggaagcaagcgtgaaggcagagagcacttgcacaaggctttgagctgggaatgattaacttcgagtttgtttttccctacgatttcgtacgaaa

SEQ ID NO: 60949 - DNA, 1331 bp, Homo sapiens
tttcgtaagggagagagagagggggactctgtgtgagggaaagaaaacaatgtctcctgctctgcagcttctgttcaggatcaatgtgactctaagaacaaatggatgaatgaatatccatatgaagagaaaaacaataaagaatatcaacacctttgagaacagaatgttaatgcttgatgggatgccggcagtcagagtcaaaacagagcttttggaatctgaacaagggtctccaaacgtccacaactatcccgatatggaagccgttcccctgttgctaaataatgtgaaaggggagcccccggaggactcgttatctgtagatcacttccaaacacaaactgagccagtggacttgtcaataaacaaagccaggacgtcccctactgccgtttcatcctccccagtttccatgacagcatctgcctcctcaccttcttcaacttcaacctcttcatcgtcttctagtcgtctagcctcatccccaactgttatcacatcagtatcttcagcgtcatcttcgtcaacagtattaactccagggccccttgtggcctctgcatctggtgttggaggccagcagtttttgcacattatccatcccgtaccgccttcaagtcccatgaatttacagtctaacaaactgagtcatgttcaccgcatccccgtggtggtacagtcggtgcctgttgtctacacagctgtaaggtcacctggaaatgtgaacaacactattgtcgtgccgcttttggaggatgggagaggccatggcaaagcacaaatggacccccgaggcctatctcccagacaaagtaaaagtgacagtgatgatgatgacctgccaaatgtgaccttagatagcgttaatgaaactggatctacggccctttccatagccagagcagtacaagaggtacatccgtccccagtatcaagggtccggggcaatcgaatgaataatcaaaagtttccttgttcaatttcaccatttagtattgagagcacaagacgccagaggacggtcttgaatcccccagactccaggaaaacggcgtattccacagattgtgattttggagggattgcaacaaaagttgtacacaaaaagttcttcacctggaagggttcaccggaggacacatacaggagagaaaccttacaagtgtacctgggaaggctgcacctggaagttcgctcgttcagatgaactgacgaggcattaccgcaaacatacgggagtgaagccattcaagtgcgcggactgtgatcgcagcttttcccggtcagatcatttggccctgcaccgccggaggcatatgttggtgtga

SEQ ID NO: 60950 - DNA, 2878 bp, Homo sapiens
gggagggctgtcggtgggccagtctgcgtagcgacggcccgtcccctgcgcacggacgccgggaagaagggggtggggccacgtttgcgtccgcgccatcaggcccgagatagcggcgaggtccgctttcagtgtatggttttccctgccaaacggttctgcttggtgccatccatggagggcgtgcgctgggccttttcctgcggcacttggctgccgagccgagccgaatggctgctggcagtgcgatcgattcagcccgaggagaaggagcgcattggccagttcgtctttgcccgggacgctaaggcagccatggctggtcgtctgatgataaggaaattagttgcagagaaattgaatatcccttggaatcatattcgtttgcaaagaactgcaaaaggaaaaccagttcttgcaaaggactcatcgaatccttacccgaatttcaactttaacatctctcatcaaggagactatgcagtgcttgctgctgaacctgagctgcaagttggaattgatataatgaagactagttttccaggtcgtggttcaattccagaattctttcatattatgaaaagaaagtttaccaacaaagaatgggaaacaatcagaagctttaaggatgagtggactcagctggatatgttttataggaattgggcacttaaggaaagcttcataaaagccattggtgttggactaggatttgaattgcagcggcttgaatttgatctatctccattaaacttggatataggccaagtttataaagaaacacgtttattcctggatggagaggaagaaaaagaatgggcatttgaggaaagcaaaatagatgagcaccattttgttgcagttgctcttaggaaacccgatggatctagacatcaggatgttccatctcaggatgattccaaaccaacccagaggcaatttactattctcaactttaatgatttaatgtcatctgccgttcccatgacacctgaagatccttcattttgggactgtttttgcttcacagaagaaattccaatacgaaatggtacaaagtcatgatgattccctgagtaacaaagggaaatgaaaactgtttgtgatcttccgtattcactgaaaaataaatgcttgtttagtatcaaattttatttcacgaaagtttttttaaagaacagaaacttttccaattaaaaaaaaaaagcagacttctggttcaagatagctcactggaatacatgtttacctttttctttcctaaattgcattgaattgataggaaggatggcggaatcttaaagtgatacatgctaactgtagaaaaaaatagaaaatgcacataagcaaaaggaaacatttaaatgctatctttcaaagataactactcttaaaaccttgagtatcttttcagacctttttcttggcaaatgaatccatattgacatatttgatttttttaaaaacatggaaacgtactgttttgtaaattctttttaactgcacatctactgttcataaatatacctctgtaacataactttttgtggttctaatgtactctgttgtatagctaatacaagttaggatgcttttggccagaggtaacagtgtccaaatataattggcctaagtaacctaggaaattgtttgacataacacagggttcaggggtgtcattaaagacacactttttttgccttgacctcagttggtttgttttgccttaggctattccacctctcgatcacaagagctgctgctataacttccagttttacatctttgtaaaattgtatctcaaaggcagaaaaggccatttcgtctctcatttgttttatccatgaggaagatttttaacaaaagcctccagaagatttcccctcagtttccattgacttagatcaggttacagagaaaggcaatgtctgacatttttggtctctgttagaagtagactctgttgaaaagaaagaagctaagctaggtgtgaagaatggaattggaagcccactgccttcccataagaaaggtttaccataatttactcacttttttctgtgttagacattttgattatctgcagtttattactacaagcagtggcagagtgaatgtccttgtacattttgagttacatgcttaattatgtccttgagaaagtttctaaaagtggaatgattggtttgactggttcatagggctttaattatacaatttacccctctaattagtactatatgtatgtgacttccctccccctgccagaatactccttggtcaattgtaggtattctttttggtttaatttttgccaatgtaattaaaaaatggtatgtcatttttaaaatttgtatttctttcattacaaataagattgttatgtcagtattgttattggcttttcgtattcctcttaacgtgaaccgtctgttcattgtttttacctgttttcgttttagcaagtagtacttaatttaaagtgtgaacttaatatataagatgccaggaccatcatattgatgacaaaaatctattatgtggttgtagtgcatgtcttggagttaaactcttaagtatcaagaagtaaaataatttcattgtttctgttactaacattaaaagtgtgcaaattgtataaaattaggtacttcgattagtaaaagaaaaaaatttgaatgttttttttttttattttattaagcatgcccagttatgccaagcatagtaaataaaggtcaagtagcatttataataaaggaagtattgttatccctagcatgagtgtaatggtgatatgaaaaactttgtcttgtcattataataataaaaaaatgaacatttattatggaattttaaaaaaaaaagaaaaaaaaaa

SEQ ID NO: 60951 - DNA, 1376 bp, Homo sapiens
gcgcttgcaactccacctcagcaggggtctctcagtcctcttaaagcaaggaaagagtactgtgtgctgagagaccatggcaaagaatggtccagagaattgtgaagactgtcacattctaaatgcagaagcttttaaatccaagaaaatatgtaaatcacttaagatttgtggactggtgtttggtatcctggccctaactctaattgtcctgttttgggggagcaagcacttctggccggaggtacccaaaaaagcctatgacatggagcacactttctacagcaatggagagaagaagaagatttacatggaaattgatcctgtgaccagaactgaaatattcagaagcggaaatggcactgatgaaacattggaagtacacgactttaaaaacggatacactggcatctacttcgtgggtcttcaaaaatgttttatcaaaactcagattaaagtgattcctgaattttctgaaccagaagaggaaatagatgagaatgaagaaattaccacaactttctttgaacagtcagtgatttgggtcccagcagaaaagcctattgaaaaccgagattttcttaaaaattccaaaattctggagatttgtgataacgtgaccatgtattgggatcaatcccactcttaatatcaggaacatttgcaaagcagttgcatcacaactttgcatttattatcttagtttctgagttacaagactttgaggaggagggagaagatcttcactttcctgccaacgaaaaaaaagggattgaacaaaatgaacagtgggtggtccctcaagtgaaagtagagaagacccgtcacgccagacaagcaagtgaggaagaacttccaataaatgactatactgaaaatggaatagaatttgatcccatgctggatgagagaggttattgttgtatttactgccgtcgaggcaaccgctattgccgccgcgtctgtgaacctttactaggctactacccatatccatactgctaccaaggaggacgagtcatctgtcgtgtcatcatgccttgtaactggtgggtggcccgcatgctggggagggtctaataggaggtttgagctcaaatgcttaaactgctggcaacatataataaatgcatgctattcaatgaatttctgcctatgaggcatctggcccctggtagccagctctccagaattacttgtaggtaattcctctcttcatgttctaataaacttctacattatcaccaacagcctgattgctgctgaacacactgggtaagtgtttgctgagaatattcacagcaactgaaatggagcagacccgtcaaacatagatgactatgctgaggctcagaaaacaatgccccaaaatgaaa

SEQ ID NO: 60952 - DNA, 1623 bp, Homo sapiens
  misc_feature (1)...(1623): n = a,t,c or g
tgcgaccgccgcagtcaagggcgacttgtggttggagtgagcaggctcctggcttccagggcagcaaaaacccccaagcactttctagaaagaatgtgtttcattctgactgtaaacacatttgtaaatgctgagaccaaaccccgacttatggatcctgagccacggccgtcactggccccgctaagcctcatcaccacacggccaggccagaccagcacccgcggacgccagctccacccctgggccccgaggttcccacccgctgaggagccgggagctccgaggaaacgcgccagggagctccaaagaacgcaggagcagcccgcggttcggcagcaagttttgcatttcttaaggtgaccacatctaataaaatgaaaaacgggtttactaaaacaggtccaaagacaacacggaagataagctacaaatccagcacacaaggcccacccacaccagccccagcggcccgtggccaggacagggctgaggctccagtctcctccaaagcccagtcacacattttggtttttgcttcccctttcaggtttttaaaagctaaacctaggagcctggtgggtctgcctgtgctgggcagtgtgtccagcctgccgaggtcacgctctggtgcgcggtgccctcagtggcgccttgggtctcggcgcctgggcctcactcctgcgcgatgctcctcagcacgtacttgaccgtgtaagcaaaggctgcaaacccaactatcacaaacaagttcgccagggcgccacccaggagtccgtggtgccggttggcctgctggagccctgcgaggtttgggacggcccccggcgcatgcccgttgagcagctgaatcccgttctggacgaggtgcgtctccccgtctggaaccacgtctggcaaggggagagtctggggtctgctactgagttcgtcttgtgctttctgtttttgtttaatctcctccacgacttcaggaaataattcacaaaagactttatctttcaaattaaatgctaaactctgcactgccagttgtcttttcgtgaagtccgacgtctctatactgcccagggtggggcccttctccaccatgaagctcaggagcccagtcaggatggtggagacagaccaggccgggttccacgtgtccgggtggaaatccgtgatagaaagacacagcctggtgttgcacttaaacctcccgttgggagtgatcatatagatactgggaggtttgaaaggaaattctctgggaaaaattagttttccatgataatagccaccttcataaggggtcatctctgggcctcggacgacatagtgccactcgagaatattcgaagggaggggctcggcacagatgtaaggcaccgggtctttcttaatgcgaaggtagtcctgcttcagcctctgggttgccgtggtcggagccctcttactgctggtgctgctcatctctccctgtcgctgcgcgtgggccgccgccgcgctcaggctcgccgtagtcgaggccggagcagggtgcggaaaagcggggcccgcgcccgaaacagccgcaccgccccgggattgggcgaattccaccgcactgactaaggactacatatnnnnnnnnacctctct

SEQ ID NO: 60953 - DNA, 1891 bp, Homo sapiens; identical to SEQ ID NO: 60597

SEQ ID NO: 60954 - DNA, 1369 bp, Homo sapiens
cagttagtggtgctcaacgtgtacgacatgaattggttccttccgatgggttcttggtctcactgacttcaagaatgaagccgcagaccctcgtgtattggatgaacgaatatacctcatccattggaattggagtttttcattcaggaattgaagtctatggcagagaatttgcttatgggggccatccttaccccttttctggaatatttgaaatttccccaggaaatgcttctgaactaggagaaacatttaaatttaaagaagctgttgttttagggagcacggacttcctagaagatgatatagaaaaaattgtagaagaactgggaaaagaatacaaaggcaatgcttatcatttaatgcataaaaactgcaattcattttttctttcagcttttatccagagattctttgtggggaaaagagattccctccgctggaatcaatccgactttgccctactttcagcttccttgtatacccttttcttacagagttgcctccccgaagggaggtgggctcacgccccgcagcccctgcagtcctagtgtccagccaagaacttccaggatgaactgggaggaagcagaggatgctgccgcatccgctttccgtggcaagcagctgccagcaggctccagacccggggcgccacactaaactataaatgtctccaaaggtcacacattcagaactgtctctggcagtcgaatatcactagagaaaagtaaacagagaagcatcctttagatattttgtatgcaaagatggctctcccccaaatcccagtttttcagctcaggattatatttgtaatcaaaaaaaaaaaaatcacttggcgcaggagggagaactttgtaagaagctgccctatgttttttttatccactcgtaaatctggatttatttcttctgttttatacaagctctgttaagttatgtttacagtatcttgtatcgctgtttacaaatcttgcatggactcctgccacagtgaaagaagaaaatcttcatgtcttcaaaaattaggcaggtaatctttgtatacttctgacaattgccagatctatggcataaataggcacacaaaaaggtacttaaacagttatagtcaccatcacctgcttcagaatggtcttttagatttgagtttgttttgttaaagttgttggcaccaggatgcagagaatcatactggcctgaggtgaaggagcacacagccctgagggcttggaaccctgggtccagttcctcttcacacccccttccactctgagtagcacatctccccaggtgcccatggaacacctgctttcatcccaaatatccgtccacctaggcggggtggtatgttcttacgcctttt

SEQ ID NO: 60955 - DNA, 3240 bp, Homo sapiens
cccacgcgtccgcggacgcgtgggcacacaccctgtatgtgagtattaacgttagtggcttgtgaaatttattccagtgtatcgcagaacgtccgctctttgttggacactaacaaggcatatccaacttctttcacaaagaggccaacttctggtttgaggtcagtggatacctgatatccccactgcgaagcccttttgtggatcctgcactcgaatggagtctaatggcttctccatggaataaaatggaaggagaatcaagcagatttgaaatccacactccagtttctgacaagaaaaagaaaaagtgttctatacataaggaaagacctcagaaacattcccacgaaattttcagagactcctccctggtgaatgaacagtctcaaataactaggaggaaaaagaggaaaaaagatttccagcatctcatttcttctcctttgaaaaaatccagaatctgtgatgagactgcaaatgccacttccacactcaaaaagagaaaaaagagaagatatagtgctttggaggtggacgaggaagcaggtgttacagttgtccttgtggataaagaaaatattaacaacacaccaaagcattttagaaaggatgttgatgttgtttgtgttgatatgagcatagaacagaagttaccaaggaaagcctaaaacagacaaatttcaggtacttgctaagtcacatggcacataaatcagaagccctgcacagtaaagttagggagaaaaagaataaaaagcatcagaggaaagctgcatcctgggagagccagcgggcaaagggacaccctgcctcagtcagaattccccacccaggaggagtcctggctttctgtgggtccagggggtgaaattacagaactaccaggcatctgctcataaaaacaagtctaagaaaaaaaagaaaaagtccagtacccgggaatatgagacacctggccatgcctgaaggatcgcaagcaggcagagaggccgggactgatatgcaggaatcccagcctactgtgggcttggatggtgaaactccacaactactaggacctactcacaaaaaaaagtctaagaaaaaaaagaagaaaaagtccaatcaccaggaatttgaggcattggccatgcctgaaggatcacaagtgggcagtgaggttggggctgatatgcaggaatcgccggcctgctgtgggcctgcatggtgaaactgcaggaataccagcacctgcttataaaaacaagtctaagaaaaaaaagaaaaagtccaatcaccaggaatttgaggcagtggccatgcctgagagcctcgagagtgcataccctgaaggatcacaggtgggcagtgaggttgggactgtggaaggcagtacagctcttaaagggttcaaggaatccaacagtacaaagaagaagtctaagaaaaggaagcttacgtctgtcaaaagggcgcgagtgtctggtgatgatttttcagtgcccagtaagaactctgagagcacactctttgattcagtagaaggtgatggcgccatgatggaagaaggtgtgaaatctaggccccgacaaaagaaaacccaggcctgtttggcaagcaagcacgtgcaagaggcgccaaggttagaacctgcaaatgaagaacacaatgtggaaacagctgaagattccgaaataagatacttatctgcagattcaggagatgccgatgattcagatgcggatttgggttctgccgtgaaacagcttcaggagttcattcctaacatcaaggacagggccaccagcacaatcaagcggatgtaccgggacgacttggaacggtttaaggaatttaaagcacaaggtgtcgctattaaatttggcaagttttctgtaaaggaaaataagcagttagagaaaaatgtggaagactttctagccctgacaggcattgagagtgcagacaagctcctgtacacggacagatatcctgaggaaaaatctgtgatcaccaacttaaaaaggagatactcgtttagattacacattggtaggaacattgcccggccctggaaacttatatactatcgagcaaagaagatgttcgatgtcaacaattacaaaggcaggtatagcgaaggagatactgagaagttaaagatgtaccattctctccttgggaatgactggaagacgattggtgagatggtggcccgaagtagcctctccgtggccctcaagttctcacagatcagcagtcaaagaaatcgtggtgcttggagtaagtctgaaacccggaaactaatcaaggctgtcgaagaagtgattctgaagaagatgtctccccaggagttaaaagaggtggattccaaactccaagaaaatcctgaaagttgcctatcaattgttcgggaaaaactctacaagggcatatcttgggtagaagtagaagctaaagtgcaaaccagaaattggatgcagtgtaaaagtaagtggacagaaattctaaccaagaggatgactaatggtcggcgtatatactatggcatgaatgccctgcgggccaaggtcagccttattgaaaggttgtatgaaataaatgtggaagatactaatgaaatagactgggaagatcttgctagtgccataggtgatgttcctccatcttacgttcaaactaaattttctaggctgaaagctgtctatgttccattttggcagaaaaagacttttccagagatcatcgactacctttatgagacgactctacctttgctgaaggaaaagttagaaaaaatgatggagaaaaaaggcactaaaatccagactcctgcagcacccaagcaagttttcccatttcgagacatcttttattatgaagacgatagtgaaggaggaggacatagaaaaagaaagcgaaggccacggcgccatgcatggttcacgcctgtaattccagtactttgggaggccaaggcgggttggatcatctgaggtcaggagttccgagaccggccttgaccaacatggtgaagacctgtcactattaaaaatgcgaaaatttagccgggtgtggtagttgcacacctggtaattttcaactacttgggaggcttgaggcaggagaattgccttgaacccaggaagttggaggtttgcagtgagcccagatcgcaccacccgcatgagagagagagattaccaatttccttgtccccttttcccagttttgattataatttatatacatatggtc

SEQ ID NO: 60956 - DNA, 3470 bp, Homo sapiens
  misc_feature (1)...(3470): n = a,t,c or g
ccactatccaagtggaggaattccaggctcaagacagcgcttccaggttcagtttcagggtctcgccggcagccccagccggcgggcgcggagcgggcagcggggcccggatcgcaggctcctctgggggccccggagttgggaagcggcgtccgggagcccccggaggaggatgggctgcagacacagcaggctgagcagctgcaaacccccgaaaaagaagcgccaagaaccagaaccagaacagccacccagaccagagccccatgaattaggtcccctcaatggggacacagctataactgtccagctctgtgcatcagaggaggctgagcggcaccagaaggatataaccagaattctccagcaacatgaggaggaaaagaagaaatgggcacaacaggtggagaaggaaagggagctagagcttcgagacagactggatgagcagcaaagggtcctggaaggaaagaatgaagaggccctgcaagtcctccgggcctcatatgaacaggagaaagaagcgcttacccactctttccgggaggccagttctacccagcaggagaccatagacagactgacctcacagctggaggctttccaggccaaaatgaagagggtggaggagtccattctgagccgaaactataacaaacatatccaggattatgggagccccacccagttctgggagcaggagctggatagcttacactttgtcatccaaatgaataatgagcgtattcatgagctggacaagcggnctgatcctcatggaaacagtgaaagagaaaaatctgatattggaggaaaaaattaccaccctgcaacaggaaaatgaggacctccatgtccgaagccgcaaccaggtggtcctgtcaaggcaggctgtcagaagacctgcttctcacgcgtgaggccctggagaaggaggtgcagctgcggcgacagctccagcaggaggaagggagggagctgttgtaccgggtccttggggccaatgcctcgcctgccttccctctggcccctgtcactcccactgaggtctctttcctcgccacatagggtgcagggcctgggcccaccacgacgcctgaagtcacagctccttccaaggtttttctggagaagacagcaggagcctctcagttcttttccaggaaggaacgagggtgggagcgagatggagatcctgggtgtgtgcccagtgagccctggggccttgagttacatggaatcacccacaagggttcttggaaggccccgagaaagcgtcttcccttgaagttgggccaaagggaataaagcaagaggagacatttcctccctgccccagcactctgtcccaatccgagaagttccgaggctttcccaggggcagtctgtgtcacgctggccatttgacataaaggagacagcccctggtcccagcttgtcagctctgctgccgacttgctgacttatcaacttcctctaggtgtttccactccaccctggcctgctcagagcctcagtttacccctgcattaaaatggtggggggactggtcaaaggactcttatgtcactgcagtgtcccattctaggattgtctgaaggccagagtaggggttggggggagtgtggacaaaccccgcaaatcagagtggggaaggtgagtggtagagagggggtctctgaaggcccttggggctgacagggccaggcagcctccccagctgaggcatcattcctgggccagagtcgtgtccaccaagggacagtagccagagctcctcttcctttaccaggcaaggtgcatcccctcagccctcctggcccttcagtcttggtgccacctgggcacaggggcaagcttggtggttgtgagtccattcatctatcagagctggaacctcatccctgcacagatgaggaaaccaaggcatggagcagttcccagagtcgaatctagatctcatctgtcatccgggtcttatcctttgctctgtttttctcttcaggctctggaaaatcagatctgtgacttaatcttcctctccctggccctcacccacttagtttctttttcattcctgctccctgccttaactcctcctcccactgcccctgatcccaggcccaggcttttacaacctggtgctcagcttccccatcagtgaaaaggggtggctagagtaactaacctcagcaggccgtccagtcctgatagtctgtggatttcggatccttctcaggaagcttcatgtctaatggagactataattataactcctgttctgcatagagcatttgcatcaaaggctttccatacccctccctcccctggtcctcataagatccttgaagcaggttcctattcctcattggcaacatggcaaacagatcacaggagtcaaagggccttgctcaaggtccccagcttcagccccaggccctaagccagcgtcagaacagtcaatctgcatttttcatcagtcattctatagtgacatcatcccagactgccttctgtattcccctgtgtacagtctccttctgtttctaggtttagaagttcagaggtgactgtgtttctccatttccacagccaaatgggggaagaggtgaggctaggggagtgctgtgctgattctccagccatggtcagacaggtcacccaggagcctcgaggaaagccctggagggaatcacatgtgtactttttcatgaagctttttgcaaagcacatctgcgatacactagtttattgaactaatgtccaggagtagacgtgattggtggccaagttatttggggacacctaaacagatcagtgacctgaatgacttctcagaacctttaatatgccaatgtgtgtggcaaacttacaagaagggagctaagtatccagcctctcccaaacctctttgaacaaagcttctgtccctcccacacctctcacctcacaggcacatcaggctgcagaatgcgctttagaaagcattgttttagtccaggcacagtggctcacgcctgtaatcccagcactttgggaggccgaggtgggtggatcacaaggttgggagattgagaccatcctggctaacacagtgaaaccctgtctctactaaaaaaatacaaaaaattagcttggcgtggtggtgggcgcctgtagtcccagcagcttgggaggctgaggctggagaatggtgtgaacccaggaggcggagcttgcagtgagccaagatcgcgccactgcactccagcccgggtgacagagcaagactccgtctcaaaaaaaagaaaagaaaaaagaaagcattgttttaattgagaggggcagggctggagaaggagcaagttgtggggagccaggcttccctcacgcagcctgtggtggatgtgggaaggagatcaacttctcctcactctgggacagacgatgtatggaaactaaaaagaacatgcggcaccttaaaaaaaaaa

SEQ ID NO: 60957 - DNA, 1038 bp, Homo sapiens
ttttttttttttaaaagtatttattatagtaaaggttactgttggaaaagatgaggggctttggtcgcatatgttgttgggcatttgtctttagaacgattggacattatttgcatcatgaattgtaatttttatgactatgcataattggtttttttcctgacccttggaatcgttagtttcatgtaactttttaaaaaattaaaacattgcagactaaatgtactgataagtacatactgaacacatttaattacccacagtaattaaaaagtcctgatctttacttcttaaggatggaaaattcattaacttgcaatctctgggatttctctattatccacaatgagagtatgaataatcccttccttccgcttccccactactggacagcctttatgtaacaggtcatgggtcccgatactgaagtgagtttcagtcccatcatctacaaactcacccgctgtctccaattttttaccattgcaccatacgtccatagcatctttttccaaaacaattctaaagttctcaccatccatgtgtaatacccaagtattggtggtttttgatctgtcctccatatacttcttgagacttttcccattaatttccagagtatattcataagcaaaaccactgatagcgtctatatttatggtcgcttttgtctttgcagctccaacatagaatgtttctttgcccactaatttgaacatccactcttttcttatctcttcctttccatctacatatactactcgtttgcctgatgtagtcccatgttcaaattcgatcttgtggactccgtcacttaaagcaacatcccaaacagctacgagatctgtcattttttctaggctgtaaggagggctgtgctctgtgggccgcgggaggctctggggtaggtttcaccaaacaaccggttggttccgactcggctgcgtaggccgcgtggccttgctcccctggccgagaaacaggcgcagccggcgcggaggttgaaagctctgcaggcgcgagtacccgacagcaacg

SEQ ID NO: 60958 - DNA, 1874 bp, Homo sapiens
cggacgcgtgggcgaaccctgaaccctacggtcccgacccgcgggcgaggccgggtacctgggctgggatccggagcaagcgggcgagggcagcgccctaagcaggcccggagcgatggcagccttgatgaccccgggaaccggggccccacccgcgcctggtgacttctccggggaagggagccagggacttcccgacccttcgccagagcccaagcagctcccggagctgatccgcatgaagcgagacggaggccgcctgagcgaagcggacatcaggggcttcgtggccgctgtggtgaatgggagcgcgcagggcgcacagatcggtgcgtggggagggttgggcgttcctgaccccgactgggaggtcagcccgagagactttgggtccctgggggtgcgacggtgccccactaccagcaccggccccagggtgccccaccgctgtgggctgccaccctcacgcgtacccccacataccaggggccatgctgatggccatccgacttcggggcatggatctggaggagacctcggtgctgacccaggccctggctcagtcgggacagcagctggagtggccagaggcctggcgccagcagcttgtggacaagcattccacagggggtgtgggtgacaaggtcagcctggtcctcgcacctgccctggcggcatgtggctgcaaggttataaaccacctcctttccagacgggagcctataccgcacatgcagcaaccagtccatccacaggcagctcccaacctcaagcctggcccaaagcctccaagaccctaccaaggcttctccccaccctgctccccagcacagttctccccaccccgttccccagcacagcgcttggggcccctctggctccagaccaggccccttggagcaggaaaaagatccactgatggaattcagacccctttccccttgggtccccagacagctcccccaagggaggagctgaggacttccctccctctgccccaagccttgtttccccaaggacaggtaccaacctcctcccctactgacacttctcaaccaagaaaacttcctttccattccctcaccagctgggcacccctatagctgcttaaatactttccaaatccagctgcactcctagccagggaaggtgaagggatgcacagaggtgggggaggggtactgtgcagggtactcagcatccctgaccaccaggtgccaatgatcagcggacgtggtctggggcacacaggaggcaccttggataagctggagtctattcctggattcaatgtcatccagagcccagagcaggtacggggcgccacggatcagtcattgatccaggttgatgatggagaccctggccagaatcactaaaagatcactggtggatcattagggtcactaatgagaacactggtcaaggttactcatgagtcactgggcctgggccgaaatcatcagtggaactttgattaggatcataaaatgggaagttggtcaaaatcacagatggctggcggggcacggtggctcacacctgtagtcctagcacttggggaggccgaagagggcagatcccttgaacccaggagttcaaaaccagcctggataacacggcaaaaccccatctctacaaaatagttcgctgcgtgtggtggtgcacgcatgtggttccagctactcaggaggctgaggcaggaggatcacttgagcctgggaggtctaggctgcagtgagccgggacgatgccactgcactccagcctgggcaacagagtgagaccctgtcccagcactctgggaggcagaggagcccagttggagatcagcctgggtaatatagtgaaacttgatctctacaaaaaaaaaa

SEQ ID NO: 60959 - DNA, 2062 bp, Homo sapiens
ttggggccggctgccttaaagcagtgaaaaagaaagcaaatagcctggcgtgaatgccaaaatgaccgctcaacaaggacagctggatagatacgggcagagaatggaacagagtatggacagaaggggggcagtgataaaccccgtctcctccccgctacacaatgggaaatgaggagatgctggaaggatcaacggccggatgatcaacaaccttaacaaaattaagggcagacgcaggggaccgcggcagcggccatgaggcaggtgggaagcaggcacagtgatgagccggctgaggctgtgggatcgtttattggggctctgtccagccaggctgcagcacccgcctgggcctggcccggtgccaccaggtgccggcaaccccaccggagaaagcgcaggagcggccgccgccccagggctcgccggctcctggtcctgtctccgtctctctgaagcggtgcggcgactcaggtgagcaagggtgtcgtcgtcgctgcccttcgccgcccgcgccgcccatcccgctcctctctgctctcggccaaccgcgctctcgtcgatgttctccagtggagtccgcatgctgcaccgacagctcccgacagcgccaggctcggcaacgggctctgctccgggtgccagccacggcttgaagtgaggccaggtgcttctgtttccactcggggtacttgaggcacgccttgtacatcttcttcatggccttgggagccaggaactgagaagatttattcaccacccacttgggtaaggagcctttggggtccacctgggccaggtaggtgatgacgcagctcttgggccctgtgctctggatgaggtagcccgtctggatggacacagctcggaccaagtctttccgaggtgggtatttgggatgtttgactgagtagttcataatgatgtaatcagcgcccatggggagccaggagcggagggtgatgacatcacggttcttcaggggcttgggacacctccaggagtaatagcccacgtcagcgttgactgtcaagcgggcgatgtcaaaagtctcaatgacgttgctgtcccatttcttgcggtactcaatgtcgtgtaggacgtcgtagagtgtctcggctggcacatcacagcactccatccggcacttgatcttgtgcagcgtccgatccatctccacagcctgcacccagacagacaccccagccctgctataggtcaggttccagcccacctcagcctcacactctgaccggaagctgcgaaagtcttggtcatcgggcacctggacactctcacggcccaggaccggccgaggcccttggggctctgtagaggccgccagcttctccatggggagtgtggggaggcccagggccctggtcctagtccggctctcctgggtcctccgcggaggctccgacaacgtcgacgcggctgcagatgctgacgccaccttcctgggacctgagaagcagggtctgtacagctccagcaacactctccttttcctccagaattctccagatcctcctcagtttcttggctctggtgctcatctcaacacagcagggtcttcctccatcaggccaaggtgggggtaggagaagaattgggaacagggactcccctaggttctcagggtacagtcagtcaatctaagcctgtatccaacaaagacactgacccctggggtacaaggaagggctccaggcccaaaggcaggaggattaggctttagctcttgctcacagcctgctgagacctggggcaagcccctgtccctctttgggccctcaggtttgcaatttgcagaatggaggaaatgggttcctcaatctacaatcacctgactataataatattttgcctttatataccgcgtgggtaaattcctgaaagtaaactaagctgttttcacccctggatctcatttgatcctcccaacagcctgtttgcatttacaaatgagaaagctccagttccctaagggaacaaaattacccaaagtcacacagcaagctggaagcagagcctgggtgcagtccttgaatcctga

SEQ ID NO: 60960 - DNA, 3753 bp, Homo sapiens
ttttttttttttctgagaggatttctttatttcgcgttcagacccaacacactcggacaccttggggccctgtgagggctaagcagggtggtggcgtcagctcccggggaggccccactccctggggaggaaatacacggcagggggccgcacccagccccccacggagggacccgtgttgctctaacagggacactgaagttgcctctgccgccccgtgaggggcctgtggcggccccagacccagcccagccaggccagaggagcctcccaggggccctcaggtggtgaggtgggggcttcccggccccggtgcccaccggcccttctagctgcctgtgctgggccaggtgtcctctgaggccggcaggagtctggcccccgctgcacctgcgcttggtggctggcaggggcaaggtagggaggtcaccctcgaggccggggtccccatgtgctaggggaagacctgccttcccagccagtgtccacagggcagcaattccacgctctgaggctcagggaccaaggcagggctgggtgtggggcccagactccaagctctggggattgggggaccaaggcagggctgggcatggggctcagggccttggaggtttttctcagctctcaacatcacagcacagggcccgtgagtcaccccagtcctctgggcctgtgtacccaagccggatgcaggccggggagtgcacgtggggctcctctgtggcgccagtgtgaagctgctctccggggcggtcgcagcctccaaaccctggtgctacgagtccgtgcctcaggcccagggaccacaggccgtctgctcatggctgaaaatgaggccaagcagctcccaagtctcgaagactccactggtgtggaggcagaggggcccttccagggcagggcagccctcggggcagcagcaggggcaagggctctgtctcacgcacacgggcacaggcacgcaggtgccggccctgccgctggctcccaagaggccgatagcccggtagggaggtcacacacacacagctgatccctggaggtaaagaaacctagacgaggagagtggaggctgggcctgcgcaaggaggcgccaaggggggagaccactgcccacaacagggtcagtcccgcgagagggtcagttccgcgcctgccgcctgcccgcccagctgcagggtgctcgccattgccactgctggggagcatggtttgggccgagaaaccagtgactccgggaggaaatgcagaagggccggggtgccagcgccagtgcccattatgggcagggctgggcctcacgtctgggccagcgagagctcctccaagcctctctttcccaggcggtacctggcgaggtccttcctggtcaccaacccgacaacctgattgcggttgtccaccaccaccaggtgccgcaggcccagggcccggaacagcttgaacacccgtgggagcgacgcctcctggggcaccgtgtagggggaggggttcatgaactcggagaggtccatggtgcactcccgctcgtcctgggacacgtggatggactggatgggtgggaagcgcgggtaggcgtctcggaagtccttcagcctcaggcgccgctgtaccaggcccaggttggaccgctccacaaacaccttgtgctttaggagaacgatgagctgggagcgcaggatcaggccctggagccgggcaggctgggtgtcatcggcatgctccaccacggggaagccgttgtgattggacgccgtgtcgctcagcacgtccacaatgacgccgaccttctcacgccgcctcaggcaggtcactggtgtgctcatcacctccctggcagtgagtgagtgtgaggtgaccggggcctcccagtgcaggaagggcacactctgcagctgaatgtgcatgtcgtacaggccctcaatgaagacgtcgcccacgatcttggcggtcatgagcaccagcatgatggggaagccgtaggtcacgttgctggtggcctccatcatgatgacggtcaggctcagtgtcatccgcacaatcccgcccagctgggcagcagctcccatcagggcgtatttgccggggtccgcccagatcgccgcccccgtgaggtaggacagggagatcccaaagagccggccccaggcagccccgatgagcagggacgggatgaagaccccggcagacaccgtgagcccgtaggtccagcaggccaggaagaagtagaccagcgtgaacaggccgagggtcagggggttgtaggagcctggcgggtcgtggaagaggctcaccacgctcttctccggggtgttgaagaaggccgcagccatggagttgtactcgccatctgcacaaaagagctgcagcgggtaggacatggagcccccctgcaggggctggcaatcccgcgacgagtagatcagcacgaaggcaactgtggccgtgacggcggccaccagcacggcctcaatcacctgcaggcagggccggtggatgtacctgattcgaaacatggtcagccagtagttcaaggcattgaacacggctccaagcacaccgcccaccacgcccatggcgatgaagaccgggatctcgtggatcgtgtaggccattttctccgagtcaaaccttccgaagttgatgaggcctgggctggacaggtcccacatgttcccgtggtaaatgctcagaacaaaattcagggtgaacgtggagatcatggaagcaaagaagatcctccaggtcaggaactggttccagaaggacgcaccctcctccaagctgaacaggaccccacccacgggggctccaaacgccgctgacactccggccgcagcccctgcggagacgaagtcccgcttctctgtgtctctgcggaggtactcgaagatcttgaaatctcgtttcagtgacgttgaccttccctgagagatcccggcggcaatcactgaacctgagtggatcatcggcccttcctttcccacggccaggcccccgaccacggacaggatcacaccggacactttgatcaccaacgtcttgagccgcaccacgtgggggatcttcaccccgttgaggaagcacttgatctgggggattccgctgccagcagccaccggctctatgaaagccacaatcacagagcccacgagcacgaaggcggcgttcagcgtggcccacagcaacagggagaaggacagtccgcccttctctgtgaacttgtcgatattgcccttgatgaccctgtacttgaggccagccaggttttccaccacgatgtcaatgaagcaggccacgaggcccgtgaggatcccaatgagggcgcagatgacccagcgcttgatctccaccgtccggaaggccgtgtgattgatccgccgctcctcctccaggaacagctggttctcactgttgtcatagtccaagctctcatacttgagggacaggagcttctcgttgtgtgggatctccttggggaagggatgtggagggtccatattccggttccaaaagttcatcatccagcttcacgctgctcatatgtccgactcggaaaagcgcagaacgtggtgactggcgcgcagccccaggcccagccccgttcagcagcggcgtccccccgccgggccgcgccgtcctccgcagcagcggcgccgcctcctcgtcgtcccggtcccggccggaccaggacaccttcttagagacgttggccatggcccgccgcggagcgacaccggccgggaagcg

SEQ ID NO: 60961 - DNA, 1298 bp, Homo sapiens
gagctccgcgcacctgggcgccatccgccctggctccgctgcactagctccacgcccgtaccccggcgtcacgctcagggaccggcgatgctctgcaggctgtgctggctggtctcgtacagcttggctgtgctgttgctcggctgcctgctcttcctgaggaaggcggccaagcccgcaggagaccccacggcccaccagcctttctgggctcccccaacaccccgtcacagccggtgtccacccaaccacacagtgtctagcgcctctctgtccctgcctagccgtcaccgtctcttcttgacctatcgtcactgccgaaatttctctatcttgctggagccttcaggctgttccaaggataccttcttgctcctggccatcaagtcacagcctggtcacgtggagcgacgtgcggctatccgcagcacgtggggcagggtggggggatgggctaggggccggcagctgaagctggtgttcctcctaggggtggcaggatccgctcccccagcccagctgctggcctatgagagtagggagtttgatgacatcctccagtgggacttcactgaggacttcttcaacctgacgctcaaggagctgcacctgcagcgctgggtggtggctgcctgcccccaggcccatttcatgctaaagggagatgacgatgtctttgtccacgtccccaacgtgttagagttcctggatggctgggacccagcccaggacctcctggtgggagatgtcatccgccaagccctgcccaacaggaacactaaggtcaaatacttcatcccaccctcaatgtacagggccacccactacccaccctatgctggtgggggaggatatgtcatgtccagagccacagtgcggcgcctccaggctatcatggaagatgctgaactcttccccattgatgatgtctttgtgggtatgtgcctgaggaggctggggctgagccctatgcaccatgctggcttcaagacatttggaatccggcggcccctggaccccttagacccctgcctgtatagggggctcctgctggttcaccgcctcagccccctcgagatgtggaccatgtgggcactggtgacagatgaggggctcaagtgtgcagctggccccataccccagcgctgaagggtgggttgggcaacagcctgagagtggactcagtgttgattctctatcgtgatgcgaaattgatgcctgctgctctacagaaaatgccaacttggttttttaactcctctcaccctgttagctctgattaagaacactgcaaccca

SEQ ID NO: 60962 - DNA, 2881 bp, Homo sapiens
tcctccctgtaactgaacaagtgaaaattcacattgtggatccgctaacaggcacagatgtcatgtgaaaacgcacatgctctgtcatccacaccgcctttctttcttttctttctgtttccttttttcccccttgttccttctccctcttctttgtaactaacaaaaccaccaccaactcctcctcctgctgctgcccttccttcctcctcctcagtccaagtgatcacaaaagaaatcttctgagccggaggcggtggcattttttaaaaagcaagcacattggagagaaagaaaaagaaaaacaaaaccaaaacaaaacccaggcaccagacagccagaacatttttttttcacccttcctgaaaacaaacaaacaaacaaacaatcatcaaaacagtcaccaccaacatcaaaactgttaacatagcggcggcggcggcaaacgtcaccctgcagccacggcgtccgcctaaagggatggttttctcggcagagcagctcttcgccgaccaccttcttcactcgtgctgagcgggatttttgggctctccggggttcgggctgggagcagcttcatgactacccggagcgggagagcggccacaccatgcgagcacaaattgaagtgataccatgcaaaatttgtggcgataagtcctctgggatccactacggagtcatcacatgtgaaggctgcaagggattctttaggaggagccagcagaacaatgcttcttattcctgcccaaggcagagaaactgtttaattgacagaacgaacagaaaccgttgccaacactgccgactgcagaagtgtcttgccctaggaatgtcaagagatgctgtgaagtttgggaggatgtccaagaagcaaagggacagcctgtatgctgaggtgcagaagcaccagcagcggctgcaggaacagcggcagcagcagagtggggaggcagaagcccttgccagggtgtacagcagcagcattagcaacggcctgagcaacctgaacaacgagaccagcggcacttatgccaacggcagcgtcattgacctgcccaagtctgagggttattacaacgtcgtttccggtcagccgtcccctgatcagtcaggacttgacatgacctggaatcaaacagataaagcaagaacctatctatgacctcacatccgtacccaacttgtttacctataggctctttcaacaattgggcagttagcaccagggataacccatgactgaaatcgaccgaattgcacagaacatcattaagtcccatttggagacatgtcaatacaccatggaagagctgcaccagctggcgtggcagacccacacctatgaagaaattaaagcatatcaaagcaagtccagggaagcactgtggcaacaatgtgccatccagatcactcacgccatccaatacgtggtggagtttgcaaagcggataacaggcttcatggagctctgtcaaaatgatcaaattctacttctgaagtcaggttgcttggaagtggttttagtgagaatgtgccgtgccttcaacccattaaacaacactgttctgtttgaaggaaaatatggaggaatgcaaatgttcaaagccttaggttctgatgacctagtgaatgaagcatttgactttgcaaagaatttgtgttccttgcagctgaccgaggaggagatcgctttgttctcatctgctgttctgatatctccagaccgagcctggcttatagaaccaaggaaagtccagaagcttcaggaaaaaatttattttgcacttcaacatgtgattcagaagaatcacctggatgatgagaccttggcaaagttaatagccaagataccaaccatcacggcagtttgcaacttgcacggggagaagctgcaggtatttaagcaatctcatccagagatagtgaatacactgtttcctccgttatacaaggagctctttaatcctgactgtgccaccgcgtgcaaatgaaggggacaagagaactgtctcatagtcatggaatgcatcaccattaagacaaaagcaatgtgttcatgaagacttaagaaaaatgtcactactgcaacattaggaatgtcctgcacttaatagaattatttttcaccgctacagtttgaagaatgtaaatatgcacctgagtggggctcttttatttgtttgtttgtttttgaaatgaccataaatatacaaatataggacactgggtgttatcctttttttaattttattcgggtatgttttgggagacaactgtttatagaattttattgtagatatatacaagaaaagagcggtactttacatgattacttttcctgttgattgttcaaatataatttaagaaaattccacttaataggcttacctatttctatgtttttaggtagttgatgcatgtgtaaatttgtagctgtcttggaaagtactgtgcatgtatgtaataagtatataatatgtgagaatattatatatgactattacttatacatgcacatgcactgtggcttaaataccatacctactagcaatggaggttcagtcaggctctcttctatgatttaccttctgtgttatatgttacctttatgttagacaatcaggattttgttttcccagccagagttttcatctatagtcaatggcaggacggtaccaactcagagttaagtctacaaaggaataaacataatgtgtggcctctatatacaaactctatttctgtcaatgacatcaaagccttgtcaagatggttcatattgggaaggagacagtattttaagccattttcctgtttcaagaattaggccacagataacattgcaaggtccaagacttttttgaccaaacagtagata

SEQ ID NO: 60963 - DNA, 2417 bp, Homo sapiens
ttttttttttttactgtaataaaagcagcttgttttctgcttgaacaatagctctgagagcaagaaggctggaaatgcacattcagaaatgaggtaagcaggacccagtgaggcacgacgtggtttactagaagtggccggtttcctggcagctttgtaaatggactctaacctcagtggaatctgggcccccggctgggatcaggaggcgaccatatgggcttttcttgtttcacggtgaagaatctgttgcgctgagagcaccagggagcaggtagaagacccgggcagccatcctgcgggggctgagaaggtgacaccagggctgctgaagtcgggctccctgttagcctgcagctccagtgccacttgccctgtgcactgttttccagttgaggagcagctcgagctctgggggggcagcaccaaaggcatctccatggggcacctcagggattttcaggcaccacgggcaatgcaggagcttctggcgcctccacctcaggccaggcccaccgttcttctggtgggatgaggctgatgcgggacttctcctcttcagctgcctctagggagatctctaaagacaccataaggggaacactgggctccagggcctccctcgggacctcaatctcacttggaacttcaatctttctcctttcctcctcagcggctgcctcctcaggcagctctcgcctgagggcttttgggggtggctgggcacaagtgggtccagagacccagtagttcagggggtagccagccagagagagttggggttctgaaacaactccgcaaggcctctgatggtcctctcgggcggctgcaaccataggacattcccagcagtgggctctggtttgcagttgttcctggaatttctccggggagatctgagtctccttgtcccagaacagtaaccggcgacgacggcggcggcgaggaggtggggggactgggggcctcctctctgggctgggtggggctggcagacgcagctcctccgggggggtcacctccatgagtagggccccaggttcccagcctgtcagcctcagctcctcaggacccagtgcctctcctattccttccacctctgcaggagctggaggtgggagccgcgggatttctaacaagatagcttcttcttcctctgcgatcagcaggtccagttctcggcggctgacctctgggagctcccgttcaccctcaatctccagcatccgtatgggctctgcctcccaggatcgtgatggcctcaggtggcagcacagtgaccggaatcctctctggctccctgggctctgtaggaacttcaggagggatctcttcaactctctctgggattgcagcctctaagaggtgtcgaatctgagggatatcgaaaggactaggaagtctgggatccacagacatcatcccaaaaaagggatctggagcatcttctagggtctccatcatggcccaggtggttaggaagcagcaggctgggtagctcagtctccatatctattcggatctgcagctgggcacggtggaggcgctccaagatgtgctggatgtcctccacgaggtactggcattgttgagaatagacgcggatcacaccgatctgaagttgggctgagagatagagggagaagcggggccgcggcaggccgggctgcgggggttgcactcgtaccagcacgtaattgaggatttcctcgcaggttttcaccacattcaccctcaggtattcgcgcttcaccaaccggctgccgcgagtcgccgccagccagatggtggcaaagcagccggtgtggcgctgaagcacgttgggatagtagaacattgtccctctggtctttcaccctcgattccaccagatccccgttcggatctgagtcggaatttctttagggcacagaattcccaacaccttggagagaagtcaggatttggtcttctctggtggcaaggtgggtgcacctagaaagccaagttaatgaggcaacgaacaatgggcagatacacaattacccaggataactgagacgcaggagatgggcgcccctctctgtggaccctcggtggatccgcacgccacgtgatgcgtcaaacttgagacttctgggttgggttccaggttggagatgcagagctccaaggggacgtccgggccggaatccagagcaggtcccgagggagcacggtgtcctccacagcaggcctcggtcctcgagcgctgggagcgatgtcaggcccctgggccttgcactggcttgggcggccgcggtgtggccccgggccgcctactgcaggactagatcgcaccgcgggaagcgagcgcttcggggcaccgcacctcgctcctcattagatggcggcttttgccctgacagccaatggggaacgggggtcgggtcgggaac

SEQ ID NO: 60964 - DNA, 2178 bp, Homo sapiens
  misc_feature (1)...(2178): n = a,t,c or g
ttttttttttttctggctacaaattttattccgttacaaatagcaccgagcccttggggctgcccctgtggagagggatccccctcctggacccccacctcctcccctgagctacccatgtagtgtctgggagctggcacacggcccagggtccctctggaagctgggccaggccaaggggttaggcccaggcccttcgtggggtgggcccagggccagctgtggcagatgtgcaggtaggtgagcggcagcctctcagatgagcacactggccacgggcacgcgggtggagcggccccgctggggcaccacaatccggtcgtctgtggaccctgcttcgtgcagcaggccctgcacgtgcagctgtgcccgccggcggtcggcctcaatgaagatggcggtgcccaggaaggctgcgccgcccagtgccccaacaaacgcgcagagcatgagcgagaactgcagagcccggaactcggacaagaaggaggggggccagttccggcgcaggcggtcagagatcaggccaatgaggtaggggctcccagcatcacccagcaggtgggacagcacgatctggaaggcctcggcggtggagcgtcgggtagggatcaccacgtacagcagaatgtcggccacgatggcccagttcatggacaggagggtctctccaatgaagatgaaaatataagtggccacgatgctaccacgggcgcaggcaagggacaggaagaggaagggtgcagagcccaggaggccagtggcacagaccaggggatcagcccgggggttggagtggcggagccggcggctgatctccacacccaggcccacacccaggactccggtcaggcaggtgatgagtccaaagatgagactgtcagaggaagagcaggagtctccgggaaggcagggtggggtctccccaaggaccacgcgggaacgcagcaggaatgccggagcccacagagccagggagcccgtgacaaaggccacagcagtgaagcccagggaagacaggacgaaactaggatttcttgccagagccctcagatctgcccaccacgaggtggggttcaggggtggcaaatctgagtggcgctccacggctccccttggcggctcccgcactaccaggaacagcagcagaacggccaccactcctagacccggtgtcaccctcagagcccagtgccagtctccagccatatccttcactttggagcctgcaatgtagcccagaccactgcccaccggaatggcaaagtagaagatgctgagcatccggctccgctggtcggccacaaagaggtcggcaatgagagtgggcgcgatggtggaataactggcctccccgacccccaccaggccccgggtcaggaggagcagccagaaatgctctccggggatgaaggatgaccccagtgtcaccagggaccagaaggcaatgcccccgcacatgagatacttccgattgtacctgtcacccaggtagccaaacacaggtgccaacaccatgtaactggagatgaacacggtctggatgagcccagagctactgtccccgatgttgaagaactgctcgatgtcgggaaggacgccagccacggtgaagcggtccatgtagttcaggagattgatgtagcacagcaccgccactatgagagccgaacggccgggagacaggccggtgatgcgctgcagcccctcctggtccgggacctcgggctcctcggacttcgggttccccgtggaccctggcaaccccggggtgccaggcactggcccgtcgtccgggtcatccgcctggctgaggaagggcgcggtgtcggacccggccatggtcccggggggccgcgcccgcccgcgctccggtcccaccgacgatcccacctgcgaggggaggaggctggagaaaggaggatggnccgaacacaggcgaggnaagtgcgcccggagacggggagcttgccctgaagcacagagcaccactgagaagggacccgggccctgtcacgcctccccgtctcagtagacacacagcgcggaggggacgtgcggaatacacgtgatgtcggggacaggagcgggctgaagagggcacgatcccacgcggaggccacccctcacccggggtaggagcccgctgcacttgctgtcgctcagcccgggcgctgc

SEQ ID NO: 60965 - DNA, 4068 bp, Homo sapiens
tttcgtccgaagcgcgggaagcagctcttgtggatcctcagtggcggtggctcggtcacccggataggtaaaggaaaacatgcctgccacacggaagccaatgagatatgggcatacagagggacacacggaggtctgttttgatgattctgggagttttattgtgacttgtggaagtgatggtgatgtgaggatttgggaagacttggatgatgatgatcctaagttcattaatgttggagaaaaggcatattcatgtgctttgaagagtggaaaactggtcactgcagtttctaataatactattcaagtccacacatttcctgaaggagttccagatggtatattgactcgcttcactacaaatgcaaaccatgtggtctttaatggggatggtactaaaattgctgctggatctagtgatgtttctagtcaaaattgtggatgtgatggatagcagccaacagaaaacatttcgaggacatgatgcccctgttttaagtctttcctttgatcctaaggacatctttctggcatcagctagttgtgatggatctgtcagagtgtggcaaatttcagatcagacatgtgctattagttggccactgctacaaaaatgcaacgatgtgataaatgcaaaatcaatctgcagacttgcttggcagccaaaaagtgggaagttactggcaattcctgtggaaaaatctgttaagctatatagaagagaatcttggagtcatcaatttgatctttcagataatttcatctctcagaccctcaatatagtaacctggtctccctgtgggcaatatttagctgcaggtagtattaatggtctaatcatagtttggaatgtggaaaccaaagactgcatggaaagggtgaaacatgagaaaggttatgcaatttgtggtctggcatggcatcctacttgtggtcgaatatcgtatactgatgcggaaggaaatctagggcttctagagaatgtttgtgaccccagtggaaagacatcaagcagtaaggtatctagcagagtggaaaaggattataatgatctttttgatggagatgatatgagtaatgctggtgattttctaaatgacaatgcagttgagatcccttctttttcaaaagggattataaatgatgatgaggatgatgaagacctcatgatggcttcaggtcgtcctagacagcgaagtcacatcctagaagatgatgaaaactcagttgatatttcaatgctaaaaactggttctagtcttctcaaagaggaggaggaagatggtcaagaaggcagcattcacaatctaccacttgtaacatcccaaaggccattttatgatggacccatgccaactccccggcaaaagccatttcagtcaggttctacaccgttgcatctcactcacagattcatggtgtggaactctattggaattattcgctgctataatgatgagcaagacaatgccatagatgtggagttccatgatacctccatacaccatgcaacacacttatcaaacactttgaattatacaatagcagatctttcccacgaagctattttgttggcatgtgaaagcactgatgaactagcaagcaagcttcactgcctgcactttagttcttgggattcaagcaaagagtggataatagacttgcctcagaatgaggatattgaagccatatgtctcggtcaaggatgggctgctgccgctactagtgccctgcttcttcgattgtttactattggaggggttcaaaaagaggtattcagccttgctggacctgtggtgtcaatggcaggacatggagaacagcttttcattgtttatcacagaggtacaggatttgatggggatcagtgccttggagttcaactgctagagctggggaaaaagaaaaaacaaattttgcatggtgaccctcttcctcttacaaggaaatcctaccttgcatggattgggttttcagctgaaggtaccccttgttacgtggattcagaaggaattgttcgaatgcttaacagaggacttggtaatacgtggactcctatatgtaatacaagagagcactgcaaaggaaaatctgatcactactgggtggttggtatccatgaaaatccccagcaactaaggtgcattccttgtaaaggttctcggtttcccccaacccttccacgccctgctgttgctatattatcctttaagcttccttactgtcagattgcaacagagaaaggacaaatggaggagcaattttggcgttcagttatatttcacaaccaccttgattatttagctaaaaatggttatgaatatgaagagagcactaaaaatcaagcaacaaaagagcaacaggaacttttaatgaaaatgcttgcgctttcttgtaaactggagcgagaattccgttgtgtggaacttgctgatctaatgactcaaaatgctgtgaatttagccattaaatatgcttctcgctctcggaaattaatactggctcaaaaactaagtgaactggctgtagagaaggcagccgaattgacagcaacccaggtggaagaggaagaagaagaagaagatttcagaaaaaagctgaatgctggttacagcaatactgctacagagtggagccaaccaaggttcagaaatcaagttgaagaagatgctgaggacagtggagaagctgatgatgaagaaaaaccagaaatacataagcctggacagaactcgttttccaaaagtacaaattcctctgatgtttcagctaagtcaggtgcagttacctttagcagccaaggacgagtaaatccctttaaggtatcagccagttccaaagaaccagccatgtcaatgaattcagcacgttcaactaatattttagacaatatgggcaaatcatccaagaaatccactgcacttagtcgaactacaaataatgaaaagtctcccattataaagcctctgattccaaagccgaagcctaagcaggcatctgcagcatcctatttccagaaaagaaattctcaaactaataaaactgaggaagtgaaagaagaaaatcttaaaaatgtattatctgaaaccccagctatatgtcctcctcaaaacactgaaaaccaaaggccaaagaccgggttccagatgtggttagaagaaaatagaagtaatattttgtctgacaatcctgacttttcagatgaagcagacataataaaagaaggaatgattcgatttagagtattgtcaactgaagaaagaaaggtgtgggctaacaaagccaaaggagaaacggcaagtgaaggaactgaagcaaagaagcgaaaacgtgtggttgatgaaagtgatgaaacagaaaaccaggaagaaaaagcaaaagagaacctgaatttgtctaaaaagcagaaacctttagatttttctacaaatcagaaactatcagcttttgcatttaagcaggagtaaaggaagaaagtgaccctagggaagtaatggatttttttttactcatctttgaatatagactcgagtctttgggaaactcattatatatatattttttaaagagtttgaagcaactgtttgtctttataagataatgtagtaattatattggtgtaggtaacaggacatatgtaaaaactatcatctttgcagattactctgcctccaaatgcagggcctttcagagatgcattgtgattgtaattactgagttgaagctccaaccaatttgaatttgtttcttaaccttgaaaaatcattaaagccaaggtattaaaacctttgtgcattaataccttctaggggtttggttcatttggtttttgtcatgtgcaaggaaggacaatagtcctctttccaagtgtgttagcatagacttctctatatgtttctactagacctaggggatgacgtcttttaataatactggccctaaacatgtaaataatcttgtaggtgagactttttcttttgtgtttcggaaatttcctatgtggctttcagttgtctgtttgtatagcctggatttttttgaggtaaatgaaactttctcatttgt

SEQ ID NO: 60966 - DNA, 1577 bp, Homo sapiens
ttttttttttttgaagttcatcatctttagacttaaggaattaacaagggtcagggagactacaccaggctgagggcttcttggttcctggagacatgcccagctacagcaaacacagggaaacacgaagggggcagctggaagatttggtcttgaacttggggggtgggtaagtgatgatccccacgactggagcagcaggaagaagttgtgtctgaggaagtgctgggccgcccagagggacagccctgccctggagcttgtcgccgggagggaagggaaacaagccccctccctcagtgctgaggaaaaggcacttggctgggtctcctcctgccctctccccatccgtgggagagacggggtccttgcctccttgcccctttcagccgcccagaagccggtcctggttcagcctctggaagaagcttttgccgaactcataggtgctgatcatgatggcacaggagggggcagccttgatgatccgaggaaggaagcctgcaaagagtcccttggtgcccgactcggcccggatcctccgcagcagcagccaggtggagtccacatgcagggggttcactctcacagcctccatcgctcccagagcgacctggcgttgggtctttaccacgtcaaagggtagagtcagcactgcagccaccgtccctgagatgccaccagccacaaagctcatgcccacagaagtctggtccttcggcctgagcccattgagccagctcttcaccagctcatagttgaaccagtacagggctgagaagggcacatctcgaagggcagtggggccccagcccagccacagtgagcgccagccaccctgagccactgcagttcgaacacaggcacccagctcccggtacgacacatgctgagcctgcagctttgtccgcataagctccagggggctgatcacagtcacggtgcccaggcgggccagcgcgccagccaccatgggtgcgtagaggtcagaggtcagggctcgaccacacaggaaggccttcagttggtcataggcagtgaagtagatggcggtagctggcacagtcatcaccagggtggcggggaggccgctccagagggtcctggtgccctcgtgcctcacgatcttcacgaaggcatccatggtgccagtgaagcgggtagggtcttgaaaccaggtggcacagcgggcaccatttgggcacaggtacagaggctccaggacaccattgcaatacaggaggcacttccatttggtataggagagaggagggcaatttggtataggagaggctccacagtctggaggaaggcatcagctcgctggccatggagggccgctgagactgcaggcgaaccttcaccacgtccaggggtgtcatgaagagagaggtaaccacagccccggtgcctgaggccaccatttgctggagggggctgatgcccgcagggtcctggtcagccatcttgaagcttcagtcctggctctaggctggtgctcgtgcggcgcggcgcccagggtcaggcgggcccataccggctccgccgcctgtgcgcggtccgcgcgcgctcgcagc

SEQ ID NO: 60967 - DNA, 2593 bp, Homo sapiens
tttttcacagcatgaattcagaagcttactttcaaaaaaaatttattcaatgaatacacaatataattccatttcgagtgattaaaacctatttgttgtttaaaaccaaacaaaactacaagaaaacattttcaaaaccttttttttcaggctgaagaaatcgtttaatccattttaaagaaatctcacatgatgttctgtcgggattaaaaatatacacggaaaaaaataaaacaaaatatatacacagaaagaagctcgcacagagtcaggcgtgcagcaacgtcacacactcattcctttctgtttcctctggacactcaaaatgtgaaagcaagtaagaggggggtggttaaccaaaccttttggtccaaggaataaaatttctttaaaaaatttaaaacgtcaaaacctgccagaataagacaatagaagagcgtatcgtcaggcgctgggaatggcaccacgacaaggcattaatgtggattcacttgcacagctgctctcataaaagctacacgattcagaggtaaccctaactatccgcaatcccaaccaaagtcatgttcatgccgctgtcctagtctggacaatcatctgtcactcatccaacacagttatatacagaatgcgcagtcccagcaacagtgtagattacagcaggcgttctctacctggactcatgattggatttcatttctaaattacatcagagctttcaaagattgaaatacacaaatctgcactacccaagcctccttgcctgtacgggaaacaaatcagaagagcatttattgggaactgacacgtcaggcctcacaggtgctgggcaggaatcacagaggcttgctctgcatcatgtcttccgttaacctgaagctttgggtttattgtgtttggcaaaccactcgtcacttttatctgctgccattgcatcatccaacaatttgcttccctctggatccatcttagaagagttctcgaaatgcttcatccccgacaaagcaaatttcatgtccgtcagggtcggccagaatgaccacctgtactgttgctttccctggggtgtccaggctcaccaggggagtcagaatcttctggttctcccttttcatcaagtcttcctaagtctggcaaactctttctgggggcaagagaaggcaaattcttccaaaaagctgctgcatggttccaccccacccttgacgcccctgtagctccaagcttacactggttatcagcatagcccagcaaagccctttgcttttcttcatctttttcataaattttcattcccagtagattacaccagtagttcaaggacttttgaagatcagacactgctagagttacttttaatacaggatctgactgaggcagactgcgattctgcaaatagaacttatatcctcccggggcctcggtttcaaaaacaccttctgcaacttccgtcagtggccactccagcttcctggcgttgctgacagcctggctagaagcgagcgtgattcccataaagtcattgccaagcttgtagtctccgacgccataattgtaagtcagttctgcgacaaaatgatcatcctcaggcccaaatcccaccattgttttactccatttcccatcataaggcccattacaggcagctttgcagccttcttcaaattcctcatgccgcagaaccttcatccccaggacgtcccgatagaaacgcgccgtctggaagcggtttcccactttgaatacgaagtgcagagctctgcgagcagccatgattcccgccgcacgcagccgtcacgcgcaccgtacagcccagtccacgaagggcgccacgggccgtgacgtcacctatgcccgacggcgcgctttcgtgacgcagcccgggtctcagggaacatggcggcgctggtgagacccgcgaggtttgtcgtgcgaccgttgctgcaggtggtccaggcttgggaccttgacgcgaggcgctgggtccgggcgctgcggcggagcccagtgaaagtggtgtttccttccggagaggtggtggaacagaagcgcgctcctgggaagcagccccgcaaggcaccatctgaggccagtgcccaggagcaacgagagaaacaaccgctcgaggagtccgcatcccgcgctcccagcacctgggaagagtctgggcttcgctacgataaagcttatcccggggacaggaggctgagcagtgtaatgacaatagtaaagtccaggccatttcgggaaaaacaagggaagatcctgctggaaggtcgcaggctcatttcagacgctctcaaggctggagctgtgccaaaaatgttcttctttagccgtctagaatacctaaaggagttgccagtcgataagctgaaaggtgtcagcctcattaaggtgaaatttgaggatatcaaggattggtccgacctcgtaacgccacaaggaataatggggatttttgccaagcctgaccatgttaagatgacatatccaaagactcagcttcagcattcactgcctttattattgatttgtgacaatctccgtgaccctgggaacctggggacaattctgagatctgcagctgggg

SEQ ID NO: 60968 - DNA, 1974 bp, Homo sapiens
ttttttttttttgtaattaacatgttctgaaggttacaattgatatttgaaattgactgtagagcatttagttgaagagttaagcattcagttccattaggttttcacatgtgttaatctcatttacagcattgaattgcggcagtaacattttcctttctgtgaagttctaaatttagttatgacctatttagcaatgcctttgaaaagggatattgtatccatggtaaattaattgtatacctaaacagagatagctcatctttgcctatcaggcttgtaattgacatctagtagacttctgcacatgtaaaattgaattcaaataaaatcatacacactttctagttcttaatatttgtctttctgaataatagtttaaagcaatatttgttaaagttttcttgcactatcacaattgctttttagttatttctcaagaagcatgttcgtattagagacaaaatctgtgtaacaggagggagaatagcgccaagtctctgggctattttttatttttgcaaatgtgctttctaatagccattgccttccatgttgtttacctaatcagcatatttttgtctgaatacttgaacattttaacagtaacgcaggtgtagaatcagaaaggaaacttatgcagagtaatattttggttcagttttaacatcgtgacaatgagggctttttctagcaatgatttttaaattgtgtaagtttgacagtattttattgttgggtttttatttgattttagttgtgtgcttttcatttgcagaagttagtaactgcagctcacctactgcaccaaagttctcgattttaggagcccagctttagtcatttgaacatgcttctaaataaaataaaacaaaaccaaaactatacttttgatctataataagagctcaataactttgtcaaggaaagctctaatatatgcagtgatggtttatgaaagggtgtggcaattttaaatttatattgtgtgtgatgttcaaataaagtggtatctacattcatgtgatttatgggtcagcatgaccattaattactgagtagaaattgactaaactttgatttcctttttttaaatcgtgttgcatttgattcctgagcaaattccctcaaagtgaactcttgttcttaaattttgaattttatggtgagattgtaaagatagaggcaattgaaacattgttccttatttatgaactgcttgaagtgaatacttaatttaagtttgcactttaataccaaacttaaaaccaaacactcatttaaaagtaggttaagtgatcatggatcattgttattagctttgtggctttgtgaaattctaaaggaatcaaataattcatcatgatttaaattttctagagattttgatttttttataatgtttctttcctgtagattgtgttcttgtttctctctctctctctctctctctctctctctctctctctctctctctctcaaaattacagtgttcattgtcattgacctcagcagcaaatttgacttgaattcacttaggatcgcaggaatcaggggaaagtgattttaaaggtggtttctccagcacattttaagaaaagggaccaaaagttattttagcttcctcaatagattgcatgttgcttattaggataataaattaatattaaatgcaatatatgtcttgtctttattatggcatctatttaggagttgttcaaatcactgcagtagggctctgcaaataaaataatgtaacctattatcatggatctaatgtactgtaactttatcagtgaaaggtaaaatctcaaataacaagtacaaacattgaacaatttacctataaagatttgtaaaagtaaaatttttccaatagatttcattcttgtcattttgtaagacgaccctgcagtccacctgtttgtaacttttttaataaaatagacatctgtattactgaaaaaaaaaaaa

SEQ ID NO: 60969 - DNA, 2287 bp, Homo sapiens
caggcggtggctatacttattaaagttggcgggagctgagcgatcagtcggtcctgggctggctgtggtgtagggcgttgcaggcagcgctcacctcctcaggccggcagaatgcgggtggctgtggctggctgctgccacggcgagctggataagatctatgagacgctggcgctggcagagcggcgcggcccggggcctgtcgacctcttgctgtgctgcggcgacttccaggcggtgcgcaacgaggcggatctacgctgcatggccgtgccgcccaagtatcgtcacatgcaaaccttctacaggtattactctggagagaaaaaggctccagttctcacgctcttcattgggggaaaccatgaagcctcaaatcatttgcaagagttaccctatggtggctgggtggcaccaaacatttattatttaggtttggctggtgtggtaaaataccgaggtgtaaggatcggtggaatctctggtatctttaaatctcatgactatcgaaaaggtcattttgagtgccccccttataattcatctacaatcaggagtatatatcatgtgagaaatattgaagtctataaattaaaacagctgaagcagcctatagatatattcttgtctcatgattggccaagaagtatatatcattatggaaataagaagcaacttcttaagactaaatcttttttccgacaagaagtggaaaataacacattaggaagtccagctgcctcagagcttttagagcatctcaaacctacttattggttttctgcccaccttcatgtgaagtttgccgccttgatgcagcatcaggcaaaggataaaggacagacagccagagcaaccaaatttttagccttggacaaatgcttaccacatagagattttcttcagatattagagatagaacatgaccccagtgctcctgattacttggaatatgatattgaatggctcactattctcagggctacggatgatcttattaatgggactgggcgcctgtggaatatgccagaaaataatggcctgcatgcaaggggggattatagtgcaacagaagaaggtatgaaagaagtattggaaaaattgaatcatgatctcaaggttccatgtaactttagtgtaacagctgcttgttatgatcctagcaagccacagacacaaatgcagctgattcataggatcaatcctcagacaactgaattttgtgcccaacttggcatcatagacatcaatgttaggcttcagaagtccaaggaagaacatcatgtgtgtggtgaatatgaagaacaggatgatgtggagagtaatgactctggagaagaccagagtgaatataatacagacacatctgctctgtcttctattaatccagatgaaataatgttagatgaagaagaagatgaagatagtattgtaagtgcacatagtggcatgaatacaccatcggtagaaccttctgatcaagcttctgagttttctgcaagtttctctgatgtcaggatcttgccaggctctatgattgtatcttctgatgatacggtggattccacaattgatagagaggggaaacctggtgggactgtggagtcagggaatggagaggacttaaccaaggtgccattgaagaggctgagtgatgaacatgaacctgaacaaagaaagaaaattaagaggaggaatcaagccatttacgctgcagtggatgatgatgatgatgatgcagcttaagatgatttacttgttttgtttttgtgtttgttttgcttttttgagatggagtttcactcttgtcacctagactggagtgcaatggcgtgatctcgggttcaccggcaacctccgcctcccaggttcaagcaattctcctgcctcagcctccccaagtaggtgggactacaggtgccccgccaccacacccggctaatttttgcatttttagtaatgacaggggtttcacccatgttggccaggctggtctcccaactccctgaccctcaggcgatcccacctgtcttggccttctaaagtgcctgggattacaggcgtgagccactgtgccctggccgacaatttacttgtcttagtattatatgtagatatgtgattttttgagactgtatttttagagctgaatttttgactaaagacttaaactttgataaattatggaagatacattagagaattttagttagatattgactttatctttaggctgttgtatgtttcagatgcaaacatattcaagtttcatatatttaaaaaaaaa

SEQ ID NO: 60970 - DNA, 3275 bp, Homo sapiens
  misc_feature (1)...(3275): n = a,t,c or g
ggtgctggatctttccactgtggtggaattcatgaaatggaagaaaaagaacaggagctccaggcaaaaatagaagctttgcaagctgataatgatttcaccaatgaaaggctaacagctttacaagtacggttagaacatcttcaggagaaaactcttaaagaatgcagcagcttggagaagctgatcgtcgaagggcatctaaccaaagcggtagaagaaacaaagctttcaaaagaaaatcagacaagagcaaaagaatctgatttttcagatactctgagtccaagcaaggaaaaaagcagtgacgacactacagatgcccaaatggatgagcaagacctaaatgagcctcttgccaaagtgtcccttttaaaagatgacttgcagggtgcacagtcagaaattgaggcaaagcaagaaatacagcatcttcgaaaggaattgatcgaagcccaggagctagctagaacaagtaaacaaaaatgctttgaacttcaagctcttttggaagaagaaagaaaagcctatcgaaatcaagttgaggaatccactaaacaaatacaggttcttcaagcccaattgcagaggttacacatcgatactgagaatctccgggaggagaaggacagtgaaatcacaagtactagagatgaattgcttagtgcccgagatgaaattttgctccttcatcaagcagcagcaaaggttgcctctgagcgggacactgacattgcttctttacaagaagagcttaagaaggtgagagctgagcttgagcggtggcggaaagcagcgtctgaatatgagaaagaaatcacaagtctgcaaaacagttttcagcttagatgtcaacagtgtgaggaccagcagagagaagaagcaacaaggttgcaaggtgaactagagaagttgagaaaggaatggaatgcattggaaaccgaatgccattctctaaaaagggaaaatgttttgctatcatcagaactgcaacggcaagaaaaagaattgcacaattctcagaagcagagtttagagcttaccagtgatctcagcatccttcaaatgtctaggaaagaacttgagaatcaagtgggatccttgaaagaacagcatcttcgggattcagctgatttaaaaactcttctcagtaaggcagaaaaccaagcaaaggatgtgcagaaagagtatgaaaagacacagactgtactctcagaactgaagttgaagtttgaaatgactgagcaggaaaagcagtcaatcacagatgagctcaaacagtgtaaaaacaacctgaagctgctccgagagaaaggaaataatccttccatattacaacccgtcccagccgtattcatcggcctattcctggctttcctgttttggtgtttcggtccattgtggtagagaaagaaaccctggccctggatgcccatgttggctgccctggttgcagtaacagccatcgtgctgtacgtgccaggtctggccagagcttctccatgagagcgttccttgagtccgtacaccgtcctccctctagaagctggcatcacactcatgctggggacaaacagaaccattttcttcctctttacctcttaaaacagcagaagtacaagaatacagctgtagggtcattgctttaaattatataaaatgtatctgcctataaagaagatataaaattgtgactttattctactgtaagcaataatttgcttgcaatttttcatgtaatttttaaattagtatgttaagattctgaatattatgggggcctaaagtaggcttcttggtacaccagattatttataacattaaatttatgagtattttactctgaattctgatcaccagataattcatttttctgatttgataactacccaaaccaaacaaccaatacatacatgggaagagaggccctgtgtgctcagtgcctatcagtttgaaatatatacacatatatatattttttacatatttacgccatttttacttgttatgaaaccactgagctattgggaacaagacttagagacaactatttgcgtggatttttttttttttaaggaaaaatacgtttggaaaataaactgttatggtgataatttggggaatatgtgcacgcttgttcagccttaatgtgacttgaagatgtggaggacatcaactttgaaaaactttccatgagagtgtattttcttgatcaaactgaagtatttctgggagcaaaaacatagtaattacacaatttcagtgcagtcaaccaaaatgttgagtcaattggaatgtaatttattaaaccatgtatttaaagagatatttttctttaaaagccaagttactttctcatatacagcattttaggaagcatgattttttttttctatcatctattcctccaagcatgtttaattgaagaaagtattaatatctctttagataagcttgtattgacctaatttggtttatgatgtgtcagagctaattcatgttcagggtgagcgttgtacctaccaacaaatttcctggttgggtatgcaaatggttattttctttttattgttgttaattgggactttctgttaatgaaaagcactattcccaagattaatagtgttctatgcacaatgaagcacctaaaaacactgcttgatattataaatttaaaacacaagtgaaagtttagccatggttttgtgcggcatcatagttatgtcaataaagtttatttaggtcatagaatatcctaaagtatcacatagttaaatttttcagtcagtgaagaccgggagggaatgtcagtgaattggcttgaatgttctgtggcaatccacaggtctagccaaatattgaaataggagtttagggtataatttgccttgtgatgtttggcagtcactgtttatactttaaaggttatattttaagctatttgagattgcttttgggaagatcactagatttatggaggaattagtcacaaatgacttgtagaaaatactgtcatatagttcatttcatcattttctgttgcaggaagccactccaccacagaatgctaatatgccagtggtacccagtacctcttgtatataggttattgcaaatattgttctgaaatgcttaacttcagaattacattttttaaagtaaataattgttttaaatctattttgtaaagatataaagtacaatagaatttctggagtacagattaaactatttgcactaacacacgtgacgtgcatgatttaatacncnagccc

SEQ ID NO: 60971 - DNA, 1709 bp, Homo sapiens
ggaattccccggtgcgagggagcggtccttaccgagacccgcccggcccggcggtgcgatgagcttcttcggcttcgggcagagcgtggaggtggaaatccttctgaacgatgcagagagtaggaagcgggccgagcacaagacggaggacgggaagaaggagaaatatttcctcttctacgacggggagacggtctccgggaaggtgagccttgccctcaagaaccccaacaagcggctggagcaccagggcatcaagatcgagttcatcgggcagatcgctatttccttcgtgctaccatcagccgccgcctcaatgatgttgtcaaagagatggacattgtagttcacacactcagcacatacccagagctgaactcttccatcaagatggaggttgggattgaggactgtctgcacattgaatttgagtacaataaatccaaataccacttgaaagatgtcattgtagggaagatatacttcctgctggggagaatcaaaatcaagcacatggagatagacatcatcaagcgagaaacgacgggtacaggccccaacgtgtaccatgagaatgacacgatagccaagtacgagatcatggacggggcaccagtgcgaggagagtccatcccgatccggctcttcctggccgggtatgagctcacgcccaccatgcgggacatcaacaagaagttctctgtgcgctattacctcaacctggtgctgatagacgaggaggagcggcgctacttcaagcagcaggaagtggtgttgtggcggaagggtgacatcgtacggaagagcatgtcccaccaggcggccatcgcctcacagcgctttgagggcaccacctccctgggtgaggtgcggacccccagccagctgtctgacaacaactgcaggcagtaggcccccagggccgagaagatgctgggcacccacccagcacccccatctaccaacaccagcggctgggggcgggggcggaccttgtgaggctcagttgacccgttacttgcaacctgaaaacaaatcatgtttttgacttaaattcttttctctggagaacccaaggggcttggggtgggaagcagtctctccttgggattctgcggccgatgtgggatagaagaggtagcatcctggaagccagcctctctggggaacatgagcccccttcctcggggggctgccttgcgtcttagaggagggagagcagagagcacgcatccttggctcctggctctctgagcttcctgatacaggatctgagcatgtccctgggattctgagctgccaacagggccctgggtagtcacatcttgtactcccctttgctgtcccggaggtagtggcaggagttgggccagcccccactaagtggcaggggaagactcacgattgggaagctacctctttgggaatcttggatgtggtgatctcaagttcccacaggccacctccttctggccactcactgctgggacccaggcacctcccttctccatcctctctggattgtcagtaatgtcctggaacagaagcctgtgggatggccttgggcacggagaagccctggggtcagtgtcgtgcacggatggcggcagtgttgaacccaggaggctgaacccggcccaccacggaagatgagtgcatggcaaccgcctgccttcacgtcgctccacttggtaaccccaaggtctggg

SEQ ID NO: 60972 - DNA, 1614 bp, Homo sapiens
acgcaggcttccccgcagcgggcccgcaccccagcccgcactcctgaccgcctggccaagcaggaggagctggagcgggacctggcccagcgctccgaggagcggcgcaagtggtttgaggccacagacagcaggaccccagaggtgcctgctggtgaggggccgcgccggggcctgggtgcccccctgactgaggaccagcaaaaccggcttagtgaggagatcgagaagaagtggcaggagctggagaagctgcccctgcgggagaataagcgggtgcccctcactgccctgctcaaccaaagccgcggagagcgccgagggcccccaagtgacggccacgaggcactggagaaggaggttcaggctcttcgggcccagctggaggcgtggcgtctccaaggggaggctcctcagagtgcactgagatcccaggaggatggccacatccccccgggctacatctcacaggaggcatgtgagcgcagcctggcagagatggagtcctcgcaccagcaggtgatggaggagctgcagcggcaccacgagcgggagctgcagcgcctgcagcaggagaaggagtggctcctggctgaggagacggcagccacggcctcagccattgaagccatgaagaaggcctatcaggaagagctgagccgagagctgagcaaaacacggagtctccagcagggcccggatggcctccggaagcagcaccagtcagatgtggaggcactgaagcgagagctgcaggtgctatcggagcagtactcgcagaagtgcctggagattggggcactcatgcggcaggctgaggagcgcgagcacacgctgcgccgctgccagcaggagggccaggagctgctgcgccacaaccaggagctgcatgggccgcctgtcagaggagatagaccagctgcgcggcttcattgcctcgcagggcatgggcaatggctgcgggcgcagcaacgagcggagttcctgcgagctagaggtgctgcttcgcgtaaaagaaaacgaactccagtacctaaagaaggaggtgcagtgcctccgggacgagctccagatgatgcagaaggacaagcgcttcacctcgggaaagtaccaggacgttctatgtggagctgagccaccatcaagaccacggctctgagcgggagattcgagcagctgaaggagcacctgcgtccttgccatggccggccctccaggagaaggagtcgatgcgcaacagcctggctgagtagaggtcccgcccagctgcagaccctccaggctggaggaccagccgccctccttccctcctggatggaagtaaaaagccaagctttctccccaccctctgtgggccacacgtgcacttgcacccaccacacacacacacacacacacacacacacacacagacacacagacacatacgcacacacgtgcacacatgtacacacggatacacacacacacacacacacacacacactgcatatctgagcacgcccctcgcactgggtctcaccttgcaccttcttcaggattttatatgtgaagagatttttatatagatttttttcctttttttccaaaacactttatactttaaaaaaaaaa

SEQ ID NO: 60973 - DNA, 5612 bp, Homo sapiens
acgacgatttcgcgttggtaaaagggtccagagtggcagtaaaggaggaagatggcggggtgcagggggtctctgtgctgctgctgcaggtggtgctgctgctgcggtgagcgtgagacccgcacccccgaggagctgaccatccttggagaaacacaggaggaggaggatgagattcttccaaggaaagactatgagagtttggattatgatcgctgtatcaatgacccttacctggaagttttggagaccatggataataagaaaggtcgaagatatgaggcggtgaagtggatggtggtgtttgccattggagtctgcactggcctggtgggtctctttgtggacttttttgtgcgactcttcacccaactcaagttcggagtggtacagacatcggtggaggagtgcagccagaaaggctgcctcgctctgtctctccttgaactcctgggttttaacctcacctttgtcttcctggcaagcctccttgttctcattgagccggtggcagcaggttccgggatacccgaggtcaaatgctatctgaatggcgtaaaggtgccaggaatcgtccgtctccggaccctgctctgcaaggtccttggagtgctgttcagtgtggctggagggctcttcgtggggaaggaaggccccatgatccacagtggttcggtggtgggagctggcctccctcagtttcagagcatctccttacggaagatccagtttaacttcccctatttccgaagcgacaggtatggaaagagacaagagagactttgtatcagcaggagcggctgctggagttgctgcagctttcggggcgccaatcgggggtaccttgttcagtctagaggagggttcgtccttctggaaccaagggctcacgtggaaagtgctcttttgttccatgtctgccaccttcaccctcaacttcttccgttctgggattcagtttggaagctggggttccttccagctccctggattgctgaactttggcgagtttaagtgctctgactctgataaaaaatgtcatctctggacagctatggatttgggtttcttcgtcgtgatgggggtcattgggggcctcctgggagccacattcaactgtctgaacaagaggcttgcaaagtaccgtatgcgaaacgtgcacccgaaacctaagctcgtcagagtcttagagagcctccttgtgtctctggtaaccaccgtggtggtgtttgtggcctcgatggtgttaggagaatgccgacagatgtcctcttcgagtcaaatcggtaatgactcattccagctccaggtcacagaagatgtgaattcaagtatcaagacatttttttgtcccaatgatacctacaatgacatggccacactcttcttcaacccgcaggagtctgccatcctccagctcttccaccaggatggtactttcagccccgtcactctggccttgttcttcgttctctatttcttgcttgcatgttggacttacggcatttctgttccaagtggcctttttgtgccttctctgctgtgtggagctgcttttggacgtttagttgccaatgtcctaaaaagctacattggattgggccacatctattcggggacctttgccctgattggtgcagcggctttcttgggcggggtggtccgcatgaccatcagcctcacggtcatcctgatcgagtccaccaaatgagatcacctacgggctccccatcatggtcacactgatggtgggcaaatgtacaggggactttttcaataagggcattttatgatatccacgtgggcctgcgaggcgtgccgcttctggaatgggagacagaggtggaaatggacaagctgagagccagcgacatcatggagcccaacctgacctacgtctacccgcacacccgcatccagtctctggtgagcatcctgcgcaccacggtccaccatgccttcccggtggtcacagagaaccgcggtaacgagaaggagttcatgaagggcaaccagctcatcagcaacaacatcaagttcaagaaatccagcatcctcacccgggctggcgagcagcgcaaacggagccagtccatgaagtcctacccatccagcgagctacggaacatgtgtgatgagcacatcgcctctgaggagccagccgagaaggaggacctcctgcagcagatgctggaaaggagatacactccctaccccaacctataccctgaccagtccccaagtgaagactggaccatggaggagcggttccgccctctgaccttccacggcctgatccttcggtcgcagcttgtcaccctgcttgtccgaggagtttgttactctgaaagccagtcgagcgccagccagccgcgcctctcctatgccgagatggccgaggactacccgcggtaccccgacatccacgacctggacctgacgctgctcaacccgcgcatgatcgtggatgtcaccccatacatgaacccttcgcctttcaccgtctcgcccaacacccacgtctcccaagtcttcaacctgttcagaacgatgggcctgcgccacctgcccgtggtgaacgctgtgggagagatcgtggggatcatcacacggcacaacctcacctatgaatttctgcaggcccggctgaggcagcactaccagaccatctgacagcccagcccaccctctcctggtgctggcctggggaggcaaatcatgctcactccgggcggggcacagctggctggggctgtttccggggcattggaaagattcccagttacccactcactcagaaagccgggagtcatcggacaccttgctggtcagaggccctgggggtggttttgaaccatcagagcttggacttttctgacttccccagcaaggatcttcccacttcctgctccctgtgttccccaccctcccagtgttggcacaggccccacccctggctccaccagagcccagaagccagaggtaagaatccaggcgggccccgggctgcactcccgagcagtgttccctggcccatctttgctactttccctagagaaccccggctgttgccttaaatgtgtgagagggacttggccaaggcaaaagctggggagatgccagtgacaacatacagttgcatgactaggtttaggaattgggcactgagaaaattctcaatatttcagagagtccttcccttatttgggactcttaacacggtatcctcgctagttggttttaagggaaacactctgctcctgggtgtgagcagaggctctggtcttgccctgtggtttgactctccttagaaccaccgcccaccagaaacataaaggattaaaatcacactaataacccctggatggtcaatctgataataggatcagatttacgtctaccctaattcttaacattgcagctttctctccatctgcagattattcccagtctcccagtaacacgtttctacccagatcctttttcatttccttaagttttgatctccgtcttcctgatgaagcaggcagagctcagaggatcttggcatcacccaccaaagttagctgaaagcagggcactcctggataaagcagcttcactcaactctggggaatgctaccattttttttccaaagtagaaaggaagcacttctgagccagtgaccactgaaaggtatgtgctatgataaagcagatggcctatttgaggaagagggtgtctgcccttcacaaacacctctctctcccctgcactagctgtcccaagcttacatacagaggcccttcaggagggcctcctgtggccgcagggagggtgcgtggggaagatgcttcctgccagcacgtgcctgaaggtttcacatgaagcatgggaagcgcaccctgtcgttcagtgacgtcattcttctccaggctggcccgccccctctgactaggcacccaaagtgagcatctgggcattgggcattcatgcttatcttcccccaccttctacatggtattagtcccagcaggcatccctggggcagacgtgctttggctcaagatggccttcatttacgtttagttttttttaaaaccgtggaggttgcccacgggcctcggcacctgggccctggcagcacagctctcaggcccagccctgggcgacctccttggccaagtctgcctttcaccctgggggtgagcatcagtcctggctctgctggtccagatcttgcgctcagcacactctagggaataattccactccagagatggggctgcttcaaggtcttttctagctgattgtggcccctccattttccgcattttcttatctccctgaccaaaattgctttgacttctaaatgtttctgcttcccagaatgcacctgacttatgaaatggggataatactcccaggaaatagcgcaggacatcacaaggaccaaaaaggcaattcttatttaaatgttactatttggccagctgctgctgtgttttatggcagtgttcaaagcttgatcacgttatttcttccttttattaagaaggaagccaattgtccaagtcaggagaatggtgtgatcacctgtcacagacactttgtcccctctccccgccccttcctggagctggcagagctaacgccctgcaggaggaccccggcctctcgagggctggatcagcagccgcctgccctgaggctgccccggtgaatgttattggaattcatccctcgtgcacatcctgttgtgtttaagtcaccagatattttgttcccatcagtttagcccagagatagacagtagaatgcaaatacctccctcccctaaactgactggacggctgccaaggaggccccaaacccaggccccatgcaaaggcacgtggtttccttttctcctctctctgcatctgcgctttccagataagcccaaagacagcaacttctccactcatgacaaatcaactgtgaccctcgctccttccatttctgtccattagaaaccagccttttcagcatctcacccattagcagccccatcacccagtgatcagtcgcctcagtaaagcagatctgtggatggggagcctacgggtggtaagaagtggtgttttgtgtttcatctccagcttggtgttccatggcccctaggcgaggtgatcagggagtggggccaatgggcccccggccctggctttgggaccttgtgctgagggatgatttgctcctgaccttgattaacttaacagttcccagctggaagggacactttcaggacccagtccactgtatggcatttgtgatgcagaattatgcactgacatgaccctgggtgacaggaaagcctttcgagaggcccaaggtggcctcgccagccctgcagtattgatgtgcagtattgcaccacagctctgcggaccttggccattgccgcagtcgcagcttccttttttctgtttgcactgtttgtttgtatgatgttagctaattccactgtgtatataaattgtattttttttaatttgtaaaatgctatttttatttgaacctttggaacttgggagttctcattgtaaccctaacatgtgagaataaaatgtcttctgtctcaaaaaaaaaa

SEQ ID NO: 60974 - DNA, 857 bp, Homo sapiens
ttttttttttttgcagtaagtaactcagaatgactttactcaggaaatatgaccatgactcactggctaggagtgccccatgcccagttcttagagacccttgatagctcctagaagacaggaggctgccgtggtcaagaagggccaagccttgaagtctcacggcaccccctgtggtggaggtataaggctcaggggccaactactgggtcttgcagtccccatcgttgctgtgggctgtcttcaccttctttagttccttctgtagctcagactcggccaccacaacctcctttggcttctggtaagagatgatcagggtgcagttggcgtgggcaaagctcagcaaggcgtcatccagaggtagctggtgtctatctagatcaggaatggagaacttcttgtagtacttcttgttggttgttctgacaatgatgcagcgctccttctggtccacagagacactatagacatccttaggataggggaggtttcgaatccgccactggaaactcatcttggtgtccttgcgcatgaagataggattggcattgctttccttgatgagttcaggccccaggttccctgctcctaggggcgctgggtctcctacttcaagctgccactggcccatggctcccagggcacttttcacacgccactttctcacaagtagttcactcgtcttctcgtcatattcttcagccatttccttgccgtctgggaataaatagtgaaccttccttctcccgtcctgcagcagcgcagtcttctgggctgtccgcagactctccaaccagcccgtcaccgccatctttcccctgctaagcagcacgcccagccgctgccatggcaac

SEQ ID NO: 60975 - DNA, 3402 bp, Homo sapiens
ctaaagggcggtcgtccggggttaggttgagggggggcgtcggtccgttctgggcgggggatgactcacagcccatcccatctccccgacgccgcccgcccgcgcagtgctagctccatggcttagcggaggaggcggcagtggcgagctggggggaggggggactcttattttgttagggggaccgggccgaggcccgaccggcctggcagggctcgcccggggccgggcgtcatgtctcatgcggccgaaccagctcgggatggcgtagaggcccagcgcggagggccctcgagccgtgttcgtgctgttggaggagcgcaggccggccgactcggctcagctgctcagcctgaactctttgcttccggaatccgggattgttgctgacatagaattagaaaacgtccttgatcctgacagcttctacgagctcaaaagccaacccttaccccttcgctcaagcctcccaatatcactgcaggccacaccagccaccccagctacactctctgcatcgtcttctgcagggggctccaggacccctgccatgtcgtcatcttcttcatcgagggtcttgctgcggcagcagctaatgcgggcccaggcgcaggagcaggagaggcgtgagcgtcgggaacaggccgccgcggctcccttccccagtcctgcacctgcctctcctgccatctctgtggttggcgtctctgctgggggccacacattgagccgtccaccccctgctcaggtgcccagggaggtgctcaaggtgcagacccatctggagaacccaacgcgctaccacctgcagcaggcgcgccggcagcaggtgaaacagtacctgtccaccacactcgggcccaagctggcttcccaggccctcaccccaccgccggggcccgcaagtgcccagccactgcctgcccctgaggctgcccacactaccggccccacaggcagtgcgcccaacagccccatggcgctgctcaccatcgggtccagctcagagaaggagattgatgatgtcattgatgagatcatcagcctggagtccagttacaatgatgaaatgctcagctatctgcccggaggcaccacaggactgcagctccccagcacgctgcctgtgtcagggaatctgcttgatgtgtacagtagtcaaggcgtggccacaccagccatcactgtcagcaactcctgcccagctgagctgcccaacatcaaacgggagatctctgagaccgaggcaaaggcccttttgaaggaacggcagaagaaagacaatcacaacctaattgagcgtcgcaggcgattcaacattaacgacaggatcaaggaactgggcactctcatccctaagtccagtgacccggagatgcgctggaacaagggcaccatcctgaaggcctctgtggattatatccgcaagctgcagaaggagcagcagcgctccaaagacctggagagccggcagcgatccctggagcaggccaaccgcagcctgcagctccgaattcaggaactagaactgcaggcccagatccatggcctgccagtgcctcccactccagggctgctttccttggccacgacttcggcttctgacagcctcaagccagagcagctggacattgaggaggagggcaggccaggcgcagcaacgttccatgtaggggggggacctgcccagaatgctccccatcagcagccccctgcaccgccctcagatgcccttctggacctgcactttcccagcgaccacctgggggacctgggagaccccttccacctggggctggaggacattctgatggaggaggaggagggggtggtgggaggactgtcggggggtgccctgtccccactgcgggctgcctccgatcccctgctctcttcagtgtcccctgctgtctccaaggccagcagccgccgcagcagcttcagcatggaagaggagtcctgatcaggcctcacccctcccctgggactttcccacccaggaaaggaggaccagtcaggatgaggccccgccttttcccccaccctcccatgagactgccctgcccaggtatcctgggggaagaggagatgtgatcaggccccacccctgtaatcaggcaaggaggaggagtcagatgaggccctgcaccttccccaaaggaaccgcccagtgcaggtatttcagaaggagaaggctggagaaggacatgagatcagggcctgccccctggggatcacagcctcacccctgcccctgtgggactcatccttgcccaggtgagggaaggagacaggatgaggtctcgaccctgtcccctagggactgtcctagccaggtctcctgggaaagggagatgtcaggatgttgctccatcctttgtcttggaaccaccagtctagtccgtcctggcacagaagaggagtcaagtaatggaggtcccagccctgggggtttaagctctgccccttccccatgaaccctgccctgctctgcccaggcaaggaacagaagtgaggatgagacccagccccttcccctgggaactctcctggccttctaggaatggaggagccaggccccaccccttccctataggaacagcccagcacaggtatttcaggtgtgaaagaatcagtaggaccaggccaccgctagtgcttgtggagatcacagccccacccttgtccctcagcaacatcccatctaagcattccacactgcagggaggagtggtacttaagctcccctgccttaacctgggaccaacctgacctaacctaggagggctctgagccaaccttgctcttggggaaggggacagattatgaaatttcatggatgaattttccagacctatatctggagtgagaggcccccacccttgggcagagtcctgccttcttccttgaggggcagtttgggaaggtgatgggtattagtgggggactgagttcaggttaccagaaccagtacctcagtattctttttcaacatgtagggcaagaggatgaaggaaggggctatcctgggacctccccagcccaggaaaaactggaagccttcccccagcaaggcagaagcttggaggagggttgtaaaagcatattgtaccccctcatttgtttatctgatttttttattgctccgcatactgagaatctaggccaccccaacctctgttccccacccagttcttcatttggaggaatcaccccatttcagagttatcaagagacactcccccctccattcccacccctcatacctacacccaaggttgtcagctttggattgctggggccaggccccatggagggtatactgaggggtctataggtttgtgattaaaataataaaagctaggcgtgtttgatgcgcttttaactttggcaaaaaaaaaa

SEQ ID NO: 60976 - DNA, 1578 bp, Homo sapiens
ttttttttttttccattttaaattattttattgtatattaaaaaaccaaataaagcaataactttaaagacctcacacacacacagtataaacacctgggtaaggttttgttcgtgtccatgttgacaccggaactaccgttaaagtgcaagttttgttttgtgttcctttgtgcagtttcactcacatgtaaacaagtcacttggctatgatttgacccacgcccccccgcttagtttcgggagggcagaggctctaccggctgtcacagcaacccggaatcacagacaagataatgccccgtgggtcctgaccctcaagcgggcatgacggtttcttgaagcctagcagaggctggataacttcacatccctcccccaccccgcgctcactcttaggtctttgagaagataaatccaccctcggctgggccctcgctcccaaagttatgggggtggcgggcctcaatgggggaccgggggtggggaatagtcccagtcttggcccgttctctttccttccggagcagatgaccatcccttctcggttcagtggcgcctccccagtgctgggggcggatcgccgggaggggagacgccagtccgcgcgcgctcccggcctggggcgcaccgggccgttggatttgacttaacaaaaaggtcctccttaggttgtgtcgccagcgcggcggggctcctagctgatgacgcagcgctccttgtccttggcctggctgccggcgctggccttctcgcggatgtacatgaggtcgctgtgtacgctgggccggcgcgcgaagggtgccacgatgccaaaggcgtcgcccgggtcgccgccgccgccgccgctgccggcccgcagcaggcttcttgttccgcagcgccttcttgtgcaggcacgtcgcagtactgcaccgagaccttgcggtgcaggtctgggctcatctcgctgggcagcttggccatggcgaagagcgcgcggaacatctggtccaggctgctgttcttcttggccgagatctcgaagtaggcgcagcgctgggggtcgtcgcccaccagctgctcgatctcgcgctggtccacctcgcggtagaagtcgcggtcccctttgttgccgcagatgaccaggggcacgtccacgttctccttggttttgttcttgaggcaagacttggtgtcgaggatctgctgcctgagccgctgcacctcctcgaaggagtcgcggttgtccaagctgaacaccaggatgaaaacgtctcctgtgaggatggagaggcgccgcatggcgggaaacgggtggttgccggacgtgtcgaggatgtcgagctggtagacctcgccgcggatggagtagaacttgcggtggaagtcctcgatggtaggcgtgtaggcgtcctcgaagcggccggtgaggaagcgcgacacgatggccgtcttgcccaccttggacgagccgaggatgaccatgcgatagcagttcttggccgggatactcagctccgagtcgctcgggcacatcttcttgatcatcgcggccagtttcattgggcagaggggccgcgagggcgggcgcggggcc

SEQ ID NO: 60977 - DNA, 3280 bp, Homo sapiens
gtgacggtggcgcacaagaaggctccgccggccctgatcgacgagtgcatcgagaagttcaatcacgtcagcggcagccgggggtccgagagcccccgccccaacccgccccatgccgcgcccacagggagccaggagcctgtgcgcaggcccatgcgcaagtccttctcccagcccggcctgcgctcgctggcctttaggaaggagctgcaggatgggggcctccgaagcagcggcttcttcagctccttcgaggagagcgacattgagaaccacctcattagcggacacaatattgtgcagcccacagatattcgaggaaaattcgaactattgctctttaacgattgggccagtctgaagtttacctcatcagtcctgacaccaaaaaaattaggcattgggagaaaaatttttaagggagatatccttttgctctcagggcatcagaacacgtggaccactttgggtttatctgtcgggagtcttccggagggggcggctttcattttgtctgttacctgtttcagtgcacaaatgaggctctggttgatgaaattatgatgaccctgaaacaggccttcacggtggccgcagtgcagcagacagctaaggcgccagcccagctgtgtgagggctgccccccctgcaaagccctgccacaagctctgtgagaggatagagggaatgaattcctcccaaaacaaaactagaactgcaaaagcaccctgacgacattaacccaatcaggagcaggcgactatttttgaagaggttcagaaattgagaccgagaaatgagcagcgagagaatgaattgattatttcttttttgagatgtttatttgaagagaaacagaaagaacacatccatattggggagatgaagcagacatcgcagatggcagcagagaatattggaagtgaattaccacccagtgccactcgatttaggctagatatgctgaaaaacaaagcaaagagatctttaacagagtctttagaaagtattttgtcccggggtaataaagccagaggcctgcaggaacactccatcagtgtggatctggatagctccctgtctagtacattaagtaacaccagcaaagagccatctgtgtgtgaaaaggaggccttgcccatctctgagagctcctttaagctcctcggctcctcggaggacctgtccagtgactcggagagtcatctcccagaagagccagctccgctgtcgccccagcaggccttcaggaggcgagcaaacaccctgagtcacttccccatcgaatgccaggaacctccacaacctgcccgggggtccccgggggtttcgcaaaggaaacttatgaggtatcactcagtgagcacagagacgcctcatgaacgaaaggactttgaatccaaagcaaaccatcttggtgattctggtgggactcctgtgaagacccggaggcattcctggaggcagcagatattcctccgagtagccaccccgcagaaggcgtgcgattcttccagcagatatgaagattattcagagctgggagagcttcccccacgatctcctttagaaccagtttgtgaagatgggccctttggccccccaccagaggaaaagaaaaggacatctcgtgagctccgagagctgtggcaaaaggctattcttcaacagatactgctgcttagaatggagaaggaaaatcagaagctccaagcctctgaaaatgatttgctgaacaagcgcctgaagctcgattatgaagaaattactccctgtcttaaagaagtaactacagtgtgggaaaagatgcttagcactccaggaagatcaaaaattaagtttgacatggaaaaaatgcactcggctgttgggcaaggtgtgcccacgtcatcaccgaggtgaaatctggaaatttctagctgagcaattccaccttaaacaccagtttcccagcaaacagcagccaaaggatgtgccatacaaagaactcttaaagcagctgacttcccagcagcatgcgattcttattgaccttgggcgaacctttcctacacacccatacttctctgcccagcttggagcaggacagctatcgctttacaacattttgaaggcctactcacttctagaccaggaagtgggatattgccaaggtctcagctttgtagcaggcattttgcttcttcatatgagtgaggaagaggcgtttaaaatgctcaagtttctgatgtttgacatggggctgcggaaacagtatcggccagacatgattattttacagatccagatgtaccagctctcgaggttgcttcatgattaccacagagacctctacaatcacctggaggagcacgagatcggccccagcctctacgctgccccctggttcctcaccatgtttgcctcacagttcccgctgggattcgtagccagagtctttgatatgatttttcttcagggaacagaggtcatatttaaagtggctttaagtctgttgggaagccataagcccttgattctgcagcatgaaaacctagaaaccatagttgactttataaaaagcacgctacccaaccttggcttggtacagatggaaaagaccatcaatcaggtatttgaaatggacatcgctaaacagttacaagcttatgaagttgagtaccacgtccttcaagaagaacttatcgattcctctcctctcagtgacaaccaaagaatggataaattagagaaaaccaacagcagcttacgcaaacagaaccttgacctccttgaacagttgcaggtggcaaatggtaggatccaaagccttgaggccaccattgagaagctcctgagcagtgagagcaagctgaagcaggccatgcttaccttagaactggagcggtcggccctgctgcagacggtggaggagctgcggcggcggagcgcaaagcccagcgaccgggagcctgagtgcacgcagcccgagcccacgggcgactgacagctctgcaggagagattgcaacaccatcccacactgtccaggccttaactgagagggacagaagacgctggaaggagagaaggaagcgggaagtgtgcttctcagggaggaaaccggcttgccagcaagtagattcttacgaactccaacttgcaattcagggggcatgtcccagtgttttttttgttgtttttagatactaaatcgtcccttctccagtcctgattactgtacacagtagctttagatggcgtggacgtgaataaatgcaacttatgttttaaaaaaaaaa

SEQ ID NO: 60978 - DNA, 4956 bp, Homo sapiens
ttctcccgggacgacgatttcgttgaaaatcacagttattttgtttctgggtgggaaaagcaggtgatattctcagtggagaccaggacaaggaacagaaagacccttactttgtggagaccccctatggttatcaactagacttagatttcctcaaatatgtggatgacatacagaagggaaataccatcaaaagactgaacatccagaagaggcggaagccgtccgtgccatgcccagaacccaggaccacatctggtcagcaaggtatatggacttccactgaatccctctcatcctccaacagtgatgacaacaagcagtgccccaacttcctcatagccagaagtcaagttacatcaactccaatctcaaagccacctccccctctggagacctcactcccttttcttaccatcccagaaaatcgacagctgccacctccctcaccacaactcccaaagcataaccttcatgtcaccaagacactgatggagacccggagaagactggaacaggagagagccaccatgcagatgacaccgggtgagttcagaaggcccaggctggccagttttggaggcatgggcaccacaagctccctcccttcttttgtgggttctggaaaccacaatcctgccaagcaccagcttcagaatggataccaaggtaatggggattatggtagctatgccccagctgctcccaccacttcctccatggggagctccatccgccacagccccctgagctcagggatctccaccccagtgaccaacgtgagccccatgcacctgcagcacatccgcgagcagatggccattgctctgaaacgcctgaaggagctggaggagcaggtgcgaaccatccctgtgctccaggtaaagatctctgtcttgcaagaagagaaaaggcagttggtctcacagctgaaaaaccaaagggctgcatcccagatcaatgtctgtggtgtgaggaagcggtcctatagtgcggggaacgcctcccagctggaacagctctcccgggcccgaagaagtggcggggaattatacattgactatgaggaggaagaaatggagaccgtagaacagagcacgcagaggataaaggagttccggcaactttacagcagacatgcaagccctggagcagaagatccaggacagcagctgtgaggcctcctcagagctcagggagaatggagagtgccggtctgtggctgtgggtgccgaggagaacatgaacgacatcgtcgtgtaccacagaggctccaggtcctgtaaggatgcagctgtagggacacttgttgagatgagaaattgtggggtcagcgtgacagaggccatgcttggagtgatgactgaagctgacaaagaaattgagctgcaacagcagaccatagaatccttgaaggaaaagatctatcgcctagaagtacagcttagagaaaccacccatgaccgggagatgactaaactgaaacaagagctgcaggctgctggatcgaggaaaaaggttgacaaagccacgatggcccagccgcttgttttcagtaaggtggtggaggcagtggtgcagaccagagaccaaatggtcggcagtcacatggacctggtggacacgtgtgttgggacctccgtggaaacaaacagtgtaggcatctcctgccagcctgaatgtaagaataaagtcgtagggcctgagctgcctatgaattggtggattgttaaggagagggtggaaatgcatgaccgatgtgctgggaggtctgtggaaatgtgtgacaagagtgtgagtgtggaagtcagcgtctgcgaaacaggcagcaacacagaggagtctgtgaacgacctcacactcctcaagacaaacttgaatctcaaagaagtgcggtctatcggttgtggagattgttctgttgacgtgaccgtctgctctccaaaggagtgcgcctcccggggcgtgaacactgaggctgttagccaggtggaagctgccgtcatggcagtgcctcgtactgcagaccaggacactagcacagatttggaacaggtgcaccagttcaccaacaccgagacggccaccctcatagagtcctgcaccaacacttgtctaagcactttggacaagcagaccagcacccagactgtggagacgcggacagtagctgtaggagaaggccgtgtcaaggacatcaactcctccaccaagacgcggtccattggtgttggaacgttgctttctggccattctgggtttgacaggccatcagctgtgaagaccaaagagtcaggggtggggcagataaatattaacgacaactatctggttggtctcaaaatgaggactatagcttgtgggccaccacagttgactgtggggctgacagccagcagaaggagcgtgggggttggggatgaccctgtaggggaatctctggagaacccccagcctcaagctccacttggaatgatgactggcctggatcactacattgagcgtatccagaagctgctggcagaacagcagacactgctggctgagaactacagtgaactggcagaagctttcggggaacctcactcacagatgggctccctcaactctcagctcatcagcaccctgtcgtctatcaactctgtcatgaaatctgcaagcactgaagagctgaggaaccctgacttccagaaaaccagtctgggtaaaatcacaggcagttatttgggatatacctgtaagtgtgggggccttcagtcaggaagtcccttaagctcccagacatcccagcctgagcaagaagtggggacctcagaaggaaagccaatcagcagcctggatgccttccccactcaggaaggtacgctgtctccagtgaacctgacagacgaccagatcgccgctggcctctatgcatgtacaaacaatgaaagtacactgaagtccatcatgaagaagaaagatggtaacaaagattcaaatggcgcaaaaaagaatcttcagtttgttggcattaatggagggtatgaaacaacttcaagtgatgattccagctcagatgaaagctcttcttccgagtcagatgacgagtgtgatgtcattgagtatcctcttgaagaagaggaggaggaggaggatgaagacactcggggaatggcagaagggcaccatgcagttaatattgaaggtttgaagtctgccagggtggaagatgaaatgcaggttcaagaatgtgaacctgagaaggtggaaatcagagagaggtatgaattaagtgaaaagatgttgtctgcatgcaacttactgaaaaatactataaatgaccccaaagctttgaccagcaaagatatgaggttctgtctgaacaccctccagcacgagtggttccgcgtgtccagtcagaagtcagccattccagccatggtgggggactacatagctgcttttgaggccatttccccagatgtcctccgctatgtcatcaacttggcagacggcaacggcaacacagccctccattacagcgtgtcccactccaacttcgagattgtgaagctgctgttagatgccgatgtgtgtaatgtggatcaccagaacaaggcaggctacacccccatcatgttggcggccctcgccgctgtggaagcagagaaggacatgcggattgtggaagaactcttcggctgtggggatgtgaatgccaaagctagtcaggcgggacagacggccctcatgctggcggtcagtcacggacggatagacatggtgaagggccttctggcctgtggggctgatgtcaacatccaggatgacgagggctccacggccctcatgtgtgccagcgagcacgggcacgtggagattgtcaagctgctgctggcccagcccggctgcaacggtcacctagaggacaacgatggcagcactgcgctctcaatcgccctggaagcaggacacaaggacatcgctgttcttctgtatgcccatgtcaactttgcaaaagcccagtctccgggcacccctaggcttggaaggaagacgtctcctggccccacccaccgaggttcatttgattgattgtatgcaaatagccctttatttacatgccactattaagctgctaattgttcctgttggggtgacagatactgaatgtatacgtattgtgcctgagctcaccagcaaacagaagcatcaagcccaggggtaaaggctgaagctttcacagtgcagagactgctagcctgggcacacgcacctcctttctggccgtcttctgtgtagggcacactttaacccagtctctgttgctgttgagtctctgctccgttttgtacagtcacagggaattctgatctgaaggggcaccttctgttcactcccacaaagtggtgtctggttctcactgagacgttttaagatttttccacaaatatttatatgtactaaatgtggaaccattagaaagttcttccaaaatctcattccagcatagttttggatttttcttttgtcttattttaaaataaggaagtcgagatgactttgatcattggtaacttgggcctgggccagacaaagtataaaacttacaaaagaatattctcatttggtcttaactaggtagatgtaatatatgactttttataaaaagggtatctatatgaacttgacacagtattttcagcttttgtattccatactaaagccatgaagaactacacgtaacatcatcatttgtattaattgcacaactccaatgctaaaggttggattgtgttagaggaatcggctctgtatttgcctctagagaaacacagtgttctctttgtatttatggattcctttttaccgtgtcacatttactttggtcctctatgtatttaaatgtttgaagtgccttagactcttgccatattttcaaaataaaattccattaagctcttaaaaaaaaaa

SEQ ID NO: 60979 - DNA, 5772 bp, Homo sapiens
tttcgtgatcatagctgggggaggctgagcgtgggagcggtgctgccagtcctgcctgaaaacgcgaaatgagtcttgcttggttctccctccactgggcgtgagagcccctgcccaggaggcccaggacaaatggccccatagtggaaactgggaagcttttaggcatctgatcagagcgggagccagccgggggaccacagtgctggacaggccaaccaactcaaacttgaagacatgaaatccccaaggagaaccactttgtgcctcatgtttattgtgatttattcttccaaagctgcactgaactggaattacgagtctactattcatcctttgagtcttcatgaacatgaaccagctggtgaagaggcactgaggcaaaaacgagccgttgccacaaaaagtcctacggctgaagaatacactgttaatattgagatcagttttgaaaatgcatccttcctggatcctatcaaagcctacttgaacagcctcagttttccaattcatgggaataacactgaccaaattactgacattttgagcataaatgtgacaacagtctgcagacctgctggaaatgaaatctggtgctcctgcgagacaggttatgggtggcctcgggaaaggtgtcttcacaatctcatttgtcaagagcgtgacgtcttcctcccagggcaccattgcagttgccttaaagaactgcctcccaatggacctttttgcctgcttcaggaagatgttaccctgaacatgagagtcagactaaatgtaggctttcaagaagacctcatgaacacttcctccgccctctataggtcctacaagaccgacttggaaacagcgttccggaagggttacggaattttaccaggcttcaagggcgtgactgtgacagggttcaagtctggaagtgtggttgtgacatatgaagtcaagactacaccaccatcacttgagttaatacataaagccaatgaacaagttgtacagagcctcaatcagacctacaaaatggactacaactcctttcaagcagttactatcaatgaaagcaatttctttgtcacaccagaaatcatctttgaaggggacacagtcagtctggtgtgtgaaaaggaagttttgtcctccaatgtgtcttggcgctatgaagaacagcagttggaaatccagaacagcagcagattctcgatttacaccgcacttttcaacaacatgacttcggtgtccaagctcaccatccacaacatcactccaggtgatgcaggtgaatatgtttgcaaactgatattagacatttttgaatatgagtgcaagaagaaaatagatgttatgcccatccaaattttggcaaatgaagaaatgaaggtgatgtgcgacaacaatcctgtatctttgaactgctgcagtcagggtaatgttaattggagcaaagtagaatggaagcaggaaggaaaaataaatattccaggaacccctgagacagacatagattctagctgcagcagatacaccctcaaggctgatggaacccagtgcccaagcgggtcgtctggaacaacagtcatctacacttgtgagttcatcagtgcctatggagccagaggcagtgcaaacataaaagtgacattcatctctgtggccaatctaacaataaccccggacccaatttctgtttctgagggacaaaacttttctataaaatgcatcagtgatgtgagtaactatgatgaggtttattggaacacttctgctggaattaaaatataccaaagattttataccacgaggaggtatcttgatggagcagaatcagtactgacagtcaagacctcgaccagggagtggaatggaacctatcactgcatatttagatataagaattcatacagtattgcaaccaaagacgtcattgttcacccgctgcctctaaagctgaacatcatggttgatcctttggaagctactgtttcatgcagtggttcccatcacatcaagtgctgcatagaggaggatggagactacaaagttactttccatatgggttcctcatcccttcctgctgcaaaagaagttaacaaaaaacaagtgtgctacaaacacaatttcaatgcaagctcagtttcctggtgttcaaaaactgttgatgtgtgttgtcactttaccaatgctgctaataattcagtttggagcccatctatgaagctgaatctggttcctggggaaaacatcacatgccaggatcccgtaataggtgtcggagagccggggaaagtcatccagaagctatgccggttctcaaacgttcccagcagccctgaggagtcccattaggcgggaccatcacttacaaatgtgtaggctcccagtggggggtagaagagaaatgactgcatctctgccccaataaacagtctgctccagatggctaaggctttgatcaagagcccctctcaggatgagatgctccctacatacctgaaggatctttctattagcatagacaaagcggaacatgaaatcagctcttctcctgggagtctgggagccattattaacatccttgatctgctctcaacagttccaacccaagtaaattcagaaatgatgacgcacgtgctctctacggttaatgtcatccttggcaagcccgtcttgaacacctggaaggttttacaacagcaatggaccaatcagagttcacagctactacattcagtggaaagattttcccaagcattacagtcaggagatagccctcctttgtccttctcccaaactaatgtgcagatgagcagcacggtaatcaagtccagccacccagaaacctatcaacagaggtttgttttcccatactttgacctctggggcaatgtggtcattgacaagagctacctagaaaacttgcagtcggattcgtctattgtcaccatggctttcccaactctccaagccatccttgctcaggatatccaggaaaataactttgcagagagcttagtgatgacaaccactgtcagccacaatacgactatgccattcaggatttcaatgacttttaagaacaatagcccttcaggcggcgaaacgaagtgtgtcttctggaacttcaggcttgccaacaacacaggggggtgggacagcagtgggtgctatgttgaagaaggtgatggggacaatgtcacctgtatctgtgaccacctaacatcattctccatcctcatgtcccctgactccccagatcctagttctctcctgggaatactcctggatattatttcttatgttggggtgggcttttccatcttgagcttggcagcctgtctagttgtggaagctgtggtgtggaaatcggtgaccaagaatcggacttcttatatgcgccacacctgcatagtgaatatcgctgcctcccttctggtcgccagcacctggttcattgtggtcgctgccatccaggacaatcgctacatactctgcaagacagcctgtgtggctgccaccttcttcatccacttcttctacctcagcgtcttcttctggatgctgacactgggcctcatgctgttctatcgcctggttttcattctgcatgaaacaagcaggtccactcagaaagccattgccttctgtcttggctatggctgcccacttgccatctcggtcatcacgctgggagccacccagccccgggaagtctatacgaggaagaatgtctgttggctcaactgggaggacaccaaggccctgctggctttcgccatcccagcactgatcattgtggtggtgaacataaccatcactattgtggtcatcaccaagatcctgaggccttccattggagacaagccatgcaagcaggagaagagcagcctgtttcagatcagcaagagcattggggtcctcacaccactcttgggcctcacttggggttttggtctcaccactgtgttcccagggaccaaccttgtgttccatatcatatttgccatcctcaatgtcttccagggattattcattttactctttggatgcctctgggatctgaaggtacaggaagctttgctgaataagttttcattgtcgagatggtcttcacagcactcaaagtcaacatccctgggttcatccacacctgtgttttctatgagttctccaatatcaaggagatttaacaatttgtttggtaaaacaggaacgtataatgtttccaccccagaagcaaccagctcatccctggaaaactcatccagtgcttcttcgttgctcaactaagaacaggataatccaacctacgtgacctcccggggacagtggctgtgcttttaaaaagagatgcttgcaaagcaatggggaacgtgttctcggggcaggtttccgggagcagatgccaaaaagactttttcatagagaagaggctttcttttgtaaagacagaataaaaataattgttatgtttctgtttgttccctccccctcccccttgtgtgataccacatgtgtatagtatttaagtgaaactcaagccctcaaggcccaacttctctgtctatattgtaatatagaatttcgaagagacattttcactttttacacattgggcacaaagataagctttgattaaagtagtaagtaaaaggctacctaggaaatacttcagtgaattctaagaaggaaggaaggaagaaaggaaggaaagaagggagggaaacagggagaaagggaaaaagaagaaaaagagaaagatgaaaataggaacaaataaagacaaacaacattaagggccatattgtaagatttccatgttaatgatctaatataatcactcagtgcaacattgagaatttttttttaatggctcaaaaatggaaactgaaagcaagtcatggggaatgaatactttgggcagtatcttcctcatgtcttcttagctaagaggaggaaaaaaaggctgaaaaaatagggaggaaattccttcatcagaacgacttcaagtggataacaatatttataagaaatgaatggaaggaaatatgatcctcctgagactaactttgtatgttaaggtttgaactaagtgaatgtatctgcagaggaagtattacaaagatatgtcattagatccaagtgctgattaaatttttatagtttatcagaaaagccttatattttagtttgttccacattttgaaagcaaaaaatatatatttgatatacccttcaattgccaaatttgatatgttgcactgaagacagaccctgtcatatatttaatggcttcaagcaggtacttctctgtgcattatagaatagattttaataatcttatagcattgtatattattattgctgttgtcactgttattattattgtggatactggcccttggtgtgttgcatagctccctatgtattctctgtttccatctttaagttcccagaccaatatacattaagagttttgcatggtctaaattgtgtttattccaaccacgtggaaagctcctggaaagaaattttacattcggttgttctgtgctcctaatgacacttgaccttgttgaacaaatggcagagcctttcccaaggatttgattgtttgtgaattatctgcatgtgtgcttttttttggtgtgtatgtatttcattaaaaaatataaatacttatgaaaattgcacgcatattagagttaaccatgtactattgatacagcaacgctacattgcaaataaaagtccgatcccaaaaggagaatgagacaaaaa

SEQ ID NO: 60980 - DNA, 583 bp, Homo sapiens
ttttaattgttaacagaaccaatttaaatacaacttaatacacaaagcaaagctgggcggcgttccggggggccagggaaaagtgccaagagggtcaggggtgaagcagtccgggccccgggtccttggaagggggctgaaggctgcccgtcgtggggaagggcttggctggcggaggccggagctgcctgtggaggccttgaagctttgccagcagctcctggatgaagtcctcgacaggtttcccacatgacttcaggagtccctggattttccggcttctctcctcttcactctctaactccaacaattcatcaatgttgatctcatcgggcatgtctgcctccatgccgcggtacagctcctccaggcgcccgtcgatccacttctccacgtccagccgccgctgcagctcccgccggtcatacttgacggtgacgcgcgcgtgccgcttctgcagccccccgggactgccccctggcccgcgggcccgcgatggagactgcagcttgctcagcacgcgcttgcccagccgctgagctgccatcgcgctgctggacccagcctggcccggacgcgtggg

SEQ ID NO: 60981 - DNA, 4790 bp, Homo sapiens
tttcgtcggcgctgtgtgtgtgaagcgtacctagggcgggaggcgacatggagacaggggcggccgagctgtatgaccaggcccttttgggcatcctgcagcacgtgggcaacgtccaggatttcctgcgcgttctctttggcttcctctaccgcaagacagacttctatcgcttgctgcgccacccatcggaccgcatgggcttcccgcccggggccgcgcaggccttggtgctgcaggtattcaaaacctttgaccacatggcccgtcaggatgatgagaagagaaggcaggaacttgaagagaaaatcagaagaaaggaagaggaagaggccaagactgtgtcagctgctgcagctgagaaggagccagtcccagttccagtccaggaaatagagattgactccaccacagaattggatgggcatcaggaagtagagaaagtgcagcctccaggccctgtgaaggaaatggcccatggttcacaggaggcagaagctccaggagcagttgctggtgctgctgaagtccctaggggaaccaccaattcttcccaggattcaggagcagttccagaaaaatcccgacagttacaatggtgctgtccgagagaactacacctggtcacaggactatactgacctggaggtcagggtgccagtacccaagcacgtggtgaagggaaagcaggtctcagtggcccttagcagcagctccattcgtgtggccatgctggaggaaaatggggagcgcgtcctcatggaagggaagctcacccacaagatcaacactgagagttctctctggagtctcgagcccgggaagtgcgttttggtgaacctgagcaaggtgggcgagtattggtggaacgccatcctggagggagaagagcccatcgacattgacaagatcaacaaggagcgctccatggccaccgtggatgaggaggaacaggcggtgttggacaggcttacctttgactaccaccagaagctgcagggcaagccacagagccatgagctgaaagtccatgagatgctgaagaaggggtgggatgctgaaggttctcccttccgaggccagcgattcgaccctgccatgttcaacatctccccgggggctgtgcagttttaatgaccagaaggaaaggaaaccctcgccggtggggaggcagagccttatcctcggctgcccttcttggctccctgcattccagggacttgctcgtcttgtttacccctagccatcctttctttcaagggtgaaccaggccttccaccctgaccttgcatctccagactgttccagagaaggtgcggggccagctgctatgtggtggccgctgtggctgacactgagtgaaggtgcttgaaatgcaggagaggatatcccagcaaattgggatcacatgcttttgtctccacagcaaccagccactgcaggcagcatgtctttcctcccctgctctctgcttgctgttgttttgacgctattctgcttgcatgtcttctggttgggatgtggagttgttgctggactctcaggcgaagctgaagtcattgaagtgtgtgaagctctgtgcttgcatgagggcaagcaaggaatggctgtgcctgaggctgctctgggaaactccttgccccttgacctcttttgagagcattcacgtggtcttcttgctcatccccttataaatgtgctttgcctgcctcagcctcatggtcagagcagtggagactggagccctgtttgcacgttctggttgttcggagaaagcctaggttctgggctcaggtccagatgcagcggggattctgttctctgactgtggcgaccttgctttggttcttgttgaagtgaaccaagcccggccaccacgcatggcatgctgtgcttggctccccataagacgtcctctttgggtgcacggtgtcaaagtgtgggcaggagtggagagctggtgccctcaggaggagaccacagcatgtccatcagctcagcagagctcgacagccacaagtcctgagaagctttgaccttgaagggcttctgggagaggaggaatttctgcatggggcgtgaaggcacactgtcccaccacaactgaaccagaagagagtgaagactcccctcttcccatcctctgtgccaggtgccagactgtgctccttggaacttatggcccaatcttacctgttctccagggactggtcactgcctcaggacccccaagcctatgccctgagccatggctgctgactgactccagccaaggtgcaaagacgagattatgagacaggtcctcaggcctgtgttccaagtactcacaggggctctgggtgcccatcgccgggagtatggttcagctgccaccggcactgtccatttgcctgtctgtcaagctcagagcatggataagccacacagcagggcagtgcaccctgggcaccatgcacggccagcaagaatcaaggcccgcagatgctaagagggcctattgtcaggggaaggtccccgctcctgcacactctctatggatacttgggttgtgggggctctcttggagagtaagtttgtggtttgtttctggtttacagtggtggctgacaccccttgtaagaaagcattcctgggaagtcttctgtgggtccaaacatgttgctccgatcatcacaggagagcaaaaggccctagataccccctttggaatgtgagagtcttgttgtctgatatttgccactgagctggtgaagcccctctaaagagatctcgaccctggggagcagaattcttgtcatctatgaggggtcctgagaaagacttgtcattttttttcctggagttcttcccattgaggtcctaggatttgcacaccactgtcccacaagagctttcctgcctaatgaaaggaggtcttgtggtgtgtgtctcctctcttctctatagttcccgagttggcccccattgcagcccccaccctgtgggtagtcttccagaagtgatgcagtggtgtgagatgccctacaccttgttatttgggagactttgagagtcattcacttccatggtgactagtgtttgttttgcctgattttatattctgtgttgcatttctccccactccctgccctgctttaataaacagcaaaccaatatctaggaagaatgactgagggatagtattgggtattggccccatggcaggaacagccacttgcatctggtcccggtgccacactgcggtgcttggtgtggttgtggagcctgtccctgcgcgccttgctcccgttgagccacgctgtctggtgggtgattctctgccctgagccaccaccctggactggcccagtctccagagctggcacaccctgcctgttttctctttttagacacaacagccgcagtttggccagccactaagtcccaccagctgaggtccgaggaaagcggggtgactcatttcccttgtccagggcccgaggagagtgaggtgtccagcctgcaaagctattccagctccttggtgttggtttgcaataaattggtatttaagcagttctgggtctgcgtgtgacatttgctgctgagacagttctgtctgtgcatggtcattattgttgcattctagccttgaggtcccaggccaacgtacacagcaaacaccagcatggggaattcttaggggttgtttcccatctggtctgaatgcactgggcaagatctcaatacagctttagaaatcctgtaagattttgaccagtggggagaaaaagaatgtagctatagatcttacatcctttcaaacaggttctggaattctgtagttactggaaagcttagggtgagtgcagagttgggaatgattccactgaagggccacctttgcccaccaggctccaaggccctccttggtctccaggtgcatacctgctgttaactttgctgagccctcgcaatgggcttcctccaggacataacgccgtgtctgacacagaagtctcccaggtggctggccacctgcttcttcctcagtcagatctttgactctccttctctgtgcccaccccatctccagcctcctctgaccctgctcacccctggggacaggacctaggggtgtgagaagtacttggctgaataaagactgtttcaaaggcaatccttagaattgcctagcatactcccagggccagaaataacccgccagaaaggagaggcgtatttgcccctgaagagtgcaggagggagaacagttgagaagtgttttgtgtggaaatgtgtccaagaggcgtcagctgctgcacagagaactcactgcccagaacactgcgcttggggaacagacctcaccccccacctcaaatctgctctccactgggcctgttggcagccagctcagctggggaagggacagcatgactcgctttgtcgatgaaaagcacgaagttgtcagcacagaacctggccagtccttgagaaactccctccttggtggtcagaggtccaaccagcccatgtggcccacggtcctgaagaactgggctatgtccctgaggctcctctctaccgtctgactgtggggtctggggaacaggcatttaaaccaggctgctgccctggggagtgcccactggacgccagggtgccccatagggacagggtcacaaagccctggggcttcccctgccagtcctggtgaggacagtgtggtcactatctcagagagacgaaaaatgaatattctgtcatttcagactaaactactcacccagctcacactaaaaaaaaaa

SEQ ID NO: 60982 - DNA, 704 bp, Homo sapiens
agagagccctgcgggaactgcgtgagcgcgtgacccatggcttggctgaagccggcagggaccgcgaggacgtcagcaccgagctgtaccgggcgctggaggccgtgaggctgcagaacagtgagggttcctgtgagccgtgccctacgtcgtggctgcccttcgggggctcctgctactatttctctgtgccgaagaccacgtgggcagaggcgcagggccactgcgccgatgccagcgcacatctggcgatgtagggggcctgggggagcaggacttcctgagtcgtgacactagtgcccttgaatactggatcggccgcagggccgtgcaacacctgcgcaaggttcagggctactcgtgggtggacggagtcccactcagcttcaggtaggggaagggctcctggtgaaacctgggggccacaggttagactctagaggacatgttttgaggccgaggtgggcggatcacctgaggtcaggagttcaagaccagcatgggaaacgtggcgaaaccccatctctactaaaaatacaaaaaattagccgggcgtggtggcacacgcctgtaatcccagctaaccctggatgctgaggcacgagaatcacttgaacccaggaggcagaggttgcagtgagccgagattgcgccactgcactccagcctgggagacagagttagactccgtctcaaaaaaaaaa

SEQ ID NO: 60983 - DNA, 4866 bp, Homo sapiens
tttcgtctccgccgctgctgccgcacctgccaccatgtcgccgccgccgggtcatgtctgactctctctggaccgcgctttctaatttctcgatgccctccttccccggcggcagtatgttccgccgcaccaagagctgccgcaccagtaatcggaaaagcctcatcctgaccagcacttcacccacgctaccgagaccccactccccgctgccaggtcacctaggcagcagtcccctggacagcccccgaaacttctcccccaacacccccgcccacttctcgtttgcctcctcccgaagggcggacggacgccggtggtctctggcctcgctcccttcatctggctatggcaccaacacgcccagttccaccgtctcgtcctcctgctcctcccaggagcgccttcaccagctgccctaccagcccacggtggacgagctccacttcctctccaaacacttcgggagcaccgagagcatcacagacgaggatggtggccgtcgctccccagccgtgcggccccgctcacggagcctcagccccgggcgctccccctcctcctacgacaacgagatcgtgatgatgaatcacgtctacaaggagaggttcccgaaggccactgcgcagatggaggagaagctgcgcgacttcacccgcgcctacgaacccgacagcgttctgcctctggccgatggcgtgctcagcttcatccaccaccagatcatcgagctggcccgggactgcctgaccaagtcccgtgacggcctcatcaccacggtctacttctatgaattgcaggagaacctggagaagctccttcaagacgcctatgaacgctctgagagcttggaggtggccttcgttactcagctggtgaagaagttgcttattatcatctcacgccctgcgaggctgctggagtgcctggaattcaaccccgaggagttctaccacctgctggaggcggccgaaggacacgccaaggagggccaccttgtgaagacggacatcccccgctacatcatccgccagctgggcctcacccgtgacccctttccagacgtggtgcatctggaggaacaggacagtggtggttccaacacccctgagcaagacgatctctctgagggccgcagcagcaaggccaagaaaccgccgggggagaatgacttcgataccatcaagctcataagcaacggtgcctacggcgctgtctacctggtgcggcaccgcgacacgcggcagcgctttgccatgaaaaagatcaacaagcagaacttgatcctccgcaaccagatccagcaggcctttgtggagcgcgatatcctcaccttcgccgagaacccgtttgtggtcggcatgttctgctcctttgagactcggcgccacctctgcatggtcatggaatatgtggaaggcggcgactgtgccaccctgctgaagaatattggagcgctgcccgtagagatggcccgcatgtactttgctgagacggtgctagccctggagtatttgcacaactatggcatcgtgcaccgcgacctcaagcctgacaacctccttatcacctccatgggtcacatcaagctcacagatttcggcctctccaagatggggctcatgagcctcaccaccaacttatatgaaggccacatcgagaaggacgcccgagagttcctggacaaacaggtgtgtgggaccccagagtacatcgcgcccgaggtcatcctgcgtcaaggctacggcaagccagtggactggtgggctatggggatcatcctctacgagttcctggtgggctgtgtgcccttcttcggagacacaccagaggagctatttggacaggtcatcagtgatgacatcctgtggcccgagggggatgaggccctacctacggaggcccaactcctcatatccagcctcctgcagaccaaccctctggtcaggcttggggcaggcggcgcttttgaggtgaagcagcacagtttctttcgagacctggactggacagggctgctgaggcagaaggccgagttcatcccccacctagagtcggaagatgacactagctactttgacacccgctcagacaggtatcaccacgtgaactcctatgacgaggatgacacgacggaggaggagcccgtggaaatccgccagttctcttcctgctctccgcgcttcagcaaggtgtatagcagcatggagcagctgtcgcagcacgagcccaagaccccagtagcagctgcagggagcagcaagcgggagccgagcaccaagggccccgaggagaaggtggccggcaagcgggaggggctgggcggcctgaccctgcgtgagaagacctggagagggggctctccggagatcaagcgattctccgcgtccgaggccagtttcctggagggagaggccagtccccctttgggcgcccgccgccgtttctcggcgctgctggagcccagccgcttcagcgccccccaagaggacgaggatgaggcccggctgcgcaggcctccccggcccagctccgaccccgcgggatccctggatgcacgggcccccaaagaggagactcaaggggaaggcacctccagcgccggggactccgaggccactgaccgtccacgcccaggtgacctctgcccaccctcgaaggatggggatgcatcaggcccaagggctaccaatgacttggttctgcgccgggcgcggcaccagcagatgtcaggggatgtggcagtagagaagaggccttctcgaactgggggcaaagtcatcaaatcagcctcagccactgccttatctgtcatgattcctgtagtggacccacatggaagttcaccccttgctagtcccatgtctccacgatctctgtcctccaacccatcctcacgggactcctcacccagccgggactactcaccagctgtcagtgggctccgctcccccatcaccatccagcgctcgggcaagaagtatggcttcacactgcgtgccatccgtgtctacatgggtgacacggatgtctatagtgtccaccacattgtctggcatgtggaggaaggaggcccagcccagggaggcaggactctgtgcctggggacctcatcacccacgtgaatggggagcctgtgcatggcatggtgcatcctgaggtccgtggagctgatccttaagagtggcaacaaggtagcagtgaccacaacgcccttcgaaaatacctctatccgcattggtcccgcaaggcgcagcaggctaacaaggctaaaaatgggcttcggagggaacaagcgaccctccgccaaggagggccaggagagcaagaagcgcagctccctcttccggaagatcacgaagcagtcgaacctgctgcatactagccgctcgctgtcgtcgctgaaccgctcgctgtcatccagcgatagtctcccgggctcgcctacgcacgggctgccggcgcgctcgcccacgcacagctaccgctccacgcctgactccgcctacctaggcgcctcatcccagagcagctccccagcctcgagcacgcccaactcgcctgcgtcgtcggcgtcgcaccacattcggcccagcacgctgcacggactgtcgccaaagctccatcgccagtaccgctctgcgcgatgcaagtcggccggcaacatccctctatcgccgctggcacacacgccgtcccccacgcaggcgtcaccgccgccactgccgggccacacggtgggcagctcgcacactactcagagcttcccggccaaactgcactcatcgcctcccgtcgtgcgcccgcgccccaagagtgccgagccccctcgctcgccgctcctcaagcgcgtgcagtcggccgagaagctgggagcctctttgagtgcggacaagaagggcgcgctgcgcaaacacagcctcgaggtgggccacccggatttccgcaaggacttccatggcgagctggcgctgcatagccttgccgagtccgacggtgagacgcccccagtcgagggccttggcgcgccccggcaggtcgccgtccgccgcctgggccgacaggagtcacctttgagcctgggcgcggacccgttgctgcccgagggtgcctccaggccaccagtgtcgagcaaggagaaggaatccccggggggcgccgaggcgtgcaccccaccccgcgcgacgacccccggtggccggaccctggagcgggacgtcggctgcacgcggcatcagagcgtgcagacggaggatggcactggcgggatggccagggctgtggccaaggcggcgctgagcccggtgcaggaacacgagacaggccggcgcagcagctctggcgaggcgggcacacccctggtacccattgtcgtagagcctgcgcggcccggggctaaggctgtggtgcctcagcctctgggcgcggactccaaggggttgcaggaacccgcacccctggcgccttccgtgcccgaggccccccggggccgggagcgctgggtgttggaggtggtggaggagcgcaccacgctgagcggtcctcgctccaagcccgcctccccaaagctctccccggagccccagacaccctccctagccccagcgaagtgcagtgcacccagcagtgcagtgaccccagtcccacccgcatccctcttgggctcgggcaccaagcctcaagtggggctgacctcccggtgccctgctgaagctgtgcccccagcaggcctgaccaaaaaaggagtgtccagtcccgcacccccgggaccatagccaagggggtcatcggccccgcgctgtacagcctccgtatacatatgtacacatataaataaagtgcgtccgtgctgcgtgaaaaaaaaaa

SEQ ID NO: 60984 - DNA, 1677 bp, Homo sapiens
ttttttttttttgagacaaagtctcactctgtagccaggtgctggggtgcagtggcatgatctcggctcactgcaacctccgcctcctgaggtcaagtgattctcctgcctcagcctcccaaatagctgggactacaagagtgcgccaccacgcctagctaatttttgtatttttagtagagacggggtttcaccttgttggccaggctggtctttaactcctgacctcaggtgatccacccgcctcggcctcccaaagtgctgggattacaggcataagccaccacgcccagccaggaaagtatttaaaaacaaattaagcaaagattataaaagtttttggagtaacacatttcccgaaatgatcacgatccacatcaagtctgagccatgttgacatccccacgtcggggcccttcctggtggtcgaggaatcttcagaggtctctaaaatatattaaaaatgtcccaacatttcaggacattccaccggcttttcttgctgggcttcctggttttcttcttgggctttctggttttcacttcctcttccactttggtcttttctgttgcttcttctgcaggtgcagaggaaggacttgctgacatctgctggtggctgcctgtaatggtggagtcttccaattgctttgccagtgtggctgggtccacctgcatcatgtgaacccctgtggcttcctcagagactgtctgctctggcacatgctcctccaggtcttccaggtcactctttgccagcgtggctgggtccacctgcatcatgtgaacccctgtggcttcctcagagactgtctgccctggcacatgctcctccaggtcttccaggtcaccacgttgtggaactcccaaggatgtcttcacctcctctgggtccctcctcctcgccgttgtaactggacagctcctgaagtacatccctgatcagaagttcggccagtgtgtctgggtccccctccatcatgtgaacttctgtggcttcctcagagactgtctgccctggcccatgctcctccaggtcttccaggtcaccgttggtttgggtgcctgcgtctgcatgggcaacagtgaggagactctgattggatgcttcagggagatgttctgctataaactcctctagatgatcttctgatggaaagcatacccttttcttcacagagcctggcaacgtctccgagagtatctcgggtggacacaatggcttgcccaaggagccttcgtcacgctcacgttgtggaactcccaaggatgtcttcatcgcctcttggtacttcttccatgtgctgtataggtggagctcccgtagtcgccgtagttgccgtttcatctcaatgtctctctctgtgtctttgtccaccatatgaacgcccaggacatcttcagatgaagcttcctgcaccaggtcctcatcgtaatcgtgttatccaggatggtgtcgatctcttgaccaagtgatccacccgcctcggcctcccaaagtgttggtattacaggcgtgagccactgtgcccagcccctgggatggcctctatgagggtggctggctccaattagcacacgtgtaagcaaactggctggccttgatgaggacggctagggacatctgggctggctgtcacgtgaataacagaaatcttcttggctggcttagatgag

SEQ ID NO: 60985 - DNA, 1058 bp, Homo sapiens
agatggccgcgctcctggccgcctagagccggagcggcccgcggagctgcggaggcagccatggtcggggcgctgtgcggctgctggttccgcctgggcggggcccgcccgctcatcccgttgggcccgactgtggtacagacctccatgagccggtcccaggtagccctgctgggcctgagtctgctgctcatgctcctactgtatgtggggctgccaggcccccctgagcagacttcctgcctctggggagaccccaatgtcacagtcctggctggtctcacccctggcaactcgcccatcttttaccgcgaggtgctcccactcaaccaggcacacagggtggaggtggtgctgcttcatggaaaggcctttaactctcacacgtgggagcagctgggcacactgcagctactgtcacagaggggctaccgggccgtggcccttgaccttccaggttttgggaactcggcaccttcaaaggaggcaagcacagaggcagggcgggcagcgctgctggagcgggcgctgcgggacctggaggtacagaatgccgtgttggtgagcccctcgctgagtggccactatgccctgcccttcctgatgcgaggccaccaccagctacatggatttgtgcccatcgcacccacctccacccagaactacacccaggagcaattctgggctgtgaagactccaacccttatcctgtatggagagctggaccacatcctggctcgagagtcactgcggcagctccgccacctgcccaaccactctgtggtgaagctacgcaatgcaggccatgcctgttacctccacaagccgcaagacttccaccttgtcctgcttgccttccttgaccatctaccttgaactaacccactcccagctcccagcctggcatgagcttggacagtctggaccgccaccctccctgaaccagggagacagcctctgggattggaggccagaggccagggtcagacccagccaggactcctcatttcatctcacagacacaataaaaaagcatatttgtcctgccaaaaaaaaaa

SEQ ID NO: 60986 - DNA, 1068 bp, Homo sapiens
cacgaggcggacgctgagggcttccgcgcgggccacccgggtcaagcgcgctccgccgggaaacttctgcgggcgccgggctgaagctccgggcagggctgggaaggaaaggaaataccaaaatatttgcagactggatccaaatcaggagcccagatgaacttaaagaagcgagcatgggattcttagtttttcaagatccgtacacacgaagcctttaatcagcatcaactccagtgtccgttttctctggttttgtgaagactgcacaaaactctcatgatggagaaccaaaggacttagttacctgtttcagtgtcatctaaagtcaactgaaaagtgaagcaggcagtaatacagccatggaaagaaattcaagtttatggaagaacctaatagatgaacacccagtctgcacaacctggaagcaagaggccgaaggagccatttatcatcttgccagtattttatttgtagatcagagtgacagttgatggcgaatttctgcattacattttcccccttcagttcctggattctcctgagtgggattcactgagacccacagaggaaggcatttttcaggtaaccctcactgcagaaactgattgtcgatatgtgtcttggaggagaaagaaattatatctgctctttgctcagcatcgctacatctcccgccttttttcagtgctaattggcagtgacattgcagataaactctatgccttgaatgacagggtatatataggaaaaagatatcactatgatattcggctacccaacttctatcaaatgtcaactccagaaatacgcagatcacccctgacacaacattttcagaattccagacgatactggtgataaatgaccatcaaagtctggaaattttataagtataaaaaaagactctctccttcatcattccccagtggaaatagcaaaatacaaaaaaagagctccctaatgtttttataaatcaaattcagaagcgagatgccattgccaactgttttattcctttcaacaactgcattgtgaataaactttacaaatttttcttgtaaaaaa

SEQ ID NO: 60987 - DNA, 1940 bp, Homo sapiens
gcacgaggcccgcactaagggaaacatggctctagcgcggcccggtgcggctcttttccctcgtgactcggttgctcctggcgccgcgacggggcctcacggtccgcagtcccgacgaacccctgccggtggtgcgcatcccagtggctctacagcggcagttggaacagcggcagagcaggcggcggaacctcccgaggccggtgctggttcgacccggaccgctgctggtttcggcgcggcggccggagttgaaccagccggcgcgcctcacactgggccgttgggagcgcgcgccgctagcctctcaaggctggaagagtcgacgcgcgcgtcgggaccacttctccatcgagcgcgcgcaacaggaggcgccagcggtgcgaaagctctcgtctaagggcagctttgctgaccttggggcctggaagccccgtgtgctgcacgcactacaggagggctgcgcctgaagtcgttcaagcccacaaccgtgcagtctagcaccatcccctcactacttcgcggccgccatgtcgtttgcgccgcagaaaccggcagtggcaagactctcagctacctcctgccgctgcttcaacggctcttgggcccacccaagcctggactcccttcctatccccgcgccccgaggcctggtccttgttccttcccgagaattggcccaacaggtgcgggctgtggcccaacccttgggccgctccttgggcctgctggtgcgggacctggagggaggccacggcatgcgtaggatcaggctgcagctgtccagacagccttcagcagatgtgcttgtggccactccaggggctctgtggaaggccctgaaaagtcgactgatcagtctggagcaactctccttcttggtgttggatgaggcagacacactgctggatgaaagcttcctggaactggtggactacatcttagagaagagccacatagcagaaggcccagctgacttggaagaccccttcaatcccaaagctcagttagtgctggtaggagccacatttcccgaaggtgtaggccagttgctgaataaagtcgccagcccagatgctgtcaccaccatcaccagctccaagctccactgtatcatgcctcatgtgaaacagacatttctgagactgaagggagcagataaggtggccgagctggtgcacatcctcaagcatcgtgacagagcagaaaggactggtccctcaggaactgttctggtgttctgtaatagctccagcactgtgaactggctgggatatattctggatgaccacaaaatccaacacctaaggttgcaggggcaaatgccagccttgatgagggtaggaatcttccagtccttccagaagagctcccgagacatacttctctgcacagacatagcctctcggggcctggacagcactggtgtggagctggttgtcaattatgatttccccccaacgctgcaagattacatccacagagcagggagagtgggccgtgtggggagcgaggtgccaggcaccgtcatcagttttgtgacccatccctgggatgtgagcctggttcagaagattgagctggcggctcgccgaaggagaagtcttccaggactagcatcctcggtgaaagagcctttgccccaagcaacctgattttgacaaatctgattaaaatgtgatgctagaacagggatctttcccagtatcttgagtgggtgaccacacttgtcagtgggaggctctgggctgccctgtcggctccttgagggcgggatgaactgctttgtgacttggaaaggtacgctgctggccagcattggagaagaagctgctgagcatggctttctgtagtctttagcaagacacaagtggattttgactttgtatcatgtcatgatttctaacaataaatgatgtttttatgtgccaaaaaaaaaa

SEQ ID NO: 60988 - DNA, 1456 bp, Homo sapiens
cccggtgcgacgatttcgtggcgaaggtgcgggaacgtccactcccgcgcgcccctctcggggaccagggcggcctcccaggaggagcttggtttctggtcctcataccgtgtggttgagtgaaatcaaaacttccacgatagcaatgctgattggacaaagaatgtgttgtggacacaaaaccaaactctggaggacagaggattcattccaaggtagagatggattcctggaaatacctcctcaaggccagggtagagccctcaatcacccactgcccccagcttctccttctcccatctcctgcaccaagcaggtctccaggtgttccagctgctgatgacgtaaagtgtggagttggtccaggaaggtcatgttccatgcagcacgaggagcgctttgtgtgagaagttgaagacctgctgtaacacatcatagaggaaagacatagcctggggccttctgcaactggctgacttccaccttctcctgggggaatctgaagtcacttctgtcctttagacacaagaagggagagattctcctcatttggcccaaaagcaccaaggtgttcctgcctagcaggccaatggttctgaggcaggttatatcctagagatccagaagagccacagctgcacacctctagggctgccagtagagggaagaggaggcccattgagaaatcaggatgcttttggcctggatgagctgaggtcttcataaaaccttggatcctaggttctatgaagacattctatctatgcatggctttaatggagcacaaatagttttcatttttctgagcatttctctaaatttttaattccatttattgttttcatttacatggcttctatatcagcatccacaaccttttggccaccagtttggtggaagataatttttccacgaaaaatggggtcagggagggaatgctttcagaggcattagattctcattaggagaccacaacctagatccttcgcatctgcacttcacaatagggttcctgctcttttgagaatccaatgccactgctgatctgacaggaggcagagctcaggcgttaatgcttgttggttggcctgcttgcctcctgctgtgcggccctgttcctaccaggccaggaccagtaccccggtccatggatgggggtgtgaaaaaccttgttctatatgacataaaaggaggtcgtcgctccacactcttgatttttgcaatggattgttccaatattcccagtaaacttaagatatatcaatccaaatgaatattgatcaatcagatgagaaacgtctgtgtgcatactgttagaagtatatacttttagcccagatcctagcctccagttttaccctccattttgcataggaaatcaggatccctgggccctatgggtttctgtattcagttagcaaattacctatctctggaaattcaactttttaggact

SEQ ID NO: 60989 - DNA, 3380 bp, Homo sapiens
ctgataccccagcttggcacggggacgcagccatggcggaggcggctttggaagccgtgcggagcgagttacgagaattcccggccgctgcaagggagctctgcgtgcctcttgctgtgccctacctggacaaacccccaactccgctccacttctaccgggactgggtctgccccaacaggccgtgcattatccgcaacgctctgcagcactggccggccctccagaagtggtccctcccctatttcagagccacagtgggctccacagaggtgagtgtggccgtgaccccagatggttacgcggatgccgtgagaggggatcgcttcatgatgccagctgagcgccgcctgcccctgagcttcgtgctggatgtgctggagggccgggcccagcaccctggagtcctctatgtgcagaagcagtgctccaacctgcccagcgagctgccccagctgctgcctgatctggaatcccatgtgccctgggcctccgaagccctgggaaagatgcccgatgctgtgaacttctggctgggggaggcggctgcagtgacttctttgcacaaggaccactatgagaacctctactgcgtggtctcaggagagaagcatttcctgttccatccgcccagcgaccggcccttcatcccctatgagctgtacacgccggcaacctaccagctaactgaagagggcacctttaaggtggtggatgaagaggccatggagaaggcagaggtgtccaggacctgcctgctcacggttcgtgtcctgcaggcccatcgcctaccctctaaggacctagtgaccccctctgactgctacgtgactctctggctgcccacggcctgcagccacaggctccagacacgcacggtcaagaacagcagtagccctgtctggaaccagagctttcacttcaggatccacaggcagctcaagaatgtcatggaactgaaagtctttgaccaggacctggtgaccggagatgaccctgtgttgtcagtactgtttgatgcggggactctgcgggctggggagttccggcgcgagagcttctcactgagccctcagggtgaggggcgcctggtaagttgaatttcgcctgcagagtctggctgaccgtggcgagtggctcgtcagcaatggcgttctggtggcccgggagctctcctgcttgcacgttcaactggaggagacaggagaccagaagtcctcagagcacagagttcagcttgtggttcctgggtcctgtgagggtccgcaggaggcctctgtgggcactggcaccttccgcttccactgcccagcctgctgggagcaggagctgagtattcgcctgcaggatgcccccgaggagcaactaaaggcgccactgagtgccctgccctctggtcaagtggtgaggcttgtcttccccacgtcccaggagcccctgatgagagtggagctgaaaaaagaagcaggactgagggagctggccgtgcgactgggcttcgggccctgtgcagaggagcaggccttcctgagcaggaggaagcaggtggtggccgcggccttgaggcaggccctgcagctggatggagacctgcaggaggatgagatcccagtggtagctattatggccactggtggtgggatccgggcaatgacttccctgtatgggcagctggctggcctgaaggagctgggcctcttggattgcgtctcctacatcaccggggcctcgggctccacctgggccttggccaacctttatgaggacccagagtggtctcagaaggacctggcagggcccactgagttgctgaagacccaggtgaccaagaacaagctgggtgtgctggcccccagccagctgcagcggtaccggcaggagctggccgagcgtgcccgcttgggctacccaagctgcttcaccaacctgtgggccctcatcaacgaggcgctgctgcatgatgagccccatgatcacaagctctcagatcaacggggaggccctgagtcatggccagaaccctctgcccatctactgtgccctcaacaccaaagggcagagcttgaccacttttgaatttggggagtggtgcgagttctctccctacgaggtcggcttccccaagtacggggccttcaatcccctctgagctctttggctccgagttctttatggggcagctgatgaagaggcttcctgagtcccgcatctgcttctttagaaggtatctggagcaacctgtatgcagccaacctccagggacagcttatactgggcctcagagcccagccaattctggggaccgctggggtcaaggaaccaggccaacctgggacaaggagcaggtcccccttctgaagatagaagaaccaccctcaacagccggcagratagctgagtttttcaccgatcttctgacgtggcgtccactggcccaggccacacataatttcctgcgtggcctccatttccacaaagactactttcagcatcctcacttctccacatggaaagctaccactctggatgggctccccaaccagctgacaccctcggagccccacctgtgcctgctggatgttggctacctcatcaataccagctgcctgcccctcctgcagcccactcgggacgtggacctcatcctgtcattggactacaacctccacggagccttccagcagttgcagctcctgggccggttctgccaggagcaggggatcccgttcccacccatctcgcccagccccgaagagcagctccagcctcgggagtgccacaccttctccgaccccacctgccccggagcccctgcggtgctgcactttcctctggtcagcgactccttccgggagtactcggcccctggggtccggcggacacccgaggaggcggcagctggggaggtgaacctgtcttcatcggactctccctaccactacacgaaggtgacctacagccaggaggacgtggacaagctgctgcacctgacacattacaatgtctgcaacaaccaggagcagctgctggaggctctgcgccccaggcagtgcaaacggaaggcggcagcgcaaggcccccactgatggccggggcccctgcccaccccctaactctcattcattcccctggctgctgagttgcaggtgggaactgtcattcacgcagtgcttcagagcctcgggctcaggtggcactgtcccagggtccaggctgagggctgggagctcccttgcgcctcagcagtttgcagtggggtaaggaggccaagcccatttgtgtaatcacccaaaaccccccggcctgtgcctgttttcccttctgcgctaccttgagtagttggagcacttgatacatcacagactcatacaaaaaaaaaa

SEQ ID NO: 60990 - DNA, 2409 bp, Homo sapiens
tcagcgcggtggccagcgcgcagaggcgggcgcggaggcggctagaaggtgaccgcggatcccagcttcctgcagccagccctgaaggatggctgccatattgggagacaccatcatggtggctaaaggccttgtcaagctgacccaggcggccgtggaaacccacctgcagcacttgggcatcggaggggagctgatcatggcggccagggccctgcagtccacggctgtggagcagattggcatgttcttggggaaggtgcagggtcaggataaacatgaagaatattttgctgagaacttcggcggcccagaaggggagttccacttctcagtcccgcatgcagccggagcctccacagacttctcttcagcctccgctcccgaccagtcagcgcccccatccctgggtcatgcccacagcgagggcccagctcctgcctacgtggccagtggaccctttagagaagccgggttccccggccaggcctcctcccctctgggcagggccaacgggaggctctttgcaaaccccagagactcattctctgccatgggctttcagcgaaggttcttccaccaggaccaatcccctgttgggggcctcacagccgaggacattgagaaggcccggcaggctaaggctcgccccgagaacaagcagcacaaacagacgctcagcgagcatgcccgggagcggaaggtgcctgtgacgaggattggccggctggccaacttcggaggtctggccgtgggcctgggcttcggggcactggcagaggtcgccaagaagagcctgcgctccgaggacccctcagggaagaaggccgtgctgggttccagtcctttcctgtccgaggccaatgcagagcggatcgtgcgcacgctctgcaaggtgcgtggtgcggcactcaagctgggccagatgctgagcatccaggatgatgcctttatcaacccccacctggctaagatcttcgagcgggtgcggcagagcgcggacttcatgccactgaagcagatgatgaaaactctcaacaacgacctgggccccaactggcgggacaagttggaatacttcgaggagcggcccttcgccgccgcatccattgggcaggtgcacttggcccgaatgaagggcggccgcgaggtggcccatgaagatccagtaccctggcgtggcccagagcatcaacagtgatgtcaacaacctcatggccgtgttgaacatgagcaacatgcttccagaaggcctgttccccgagcacctgatcgacgtgctgaggcgggagctggccctggagtgtgactaccagcgagaggccgcctgtgcccgcaagttcagggacctgctgaagggccaccccttcttctatgtgcctgagattgtggatgagctctgcagcccacatgtgctgaccacagagctggtgtctggcttccccctggaccaggccgaagggctcagccaggagattcggaacgagatctgctacaacatcctggttctgtgcctgagggagctgtttgagttccacttcatgcaaacagaccccaactggtccaacttcttctatgacccccagcagcacaaggtggctcttttggattttggggcaacgcgggaatatgacagatccttcaccgacctctacattcagatcatcagggctgctgccgacagggacagggagactgtgcgggcgaaatccatagagatgaagttcctcaccggctacgaggtcaaggtcatggaagacgcccacttggatgccatcctcatcctgggggaggccttcgcctctgatgagccttttgattttggcactcagagcaccaccgagaagatccacaacctgattcccgtcatgctgaggcaccgtctcgtccccccacccgaggaaacctactccctgcacaggaagatggggggctccttcctcatctgctccaagctgaaggcccgcttcccctgcaaggccatgttcgaggaggcctacagcaactactgcaagaggcaggcccagcagtagggctgcgggccacgcccaggccggctccgcgggaactctctccctcagacaggccaaaaaccagtagcgaggtcgtggtgatgctctttttaactcctttgcccaataaggggggtggctgcctggagccccgtagccagcgctttccacggtttctgttgctaaatggttgtagggtgagaagtgcaagaatgaagatgaagccccactgctcggtcagtctgcctccgtgtgtcctctgaaataagcagatgaagatgaaagggcaactttgttttcttctttttcctgatgtgaatgttaagcagaagggagagagtccttactcccttccaatctctgttcagtgcaaaacccagaaacatgaacagatacg

SEQ ID NO: 60991 - DNA, 1794 bp, Homo sapiens
  misc_feature (1)...(1794): n = a,t,c or g
ttttttttttttggtttcttcaaaattttattaacaaaacccagggagaggaggcaaggatgagtggactccgcagccccaccaggcactgaacatgtcgacggggacagtccctctgataaaggcagatgggcggtcaaccggtggatgggcacagggagaaccggagaaacagatgagtggaggaacggacacacgggcaccgggcggctcccccatctggaatgcagggtgtaaggggtccgggccaggaggctcagcggtcggcactggagcgcaggtcggtagtgaggggatcgtgctggatcgtctggtgcagcatcagggccagcaatcccgcgcggtttgtcatggctgtgcgcacattgcgctcctgctcaaacagctcgtccagcttgtaccacacacgcacgcgctccaagtccacttccgcacgccgcagcttctcccagcagtaatggcgattgcactggcgcttgggcaggcggcagaagtcacccgtgagctcaaagacatcacgtacaagggggcacccgcatacctcgtcagctggcactttggggtcccgtgagtgctcggggcacagcacctggagccgcttacagtatgttttgctctgaggattatacacatcacagaagagtcgtgtggccccttcaatgcgtgtggggtacatggacccaaaggacgtctggctctcatacttggcgtagcagcgctccatgtggcgcaaggcaacacgtgggttgatggggtgcccacaggaaacacagaagatctgcaggtctgtgtcatcactgtcaccctcgttgctctcctcatcctcgcgcacagcctgctgcttggcacgtagaatgatggcctcaagctcatggaatcggcgttccatttcctgaaggcgggtgcgggcactctgctgctctcggcgaatgcgttcgagcagcttcttgccgtgctcttcagcaatgcaagggctctgctgccactgctggatgcgctgggggaggatctcgtagatgcggttggctgccagcttcatgccacagtcatctgagcaatacttggagctgggctgggcggggcgcacacagccggcccaggcactggggcagtgacgcagggtccttggcatcagccctctctgggtgtttccaattaaccttgtgcttcctgcttctgccgaagccgcttgtatcgctcctccttccttcttcctcagacttccttctcccgaacgcttcacatgcttcactttcactgccctcttccgcagcgcggggtcccaggaatggggactcttctgtgtcgctcatcccagggcaggccattgtcatcaaaggcccctgcacagaagtccttgataccaggtcaggatccagagggtgggtccctcatctgagagtggctcaggtgtgtctgtagcctcaggaggctccttgactgttgatgacgccactgccccctcatcttcacggatgcgccctaacttctgtgatggctgtggctgctgttgggtgggcagtggacggcggggccttggcagggactctgagggcgtcactggtgagagcgaggaagggaagtacttgtacgattcccgggcccgcagctggcactggcgcagccggcacttctgccggatcttgttggggcccccgaacttcttcatgtcccgacagaaatcacagtgaccacagtcctcagtgcgccgacatgcctcacactcaccacacatgcgggctgaccgtttgatctgctnctnctgctgctggtgatactgccngggtgtgacca

SEQ ID NO: 60992 - DNA, 1538 bp, Homo sapiens
ttttttttttttctggaaggttctcaggtctttatttgctctctcaaattccaggaattgacttatttaattaatccatcaacctctcatagcaaatatttgagaaaacaaatttatattcagattcttattttcagtagggaagtaagaagttgcagctcagtgcacgtaaagttgagacagagatggagacatccagccccacctctctggaacaagaaagatgactggggaggaaacacaggtcagcatgggaacaggggtcacagtggacacaagggtgggctgtctctccacctcctcacattatgctaacagggacgcagacacattcaggtgcctttgcagaaagagatgccagaggctcttgaagtcacaaaggggaggcgtgaagaaatcctgcatctcagtccctcacaagacagctgtctcaggcttttcaagctgtgagagacacatcagagccctgggcactgtcgctgcacgcagcctgagagtagctccctccttttccacctgaactcttcctcctacacatcacagcagcgaccacagctccgatgaccacaactgctaggacagccaggccagcaacaatgcccacgatggggacggtggactgggaagacggctcccatctcagggtgaggggcttcggcagcccctcatgctgtacatggcatgtgtatctctgctcttctccagaaggcaccaccacagctgccccactttctggaaggttctatctcctgctggtctggtctccacaagctcagtgtcctgagtttggtcctcggcatccccgctgccaggtcagtgtgatctcccgcagggtagaaacccagggcccagcacctcagggtggcctcatggtcagagatggggtggtgggtcacgtgtgtctttggggggtcagcgcgctccagcttgtccttcccgttctccaggtacctgcggagccactccacgcactcgccctccaggtaggctctccgctgctccgcctcacgggccgcctcccacttgcgctgggtgatctgagccgccgtgtccgcggcggtccaggagcgcaggtcctcgttcagggcgatgtaatccttgccgtcgtaggcgtactggtcatgcccgcggaggaggcgcccgtccggccccacgtcgcagcccgtacatgctctggagggtgtgagacccggcctcgctctggttgtagtagccgcgcaggttccgcaggctctctcggtcagtctgtgcctgggccttgtagatctgtgtgttccggtcccaatactccggcccctcctgctctatccacggcgcccgcggctcctctctcggactcgcggcgtcgctgtcgaacctcacgaactgggtgtcgtccacgtagcccactgagatgaagcggggctccccgcggccgggccgggacacggaggtgtagaaatacctcatggagtgggagccggcccaggtctcggtcagggccactgccccccagagcagcaggaggacggttcggggcgccatgaccagcatctcgg

SEQ ID NO: 60993 - DNA, 3611 bp, Homo sapiens
cccagactccagccctggaccgcgcatcccgagcccagcgcccagacagagtgtccccacaccctcctctgagacgccatgttcaactcgatgaccccaccaccaatcagtagctatggcgagccctgctgtctccggcccctccccagtcagggggcccccagtgtggggacagaaggactgtctggcccgcccttctgccaccaagctaacctcatgtccggcccccacagttatgggccagccagagagaccaacagctgcaccgagggcccactcttttcttctccccggagtgcagtcaagttgaccaagaagcgggcactgtccatctcacctctgtcggatgccagcctggacctgcagacggttatccgcacctcacccagctccctcgtagctttcatcaactcgcgatgcacatctccaggaggctcctacggtcatctctccattggcaccatgagcccatctctgggattcccagcccagatgaatcaccaaaaagggccctcgccttcctttggggtccagccttgtggtccccatgactctgcccggggtgggatgatcccacatcctcagtcccggggacccttcccaacttgccagctgaagtctgagctggacatgctggttggcaagtgccgggaggaacccttggaaggtgatatgtccagccccaactccacaggcatacaggatcccctgttggggatgctggatgggcgggaggacctcgagagagaggagaagcgtgagcctgaatctgtgtatgaaactgactgccgttgggatggctgcagccaggaatttgactcccaagagcagctggtgcaccacatcaacagcgagcacatccacggggagcggaaggagttcgtgtgccactgggggggctgctccagggagctgaggcccttcaaagcccagtacatgctggtggttcacatgcgcagacacactggcgagaagccacacaagtgcacgtttgaagggtgccggaagtcatactcacgcctcgaaaacctgaagacgcacctgcggtcacacacgggtgagaagccatacatgtgtgagcacgagggctgcagtaaagccttcagcaatgccagtgaccgagccaagcaccagaatcggacccattccaatgagaagccgtatgtatgtaagctccctggctgcaccaaacgctatacagatcctagctcgctgcgaaaacatgtcaagacagtgcatggtcctgacgcccatgtgaccaaacggcaccgtggggatggccccctgcctcgggcaccatccatttctacagtggagcccaagagggagcgggaaggaggtcccatcagggaggaaagcagactgactgtgccagagggtgccatgaagccacagccaagccctggggcccagtcatcctgcagcagtgaccactccccggcagggagtgcagccaatacagacagtggtgtggaaatgactggcaatgcagggggcagcactgaagacctctccagcttggacgagggaccttgcattgctggcactggtctgtccactcttcgccgccttgagaacctcaggctggaccagctacatcaactccggccaatagggacccggggtctcaaactgcccagcttgtcccacaccggtaccactgtgtcccgccgcgtgggccccccagtctctcttgaacgccgcagcagcagctccagcagcatcagctctgcctatactgtcagccgccgctcctccctggcctctcctttcccccctggctccccaccagagaatggagcatcctccctgcctggccttatgcctgcccagcactacctgcttcgggcaagatatgcttcagccagagggggtggtacttcgcccactgcagcatccagcctggatcggataggtggtcttcccatgcctccttggagaagccgagccgagtatccaggatacaaccccaatgcaggggtcacccggagggccagtgacccagcccaggctgctgaccgtcctgctccagctagagtccagaggttcaagagcctgggctgtgtccataccccacccactgtggcagggggaggacagaactttgatccttacctcccaacctctgtctactcaccacagccccccagcatcactgagaatgctgccatggatgctagagggctacaggaagagccagaagttgggacctccatggtgggcagtggtctgaacccctatatggacttcccacctactgatactctgggatatgggggacctgaaggggcagcagctgagccttatggagcgaggggtccaggctctctgcctcttgggcctggtccacccaccaactatggccccaacccctgtccccagcaggcctcatatcctgaccccacccaagaaacatggggtgagttcccttcccactctgggctgtacccaggccccaaggctctaggtggaacctacagccagtgtcctcgacttgaacattatggacaagtgcaagtcaagccagaacaggggtgcccagtggggtctgactccacaggactggcaccctgcctcaatgcccaccccagtgaggggcccccacatccacagcctctcttttcccattacccccagccctctcctccccaatatctccagtcaggcccctatacccagccaccccctgattatcttccttcagaacccaggccttgcctggactttgattcccccacccattccacagggcagctcaaggctcagcttgtgtgtaattatgttcaatctcaacaggagctactgtgggagggtgggggcagggaagatgcccccgcccaggaaccttcctaccagagtcccaagtttctgggggggttcccaggttagcccaagccgtgctaaagctccagtgaacacatatggacctggctttggacccaacttgcccaatcacaagtcaggttcctatcccaccccttcaccatgccatgaaaattttgtagtgggggcaaatagggcttcacatagggcagcagcaccacctcgacttctgcccccattgcccacttgctatgggcctctcaaagtgggaggcacaaaccccagctgtggtcatcctgaggtgggcaggctaggagggggtcctgccttgtaccctcctcccgaaggacaggtatgtaaccccctggactctcttgatcttgacaacactcagctggactttgtggctattctggatgagccccaggggctgagtcctcctccttcccatgatcagcggggcagctctggacataccccacctccctctgggccccccaacatggctgtgggcaacatgagtgtcttactgagatccctacctggggaaacacaattcctcaactctagtgcctaaagagtagggaatctcatccatcacagatcgcatttcctaaggggtttctatccttccagaaaaattgggggagctgcagtcccctgcacaagatgccccagggatgggaggtatgggctgggggctatgtatagtctgtatacgttttgaggagaaatttgataatgacactgtttcctgataataaaggaactgcatcagaaaaaaaaaa

SEQ ID NO: 60994 - DNA, 2583 bp, Homo sapiens
ttcaaagggaagctgcgaggattccaaggtcccacctccctcacagccaatgaggggcctgggagggaggagcttggtgcagcttgagcttctgagagaatcattcccggtagatgcagcggagtctgagctctgctgcatctgtcacagcagaacaaaattaaaaacacaacagtggaagagaaacgctgcagactatgggacgctgtaggactttctaaaacatttgctggggatttctgtgaagcatgatcttttaaaacgaattcttttggaagccggtttgggtaactgggaaaatgacacatatgctaaatgcagcagctgatcgagtgaaatggaccagatcgagtgctgctaagagggctgcctgcctggtggctgcggcatatgctctgaaaaccctctatcccatcattggcaagcgtttaaagcaatctggccacgggaagaaaaaagcagcagcttaccctgctgcagagaacacagaaatactgcattgcaccgagaccatttgtgaaaaaccttcgcctggagtgaatgcagatttcttcaaacagctactagaacttcggaaaattttgtttccaaaacttgtgaccactgaaacagggtggctctgcctgcactcagtggctctaatctcaagaacctttctttctatctatgtggctggtctggatggaaaaatcgtgaaaagcattgtggaaaagaagcctcggactttcatcatcaaattaatcaagtggcttatgattgccatccctgctaccttcgtcaacagtgcaataaggtaccctggaatgcaaattggctttggccttcagaactcgccctagtagaccacgcctatgaaacctattttacaaatcagacttattataaagtgatcaatatggatgggaggctggcaaaccctgaccaatctcttacggaggatattatgatgttctcccaatctgtggctcacttgtattccaatctgaccaaacctattttagatgtaatgctgacctcctatacactcattcaaactgctacatccagaggagcaagcccaattgggcccaccctactagcaggacttgtggtgtatgccactgctaaagtgttaaaagcctgttctcccaaatttggcaaactggtggcagaggaagcacatagaaaaggctatttgcggtatgtgcactcgagaattatagccaatgtagaagaaattgccttttacagaggacataaggtagaaatgaaacaacttcagaaaagttacaaagctttagcagatcagatgaacctcattttatccaaacgtttgtggtacatcatgatagaacagttcctgatgaagtatgtttggagcagcagtggactaattatggtggctatacctattatcactgcaactggctttgcagatggtgaggatggccaaaagcaagttatggttagtgaacggacagaagcctttaccactgctcgaaatttactggcctctggagctgatgctattgaaaggattatgtcttcatacaaagaggtcactgaattagcaggctacactgctcgagtgtacaatatgttttgggtctttgatgaagtaaaaagaggcatttataagagaactgctgtcattcaagaatctgaaagccatagcaagaatggagctaaggtagaattacctctcagtgacacattggcaattaaaggaaaagttattgatgtggatcacggaattatttgtgaaaatgttcccataattacaccagcaggagaagtggtggcttccaggctaaacttcaaagtagaagaaggaatgcatcttttgataactggtcccaatggttgtgggaaaagttctctcttcagaattctaagtgggctctggcctgtgtatgaaggagtcctctataaaccacctcctcaacatatgttttatattccacaaaggccatatatgtctcttggaagtcttcgggatcaagtcatttaccctgattcagtggatgatatgcatgataaaggttatacagaccaagatctggaacgtatcctacacaatgtccatctctatcacatagttcaaagagaaggaggatgggatgctgttatggactggaaagatgtcctgtcaggaggggaaaagcaaagaatgggcatggctcgtatgttttatcataaaccaaaatatgccttgctggatgaatgtaccagtgctgtcagcattgatgtcgaaggaaagatatttcaggctgcaaaaggggctggaatttccttactgtctataacacacagaccttctctttgggtcacccattgttttgtcacccagactggagtggaatggcacgatcatggttcactgcagcctcaacctcctggactcaagcgatcctcttgcctcagcctcccaggtggctgagaatacaggtgcacaccaccatgccctgctagtttttttatttttgtctttttgtagagatgtatgttgcccaggcttgtcttgaactctgaacaattctcctgcctcagcccctcaaagcgctgggattgcagatgtgagccaccttgcccagccagatcttt

SEQ ID NO: 60995 - DNA, 2628 bp, Homo sapiens
agatacacaacaaattttaaaagagactctgtgctgcaagaggatggattgagaataactttacttgtttttttgggaggaggttaatgggtgggaggggtgagaggggagaatctgatttacatacggacttgagactcccaaggcagtaccccgggtcgtcctctgcaaggttgccccggtgggtgcttgactcccagctggcgtcccgggagcccggggtggagtccatggagggagagcgaacggggaatgttggagggggcctggagtggggggagggggcgggtgaggcaaggcccggcccgcaacaagtcctgcctctgggccccgggagcgtcctccctgtgtccgggacgggcgagggcttaatgctatggacagcggagaggcctggcggggcacagcggggactgagggctcagtggggcgggtggcgcgattcggccaaggcccccgcggcccaacactttcgccgctgaactggtaagtgaacttcttcttcaacttcttgaactcgcccgtcttgccagtaggttcgcagcgcgcgcgccatcttctggtaggtcatcttcttgcggttgcccttctggatgccccagcgtgtcgccagcgcctccttgtgcttggacgagaactggaaggtgcccttgtccttgtccacccaccagatgctgtccttcatgtcgccgctgcggagcaggtccaacaggaactgccgctttgtcccccctgccttgaggaatgcagtgaagctagcacgggccttgtcctctgcacgttaccttacctcagagattacatgccttacctcgctgaatcatcacagccctaggagtacgtggcatgcctggatgtccctgccctggctgtggcatggcgggcccaaggctcctcttcctcactgcccttgccctggagctcttgggaagggctgggggttcccagccggccctccggagccgggggactgcgacggcctgtcgcctggacaacaaggaaagcgagtcctggggggctctgctgagcggagagcggctggacacctggatctgctccctcctgggttccctcatggtggggctcagtggggtcttcccgttgcttgtcattcccctagagatggggaccatgctgcgctcagaagctggggcctggcgcctgaagcagctgctcagcttcgccctggggggactcttgggcaatgtgtttctgcatctgctgcccgaagcctgggcctacacgtgcagcgccagccctggtggtgaggggcagagcctgcagcagcagcaacagctggggctgtgggtcattgctggcatcctgaccttcctggcgttggagaagatgttcctggacagcaaggaggaggggaccagccaggcccccaacaaagaccccactgctgctgccgccgcgctcaatggaggccactgtctggcccagccggctgcagagcccggcctcggtgccgtggtccggagcatcaaagtcagcggctacctcaacctgctggccaacaccatcgataacttcacccacgggctggctgtggctgccagcttccttgtgagcaagaagatcgggctcctgacaaccatggccatcctcctgcatgagatcccccatgaggtgggcgactttgccatcctgctccgggccggctttgaccgatggagcgcagccaagctgcaactctcaacagcgctggggggcctactgggcgctggcttcgccatctgtacccagtcccccaagggagtagaggagacggcagcctgggtcctgcccttcacctctggcggctttctctacatcgccttggtgaacgtgctccctgacctcttggaagaagaggacccgtggcgctccctgcagcagctgcttctgctctgtgcgggcatcgtggtaatggtgctgttctcgctcttcgtggattaactttccctgatgccgacgcccctgccccctgcagcaataagatgctcggattcactctgtgaccgcatatgtgagaggcagagagggcgagtggctgcgagagagaatgagcctcccgccagacaggagggaggtgcgtgtggatgtatgtggtgtgcacatgtggccagaggtgtgtgcgcgagaccgacactgtgatccctgtgctgggtccggggcccagtgtagcgcctgtccccagccatgctgtggttacctctccttgccgccctgtcaccttcacctcctggagtaagcagcgaggaagagcagcactggtcccaagcagaggccttgccctgctgggaccccgggagtgagagcagcccaaggatcccagggtgcagggaactccagagctgcccacctcccactgccccctcagcacacacacagtccccaggcggcctaggggccaaggctggggcggctttggtcccttttcctggcccttccttccccacttctaagccaaagaaaggagaggcaggtgctcctgtaccccagccccactcagcactgacagtccccagctcctagtagtgagctgggaggcgcttcctaagaccctttcctcagggctgccctgggagctcattcctggccaacacgccctggcagcaccagcagctcttgccacctccagct

SEQ ID NO: 60996 - DNA, 4593 bp, Homo sapiens
  misc_feature (1)...(4593): n = a,t,c or g
tttcgtggccagggccgagaagggcttcaggacgcgggaggcgcacttgcttcaagtcgcgggcgtgggaacggggttgcaaaacggggcctctttatccgggcttgcttccggcgtcatggctcaaagggccttcccgaatccttatgctgattataacaaatccctggccgaaggctactttgatgctgccgggaggctgactcctgagttctcacaacgcttgaccaataagattcgggagcttcttcagcaaatggagagaggcctgaaatcagcagaccctcgggatggcaccggttacactggctgggcaggtattgctgtgctttacttacatctttatgatgtatttggggaccctgcctacctacagttagcacatggctatgtaaagcaaagtctgaactgcttaaccaagcgctccatcaccttcctttgtggggatgcaggccccctggcagtggccgctgtgctatatcacaagatgaacaatgagaagcaggcagaagattgcatcacacggctaattcacctaaataagattgatcctcatgctccaaatgaaatgctctatgggcgaataggctacatctatgctcttctttttgtcaataagaactttggagtggaaaagattcctcaaagccatattcagcagatttgtgaaacaattttaacctctggagaaaacctagctaggaagagaaacttcacggcaaagtctccactgatgtatgaatggtaccaggaatattatgtaggggctgctcatggcctggctggaatttattactacctgatgcagcccagccttcaagtgagccaagggaagttacatagtttggtcaagcccagtgtagactacgtctgccagctgaaattcccttctggcaattaccctccatgtataggtgataatcgagatctgcttgtccattggtgccatggcgcccctggggtaatctacatgctcatccaggcctataaggtattcagaagagggaaaagtatctctgtggatgcctatcagtgtgctgatgtgatctggcaatatgggttgctgaagaagggatatgggctgtgccanaggttctgcagggaatgcctatgccttcctgacactctacaacctcacacaggacatgaagtacctgtatagggcctgtaagtttgctgaatggtgcttagagtatggagaacatggatgcagaacaccagacacccctttctctctctttgaaggaatggctggaacaatatatttcctgggctgacctgctattccccacaaaagccagggttccctgcatttgaactctgaaaggataacatgcccacctgcaaactcactgccatgaccctttctgtatattcaaaccccaagcctaagtgccttccgttgctttcccaaggaaacaaagagtcaaactgtggacttgattttgttagcttttttcagaatttatctttcattcagttcccttccattatcatttacttttacttagaagtatccaaggaagtcttttaactttaatttccatttcttcctaaagggagagtgagtgatatgtacagtgttttgagattgtatacatatattccagaacttggaggaaatcttatttaagtttatgaatataaccatctgttactgttctaaaaatgtttaaaagaaactcaatacagataaagataaatatgtgactattattgggtattacacttcacttctctttaatatttttcctccaactggagggcagacaatttttctgacttgcttttctctaggtggttcattttgaaaggggacagaaatataactaaatgcttccaggagaaaaattccaagagttacaatctggacttggtacctaaatatcattttttaaattcttgatgcctatttggactagaggtaaacatactttcagattggcctgtttttgtcggtaaggcatacagccttcagaagccaacatttttaatcaaaaacttataaaacatgatgatcattgtgaaaattctgagttgaaggatagtttaagataagctaacaataacagtctgtgttttctataaaataatctgagttttttggaactctttatttaaatatgtgtgtttttcagtattcaaataagatcaggaagccaattttctatgtatgaatatgctttaacctaggatttcagtccactctgactgactttctaaactttaacttgggtttttacagtgactatgcattagtgctgactctttggtataagccccataaaaaatttccctccctatcaatttatctgaactttggtcttttcacttaaattgtacagtattcctacttcctgtttaaaacggggagatgaggaaagggaatactatcctaaccaataacttgaacaaaaacactaaaactaaggcatttaattaggaaatgctttttattgaggaggtattatccagagttcatgcttagaacaaatgcatctttgcgtatcctagacttaacaattcatcagtttctgagaccacagaatcaggttttccgtagtagataaagactctctggtgcttcaaattctgttcaagtgttttgactcatcagcttctactctttctattactgcctttgcctggcttgttttgtctctttgcaactgattttgcaaaaaaaaattgtagctttaaaataacagggtctaagtattttaaatgtgcctatttcacagctctcttggtcacaaaaacatgctatttttattggaacttcaaaccaaatccccactgaggtgtgtactgggttcctgcagggtaggcaggtctcctattatctcctgtttagcaccaaaagagctaatattattggaaactgaccttttaaaggccactggcagtaggatttaaaaagcagcccactgctcagtttccaggatcagcttcctccttctgtcacttgtgtaagttggcactaccttgtgcctctcagattgctgaagtgctgctggtaagcatgtgcatgctctgcctttcttgtgaaagttttcaatcagcgatatcagcacttacagtaagaagtaaaagtagtgcacagcaaagctaatttgcctttgcctggggtgttcagcttgaaagaataaagctcatttggtttagttaaatgtcttactctactgtgcctatgcttttagctgcgttactaagcaagggaaaaataacagtttctctgagccagagaagacttgatcacagttctccaagcatcgtgatagcaatgcttaaccccaggaagatttcaaggcagggagaagaacatttcaaataagattcttgttaacccatttatgcctagtgttccattattggaatgctaagcttgtgggagtcatttacatcctactgctcaaagtcattgccaaggtctgatttttcacacaaaaaattgcaacccccagcataaatgggttagctactgtcatcagttagcaaattcatccacacaaacacaattagagtttggtttttttttaagcttttcaaaacttactaaactggcacaattttatatgtatgctatttgttgtatttatgcttaagagcaaaaaagttttgatgggattttaaattcaggcaaagcctacaacgctgagacaatcccctaacaacatggtagtaactaaagaaacttttatactaggcttcttagttttaaaaggaagtggcatcattgtttcagttctagtttgtatttttctctcagatatttttcttctttaaaaatctttcccagaagttggttcctagaaaactcaataccatcatctcttatctctatacagggactaggtaataaaaccttcaaaggttgtcaaaggtcatcaagcagtgttcatttatcctgtcacatgtttctgtttctatagtaatttagaaattgcaaatagttaacttttcatcatgtaaaaagttaacattatcctatttccatagataccatggacggcggtgtggcctgagttgtcagtctttaatcctgagtcatgtggctctcttttcatctttgatgtcagttccaattatttggcatcaaaaaccttcatggtaggtagagttttaggtaaaagtggatctagggttactttctttattaacatttcctaaataactgaattgagagacatactctgctactatgtcctcaggttaatttttgtctgatcttacgatgccctgccttttactagctactttagaaatagaaaatgtgaagagtgactatttacatgtatactcctttggctgctagaactcatctgtagtcctttattatttacactgaattccaatttcatttctgcttccgctaagtaagagcacctcattcctgtgttttctctactattgagctgtagacgaactgtttctctaattataaagcaaactgtttgggatattcagggaaactaccccaatgttatgttgtcatttaatgggaaaggctgggatcatatgtatttctatgttctgtaaagtatttgacttactagttctcaataaaattttattaggactataaaaaaaaaa

SEQ ID NO: 60997 - DNA, 764 bp, Homo sapiens
tttcgtaagtactcctggcttcgagacatggggctgctgggcccagggggcccatctcccagcatcttctgcgagctgctcatgtgccgtgcccgaccacccaggctggagtcctgccgcgtggtggccctcggggtgggtggcaggtggctggagggcttctcagtggtgggccccacctcagccgggccagtcatggcagcctgcagctcgtcactgagctcgctgtcctggaaggtggtcattttaggggactggcagtcggccggtgtgggctcaggcgggggcggcgactcgatggccatcacttcaagagactggggcgccttccggcgcagggggcccccctcatacttggcgtattcagccttctgcagctctgccagcttcctcacagcgagcatcagcttcttctggtgccccagcttggtgatgccgatctcctgcaggtcctcccaggtgatgtcggtgatgaaatcaatgttctcgtagccattgtccaccaacaccttgtagtactgggccaggccgatcatggacagccacacggccaggttagccttgccctccgatgctggctccagcttcttgggcggctgctccccatagacctgcccggcgtgggccactggaggctgggaccgggccacacctgcagagccttccggaggcttggcggggctgtcccccgggccggactcagagacggacttctgggaaagcaccgttgccaggagcttgacgccttcagagcccgcgtgtag

SEQ ID NO: 60998 - DNA, 5999 bp, Homo sapiens
tgtccttcgaggccagcgtggccctgctggaggcctcgctgaggaacgacgccgaggaaggaatgaatggagaatccatgatgtaaccacagcccccttccctgggcttgttcagaggcggtctcgcctgctcattgtgagccaagtacgctacttcctgaagaataaggtcagccctgatttgtgcaatgaggacggactcacagccctacaccagtgctgcatcgacaactttgaggaaattgtgaagctgctcctctcccatggtgccaatgtgaacgccaaggacaacgagctgtggacacctctccatgctgcagccacctgcggccacatcaacctggtgaagatcctcgttcagtatggggccgacttgcttgctgtcaactcggatgggaacatgccatatgacctctgcgaggatgaacccaccctggatgtcatcgagacctgcatggcataccagggcatcacccaagagaaaatcaacgagatgcgggtggctcctgagcagcagatgattgcggacatccactgcatgatcgcagcgggccaggacctggactggatagatgcccagggtgccacactgctgcacatagctggagccaatggatacctgcgggcagctgagctcctcctggatcatggagtgcgtgtggatgtgaaggactgggatggctgggagcccctgcatgcagctgccttctggggacagatgcagatggcagagctattggtgtcccatggagctaatcctcaatgcaaggacatccatggatgagatgccaatagacctgtgcgaggaggaagagttcaaggtcctgctgctggagctaaaaacacaagcatgatgtgatcatgaagtcacagctgaggcacaagtcatccttgagccggaggacctcccaccgccaggcaagcccgtgggaaaggtggtgcggcgaacccagcctgtcggaacaggacccaacctgtaataggaaggagtatgaagggaagaggccatcctgtggcagcggagtgccagctgaggatcagcggacctccacctacaacggggacatcagggagacccaggacagaccaagagaataaggaccctaaccccaggctggagaagcaccgtgctactctccgaatttcctaccaagatcccacgaggtgaactggacatgcctgttgagaatggcctccgggctccggtcagtgcctaccagtatgcgctggccaacggggatgtctggaaggtgcatgaggtgcctgactacagcatggcctatggcaaccctggcgtggccgacgccaccccgccctggagcagctacaaggaacagagccctcagacgcttctggagctgaagcggcagcgggctgcagccaagctgctcagccaccccttccttagcacacacctgggcagcagcatggccaggacgggcgagagtagcagtgaaggcaaggcccccttgatcggaggcagaacttcaccgtacagcagcaatgggacctcggtatattacacggtcaccagcggagatcccccactcttaaagttcaaggcccccatagaggagatggaggagaaggtgcatggctgttgccgtatctcctagtctccgtgtgatggaggagggagatgcctggggaggggctcctggaatccaggccagcccaacaaccctggctggggaggtgtcagggcagctggggagaggtgggctctgcttttcagaggaactcagaccccagccctcagctggctgcccatagcatcccatgtcccacgtcccgtggttctgcttcctgctgcatcgtctgccatctgacacaaggcctgtcgtggcctcctggttcactctgctgtctgatcttgggagggtgggcttgagatcccagctctattcttggtataaaggcttctccggatcagtacatgcatgtcacattaacacacacacacacacacacatatacacacacacacaagctcgatcagtgtgtgtaggaatgacatacctgggctcaggggaagcaagggggcttagaatttgtggggtattcccaaaaggatggaagttaagactcagagtctcattaccactgccaatgtggttttagcaggggaggggacctgctaagctgagacccatagtcctgctcagagttatcccaaagtctgagccaccagccacacctgacaggggtgagaagtcctcgctgtgttcagagggagccaggaatctacatgggtagatgagatagacacagacctgctccccgcagccttgttgagagccacacttctgcccatgccaggagccagctgtgtgaccatccaggggtggagggggaaaaccaggcaatttcgttcctggaatcaaccaaatcatgttttcctcttggatggaagtgtcaaaggcagaagggtgtgggagggggacaaggtcagtatttaccaaagtgtatctgattttaaaaattcctttagtctgtaaaactcctagagggagggaggtaactgaattcacttctttttgtggatcgtatcaaggtcactgggttttactggctggtgctgggaaaatgaagctaagtgaggagcttccattggaatgcttttccagggagagaggccagttaatttaaaaaaaacagtcgctagttaacagcgacagagcccagcaccctggggtctttgtgaatatccagactgtttcagcccagcccatctcagccaaccctccttagactgagctgtcagagcaagcaattaggggccagcctgcctccacctcccacccccttccacctccatcagtcatgtgtgcagagtcagtgctcgggatcccgggcccagcttttgcctttttggggatgcttggtgagacagatttgccagtcagcccttttgagttcccgcctcacccaggggctcccagcctgcacttgcaggagtggtgatgccccaagtctgcgaatccagggtgcacgtggtcaatatcccctcctgcattcaggagagccatggtagggctggagttgggtcttgcccagccctgcagtttcatagtcccagccttcctggtgctggggagggaggactgtgaatggctgttctcccctcactgctgagtctcccaggaccccctttggagatgcccatggcatgggcactgcccacaggctcagccagaacctcttggtgtacccgataagctgcaggttatcccttgctctgtgcgccttttatttgtccttaaactacctccttagagctctgaaggggtctcctagttccagattttaatttggggaacagatctgggttctttttaaccctcttctttctcagtctatgagaaacttgccctgaggggcacctgggctaggggcttgggactggaagaccatccccgccttgtgccacaactttggtcatgggatctgctctttgtcattcttagccccctactgtggcccccatagccccataacccagagagggagctggacttcagggagcctgagtgatgctttcccaggagcagggcagctggctggaccagaaagtagagggcccatgggagtgactgcacccttgttggctgctggaaggggagaggttctcagcatcaggccacctccaccccaatgccaggatagatgtattctggagtaggggtggaggcggcccaggaggctgaatgacaggtgcacagatgcttcccacgaccttgccatttggggtgggctcttcaacatctcaggctggggctggaacaggacaggatgatctaaaacacacgtaccattggctgtaaaacagtatgagcccagactgacgctgaaatccctcatgagccaaccttagctacaaggtagggagttctgagggaagccgcgtgctcctcaggagagagctgtttaggttttccgatctttttgctcaggggccaaacactgaaggcacgtactgcccaacccactgagcgcctgaggccattccctccttttccgcatgcctcctgcctcctgggctattcctctccacccagaaggctgggaatcccagctgattccctgacaggagccgacttcacacacaggtgactctcaggcattggctcatgttttcagccagggataaaccatcccttcttggggctttaagtccctggggagctttccctgtaggtctcctgggtgttgagagacaagttggagaccaacctccaatgaatgagccgcggtcattcattaattcactcacgtaatttactgagtagctgcaacatgccagcctctacgttaggttctgcggataaaggaggaataagacagagtcaggagaactgttccttgtggtttccgtcccttggggaccacaggcatcagcagtcccattcaagtcacctgaggcaaagtgtctgcatcttcgtccagcgaccctttgcttttcggctcctagaatccttagagtctgaattcctttagctgggaacagctgtcatggtcacccctggataacatttgccaccaagtatagatgctggatcttgggttccaggcagacatcatccaggtccatctggaactttcagtgatagctgccttcagccagcatctttgggggactctataatagcagcttgagatcagtgtctagaagactgttctgcaatttgctgccaaatgcatctcaggtttttaaagtcattgtttcttgctcatgggggctcatttattacatagtcccctcaccccactaatggataatgggaggaaaagttgctgcttccttcagcatcaaagcctttccttgggaatctgcctccctccatggcaggggtggattcgggagctgggagtaaccaggcaaagtcaaccagatgcctagctcctgctgagacccaggtcctatggcagctcctcattagattaaaggagaccacttccaaagcaggtgctgcatggctcaccatcatatgccccaaacaactgaaagttggcggttatcaccagactgtgagtttctggcaagtagcttggggaagctgaataaactctaggcccagggctactaaagacttcaggatagaattctccatcaaatatacagcataagtaaaactgctctgcactgtttaatccatttccaaggggcttagaaaagctaacaagggtgtgtcccctgtcctgccccaccggtttgctggctttgtaataacataagaccattgtggttgttggtgtcagataccttcccatcctgagctctctcacctacctgctctctctcctagagcaggatactggggtacttttaagaagggtgctccttttaagatgcccagaaaagctgtatttaactcttgctatttgtaacttggggatgggtctcccctgccccagggcacataagagcaaaggctccaatggtcagtggatgactctgcaaaagtgaccccctgtgccagaagctatagccctctccccaacaggtctctcttgttggccagagggcctgcttcccatgggcattgcaagtgccaccgtgcggggcctggctcctgcacacccaggaaaagtctgcagacccccagcccctccgcaataattcaccagaccagaagccactgggtgtacagagaacacttaaaaaaatgtattttatgtgaaaaaaaattaaaactctgtatacctgtatccagcagctttgtgtaaaaatggcaatcaagagagtcgtaatatatttaaaactttttttaaaaaaaatcttcgcagatctttgatatcgtactgaggtaacttccacgtagccccttgccactgcggcaccggtgggccttgggtccaaaatctgtggctcagccacatcccaaagggggcacatgtccctggagttgcttccagcttgccaagggcctgtgacagaattcgctgttaagagtttttaattaaaattattaaattccttttaataaccaaaaaaaaaa

SEQ ID NO: 60999 - DNA, 3790 bp, Homo sapiens
tacggctgcgagaagacgacagaagggggcggcggcgcggtgtaccttgggatagggagcgatctccgagcgaggcggcaagatggacgcgggatttttccgcggaacaagtgcagaacaggataatcggttcagcaacaaacagaagaaactactgaagcagctgaaatttgcagaatgcctagaaaaaaaggtggacatgagcaaagtaaatttggaggttataaagccttggataacaaaaagagtaacggaaatccttgggtttgaagatgatgttgtgattgagtttatattcaaccagctggaagtgaagaatccagactccaaaatgatgcaaatcaacctgactggatttttgaatggaaaaaatgctcgagaatttatgggagaactgtggcccctgctgctaagtgcacaagaaaacatcgcgggaatcccttctgctttcctagaactgaagaaagaagaaataaaacaaagacagattgaacaagaaaaactggcatctatgaaaaagcaagatgaagacaaagataaaagagataaggaagaaaaagaaagcagcagagaaaaaagggagcggtctcgtagcccaagaagacgcaaatccagatctccttcccctagaagacgatcttcccctgtcaggagagagagaaagcgcagtcattctcgatctccccgtcacagaaccaagagccggagtccttcccctgctccagaaaagaaggaaaaaactccagagctcccagaaccttcagtgaaagtaaaagaaccttcagtacaagaggctacttctactagtgacattctgaaagttcccaaacctgaacctataccagagcctaaagaaccttctccggaaaaaaattccaaaaaagaaaaggagaaggagaagacccgaccacgatctcggtcacgctccaaatcaagatcccggacgcggtcccgctctccttctcacactcgacctagacggcgccatagatcccgatcaagatcgtattcacctagaaggcggccaagcccaagaaggcggccatctcctcgaagaagaactccgccaagaagaatgcctcctccaccaaggcatagaaggagtagatctccagtaagacgaaaaagacgttcgtcagcatccttgtctgggagtagctcatcatcctcttcatctcgttcacgggcaccaccaaagaagcctcccaagaggacatccagcccccctcggaaaactcgtaggttatctccttcagcaagtcctccaaggcgaaggcacaggccatcacctcctgcaactccaccacccaaaactcggcattcccctacaccccagcagtcaaaccgtacaagaaaaagtccgtgtgtcctgtgtccccagggagaacttcaggtaaagtgacaaaacataaaggtactgagaaaagagaatccccttcaccagcacccgaagcctagaaaagtagagttatctgaatcggaagaagataaaggtggcaaaatggctgcagcagattctgtgcagcagagacgccaatacagacgacaaaaccagcagtcttcatctgactctggctcctcctcctcctcagaagatgaacgacccaagagatcccatgtgaagaatggtgaggttggcaggcggcggagacattccccttcccggagtgcttctccatcaccacgaaagcgccaaaaagagacttcccctcgtggtagacggaggagaagtccatccccaccacccaccagaaggcgacggtctccttctcccgcccctcctcctcgacggcgcaggactcccacaccaccaccacgacgaaggactccttctcctcccccacgtcggcgctcaccttctcctagaagatactctcctccaatacagaggagatactctccttctccacctccaaagagaagaacggcttcacctcctccccctcctaaacgaagagcatcaccatctccaccaccaaagcggcgggtctcccattctccacctcccaaacaaagaagctccccagtcaccaagagacgttcaccttcattatcatccaagcataggaaagggtcttccccaagccgctctacccgggaggcccgatcaccacaaccaaacaaacggcattcgccctcaccacggcctcgagctcctcagacctcctcaagtcctccacccgttcgaagaggagcgtcgtcatcaccccaaagaaggcagtccccgtctccaagtactaggcccattaggagagtctccaggactccggaacctaaaaagataaaaaaggctgcttccccaagcccacagtctgtaagaagggtctcatcctcccgatctgtctccgggtctcctgagccagcagctaaaaagcccccagcacctccatcccccgtccagtctcagtcaccgtctacaaactggtcaccagctgtaccggtcaaaaaggccaaaagcccaacaccgagcccatcaccgccaagaaattcagatcaggaaggaggtggaaagaaaaagaagaaaaagaaggacaagaaacacaaaaaggataagaagcacaagaagcacaaaaaacacaagaaggaaaaggctgtggctgcagctgctgcagctgctgtgacccctgcagccattgcagctgccacaaccacattagcacaggaagagccagtggcagcgccagagccgaagaaggagactgaaagtgaagctgaagataaccttgatgatttagaaaagcacctgcgtgaaaaggccctgagatcaatgaggaaggcccaagtgtccccacagtcttagggggaaatgtttgttatgatgtaaattttatttggtttgtacgcagttcaatttcaaaattgctaaaatgtgtttgagctttagactataacatttgttgtaataattgctaggttgaagttcaacatgtaaaaaaagggggcatggatttacattgcaaaaggtgtccacagtgtattagtgacattctttcattgacagctgacataattcattgagtgaaatattttaagccaaaaaaaaattccctttttaaaaaagggggtttaaatactgttggcatttttatggttcctttaaatgccctagctattcccagaggggtttttttgtttgtttttttggttttgattttctttttgtttttctttcttcttcttatttttttcatttgagtcttagctcccatttaagttatgcttctgaccttgtatggtctgtaagcttgcccagaaataagaccactgttttgaactaccacaaaagtataaatgaatattttaatgccacaatctttcctgttgcctgtggagtctctgctgaaatgaatcaggattcgagctctaggatgagacagaaaatgaaagcatgttgtttgccaggacactgtgggtttatattgatgtgtaacaagttgatttggaacactggactctcattctgttattctggttttgttttttttgttttgttttttttcttttgtaaaggcaatgagctagtcccagaaaggatccttcagttacatacaatttgtttaatgaaatgtcatggctctgttcatatttttgtcttgttcttccaattggtatatacaactttcagagcctcttgtatttggaaggctggaagggcccagactttggaatagtgtcttggtttcactgtttttgttttgatttttttttttgttttgatttttttttaaactaaagctatataaagcttgtggattaaacagaataaatttctaaatttaaaaattttaaa

SEQ ID NO: 61000 - DNA, 1860 bp, Homo sapiens; identical to SEQ ID NO: 60874

SEQ ID NO: 61001 - DNA, 964 bp, Homo sapiens
tttcgtggctatgcccggacagaggatcgcctcgctggcctactctctcctcccgtacggcgccggaatcccagctccacttaccaggccgcggctaccccgccgtcccccccgactcccgccaccccgctctctcaggctcttcaggatccaagtccgtaggccctttaaggggtctagttgccgtttgcgaggccctgggactttggtcccagacagcggggatccggatggcttccgtgcggatccgagaggccaaggagggagactgtggagatatcctgaggctgattcgggagctagccgaattcgaaaaactctcggatcaggtgaagatcagtgaagaagccctgagagcagatggctttggagacaatcctttctatcactgtttggtagcagagattcttccagcgcccgggaagctactggggccctgcgtggtgggctatgggatatactatttcatctacagtacatggaagggacgcaccatttatctggaggatatctatgtgatgcagaatatcggggtcaagggattggttccaaaataatcaaaaaggtggctgaggtggccttggataagggctgctcccaattccgcctggccgtcctggactggaaccagagggccatggacttgtacaaggccctaggagcccaagatctgacggaagctgagggctggcacttcttctgctttcaaggagaggcaacgagaaagttggcaggaaagtgacgccatccctaggaggatctctgtcttgagtttctccttccccatcagctgaagcactcttcagagactacgtccacagacactgatgctgaggcctccctggaggaaggagggttaggggtgcctatcctcaagtattggaagagcagaattgagggagagacctttcttccttgttgagggtgaaaaataaataagaattacatgtcctgaaaaaaaaaa

SEQ ID NO: 61002 - DNA, 1673 bp, Homo sapiens
gccaggcatggaacaccactcggtgccggataggccgaccccacctggactccacccccgcagcatgcctcgaccgcggtccgcaggtggaccgcctctccccgccccccagggtgcgctggtcccgggcgcgcgctcatacctccgcatgccgggcgtggtcgggtaagtccccggacgtgacccatgcccggggagctagtctccgcccttcgctcttacggatcccctcggagtacgccgcaccatgcagctcaggctcttccggcgcctccttctcgccgctttgctgctggtgatcgtctggaccctcttcgggccttcggggttgggggaggagctgctgagcctctcactagcctccctgctcccagcccccgcctcaccggggccgcccctggccctgccccgcctcttgatccccaaccaggaagcttgcagtggtcccggggcccctcccttcctgctcatcctggtgtgcacggctccggagaacctgaaccagagaaacgccattcgggcttcgtggggcgggctgcgcgaggcccgggggctcagggtacagacgctattcttgctgggagagccgaacgcacagcaccccgtgtggggttcccaggggagtgacctggcctcggagtcagcagcccagggggatatcttgcaggccgccttccaggactcctaccgcaacctcaccctaaagaccctcagcgggctgaactgggctgagaaacactgccccatggcccgatacgtcctcaagacggacgatgatgtgtatgtcaacgtccctgaactggtatcagagctggtcttgcgagggggccgttgggggcaatgggagagaagcacggaaccccagagagaggctgagcaggaaggaggccaggttttgcacagcgaggaagtgcctcttctgtacttgggccgggtgcactggcgcgtgaacccctctcggacaccggggggcaggcaccgcgtatcagaggagcagtggcctcacacctggggcccctttccaccctatgcctcaggcacggggtatgtgctgtcagcgtctgctgtgcagctcattctcaaggtggccagccgggcaccccttctcccattagaggatgtctttgtgggggtaagtgcccgacgaggaggcctcgccccaacacagtgtgtcaagctggctggtgccacccactacccgctagaccggtgctgctatgggaaattcctgctgacgtcccacaggctggacccctggaagatgcaggaagcctggaagctggtgggtggctctgacggggaaaggactgcgcccttttgctccctggttcccagggaagtccctgggcatcctgcggtgtcgaagcaatagccctggcttcagagctgagagtgcctggggcccacaggaaaggcaggaacaggaccttctctctccccaggcccaacgcaggggccctcactggctgcagctgatctgttttccttataccagatcctcagtctcactaaagacagcgatatgggagacacccagggggcctggcccgccagcccaaaagatggtcatcgggaagagaaaaagaaaaaaatgctgcagttgttctctcaagctagggcagaagaggggtgtcaagctcctcaataaacttgtctccacttcaaaaaaaaaa

SEQ ID NO: 61003 - DNA, 1312 bp, Homo sapiens
gtgggttgttcagccactgaattacccagctcgccacaattggaaaccagcatatgagcctgaaagaaacgcggtattgccaacaccctacccctaaggtcatcatagcattgaagacgggcttctatacatcaacgatctagcatatggtaccatgtccatacgcttaacgacgcatgcagctaatacctcataaagataagtgcgcgctaataagacttttttttctttttcaaacagtaatgtttaattgagcacctcatctccaccctgactctcagggctgtgacagctgcacccacagcaacctgggcacggaggcaaggggggcccacaagtgagggagggcacacaaagtcagagggcagcaaggaggctgaggggcagtgggagtgccaggagcagggtcctggatggggctggcagggccagggcctgcccgttgaggcagtcccagatccagtgttggtaggaggagacctgtaggtagatgggtgggggcctcgctcttctggcagcctgcaccccagctcaccaatcccaccaggtagcagcgtgccctccatggagcagaccaagggctctccagttagctcatagcagaacttctccctgtgggtgtcctccgcacacatcatctgggacttgatgatctgaaccagagtggggattttggtgaagttgtggtagaaattgtcacactctttgttgttcaggatgatgacttccttctcctgaatggtccggaactgaggccacatgccgtcagccttggaaagtccccagcccgtcacagtgcagcgggaatggtccttcaacacatagtccgtgccaggcaggcagatgggccgcacgtaattgctgtacttgagttcctgcttgagcttgaggaggccgatgtcgttggcctggcccacccaggaccagaaccgctgggcccggtacctgctatgcatgatgacctggagcaccgggacatcggaggcggtctgcgtcatctggtcaatccacggactccccaccctcactgagtagataacatcacgccagatcaggcagtgggccacagtcagcacccactgggaggcaatgatggtgccggcacagatgtgtgtgccattggcccgcacgctgaccatccagggccaccgccgagccacggcttctgggtccctgagggtggggtcctgctcgtaggaaaagccacaggagcggtatgggtcgactttgccttcagaaactgggaattgggtctccatggtggtcgagggcagaattcctccgctctgactaaggtatcgaagttttatct

SEQ ID NO: 61004 - DNA, 1350 bp, Homo sapiens
tgttggttggagcgagcatgtgggtctgcagtaccctgtggcgggtgcgaacccccgcccggcagtggcgggggctgctcccagcttctggctgtcacggacctgccgcctcctcctactccgcatccgccgagcctgcccgggtccgggcgcttgtctatgggcaccacggggatccagccaaggtcgtcgaactcaagaacctggagctagctgctgtgagaggatcagatgtccgtgtgaagatgctggcggcccctatcaatccatctgacataaatatgatccaaggaaactacggactccttcctgaactgcctgctgttggagggaacgaaggtgttgcacaggtggtagcggtgggcagcaatgtgaccgggctgaagccaggagactgggtgattccagcaaatgctggtttaggaacctggcggaccgaggctgtgttcagcgaggaagcactgatccaagttccgagtgacatccctcttcagagcgctgccaccctgggtgtcaatccctgcacagcctacaggatgttgatggacttcgagcaactgcagccaggggattctgtcatccagaatgcatccaacagcggagtggggcaagcggtcatccagatcgccgcagccctgggcctaagaaccatcaatgtggtccgagacagacctgatatccagaagctgagtgacagactgaagagtctgggggctgagcatgtcatcacagaagaggagctaagaaggcccgaaatgaaaaacttctttaaggacatgccccagccacggcttgctctcaactgtgttggtgggaaaagctccacagagctgctgcggcagttagcgcgtggaggaaccatggtaacctatggggggatggccaagcagcccgtcgtagcctctgtgagcctgctcatttttaaggatctcaaacttcgaggcttttggttgtcccagtggaagaaggatcacagtccagaccagttcaaggagctgatcctcacactgtgcgatctcatccgccgaggccagctcacagcccctgcctgctcccaggtcccgctgcaggactaccagtctgccttggaagcctccatgaagcccttcatatcttcaaagcagattctcaccatgtgatcatcccaaaagagctggagtgacatgggaggggaggcggatctgaggggctgggtgcaggcccctcagttggggctcccaccttccccagactactgttctcctcactgcctcttcctattaggaggatggtgaagccagccacggttttccccagggccagccttaaggtatctaataaagtctgaactctcccttccaaaaaaaaaaa

SEQ ID NO: 61005 - DNA, 4406 bp, Homo sapiens
ttttttttttttctccaaaattagtttttaatacattcaggtaggttatacaaagagttggtcccgaggcctgggctgaggcctgggccctgggaagtgacagcagccctgtgtagtgttttcaaagatcaggcgtggggacccacaccttggcctccaggcctaaggaggagtgttacgtgcagtagcacccgtgggtgtgatcccaaccaggactgggtctgcctgggtgctccacacaccaccagggcctagccctggctctgcccattgactctcccttaacttcctctgggccttggtgttctcctctgtaaaatggggtggagagagtggcattttcactttctcgcacattactgagcccacatcatgagccagactgtgggccaagcacaggtaagatgatgaagacagcaaaacaaggtcttgagttggtcccagcacgtccattcttcccagacagctcatgactccatggtatgagggatgggggtcatctgggtgaggctttttacctgtttttgtaagagggaaaaaagatccttgcatgatgaggcacagaaaggaagtttggagccagcattatcttgtgatgtgatagctgagagaggacatcactctggtccaacccccaatctcaccccacaaataagggctcttttttcccccagaggctctgtataagctctccacaagtttcattctcttcctaagcctcagtttccccatctgtgcaatggggaggttggattccatagtctcaaactccaggctctgctcaatagaggaaaagggaatgagagaatgcaagagcacagagagaacaggagaacccacaccagggtggaaaggaagggaggagggaaacaggcagagaaggaggagagcgcctgcagctgcctgcctgggagagaggagagagcaggtgtgcacagcacaggatgcttccagaccctgctcgggctatgtggggccacttcctgtccacttaacggcctgcagcccctgcagtggtaaagatcaggccctggagacagaaggatgaaggtttgaatctcacctatggcattagttagctggggccctggaaggagattttcagaacttcagtttcctcttttataaaacggggataaaatatagagatgtcacataggggcagacacaaggcttggattcaaatccacatctgccaagctgggtgcaaaacagaaccagatatctaaggttttagctcctggctcagcagccaaggtggggctgcgatggagaagtggggctgggcagggacggtgcttaaagcagcactggggtcagggtatgcaacatgagagtgccaggaagggagaaggcaagtccagagcaggagacggaatggtccagtgctgggctggaccccttaaccagaccctgctggagccgccgtggcccacctaacaacaccagatccgagacacactcgtacagctccaattctctcttccggtcctaagcttttcattttcagagagactgaaagtcattctcagaagacgtgacaaacagtctgcttggaaatgtctcagacaaatcctcctgggcttggccctccctcaccctggcacagccggggcaggactcaccgcaccaaaccagcggggcctgccgagctctggagccctgggctttcacacctcaggccctaagcacactgcgtggcggccacgtggctctgcagcactctctcctaccagactgggagattcttgagggcgggaatgtatctcatttcccagcattcccagtgcccagagcagggtgtggcacaaaatacatgctcagtgaagatttgttgatctgacaggtcaacattattctcggctgtcccctgaaaccgcccaaacttctggcttccacagctggacccaaagtgcagcccgggaagggggtcacccactgatgcagcaggcggcagagaaaggtgtcctgggctgtaatttggagaccagagttctgggatcccggatcactgtgtgaccttgagtcagtcctcactcttctctgtacctcaggctcccccactgacctagagtgtctcccggcttctttaggctttatactgttggttaaacttctgccggcggacgcagcagcaggcggccagcgtggtgaggaggatggcagagaccagtatgaaggtgaggatgatgatgaggttgatgttcttcagtccccccttctcacagtcctcgggacgcacgtggctcagggacacctcctcctgggagctgaagcggcagatcaggtcctgggtggcgtccacgtccacacggccctggtgcagctgggctgccagccagccattgccgcagcagctgagtggattcccctgcaggtagaggcgccggaggctggtctccaggccacccatggcactgcctggcaggaggctgaagctgttgtttcgcaggtccagcacctccagtgacacagcctgtgtccaggcgggaaggtggctcaggcggttctcggcaagattgagccgcttgaggcagatgaagcagggcaggtccacctgcaggaccatcagcccgttgccctgcagtgccaggacctccaaggaggcctccaggcctcccaaggcccccgtggccacctccagcccaggattggaagaaaggtccagctcagtcagtggggtgtggaggaaggcccctgccctgagcagctctatctcattatccaccaggctcaggctgcggagggaggtgatgccggagaaggcccacacagccggaagggcccaggctcatctgggcccccacaggggctgactcggttcccctgcaggttgagccgctgcaggctggccagattggcaaaggtgtatgggggcaggtcccgcagggcattgccctgtaggagcagcgtccgcagagacccccagggctctggcgcccagttccagtgtctccagggcattgtggcttaagtcaaggagcatcaggcagggcagggagcctaagcgccgggcctcaaaggtccgcaagcagtttctgctgaggttcaggaagcacagggaggtcaggtgctcaagaaagctgtcggggatgagctcaatctcattgtagctcaaatccagattcaagagctgggaaagggggcggccgctggcattcccgctgggggctggagaggggcagggctgaccagccctcggaaggtgcgtggatgcccttgctgtcctggggtggccctgtggggagccggatgaggttgttggacaagttcaggtagatgagtctcgggagcgcggccaggtcggggaaatggagcagtttgttctcccgcaggtcaagccaggtgagctggaactcagcctggggctggcgaggccgtctgaaaggcctcgatgctgttgcagctcaggtctagcacccgcagctgctggaggctgaagtcggagatgcaggtgagggaattcctggagaggttgagatgggtcaggcggggcaggccctcgaaggcgccatcctcgatgtccatcagcacgttgctatgcaggtcaagctgctccagcgcaggcatgtcccggaaggtgtggcgggtgaggcgagtcagactgttctccgccagtgagagggtatgcaggctgggtgcctcccccagcagccgctccagcaggccgctgtacaggctgttcccagacaggtccagggaggtcacgcgtggcagggggcccaggccaccagcactcagcgcagtggccatcgccagccggttgtgagccaggctgaggtgctccaggtgggtcagggcctggaaggctcctggctggaggaagctgatctcattggtgctcaggtccaggtgacgaagtgccgtgtagaagcccaggggtgaggccaggatactccgcagctggttcccagatagatcaagggtctcagtgtctggcgggagcaccgaggggacctggaagcaggcccagaacctggcacgagaccttcttgtccaccatcttacagggcactttgtcttggtgttgtgcagccaggcctagggtcagcagggccaggagcagcaggatctggggtctcatggctccaaagtcacacaaggagaaaatagcagggtcacgatcagaatccagttcatctgtctccaaagcaaatgttcccactataccaaatcaaggtctccttccctaagccctgccaacgacccctcacacgcaggagcagggcagactagctcacagtctggcctctgaggtcctctctccctcctctcggcctcagctgacttactggcagagtggggtcctgggagagctgctgcggacgttcctgtcaagcagtgaatcactaagggcaagcctcgatctggagacatgtgcatcccacgggggaattagaccttaa

SEQ ID NO: 61006 - DNA, 1835 bp, Homo sapiens
aagatggaaaggactgagatgatgcccacaattaactcccagctggaatttaaaagtaagccttttcctttagtctcctcttcccggtggttggtaaaaagaggtgaattgacagcctatgttgaagacactgtgcttttctcaagaaggacatccaaacagcaagtctacttctttctctttaacgatgtgctcattatcaccaagaagaagagtgaagaaagttacaacgtcaatgattattccttaagagatcagctattggtggaatcttgtgacaatgaagagcttaattcttctccagggaagaacagctccacaatgctctattcaagacagagctctgccagtcacctctttactctgacagtccttagtaaccacgcgaatgagaaagtggagatgctactaggagctgagacgcagagcgagcgagcccgctggataactgccctgggacacagcagcgggaagccgcctgcagaccgaacctcactgacccaggtggaaatcgttaggtcatttactgctaagcagccagatgaactctccctgcaggtggctgacgtcgtcctcatcttatcaacgtgtcagcgatggctggtatgagggggaacggactacgagatggagaaagaggctggtttcctatggaatgtgccaaggagataacatgtcaagctacaattgataagaatgtggagagaatgggacgcttgctaggactggagaccaacgtgtagtctctcagatggtcttttgttactgcaagatttgcacgacacttaccgggctggttggttctgggctagttttattgttaattttgtcacagcctatttaattaaaagaacgaaaacacttgcctttaagcttgccaggttgttccgctctctcatgagaagagcttgggatacagtgagtttgcacagcttcagtttttacctaaccacacacttggcagacctcctgaggtacacagaataggctggagcagttcacttcagggatcaggttcatctctggttcctcctagtttcaccatgttctggcaataaaaaacacatattatatcctggttttctctatccttgcattactaaggtgactgtctctctttatacatccttgtatggttctcccagtattagcaagattgtatatctgtaaagaatgtccagttttgtaaatatttccctgcctttttttttctttttttacatctgattttaatgcttcgttaacttcaaaaggaactggtagagttcaaaaggtgagctgttgtttttctaaacctcttcccaggaaggggacattgacacttgaatttttgtcacctttttcctcattagaaggaaagtagaaagccttactgtaggatttttaaaaaaaaatccatctcaccccatattggtcttaaataagtatagactaattaacctaagctacctttaacaacgtaaaatttagatgggttcatatatgtgagaaaaacctgaatataggacaggggtcctacttttttccccacctctgtcgcccaggctagagtatagtggtgtgatcttggcccactgcaacctctgcttcctaggttcaagtgattctcctgcctcagcctcccaagtagctgggattgtaagagtatgccaccacgcccagctactttttgtatttttagtagagacagggtttcatcatgttggccaggatggtctcttaactcctgccctcaagtgatccaccagagaggagatcctcggcctccccaagtgctgggattataggcatgagccaccgtgcccagcctactttctaattaattaaaaaaaaaa

SEQ ID NO: 61007 - DNA, 4600 bp, Homo sapiens
ttttttttttttaggggcaaactgaagttttatttagaatgaaaaaatagatcaacaaattacagattttaaagagctaaaaaattcccacagatgtcacggagtccaggggaataacagcctggttggaggggcgctctccgcctcttctgtatttttggctctctctgagggtagtggttttaccagcatgctttatcaaaaactaaactatcagggagagtctacaaaaactcctgctagagtaaggtcagattccagaccctgtcgcacctctgaagaccttggtccagttccttccagggtggcttcacgccttgccatccctgcctccctgcggctgcccctgtgcccaggccccgccaacgccgtcaaggccccctcggccacgccgcgtccccgcccagcatctcggatgccattccttcccggtggcacctgcccaggctttgccgaaatcgaaggcaacaagagggggaggtgggcttaagagtgcctgcccggccgccacctgtcttggaggtggagggaatggccgaggggtggctcccccagctccccacctttgagcatctctcaggctgggaaagggcaaagggccacatgaagccagcaggcacttcagtgccacgtccccagagggacagtcctcccacccaggaacccctggctgcccagaaagcaccaccggcaaggccgcctccaccgcacccgtgagaggactcggcagctgtgaaggaactgggagattctgcagatgggccgaggtcagggcttccaggctaggaagaagtcttccagatgcctagcttcaccagtcccaggagaaggaaggaaggggcatgggcagaggcctggcaggggaggaggaagaggccaaccctgtacacaggaccacaggacagggtggaggactgtcccaggagtccctccacaacaggaggcctggtcccagtggcccctctctctaggggttccctgctgccaccatgtccacagaggagtcacagcttccatggcccagccacaagttctggcttaaagtcagaacaggagagaggccctcaactccagtgaagcatgcagctcctttttcaaccccaacacctctgacgaagcatgtttgttatatgaaggcaaggatcatgatggcacgaagcatgttatatgaaggcaatgaccatgagcacgaagcatgttatatgaaggcaatgaccatgatggcagctgccaccaaaatactttaccagcacacccttctgactgcagcatttctcagaagaaaggctcaggtgaaaagttcctggaattttccagatcttcagtggatctattagcattgccacataccaaaataaggaatttccctaaaggttaacttctaatccagcaaaactttgctcatacctcaaaacggagccaagactcagactaatacacacaaatcaaaatggacaaaagcaagtcttgactcgcttgacaaacagaatagacacaaaagaatgtacaaccaatacaattccagaatgtccctgaaaggaaaaagcaccctgtactgacatgaaataaatgttaaccttgagattacactaacaatgcctttttttaagagatggtctcgctctgttgcccaggctggagtgcagtgtcatgatctcggctcactacaactcccacctcccgggttcaagagatcctcatgcctcagcctcttgaatagctgggattacatatgcatgccattgcaccccgataatttttgtatttttagtagagatagggtattgccatgttagccaggcagtctggaactcctgggctgaagtaatccccctgccttggcctcccaaagtgctgggatcacaggtgtgagccactgcacccagccaggccaattctttatcaggaatttccaattcccatttccatttaacaagagactaactaactgaattaatcctgccttctaatgtttctggaacacatcctctaccttcgctgccggctcctctgatgtcccaagggccttttggtagcagttagcatcatttagcaaatacagagtggaaagagtgtgccggaggcccgggcttgggtgtgctgtctgctcctgtggcctgtcaggcaggtccagggagacacaagggaagcctgagggaccctgactccccttgaagaatttctccatacagcaagacagtgtggctttatcccagatccctgactcctaaaaagagtctaaaaagagctaagttctctctaaattctttaatggttcatgaccaaattcttggttctaagactttgaatttttaaataatagatgtgcagcttgacttgggtaaaaactagaaacctgttctcccacccaggcctttgctttagtaattatcaagctgacggtctggccgggcgggcaccaggagtaccgaaggctcacttgagtcattagtgaacatgtctgactgagtctgggctgagggacctggctctgcattttgtaaaatagatactagcagattgtcccaagatgtgtacagctcattctcacagcccagcgagggcacttactccacaaatgcgtggccacaggtcatcacctgtcctgtggccctggcgagcctgatccctcacgccgggcacccacacggcctgcgtgccttctagacttgagttcgcagctctttaaggagctctcgggccagtttttctgatctagggctttcaatgccaagacgattccatctgtacaaggtctggtcaagaaagccaatgatctcgtgagttatctcagcagtgtgagccatcagggtgatgacatcccaggcgatcgtgtggcctccaggagcccagagcaggaagttgaggagaaggtgcctgatcagctgttgtgcaggagctctgaggtctgtgtctgtgccctgtcctgctaccgtctgcaggtcctgggctgagaggctgctgcttctggacattgccaggaggtggcccagcacggccttcacctggaccatagtctgtgctctctgctgcctcccatcacgggggccgtagtagaaggccaagagccacagcagggccgtggggggttcggctgccgacatcagtaattgctctgccaccatctcagcccatcctccgaagtgaatgaacaggaaccagctctcaaagggacctccgcaggacccatgagtctggtcttcaactgcttctctgagcagttcagaaatatgcttcagtgtctggagccagtgtccccgagggatatcttgaggggtcttgcagcagcaccatggcaaagagatggagaagtgtaaggaaagtagggtcttgagtgcaaaccgcagctgcttgcttgctttctccagagcttctacaaagcactgcgttaaacacctgaatagtggctatgatttccagggccccatcggtttcccaggagtgcacacctgaacatctcatcaacaacccggaatatggcagggtggcaggctgcttgaggcagcgatgaatcttttataaagcattcgatccttctcagacaatttctctcactggagattagcttttcaaaaagatgcagcattgctttttcaaggctgggaaggtgccgaagccagaggcagactacagctgacatggggagagaaatcttcttcagcaaaatggcctcgtttacagcctcaaagaactctggctggaggatttcctgaggttcacgtccatgacagatgaggagagcctcccccagggggtcaacatctgtcagggtaataagtgggacacaaactcgtgacagggacgccactcgctcgggagccattcgcctttgagtgttaaatccattaagatgattctctctgagttcagacgctaatgataaaaccatatttttaagcaacccaggatagtaatctataggtgcatacccaagaccttgagtgaaaagagcaacttctttatcaaatctgagtgctgaaagtatatgagataatcccccctgtatccaggagttaagttttgattgtccagaattctgtggttctttgttaattagacaacataagcaccatattagaattttttggctttcatcatatgctaaaataaaaggattccaacaagcttttgccaacagttgaccaattgtggggaatctttcaatgactgtattagaatccatctctttcaaggcttcatacatcttccttaggaactcctggaactgagccacgtgaagacaggtgtcttgctgggtttccaaagtggaagcctgatcccatacagaaagcttctgcatccaaaactgataatcacaagaaagatctactgaatcttgagccatcttggaaaaagcgaaaaggtgatgtcccttcacagcagcctgtccagcactgaaggaaatggtcggcacacattaaatcgggtggtcctcgcgggagctgcttcagcagtttgggcagtggcggaaaggaagccaccgcccgggatctgtggcttgaaaatttggctttgcctcgtattggctttttgagtttttttggaattttcccgcggtcgcccggcagtggagccgcgcgcgcgcacacgtgtcagcagt

SEQ ID NO: 61008 - DNA, 1961 bp, Homo sapiens
tttttaaatcacaaaaatagacataatatttgaaacctgtaaataaaaatattttacaattctttgaaattaaatatttcagactgctttgccagcaacatgctcaattcccgatcatcgctcaaagtggtaagtttctaaaatttagcactgtgggttttaaagaaaggtaaacatttgtgtaacataaggaatagtctaattttctagcctcgttgaattaaaatacaaatgtttgagttaaaattttacacatctagaaaattgacaacttctttgtgtactatgtgatatgactgactaattttttcttctttatgaacaagacctattctctttgaaccattccctggtatctttcattctccctacgctcacagaaccaaactaagacatgggaaaaagccttgacttttgggactgcttctcttccataagaattttcagtagataaaattttaaaagtgctgcaccttccctgagtgaaaattccctaaggatgcatggttagcatttcagttctaattaaggcagactggatcctggctaactggagtcatggggtatactttcattcatgagtggaacagcagtgtcttagcagcactacatctgcaatgttcattgtgaagtggagtcaggacctcgttggaagacttcgttctgcgtcatgccaactgcattttatggtgataacattctccaaatagcacctctacaatcatttttcagtcgttacccttttaactcagcaggaaaggctattacagatacttctttaaatcagtgtttattgacagggaaaagcaccagcaatacacacttaaccaaatccttgcaaatgtcatctattaaatatcttcatccttattagtctgttttactttgaatatcttctgagtgaaattgagtgcattcccatatcttttcaccaattatatttgttttcctatgacccaatttgttcatttttctattgaatgaaccctctccccaaagagttccgcatgtgccaatttttctactcaattatttacctgtgttgcattaaacttataatatcttttttaaaaattaaccctttatcataagtgctgcaaacacttagttgaagtttgccatatcttttgactttgtaaaaacttttggcatatgagttgtatatttcatgtagtcaaacagtaatcttttcctttatggattccaatttttaaatggtttatatttttagctaaattttcaggagtgaaaagaaaaagaggaaggaagaaacccctctcaggcaatcatgtacagccacccgaaacaatgaaatgtaatacattcataagacaagtgaaagaagagcatggcagacacacagatgcaactgtgaaagttccttttcttaagaaatgcaaggaagcaggacttcttaattacttacttgaagaaatattagacaaagttcattcaattccagaaaaactcatggatgagactacttcagaatcagactatgaagaaatcgggagtgcactttttgactgtagattgttcgaagacacatttgtaaattttcaagcaggtatatgagttatataacatctgagcagcatagttgagaaatatcatgatattgaaacaatatactatacaggtgataaaaatattttagaagaatgttcattgttttcttaaatgagaaaagccaattacaaaaacagtatgaccccgcccacccccccacacacacaggaaaaaaatattgaggtacatgtgcacagacaaaagctgcacctggtggagacagtagttggttgtaggtagttggaatatagggatttttggctgttcttttactgctatattttccagattttctgtatacacacaaatacttttataatgagaaaaactcattaaaaagtagagacaacaaaaatttgatcaaaatttgagcatattttgccttggggggg

SEQ ID NO: 61009 - DNA, 2928 bp, Homo sapiens
ttacgtgcaactcagtaacagcccgagagccgggaaataaaaataacccctcagagcgatggatttcggggccgcccggcggccgaggcgcccgccgaaggccctgctgtaaaagagaggaggttcagatgagcccctgctgacttgagagagacagagagaccacgccgattgctgagaggaactggaagaagaaaaattcccagactcagtgggaagagctccctcaccatgagtagcgctatgttggtgacttgcctcccggaccccagcagcagcttccgtgaggatgccccgcggcccccagtgccaggggaagaaggggagaccccaccgtgtcagccaggggtgggcaagggccaggtcaccaaacccatgtctgtctcttccaacaccaggcggaacgaagatgggttgggggagccggaggggcgggcatctccggattcccctctgacccggtggaccaagtccttacactccttattgggcgatcaagacggtgcttacctgttccgaactttcctggagagggagaaatgcgtggataccttagacttctggtttgcctgcaatggattcaggcagatgaacctgaaggataccaaaactttacgagtagccaaagcgatctacaaaaggtacattgagaacaacagcattgtctccaagcagctgaagcctgccaccaagacctacataagagatggcatcaagaagcagcagattgattccatcatgtttgaccaggcgcagaccgagatccagtcggtgatggaggaaaatgcctaccagatgtttttgacttctgatatatacctcgaatatgtgaggagtgggggagaaaacacagcttacatgagtaatgggggactcgggagcctaaaggtcgtgtgtggctatctccccaccttgaatgaagaagaggagtggacttgtgccgacttcaagtgcaaactttcgccaaccgtggttggcttgtccagcaaaactctgagggccacggcgagtgtgaggtccacggaaactgttgacagtggatacaggtccttcaagaggagcgatcctgttaatccttatcacataggttctggctatgtctttgcaccagccaccagcgccaacgacagtgagatatccagtgatgcgctgacggatgattccatgtccatgacggacagcagtgtagatggaattcctccttatcgtgtgggcagtaagaaacagctccagagagaaatgcatcgcagtgtgaaggccaatggccaagtgtctctacctcatttcccgagaacccaccgcctgcccaaggagatgacccccgtggaacccgccacctttgcagctgagctgatctcgaggctggaaaagctgaagctggagttggagagccgccacagcctggaggaagcgcctgcagcaagatccgaagaggatgaagagagagagggctccgagctcacactcaaattcgcgggagggggcgcccacgcaggcaccccctcttcccttactgccctccggcagcttacgagggaaggacccgcaggacgatactggacgatcacctgtccagggtcctcaagacccctggctgccagtctccgggcgtaggccgctatagccctcgctcccgctccccggaccaccaccaccaccaccattcgcagtacttactccctcgtcccgcccggtggcaagctgcctcccgcggccgcctcgccgggcgcctgccccctcctcgggggcaaaggctttgtgaccaagcagacgacgaagcatgtccaccaccactacatccaccaccatgccgtccccaagaccaaggaggagatcgaggcggaggccacgcagcgggtgcactgcttctgccctgggggcagcgagtattactgctactcgaaatgcaaaagccactccaaggctccggaaaccatgcccagcgagcagtttggcggcagcagaggcagtaccttgcccaaacgcaatgggaaaggcacggagccgggcctggccctgcccgccagggaaggaggggcccccggcggagctggggccctgcagcttccccgggaggaaggagacaggtcgcaggatgtctggcagtggatgctggagagtgagcggcagagcaagcccaagccccatagtgcccaaagcacaaaaaaggcctaccccttggagtctgcccgctcgtctccaggcgaacgagccagccggcaccatctgtgggggggcaacagcgggcacccccgcaccaccccccgtgcccacctgttcacccaggaccctgcgatgcctcccctgaccccacccaacacgctggctcagctggaggaggcctgtcgcaggctagctgaggtgtcgaagcccccaaagcagcggtgctgtgtggccagtcagcagagggacaggaatcattcggccactgttcagacgggagccacacccttctccaatccaagcctggctccagaagatcacaaagagccaaagaaactggcaggtgtccacgcgctccaggccagtgagttggttgtcacttactttttctgtggggaagaaattccataccggaggatgctgaaggctcaaagcttgaccctgggccactttaaagagcagctcagcaaaaagggaaattataggtattacttcaaaaaagcaagcgatgagtttgcctgtggagcggtgtttgaggagatctgggaggatgagacggtgctcccgatgtatgaaggccggattctgggcaaagtggagcggatcgattgagccctggggtctggctttggtgaactgttggagcccgaagctcttgtgaactgtcttggctgtgagcaactgcgacaaaacattttgaaggaaaattaaaccaatgaagaagacaaagtctaaggaagaatcggccagtgggccttcgggagg

SEQ ID NO: 61010 - DNA, 1556 bp, Homo sapiens
gaccatcactatcgccagcttggcacgaggcacacgcatgcattccaggcggtgctgctggggctcggcggggccgtgtctggtctgcaaggcgcgcgggctcgtggggggttggctggggagcccacgctgcctggcgactcgggccaccgaatgtgagaccgagtccctttatgtcaccagcgcacacgctgatttgaaccctgcttcgacgtgtgtgtcatggcttaaaaatagctgctaatctgtcaacctgtcttgggcagaaacagcggcggcgacagcagcaggagcgtcatggccgtggcgctgtctgcgccggcgatccgcctttcggactgaggcccagcgcagcgcttgcaaagagcagctacctggcaactgaacccatcatcaccacagccactcctgcagctgccacggtttctgccacctctaagatgtgccctggtaactggctttgggcttctatgacttttatggcccgcttctcccggagtagctcaaggtctcctgttcgaactcgagggaccctggaggagatgccaaccgttcaacatcctttcctcaatgtcttcgagttggagcggctcctctacacaggcaagacagcctgtaaccatgccgacgaggtctggccaggcctctatctcggagaccaggaagatcctggtgcattgtgctgtgggcgtgagccgatccgccaccctggtactggcctacctcatgctgtaccaccaccttaccctcgtggaggccatcaagaaagtcaaagaccaccgaggcatcatccccaaccggggcttcctgaggcagctcctggccctggaccgcaggctgcggcagggtctggaagcatgaggggagggggagagaggtcaggccaggcccgtgggtaggtccctggctcccagctggagataggaggcccaggtggcaggtagcaggaggcccagatcacccatcctcccctggggtcaggagaggccgagccccaggccactgtcactctttgtgggaggggacggggagtgaggttgggcagtgtggtggatgggcacccaggaagggttgaccagggaaggaggcagctaggctgtaaatggaagatggtcctgggattcgaacaccgctgggatctggccagggtgctccctgggattcacagtcccttcccctctttgtgcccaagtgtttccctctctccctcaccaaaacaaaagggccatctctgccctgcacttgtgcagaaagtcagggatacggcaagcatgaatgcaatggtgtagagttgtgtgaaacccctagcatagagacagacagcgaagagatggtgtgaaaagcttgcagaaccagacagagaaccccacagactttccactccaagcacaggaggaggtagctagcgtgtgagggttggcactaggcccacggctgctgcttgggccaaaaacatacagaggtgcatggctggcagtcttgaaattgtcactcgcttactggatccaagcgtctcgaggataaataaagatcatgaaaaagaaaaaaaaaaaaaa

SEQ ID NO: 61011 - DNA, 3151 bp, Homo sapiens
ggtccccaagcggagcgggaggccggaccggggagccgagcggcggcgtcggcggcgtcggcggcggcggcgacggcggcgggggcggtaatggcggagctggtgcaggggcagagcgctcctgtggggatgaaggccgagggcttcgtggatgccctgcaccgggtccggcagattgctgctaaaattgattcaattcctcacttgaataattccacaccttctagtggacccctcagtatatggatacggagtacaaaaacggcccttggatgatggagtaggtaaccagttaggggccttggtacatcaaaggacggtaataacggaagaattcaaagtgcctgacaaaatggttggatttattatcggcaggggaggtgagcagatttcacggattcaagcagaatctggttgcaaaattcagattgcttcagagagttctgggattccagagaggccctgtgtacttaccggaaccccagaaagtattgaacaagccaaacggctcctgggacagattgtggaccgctgtcgaaatggacctggctttcataatgacatagacagcaacagcacaatccaggagattctcattcccgcatctaaagtgggtctggtcatcggcagaggaggggaaacaatcaagcagttgcaggagcggacaggggtgaagatggtcatgatccaggatggcccattgcccacgggagcagacaagcctcttcgtatcactggagatgcatttaaagtacagcaagcaagagaaatggtactagagattatccgagaaaaagaccaagctgactttcggggtgtacgcggcgatttcaactctcgaatgggaggaggcagtatagaggtatctgtgcctaggtttgctgtggggattgtaataggaagaaacggggaaatgatcaaaaagatccagaatgatgctggtgtgaggattcagtttaaaccagatgatgggattagtccagaaagagctgcccaggtcatgggccctccggatcggtgtcagcatgcagcgcatatcatcagcgagctgattcttacagcccaggaaagagacggctttggaggcctggcagcagccagaggaagaggtcgtggccgtggcgactggagcgtgggagcccctggtggcgtccaggagataacatacacggtgccagccgataagtgtggcctcgtcataggcaaagggggtgagaacatcaaaagcatcaaccagcagtcaggggcgcacgtggagcttcagaggaacccccctcccaacagcgaccccaacctgcggagattcaccatcaggggggttccccagcagatcgaggtggccaggcagctcatagatgagaaagttggcgggaccaatctcggagcacctggagccttcggacagagtccattcagccagccacctgccccacctcatcaaaatacctttcctccaaggagctccgggtgcttcccaaacatggctgccaaggtgaatgggaacccccacagcacccctgtgagtggtcctccggcctttctgacccagggctggggcagcacctaccaggcgtggcagcagcccacacagcaggtcccaagccagcagagccagccgcagagcagccagcccaactacagcaaggcctgggaagactattacaaaaaacagagtcacgccgccagcgctgctcctcaggccagctccccaccggactacacaatggcctgggcagaatattacagacagcaggtcgctttctacggacagacgttagggcaggcgcaggcccacagccaggagcagtaggacagcgtcctcgtggccaactctcccctcaaaatcattgtcaaagaaaacctatttgtaacagaggtttttacatttgcaaaccttttgatgaagaactgttgttttgttctgtgaaacactatatttagattaacggaatttttctaaaaatcaggaaaattagttactaaaaattgctgatcatttttgtttcattatttttggtatttcaaatgtataagctctgggattctttttggagcaatacctacaaagtcaggcaccagaatgtgcctcagagctgtgacatttcaacatgatggttttggtttggtttggttttgtgtcctttttatttgcagttttttctgttgcaacagaaagtggcttggaagtcttaggtggtatgtaacaaattctttttaaaaattttaaagcagtatttaagtattcttaaatgtgtaaattcatttaatgttttacttctaatttcttgtatcttggctgtctggttttattgcatttttaaaaaaaactgaactattatgtattgtaatgaatgatgtgaattctgaactgagacagataattgtattgctgtccaacaggggttgggaggggcattttgtagggtttgtataatttctagagttcgaaaggggtaatataaaaatgtgctcgtgtgtttagcctacgtttttctcatgcctccattaccagttgcaattgtgtatctaagacctccaagcttgtttttaaaacaaaacaaaaaacctttctctattatctcagaaatataaatactgttatttttaatattaagaaattcaatataacttttaacacacactgtggaacattaaaccgtataaaaatgtagttataactatttttaattccaaggtgttgtttgcttttttcttttaaatattttcttaatattttgtcagattaactagatgaataaataaatctagtattaaccgcattatgaattaaataattttgatttaatgaaagggataatatgatttccagtgtttactgtagtgtatcttgtacagataacatgtatttttaaaggaaaaaaaacggaattgaagctattttttcttgcatttctaattgacctgagggacattccgtttgaaatgtactgaagttacagtttctggttttttctccttatttttcttataatgcttgaaatgtctaactattaaaaaagacaattggaaaatgttatgcatggggtttttaagaaaacaaagtgttctttttatttgactgacaattcattttacactctatataataaaatctccacaaggcatcttgtgggcaaagtcaaaaaaaaaa

SEQ ID NO: 61012 - DNA, 1938 bp, Homo sapiens
  misc_feature (1)...(1938): n = a,t,c or g
cgagcccggagacttgccttgcaatgccatgtttgtgtatgtgctctaactcccggagagcaatcagggagacggctccccggccagacttggctgatgttttcttgtttctgtttcagccttcaggataattccttcagcagcaccactgtaacagagtgtgacgaagatccagtctctctacatgaagaccagactgattgctccagtctcagagatgaaaacaataaagagaactaccccgacgcaggggctctggtagaagagcacgcgccgccctcttgggagccgcagcagcagaatgtagaggcgaccgtgctggtggacagcgtattgcgacccagcatgggcaacttcaagtccaggaagcccaagtccatcttcaaagcggagagcgggaggagccacggagaaagtcaggagacagagcatgtggtatccagccagtcagagtgtcaggtgagagcaggaacaccagctcatgagagtccacaaaacaatgccttcaagtgccaagaaaccagtgcgacttccaaccaagaatagaccagaggactgccacttcgccaaaggatgcttttgaaactcggccaggacttaaatgaggaagaagctgctcaggtgcatggagtcaaggacccggcgccagcatcaacccagagcgtgcttgccgaatgggacagattctgcagacccctcaccagtccacaaagatgggcagaatgaggccgacagtgcaccagaagacctccactctgtggggaccagcaggctgcttctattcacatcactgatggtgataaccccactgctgttcgccacggttgttccctctttcaggccaaagccagagattcaacttagaccccgagtcagccccatctccacccagcactcagcagtttatgatgccgcggagttcttcacgctgcagctgtggagatggcaaggagccacagaccatcacccagctcaccaagcacatccagagcctcaagcggaaaattcggaaatttgaagaaaaatttgaacaagaaaagaaataccggccttcacatggtgacaagacttctaatcctgaagtcctgaaatggatgaatgatttggctaaaggtcgtaaacagctcaaagaactaaagctaaagctgtcagaagaacaagggagtgctcccaaaggtccacctagaaacctgttgtgtgagcaacccacagtccccagagaaagtgggaaaccggaagctgcgggcccggagccaagctcctctggagaagagactccagatgctgccttgacatgcctgaaggagagaagagagcaacttcctccccaggaggattctaaggtaactaagcaagacaagaacctcataaagccgctttatgaccgatacagaattatcaagcaaatcttgtcaacaccttcccttattccaacaattcaggaggaagaggactctgatgaagaccgtccacagggaagccaacaaccttctttggcagatccagcatctcaccttcctgttggtgaccacctcacctactctaatgagactgagcctgttagggcccttttaccagatgaaaagaaagaagtaaaaccaccagctctctccatgtctaatttacatgaggctaccatgcctgtacttcttgaccatctccgagaaactagggctgacaagaagagactgcggaaagccttaagagaatttgaagaacagttttttaaacaaacaggaagaagtccacaaaaggaagataggataccaatggcagatgagtattatgaatataagcacataaaggccaaactgagacttttggcccccccagccggatcatatttcccccntgnnnnnnnnnnnnnnncggnaaatgttatgatcactttcacccatgatataaagtaaagtttattttcctctgcaaaaaaaaaaa

SEQ ID NO: 61013 - DNA, 4192 bp, Homo sapiens
gcggggaagcagcagcggccaggatgaatcccaggtgctctggagctggatggtgaaggtcggcactcttcaccctcccgagccctgcccgtctcggccccatgcccccaccagtcagccccgggccacaggcagtgagcaggcacctgggagccgaggccctatgaccaggccaaggagacgggcgctccagggtcccagccacctgtcccccccatggagctgaggccctggttgctatgggtggtagcagcaacaggaaccttggtcctgctagcagctgatgctcagggccagaaggtcttcaccaacacgtgggctgtgcgcatccctggaggcccagcggtggccaacagtgtggcacggaagcatgggttcctcaacctgggccagatcttcggggactattaccacttctggcatcgaggagtgacgaagcggtccctgtcgcctcaccgcccgcggcacagccggctgcagagggagcctcaagtacagtggctggaacagcaggtggcaaagcgacggactaaacgggacgtgtaccaggagcccacagaccccaagtttcctcagcagtggtaccttgtctggtgtcactcagccgggacctgatggtgaaggcggcctgggcgcagggctacacagggcacggcattgtggtctccattctggacgatggcatcgagaagaaccacccggacttggcaggcaattatgatcctggggccagttttgatgtcaatgaccaggaccctgacccccagcctcggtacacacagatgaatgacaacaggcacggcacacggtgtgcgggggaagtggctgcggtggccaacaacggtgtctgtggtgtaggtgtggcctacaacgcccgcattggaggggtgcgcatgctggatggcgaggtgacagatgcagtggaggcacgctcgctgggcctgaaccccaaccacatccacatctacagtgccagctggggccccgaggatgacggcaagacagtggatgggccagcccgcctcgccgaggaggccttcttccgtggggttagccagggccgaggggggctgggctccatctttgtctgggcctcggggaacgggggccgggaacatgacagctgcaactgcgacggctacaccaacagtatctacacgctgtccatcagcagcgccacgcagtttggcaacgtgccgtggtacagcgaggcctgctcgtccacactggccacgacctacagcagtggcaaccagaatgagaagcagatcgtgacgactgacttgcggcagaagtgcacggagtctcacacgggcacctcagcctctgcccccttagcagccggcatcattgctctcaccctggaggccaataagaacctcacatggcgggacatgcaacacctggtggtacagacctcgaagccagcccacctcaatgccaacgactgggccaccaatggtgtgggccggaaagtgagccactcatatggctacgggcttttggacgcaggcgccatggtggccctggcccagaattggaccacagtggccccccagcggaagtgcatcatcgacatcctcaccgagcccaaagacatcgggaaacggctcgaggtgcggaagaccgtgaccgcgtgcctgggcgagcccaaccacatcactcggctggagcacgctcaggcgcggctcaccctgtcctataatcgccgtggcgacctggccatccacctggtcagccccatgggcacccgctccaccctgctggcagccaggccacatgactactccgcagatgggtttaatgactgggccttcatgacaactcattcctgggatgaggatccctctggcgagtgggtcctagagattgaaaacaccagcgaagccaacaactatgggacgctgaccaagttcaccctcgtactctatggcaccgcccctgaggggctgcccgtacctccagaaagcagtggctgcaagaccctcacgtccagtcaggcctgtgtggtgtgcgaggaaggcttctccctgcaccagaagagctgtgtccagcactgccctccaggcttcgccccccaagtcctcgatacgcactatagcaccgagaatgacgtggagaccatccgggccagcgtctgcgccccctgccacgcctcatgtgccacatgccaggggccggccctgacagactgcctcagctgccccagccacgcctccttggaccctgtggagcagacttgctcccggcaaagccagagcagccgagagtccccgccacagcagcagccacctcggctgcccccggaggtggaggcggggcaacggctgcgggcagggctgctgccctcacacctgcctgaggtggtggccggcctcagctgcgccttcatcgtgctggtcttcgtcactgtcttcctggtcctgcagctgcgctctggctttagttttcggggggtgaaggtgtacaccatggaccgtggcctcatctcctacaaggggctgccccctgaagcctggcaggaggagtgcccgtctgactcagaagaggacgagggccggggcgagaggaccgcctttatcaaagaccagagcgccctctgatgagcccactgcccaccccctcaagccaatcccctccttgggcactttttaattcaccaaagtatttttttatcttgggactgggtttggaccccagctgggaggcaagaggggtggagactgtttcccatcctaccctcgggcccacctggccacctgaggtgggcccaggaccagctggggcgtggggagggccgtaccccaccctcagcaccccttccatgtggagaaaggagtgaaacctttagggcagcttgccccggccccggccccagccagagttcctgcggagtgaagaggggcagcccttgcttgttgggattcctgacccaggccgcagctcttgcccttccctgtccctctaaagcaataatggtcccatccaggcagtcgggggctggcctaggagatatctgagggaggaggccacctctccaagggcttctgcaccctccaccctgtcccccagctctggtgagtcttggcggcagcagccatcataggaagggaccaaggcaaggcaggtgcctccaggtgtgcacgtggcatgtggcctgtggcctgtgtcccatgacccacccctgtgctccgtgcctccaccaccactggccaccaggctggcgcagccaaggccgaagctctggctgaaccctgtgctggtgtcctgaccaccctcccctctcttgcacccgcctctcccgtcagggcccaagtccctgttttctgagcccgggctgcctgggctgttggcactcacagacctggagcccctgggtgggtggtggggaggggcgctggcccagccggcctctctggcctcccacccgatgctgctttcccctgtggggatctcaggggctgtttgaggatatattttcactttgtgattatttcactttagatgctgatgatttgtttttgtatttttaatgggggtagcagctggactacccacgttctcacacccaccgtccgccctgctcctccctggctgccctggccctgaggtgtgggggctgcagcatgttgctgaggagtgaggaatagttgagccccaagtcctgaagaggcgggccagccaggcgggctcaaggaaagggggtcccagtgggaggggcaggctgacatctgtgtttcaagtggggctcgccatgccgggggttcataggtcactggctctccaagtgccagaggtgggcaggtggtggcactgagcccccccaacactgtgccctggtggagaaagcactgacctgtcatgcccccctcaaacctcctcttctgacgtgccttttgcacccctcccattaggacaatcagtcccctcccatctgggagtccccttttcttttctaccctagccattcctggtacccagccatctgcccaggggtgccccctcctctcccatccccctgccctcgtggccagcccggctggttttgtaagatgctgggttggtgcacagtgatttttttcttgtaatttaaacaggcccagcattgctggttctatttaatggacatgagataatgttagaggttttaaagtgattaaacgtgcagactatgcaaaccagaaaaaaaaaa

SEQ ID NO: 61014 - DNA, 2014 bp, Homo sapiens
ggcacgagcgggctgagagaagagcttgcggggtttgcggttgatggccccgactgaagggctggaggcggtgtatgccgctgttcttgctgtcgctcccgacacctccgtccgcttctggtcatgagaggagacagaggcctgaagcaaagacatctgggtcagagaaaaagtatttaagggccatgcaagccaatcgtagccaactgcacagtcctccaggaactggaagcagtgaggatgcctcaacccctcagtgtgtccacacaagattgacaggagagggttcttgccctcattctggagatgttcatatccagataaactccatacctaaagaatgtgcagaaaatgcaagctccagaaatataaggtcaggtgtccatagctgtgcccatggatgtgtacacagtcgcttacggggtcactcccacagtgaagcaaggctgactgatgatactgccgcagaatctggagatcatggtagtagctccttctcagaattccgctatctcttcaagtggctgcaaaaaagtcttccatatattttgattctgagcgtcaaacttgttatgcagcatataacaggaatttctcttggaattgggctgctaacaacttttatgtatgcaaacaaaagcattgtaaatcaggtttttctaagagaaaggtcctcaaagattcagtgtgcttggttactggtattcttagcaggatcttctgttcttttatattacacctttcattctcagtcactttattacagcttaatttttttaaatcctactttggaccatttgagcttctgggaagtattttggattgttggaattacagacttcattctgaaattctttttcatgggcttaaaatgccttattttattggtgccttctttcatcatgccttttaaatctaagggttactggtatatgcttttagaagaattgtgtcaatactaccgaacttttgttcccataccagtttggtttcgctaccttataagctatggggagtttggtaacgtaactagatggagtcttgggatactgctggctttactctacctcatattaaaacttttggaattttttgggcatctgagaactttcagacaggttttacgaatattttttacacaaccaagttatggagtggctgccagcaagagacagtgttcagatgtggatgatatttgttcaatatgtcaagctgaatttcagaagccaattcttctcatctgtcagcatatattttgtgaagagtgcatgaccttatggtttaacagagagaaaacatgtccactctgcagaactgtgatttcagaccatataaacaaatggaaggatggagccacttcatcacaccttcaaatatattaagttgtataaactatcaaggccacaaaatactaatgtcatttggtcataatgactactgataaggcatcagaatggattttcagggctaccagaaaaatgtttccagatggttttagaatgtaggacttatgatccaattcaccaaaagattaaatgaaaccaccctgtgttttaaaatatatataatgttcaacctaatgtatatgcaacatttattctattctaattatttgacaggtaactgcagtgttaaattgtaaatgtgttttctttatgttaccaaaacagcgaatttgaaattaggaactagtgggttttaggaggaactcagggtattctttcctggacattgtttttcaggaataaagaatatttttcataatatttttaaggatacatactatctaaaagtagaattttgttcagcattgacttttataattcccatcctaaaaattcttaatattttcataaaatttgtatttttaaatgaaaattctaaatgttgtattttatcagtaacattttctaagtgaagattaatttactgaggatgatacattatagtattgtattattctctgtagtaagattagtaataagtgaaaataaatgatttaaattcaaaaaaa

SEQ ID NO: 61015 - DNA, 2401 bp, Homo sapiens
ccgggtcgacgatttcgtgcgggagacggcggtcgaaaaaacccggcggcctgaagcttgtgctttctttgacgcaagggctcgagacgcagccgccgtcggccgagcgcccggctagaagcgacaccagacggagcctccggagttcctccgcccccacctcgccgggtcctggagccgcagtcctcccagctgccctcctcgtggccatggagtgtccacacctgagctccagcgtctgcattgctccggactcagccaagttccccaacggctccccgtcgtcctggtgctgcagcgtgtgccggtccaacaaaagcccttgggtctgtttgacttgttcaagtgtccactgtggaaggtatgtgaatggccatgcaaaaaaacattatgaagatgcacaagtacctttaaccaaccataagaaatcagaaaagcaagataaagttcagcacacagtatgtatggattgcagtagctacagtacatactgttatcgctgtgatgattttgtggttaatgacaccaagctgggactggtacagaaagtcagagaacacttacagaacttggaaaactcagctttcacagctgacaggcataagaaaagaaaacttttggaaaactcaacactaaacagcaagttattaaaagtaaatggaagcaccactgccatttgtgccacaggccttcggaatttggggaacacatgtttcatgaatgccatccttcagtcactcagtaacattgagcagttttgctgttatttcaaagaactgcccgccgtggagttaaggaatgggaaaacagcaggaaggcggacataccacaccaggagccaaggggataacaatgtgtctttggtagaagagtttagaaagacactctgtgctttatggcaaggcagccagactgcatttagcccagagtccttattttatgttgtttggaagattatgccaaactttaggggctatcaacagcaggacgcccatgaattcatgcgctaccttttggaccacctacacttggaacttcagggcggtttcaacggtgtttcccgctcagcaattctgcaggagaattctactctgtctgcaagtaacaagtgttgcataaatggagcatctactgttgtcacggctatattcggaggcattctccaaaatgaggttaactgcctcatatgtgggacagaatctagaaagtttgatccattcctagacctttcattagatattccaagtcagttcagaagtaagcgctctaagaatcaagaaaatggaccagtttgttcgttacgagattgtcttcgcagttttaccgacttagaagaacttgatgagacagagttatatatgtgccataaatgcaaaaagaaacaaaagtccacaaaaaagttttggattcaaaaactacccaaggggctatgcttacatttgaaaagatttcattggacagcatatttaagaaataaagttgatacatacgtagaatttccactgagaggcctagacatgaaatgctacttactagagcctgagaacagtggcccggagagctgcctgtatgacctcgccgctgtggtggtgcaccatggttccggggttggttctggacattacacagcatacgcaactcacgaaggccgctggttccacttcaatgacagtactgtaacactgactgacgaggagactgtggtgaaggcgaaggcctacatccttttctacgtggaacaccaggccaaagctggatcggataaactttaatacctcctccaaatcatcattcaccaaccataccagagaaacatttccagttttccacaaatacttgatacaagatttaatttcattatgcacttttcaatttcctattttggatttagttttgtcaatggtagtgacttactgaacatgggcaccaactaattttgttgttgttctaccagaaaacctcagcagatgttttgatttgctgctttagttgtaataattcaatttttataggtagttgtaagaacttagtcttatttgacttttttattttatgttaatgttttcagttctcactttgaggcacatttacatcaatgcttttgttcctctcacatgctgaaagcaagatgtgttccttattgtgaagagcgacacaactgcctgctgcctttccacagctataatggacatcaggttgactctaaatcaaggatcatgtgtgcacaatacttgtggcccacaaaatttcacaatgactgctgaggaatcattctttttgcctgtaaaatataacaaagggcatcattaagtagaccaggtaattactgcttgtctctcaaggctgctgtctttatcagcactaactaaataaatttgttggttcagttgtaaaaaaaaaa

SEQ ID NO: 61016 - DNA, 6976 bp, Homo sapiens
gaccgctccggaattctctcgttcgacccacgcgtccgcccacgcgtccgtcgcacgcgtcttgaggaaccgggagatcgcacagctcaagaaggagcagcggcgacaggagtttcagatccgagctctggagtcccagaagcggcagcaggagatggtcctgaggaggaagacccaggaggtttctgcactgaggcgcctggccaagcccatgtctgagcgggtggcagggcgtgcaggactaaagccacccatgctggactctggggctgaggtgtcggccagcactacctcatctgaggctgaatcaggggcccgctctgtctccagcatcgtgcgccagtggaaccgcaaaatcaaccacttcttgggggaccatcctgcgcccactgtcaatggcacccgtcctgcccgaaagaagttccagaagaagggggccagccagagcttcagtaaggcggcaaggctcaagtggcagtccctggagcgacggatcattgacatcgtcatgcagagaatgaccattgtcaacctggaggctgacatggagcggctcatcaagaaaagggaggagctgttcctcctgcaggaggcactgcggaggaagcgggagcggctgcaggctgagagccccgaggaagagaaggggctgcaggagctggctgaggagatcgaggtgctggcagccaacattgactacatcaatgacggcatcaccgactgccaggccaccatcgtgcagctggaggagaccaaggaggagctggactccacagacacatccgtggtcatcagctcctgctccctggctgaagcccgcctcctgctagacaacttcctcaaggcatccattgacaaggggctgcaagtggcacaaaaggaagcccagatccggctgttggagggccgactgaggcagacggatatggcaggctcctcccagaaccatctgctcctggacgccctgcgtgagaaggctgaagctcaccccgagctgcaggccctcatctacaatgtgcagcaggagaatggctacgccagcacagatgaggagatctcagagttctctgagggcagcttctcccagtcattcaccatgaaaggctccaccagccatgacgatttcaagttcaagagcgagcccaaactgtctgcccaaatgaaagctgtgtcggctgagtgcctgggccccccactggatatctccaccaagaacatcaccaagtccctggcctccctcgttgagatcaaagaggacggagtgggcttctctgtccgagacccctattaccgggacagggtctcgcgcaccgtcagtctgcctacccggggcagcactttccctaggcaatctcgagccacagagacgtccccgctgacgagaaggaagtcctacgaccgagggcagcccattaggtccacagatgtgggattcacacccccatcatcccctcccactcggccccgcaatgaccgcaatgtcttctctcgtctcaccagtaatcagagccaggggtcagcgctggacaagtctgatgacagcgactcctctttgttcggaggtcctgaggggcatcatctccccggttggaggagccaagggtgcacggacggccccactgcagtgtgtctccatggccgaaggccacaccaagcccatcctctgcctggatgccacagatgagttgctattcacagggtccaaagaccgaagctgcaagatgtggaacttggttacgggacaggagatcgcagctctaaagggccaccccaacaacgtggtctccatcaagtactgcagccactcggggcttgtgttctccgtgtccacctcctacatcaaggtgtgggacatccgggactcagccaagtgcattcggactctcacgtcctcgggccaggtgatctcaggggatgcctgtgccgccacatccacccgtgccatcaccagtgctcagggcgagcatcagatcaaccagatcgccctcagcccttcgggcaccatgctgtacgccgcctcgggcaatgccgtccgcatctgggagcttagcaggttccagcctgtcggcaagctgactggccacatcggccctgtgatgtgcctgacggtcacccagacggccagccagcatgacctcgtggtgactggctccaaggaccactacgttaagatgttcgagctgggcgagtgtgtgacgggcaccatcggccccactcacaacttcgagcccccgcactacgatggcatcgagtgtctcgccatccagggagacatcctgttcagtggctcccgagataacggcatcaagaagtgggacctagaccagcaggagctcatccagcaaatccccaatgcgcacaaggactgggtgtgcgccctggccttcatcccgggccgccccatgctgctcagcgcctgccgtgcgggtgtcatcaaggtctggaacgtggacaacttcacacccatcggtgagatcaagggccacgacagtcccatcaatgccatctgcaccaatgccaagcatatcttcacagcctccagtggctgccgggtaaaggtgtggaattacgtccctggactcaccccctgccttcctcgccgagtcctggccataaagggccgcgccaccaccctgccctgaccctccccaactctccctgtctcctctttcattcttcccctctttccttttccctctctttccccacttcgatctgagctgcttcttaacgtgacctgacggtgaagtttctggagtgtccggcggttaccccacagcggcccaccctaggagtgaggtcagagggatgcccccggaccctcgaccccagcagcctggacaccatggaagggaagctgtgacccggccgatggggccagctgctctggggacagagggcgtggccccctctcctgccctcctccctctcccttggccttcccacaggacactgttccctcatccctcccctgcctctcaggagcctctgggtgagagagaggctggggaggaaattaagctgtgaagccaaagggcattatcccttcttgttcccctcctggcagtcgtggccacattgtctcctgctgaaccggctctgcccctttctcaggcctttggcccagtggtggagccctgtggggaggtgcagcagcctggccccatcccacccttccgaggagctggcctccccgcttttcccagcccagcctctagagccactgcacctgcctctgagcccaaaaagataagtcctcaggtagctaaggaaaccaggtgtggccggctgggccttgcagctaacccttaaccctttggcaacccgcagatagccccaactggccccaacagttccctggggtcccttttggatggggccaaggtggagctgctagaaagattcctttggggagatggtcagaaatacttcagttatttattattttgttatttttattttttgctgttgcctcctggaaacggacttgaagtttcttcccctatattctttccctcagctcttgggggccagaaatcccaaagggagtccgctgccccggccctccagggccgcctcctctgtttgctttgcagaggagggaactgctccttcgactctgcagctcaggcctgtccccgacacagcccccagggagtcttctagctacccctggcctctaggccgcctgacgctcagtgccttcctccgttccggggcctggcacccgtgccgggcagccttacaccagccatgcccgcggcaccacatgtgtcttctcactcgcgaggtcttgtgcccagcgcccccgggaaggcgggggcgctcaccccacagcccaggccccggggttctgccccacagtcctgcgtgggccacgtaggaagcagcgtgggggctgtgtctgctgggaggtggcttggatggggaggacagcccggcacctggacccccgcccctccccagccctgcagtcccccactgggccggggagtctctccagcttctctctctctggttattcaggagacacattttcggccttaaaactggcatggagcgcaggccctcccttgcagaaaattatcaaggaagagggagttggcagagtttctctgccccggggctggggacgcggagctccggggaaattgttaaatcagtgttctggcgccccctgttgggggaactctggaattacaggagtgggccttgggggggactgagctccatccctctcccccgccccacccccacccaaagttgcccaccctgtttttccgttgcatcgctggtcttgtgcttcccgcttcagtctgggagccaagagccagccccacctcccttcagaggacgcagtgacttttggactttccagaggtggttctgtgtttctgcccttggctcctctccgtcttgggctggggcacttggagccctctccatgtggcgcccagtgttggggggaggcaggctccagtggaggctgagtgaggcctggtcccttccccgtgccctcctcggagctgccacagaggctaagacggctgtcctgctggtgctggccctgctggatgtggtattgaagtctggggcagctgatagcaggaaggagacccccttggatgctggtctcctgggacctgaacagtctgtcagcaatggctggaaatccttcttcctctggccaccccgggggtgccgggcaacccccttagctctaagatgtggccacaaatctcttcccactcctccccgccaacctgaacagaaagttttgaccttgcaacctgtaagaaagaatccgtccgcatgactgtttacaagcgatagaaacacgtaagactctgtccccttgagctcccacccccgggccggggatgccccacctggggtgactgcactgtagctgcaaggcgtgttcttgcacgaagtgtgatcttatggccctgcgagaggtgctcatcatcatgcccattttctgctgtttctgatgggtcagctacctcacggcggggccagctctgctgtcctggcaagtgtcattgactctctaaacttgaagtccttcaggagccctgagcccaacatccatgagacaccccgagttgtgcttcatgagagttggattctctgcccactctttcagggatgtccaaggtccatgttagggggcaggcccccagctccactcactgcacaagcaccctaaatgttggaagcacaaaatggttgtgatttgagcacaatggcagggtcctgcaggcagacttgacaggcccaggcccgggaggatccccccacgttggctctgtccaaagtgagattgggggtgcctgtgtctgggacagggggctgcccttgctcagaccaggccttggctcatggcttgtcctaattctgggactcgtcatcttacttcttgcccttctgtgcccatcttaagactggaggctgagccttgtcaggcccagccacatctttacgccatgggaccaggagtaaagcgctctctaaaccccgcaccccaaatctctaaacgcctgagttcaggctgagtcctagccctagtgagcctgaagagcttggactgattcccagtctcctgggtcaagccccactttgtgctttcgaagcttatgagcgggttccctggatagaaggagtcttccatccccactgcccttgggcctcttcagcatagtcctgtgccagggccctgtcctcactatcagtcagttcagtttcagtatttgctttcacgtgagtggcggactcttctgaagcagccagaactctcaaaggcagcgcatggagttgccttgcgagatttccaaggaaggaggaaagattaacaggcggagcctggcacacccaagcctttgaggtggtcagagtgccaccttcagccccttgggaagggacagcggtgggtctgggagtggcctcaccctggattcagcctaggaatctcttcaccctcagctgtccagccctgctgcctgtctggggatgtgtggcctgggcagagggcagtttaaagcacaaaaccacatggggaaaacacaaggttgcggggactttctcatgtgcctgatgtggtggagggagacaccagcaggtggctgcagtgacgttagggaacataacacttctttgccctgctagctctcagctctggggggcatcccccgatgtggtctgggctgggagcaggcatatcccctggttgttgcctgtgcctggtctgttcaccatcgtgtttgtgtgggcagagcctgccctgcaggagcagtgactttcttcccactgtgtgtcccggacctgtggtatgtgtccctttgccatcccaaacaggcaactgcttgctgctctccttgcttggcatagcctcctggtcagtggccaatgccccacaggccttcctgggcctggccctcctctcctgactcccagatccttccctgccctcttgtgtgcaaggacagattttgcagggaaagttctgtttcttctttgatacctttgttctgtcacctgccccatccccagcactccatggatcttgaagcccctatcacactcctagttccagtccctgtgaaacccatgtccctgaagggccctgccagggaaagtaggaaaatagaaactccctcccacaaagagcccgaggatccagagaagacccctgagatgaaattcagggccctgccctgccccacccaactcttttcctagcaatccatgtccctgccccaggctgcaggccttgcattaggctcctgctgtcctgccatgtatgtgactagtcatcaaggtgtatatatgttttgtacctctgccgatgggctgtacatagtgtatgaaagttatttaagaccccatgttgtacatttctgttcctagattggatgtgtgtgttctaagaagttgtcataaataaaacctgaatgccccaatgtcaaaaaaaaaa

SEQ ID NO: 61017 - DNA, 3010 bp, Homo sapiens
cgccgggctcgggcggagagaggagctgctacgccacagcccagcggcggccattcgcggaaaaagaggcagagcctgtgccagctacagcctcctccgagccaccgcgggcgggcgggaccggcctctcctcccgcctcgcccccacccccacccacctctatcccagtgtctccgtctgagggtttgtcctgttaatgcgggatgagcgatcacaagaaggaggaggaggaggaggcggcagcggcagcggcgatggctacagaaggagggaaaacctctgagccagagaataacaataaaaaacccaaaacctcaggctcccaggactctcagccctctcctctggctttactggcagctacttgcagcaaaatagggactcctggtgaaaatcaagcaactggacaacaacaaattattatagatccaagtcaaggattggtgcaacttcaaaatcaaccacaacagctagaactggtaacaacgcaacttgctggaaacgcttggcaacttgttgcctccactcctcctgcttcaaaagagaataacgtttctcaaccagcctctagttcgtctagttcttccagcagtaataacgggagtgcatctcctacaaaaactaaatcaggtaattcttccacccctggtcaatttcaagtcatacaagtacaaaatcacaagtggtagtgtacagtaccaagtaattccacaacttcagacagtggaaggtcaacaaattcaaatcaatccaactagtagttcatctctacaggatttgcagggtcaaattcagctcatttctgcaggtaataatcaagctatactcacagctgctaacaggacagcttctgggaatattcttgctcaaaacctggcaaatcagacagttccggtccaaattagacctggtgtttcaataccactgcagttacagactcttcctggtactcaggctcaagttgtaacaaccctaccaattaacattggaggagtgactctagctttgccagtgataaacaacgtggctgccggaggagggactgggcaggttggccagcctgctgctactgctgatagtgggacttccaatgggaatcaattagtttccacacccaccaacaccactacttctgccagtactatgccagaatctccctcctcctccactacctgcacaaccactgcttcaacgtctttgacaagcagtgacacattagtgagctcagcagatactggccagtatgcaagcacatcagccagtagttctgaacgcaccattgaagaatctcaaacacctgctgctactgagtctgaagcccagagctccagtcagcttcacgctaatggaatgcagaatcagcaggatcaatcaaattctcttcagcaggtgcaaattgtaggccaacctatcttacagcagatccagatccaacagcctcagcaacagatcattcaggctattccaccacagtcgtttcaactccagtcagggcagacgattcagaccatccagcagcagcctttacagaatgttcaacttcaagcagtaaatccgactcaggtgcttatcagggctccaactttaacaccttcagggcaaatcagttggcaaactgtacaggttcagaatattcagagtctttcaaatttgcaagttcagaatgctgggttatcccaacaattaaccatcaccccagtgtcttcaagtggtggcacaactcttgctcagattgctcctgtggctgttgctggtgccccaataactttgaatactgcccagcttgcatcagtgcctaaccttcagacagtgagcgttgccaacctgggtgctgcaggtgttcaagtgcagggagttcccgttacaatcactagtgttgcaggtcagcagcaaggacaagatggagtaaaagtccagcaagctactatagctcctgtaactgtagcagttggaggaattgctaatgccacgataggtgctgttagtcctgaccaactcacacaagtgcatttgcagcaaggccagcagacttctgatcaagaggtacaacctggcaagaggcttcgaagagttgcctgttcctgtcctaattgtagggaaggagaaggaagaggcagtaatgaaccaggaaaaaagaagcagcatatctgtcatattgaaggatgtggtaaagtttatggcaaaacatctcatttacgagcacatcttcgctggcatactggagaaagaccttttatatgcaactggatgttttgtggcaaaagattcacacggagtgatgagctccagagacatagaagaacccatacaggtgaaaagagatttgaatgcccggaatgttctaaaaggtttatgcggagtgatcatctctccaaacatgtcaaaacgcaccagaataaaaaaggtggtgggacagctcttgccattgttacctcgggagaactggactcatctgttacagaggtgcttggctccccaagaattgtcacagttgcagccatttctcaagattcgaatccagcaactcccaatgtttcaaccaacatggaagaattctgaaaagttatttataacagagacctctagtgctgcacttgtttacacacctttgaaaatctggaaatgggctggtcaagtggattacagagtaggaaattatgttttcattcttggcttctttaagtattccagggtttggggtcaacacgtgaagtgttgaattttaaaaaatacaaaaagcaaactgatgtactggaaacagaaaagtatttcctccatactataagttgtagttgtttggaaatatatcacataacctttatacagaatcttcccatctcttaatatcatgtgttaacatgtttaaaaagaccttagtagtttgcaggctggaccttaattggacttattttctttgaaagtactttgttataaattcagtcagtaataatttacgtgtattctttttctctatagcacagaaaacagatagttaactgatgatagcgc

SEQ ID NO: 61018 - DNA, 1312 bp, Homo sapiens
catcccatcgattcgaattcggcacgaggccgggtgaaatcgtaggacagtgaagatgctgctggaattgtccgaggagcataaggaacacctggccttcctgcctcaagtggacagcgcggtggtcgccgagtttgggcggattgctgtggaattcctgagacgcggcgcaaacccaaaaatctacgaaggcgccgccagaaaactcaatgtgagtagtgacactgtccagcatggtgtggaaggattaacgtatctcctcactgagagctcaaagctcatgatttctgaactggatttccaagactctgtttttgttctgggattctctgaagaattaaacaaattgttgcttcagctttatctggacaacagaaaagagatcagaacgcttctgagtgaattgggcaccaagccttcccagttatcataaccttgaatggcgactagatgtacagcttgcaagtagaagtctcaggcaacagattaaaccagcagtgactataaagctacaccttaatcaaaatggagatcacaacaccaaagttctgcagacagacccagccaccctgctccatttggttcaacaactggaacaagcattggaagagatgaagacaaatcactgtaggagagttgttcgcaacatcaagtagtaccagttttaaggttttaattcatttgaatcacttatgaattgatgatatacagcaattacttttcaaaattaattttttattaattcatgatgataaatacatagtattcctcagtatctattccaagatactgaggtcataatcagaagctaagctgggtgcagtggctcatgccagttatcccagcactttgggaggccgaggtgggcaaatcatgaggtcaggagattgagaccttcctggctaacatggtgaaaccccatctctactaaaaatataaaaaattagccaggtgtggtggcacgcatctatcagagtcccagctactcaggaggctgaggcaggagaatcgcttgaacctgggaggtggaggttgcagtgagctgagattgtgccactgcactccagcctgggtgacagagtgagactccatctcaaaaataataataataataataaagtaaaaataaaaataaaaaagtaatcagaagctaaagtaaagttcctttcctggtgctaactgtggtcttcttgacacattaagatgtattttgtattttaagagtctcatgctctaccgttgggaactagccagatggccattattttgtattttaaatacataaataggattgaatcaactaaaaaaaaaa

SEQ ID NO: 61019 - DNA, 1953 bp, Homo sapiens
tttcgtccctcagcggcgcttcctcgtagcgagcctagtggcgggtgtttgcattgaaacgtgagcgcgacccgaccttaaagagtggggagcaaagggaggacagagccctttaaaacgaggcgggtggtgcctgcccctttaagggcggggcgtccggacgactgtatctgagccccagactgccccgagtttctgtcgcaggctgcgaggaaaggcccctaggctgggtctgggtgcttggcggcggcggcttcctccccgctcgtcctccccgggcccagaggcacctcggcttcagtcatgctgagcagagtatggaagcacctgactacgaagtgctatccgtgcgagaacagctattccacgagaggatccgcgagtgtattatatcaacacttctgtttgcaacactgtacatcctctgccacatcttcctgacccgcttcaagaagcctgctgagttcaccacagtggatgatgaagatgccaccgtcaacaagattgcgctcgagctgtgcacctttaccctggcaattgccctgggtgctgtcctgctcctgcccttctccatcatcagcaatgaggtgctgctctccctgcctcggaactactacatccagtggctcaacggctccctcatccatggcctctggaaccttgtttttctcttctccaacctgtccctcatcttcctcatgccctttgcatatttcttcactgagtctgagggctttgctggctccagaaagggtgtcctgggccgggtctatgagacagtggtgatgttgatgctcctcactctgctggtgctaggtatggtgtgggtggcatcagccattgtggacaagaacaaggccaacagagagtcactctatgacttttgggagtactatctcccctacctctactcatgcatctccttccttggggttctgctgctcctggtgtgtactccactgggtctcgcccgcatgttctccgtcactgggaagctgctagtcaagccccggctgctggaagacctggaggagcagctgtactgctcagcctttgaggaggcagccctgacccgcaggatctgtaatcctacttcctgctggctgcctttagacatggagctgctacacagacaggtcctggctctgcagacacagagggtcctgctggagaagaggcggaaggcttcagcctggcaacggaacctgggctaccccctggctatgctgtgcttgctggtgctgacgggcctgtctgtgctcattgtggccatccacatcctggagctgctcatcgatgaggctgccatgccccgaggcatgcagggtacctccttaggccaggtctccttctccaagctgggctcctttggtgccgtcattcaggttgtactcatcttttacctaatggtgtcctcagttgtgggcttctatagctctccactcttccggagcctgcggcccagatggcacgacactgccatgacgcagataattgggaactgtgtctgtctcctggtcctaagctcagcacttcctgtcttctctcgaaccctggggctcactcgctttgacctgctgggtgactttggacgcttcaactggctgggcaatttctacattgtgttcctctacaacgcagcctttgcaggcctcaccacactctgtctggtgaagaccttcactgcagctgtgcgggcagagctgatccgggcctttggtgagagggagtgagggtgcaggctagtggggggtggtaatcatctaggacactctggaacatggatcaccccagcaggggagagggtttgcttcctgctttgtgggtaacgtacctcatccacacattctgtggcttggctgcctggtccctaacggactggacctttgacttgcttttgactgcccatctcctcttctccagggctggacagactgccgctgcccgtctccg

SEQ ID NO: 61020 - DNA, 5259 bp, Homo sapiens
ttttttttttttactaatatagagattttatttaaactgtattgaatttttacagcacattgcatgtttgtcacaacgcaactgcacagtttggatttttggccacatcatgtcacttacacccacaacagctttgaaaggagtatttgatgaacacatctgagccaaaagcccagagtctctctccaaggccatgcagtttgttcactgatgggacagtccctcaaaacagcccacgctaagtagacagatacagtctccccaaatgttaccaatcttactccccttgaaaacaggcagagtgaagtgcaatgaaagacaagttaattaaaaagccactcacaactggcagtaaattttaatgattgataaaatggctttaaaataattttatggtatcagaaacaaggaacagcttgttactttttcaatgatctcaggaattttgcagacacaaaatctccattattcagctccatttaaatgaaaaaaaaagttccgctaggctgacctaaatatgccaaaactttttaggttacatctatggcaagtacaaaagaaccacagatgcgtctctgtaggactgaaaaggtcaggacaaataatgattcttgttctaaatgcagatcctagttattttggaatgaaatgctgttttctagaaagcaacatgaaagtagcagtaagaaagatgactaccatcatttcaaaacaggataagcctaaatataatttaccatttatatgtcaacaaattaaggaaaactgtataaagtcctagtggtttcattataggccaaggagactgtatctgtcccacccacagtacatggctatatcactgtatcttttggttaagtgccactggtacatattaagatgaaaaaaaacaaaaacaaaaacaaaaaaacaaaataaaattttttaaaaaccaacaacgtttggtccaaatggacacatgttctttcccaattttggtatcaaggctttattctcttctgtttgggttccattgttaagtgcacagaaatagacagcagcatttgtactgaaaccctcacataccaaacagcatatgctaggaggtaaaaaccaaacgctaaattctaccctcaaggtgtcaagtgttcaggataagaagcaatgtgacccagaggaggcatcagccaagggaaagacaacatgggggaaatgggcaatggaacaacaacaacgaaaacctttgttttattttcatgccaggagaggatcaaggtgtagctcctgtgttagcaccaggacaactaggaaaagtcaggtgcaaagagtagggcacaatcagcagatatttcacaaggataatttttgcttttcccttctcattcttcacagtgcataactcaagagctgccactgtgtaacagagacgactgccttcacagctcaaaataactcaatgtttgccaggaccgaacatcagcagagttttcctctgctcccaaaaatgtctcactccctagaactgttcccctaaactgaatattcaccaatgctggctgatgagccaactgaaaaatacattgaaacctccacttgctgagccagtcttcaaaccaaactccacagaaagacagtactaatgcaactagaaggagtgcctctaaaggctgagccttcatgcagacacagagcacagaggtacaggatatagttcatctcaaataggacaggaattcctaccttgtatactataatctgcttttgtcaaggtggaggagagatgggtctggttatcacttggagtttggttatacatatgcctttctattgctgtttggggcactttgcaccaggcaacatctacgcaatcatcatcttgtgacctccaggagaaagaggctggagtcaccaactcaacattaagcttccagaccctgggtctgggttaggaccattaccccaaggtgagggtatcaccagtagaggacctcctgctaaattgcaattcctctgctccagtttcatgataccaaggaggatttctcaagatggtatctctgagctctgtgatttcatgagccacaccaaggaaccttccaaactacaactgaagaagatcctcccttcaaacctgctaaaattggacaggtttctccccggcattcaactggaagctgtagcaatgggtttcttcagctgttggctcatgagttccctggcacgagagacttgaatgtgttcgtaacatgagttacagacgagaactgggtcatagagttgctgatcaggaatgggcagcttcaggtggcagcatccagcacaaaatacattcccacaatttctgcaatggtgtcttcgtttggccaaccagaattcacagtcacagttatagcagtgtgatgccatatggtctggaacccagcgagtcacctcagtctctttcttatcaacaggttcccagcttgcttctgaaaggcagtcttcactgtgatcagagccaaaatcctcagtatcactgccatctgactccttcaaacatgtaaaatcatcctcatagtccatggggggctctgctggaggggcacagcagtgacggatgtccagcctcatctgaagctcacgcacctgtcgacgtagctgctccacctcttgtttgtaccctgcttcgatttgccgtaacctatgctggatcacatccgtgggaaaggggagtccatcatcatccaaatacagaggaggcactggagaagggcagttcagtggaacgggctttgtgctagagacttgctttggatgactggacaaccacatctggttctttcctcctgggccagtacaatgtccattggaatgactagaacagacaggtgacttcacaccttctctctgagcccactggcccccaaagcagggccctgtggcccgcatctgcttactgtttggcctcttgctacaacagccataggaaagcagccgccgaggggtggcctccccacttgggaatgaagtcaccatcccttggaagctgtcccagttggaccctagaaaagagaactcactgatctggctctgagaaattggcttccggaccaattccaatggcattttcccaaagcgaggattttccaataactgcccattcctattatttcctcttttaccaatgtcttcctccccatgggtcagatccggcacagaactcagttgttcctggtgggagatacttgccacagaccctgagggatcttggttgaggaaagtcagtgcttgggtctagaggagtttggcaggcagcactcggtgggttgcaaacggtgctgaggctgtgatcaagaacacacttggagggcacacctagcatggagtctggctgggcctgttggggcgtacctgtaggagagttctgggaagactcaggaaaattacaaactccatcacacttgttagaaatgaccttggagagtgcactgacagcttctgtttcaggacaatgttcaggtggctcccctatgccatctaaagtcctacccagctcatcctgggcagaagggtctggagctggtcccttagtctcttctaggactttgatctcaggatcagaggtgttgctcttcatttcccgaggcactgcggtattaagcagtttgtaacttggagaacagcttttgtgactcttgaaaggtttattgctcaagtagtctttctggctgctgggcagaggaggaggaagacccacttctcctacagtttgctgaggccctcctaccccagagtccacaaagcttgtctctgatccctcaggattgctgtgccagggctccaggcctaccctgacctcctgacagtggttattcaggttagggtcactggatgtacgagtcagggggctgcttgtgtcacaggcagaaagaagatcatccatggatctggttttaggtaatctgtccagagagcggccagagaactcctggctctgggccactggggaaaggtaaagatccatgttttcttccccaagtgtgcatggagatgatgctggcagataaacagctgtccagaggtgcagggcccggacatgacaaacaggatgcaggaccatgtctgagctgggtgtgtagaggaagttatgaaagtttttattgccagctcgaaggagcgcccacacagagcaggtcccgctttgtagatgttgcgcttctctcgctacacaggggttgttggccaggaaggtgccgtagaggcaggagtatgtgtgttgcaccagttttaccaggaatgcttcattaaattcaaacaggcaggggaactgcttaagcaactgatgaacagaatcaagccactggaggaacacagggcattgttcgttttggtcctccacattctcttggtggccacagcgatctccaaacttgtgcccaaaatccagccagtcagactccactaacacttggaagccctccaacgtcctgtaatatgggtccagtaatattttggccagggctacgatctgcggtgtgcggtcccagccatctgagcagtgtaccagcacaggccggccttcccggtctactgtattagccaccagcacagctgcttttagcatcaccgacaagtgctgcagccatttggtactctccagtgccgacaaccagttgctaggatccggcatctggctacacacagcccggaggtactgaaagctgttccggatggcatggatgttggccattcccatgaacacgacctcacagttgggatagtactcttcacattcacagcctccacccttggcccggttggccactgctgccgtgtaggatcgcgcatccaggatcagcagcttttgaggagctgctgtgctctccactccagagcacgcagtcagagaagaatcaaagtcagcatcacacgcctcgctggtatcattattcccggtgctgagggagcccccagtggcccttgtccccgggtccagggcacaggctttagcaatggacgtgaccaggtactcatcatcagcattgcgccagccccaccagctgatctctggctggctgcagcgggcgatggcagccccattgcgcaagtgtctatacacaaccacgggaatccgcttccaggagcggaaggaagccacgttctccagctctttgtcagtgatccacacaggaaccagcagcttctgggggtaactggggcacaatttgtagttgctgttgatgtgtgagactctccagacgttctgcaggtcaaagcccatccttgcaagctccgcctcct

SEQ ID NO: 61021 - DNA, 3686 bp, Homo sapiens
tgggggggggggggtcttgctacattgcccaggctcaaacttctgggctcaaatgatcctcctgcttctgcctcagcttctgcctcggcctccggagtagctgggactacaggcctgaaatactgtttctttaaggaagggcatgttacctataataccaaaccacaaaaggatagctgcggttttgggcgaggagagctcagagagtttcttgcatatggccctgtgatggcggccatggccctgcatagacacgagctggaatctgcaggtggcagccaggacgctgcgtgtgtcgagtgcacagtgtggcttggtgccaaccatggcgagggtggagagccccgtgcctgcagcgcgcgcttccctcactgggtcctgcgtccttgggcaggcgatgcccctgcggggaggggctggtccatccccggccagccacggacccacgcatggacccagcgacccacggacctgcttacctgggcgcggcgcgggtggcatgcggccacacggaaggggcgcgctgggctgctgcggcctctgcagcttctacacctgccacggggcggccggagatgaaatcatgcaccaggacatcgtcccgctctgtgctgccgacatccaggaccagctaaagaagcgctttgcttacctgtccggtgggcgggggcaggacggaagcccggttatcaccttccctgactacccggccttcagcgagattccggacaaggagttccagaatgtcatgacctacctcaccagcatccccagcctgcaggacgctggcatcggattcatcctggtgatagaccggcgacgggacaaatggacctccgtgaaggcgtccgtcctgcgcatcgcagcatctttcccggcaaacctgcagctcgtcctcgtgcttcgcccgacgggttttttccaaaggactctctccgacatcgctttcaaattcaatagagatgactttaagatgaaggtgccggtcataatgctgagctccgtaccagacttacacggttacatcgataagtcgcagctgaccgaggacctgggtgggaccctggactactgccactcccggtggctgtgccagcgcacggccatcgaaagtttcgccctcatggtgaagcagacggctcagatgctgcagtccttcgggaccgagctggctgaaacagagctgcccaatgacgtccagtcgacacagctcagtgctgtgtgcgcacacagagaagaaggacaaggcgaaggaggatttgaggctggcactgaaagaggggcacagtgtcctggagagcctcagggagctgcaggctgagggctcagagcccagtgtgaaccaggaccagcttgacaaccaggccaccgtgcagaggctcctggcccagctgaacgaaaccgaggctgccttcgatgagttctgggcaaagcatcagcagaaactggagcagtgtctgcagctccggcactttgagcagggcttccgggaggtcaaagccatcttggacgcagcgtcccagaagatagcaaccttcacagacatcggcaacagcctggcgcatgtggagcacctgctgagggacctggccaactttcaggagaaatcaggcgtgttcgtggagagggcccgagccctgtctttgaccgcaagcagcttcattgggaacaagcactacgcggtagactccatccgcccaaagtgccaggagctccggcacctctgtgaccagttctctgcggagatcgcaaggaggagggggctgctcagcaagtccctggagctgcaccgccgcctggagacgtccatgaagtggtgtgatgaagggatttacctgctggcctcacaacctgtggacaagtgccagtcccaggacggcgcggaggctgccctccaggaaatcgagaagtttttggagaccggtgcggaaaataagatccaggagctcaacgcgatttacaaggaatacgaatccatcctcaaccaagatctcatggagcacgtgcgaaaggtcttccagaagcaggcaagcatggaggaggtgttccaccgcaggcaggccagcctgaagaagctggcggccaggcagacgcggcccgtgcagccggtggcccccagacccgaggcactggcaaagtcgccctgcccctccccaggcattcggcgaggctctgagaactccagctccgagggcggtgcgctccggagagggccctaccggagggccaagagtgagatgagtgagagccggcagggccgcggctcagcgggggaggaggaggaaagcctggccatcctgcgcaggcacgtgatgagcgagctcctggacacagaacgggcctacgtggaggagctgctgtgcgtcctggagggctacgccgcggagatggataacccactgatggctcacctcctgtcaacaggccttcacaacaagaaggatgttttgtttggaaacatggaggaaatctatcacttccacaacaggatattcctcagggagctggaaaactacactgactgcccagaactggttggaagatgctttctggagaggatggaagatttccagatctatgagaagtactgtcagaacaagccccgctctgagagcctgtggagacagtgctccgactgcccgtttttccaggaatgccagagaaagctggaccacaagctgagcctggactcctacctgctgaagccagtgcagaggatcaccaagtaccagctgctgctcaaggaaatgctgaaatacagcaggaactgcgagggggctgaggacctgcaggaggcgctgagctccatcctgggcatcctgaaggccgtgaacgactccatgcacctcatcgctatcaccggctatgacgggaatctcggcgacctgggcaagctgctgatgcagggctcgttcagcgtctggaccgaccacaagaggggccacaccaaggtgaaggagctggccaggttcaagcccatgcagcggcacctgttcctgcacgagaaggcagtgctcttctgcaaaaagagggaggagaatggggaggggtatgagaaagctccctcctacagctacaagcagtccttaaacatggctgccgttggcattacggagaacgtgaagggagatgctaagaagttcgagatctggtacaacgcgcgcgaggaggtctacatcgtccaggcgccaactcctgagattaaagccgcgtgggtgaatgaaattcggaaagtgctgaccagccagctgcaggcttgtagagaagccagccagcaccgggcgctggagcagtcacagagcctgcccctgccggccccgaccagcaccagtccctcaagaggaaactcaaggaacatcaagaagctggaagaaaggaaaacagaccccctaagcctggagggatacgtcagctcagcgccactgacaaagccccccgaaaagggcaaaggttggagcaaaacgtcccactcactggaggcacctgaggacgacgggggctggtcaagtgcagaggagcagattaactcgtccgacgcagaggaggacggcgggttgggccccaagaagctggttccaggtaaatacacggtcgtggcggaccacgagaagggaggccccgatgcgctgcgcgtgaggagcggggacgtggtggagctggtgcaggagggcgacgagggcctctgg

SEQ ID NO: 61022 - DNA, 897 bp, Homo sapiens
agacctgagcatggcggccaccaggtgcctgcgctggggcctgagccgagccggagtctggctgctcccaccgcccgcacggtgcccacgccgggcgctgcacaagcagaaagacggcactgagttcaagagcatctacagcctggacaagctctaccccgaatctcagggctcggacaccgcctggagggtcccgaatggtgcaaagcaagccgacagtgacatccctctagatcgcttgacaatatcttattgtcggagtagtggtcctggggggcagaatgtgaacaaagtgaattccaaggcagaagtcaggttccatttggcaactgccgagtggatcgcggagcccgtgcggcagaagatagccatcacgcataaaaacaagatcaacaggttaggagagttgatcctcacctctgagagcagccgctatcagttccggaatctggcagattgcctgccagaaaattcgagacatgatcactgaggccagccagacaccgaaggagccaacaaaagaagatgttaaacttcatagaatcaggatagaaaacatgaatcgggaaaggctgagacaaaagagaattcattctgctgtaaagacaagcaggagggtcgacatggactgaaatcaccctctgcagctgggagggctcttctgggcgtccgggcagctgcagctgagaggactttcacaccataaggagatttctgtttttctttttggctgttaatgcttgtctataacattggagccatcacaagaatgttcatttggaatgaaggctgcaggcactggttgcagacgtctttataggcagtcaccatgttgtcaaaccttaataatgcacctcatgtattagtcacaataaaaatcagaactcaaaaaaaaaa

SEQ ID NO: 61023 - DNA, 2187 bp, Homo sapiens
tttcgtctcccctcccttccccggccccggctctggccccggcccattcgctgttgggtcttctgctagggaggatgtcgggttcgtcgctgcccagcgccctggccctctcgctgttgctggtctctggctccctcctcccagggccaggcgccgctcagaacgctgggtttgtcaagtcgcccatgtcagaaactaagctcacgggggacgcctttgagctgtactgtgacgtggtcgggagccccacgccagagatccagtggtggtacgcagaagtcaaccgggcagagtctttcagacagctgtgggacggtgctcggaagcgccgtgtcaccgtaaacaccgcctacgggtcaaacggcgtgagtgtgctgagaataacccggctcaccttggaggactctgggacttacgagtgcagggccagcaacgaccccaagaggaatgacttgaggcaaaacccctccataacatggattcgagcccaggccaccataagcgtccttcagaagccaaggattgtcaccagtgaagaggtcattattcgagacagccctgttctccctgtcaccctgcagtgtaacctcacctccaggctctcacacccttacatacagctactggacaaaagaatgggggtggaactgagagccactcgtaagaatgccagcaacatggagtacaggatcaataagccgagagctgaggattcaggcgaataccactgcgtatatcactttgtcagcgctcctaaagcaaacgccaccattgaagtgaaagccgctcctgacatcactggccataaacggagtgagaacaagaatgaagggcaggatgccactatgtattgcaagtcagttggctacccccacccagactggatatggcgcaagaaggagaacgggatgcccatggacattgtcaatacctctggccgcttcttcatcatcaacaaggaaaattacactgagttgaacattgtgaacctgcagatcacggaagaccctggcgagtatgaatgtaatgccaccaacgccattggctccgcctctgttgtcactgtcctcagggtgcggagccacctggccccactctggcctttcttgggaattctggctgaaattatcatccttgtggtgatcattgttgtgtatgagaagaggaagaggccagatgaggttcctgacgatgatgaaccagctggaccaatgaaaaccaactctaccaacaatcacaaagataaaaacttgcgccagagaaacacaaattaagtactgcttacaatatctttaggttcctgaaactggtggcaacatgacctgctaaaattttctgcttggacctctttggttctctcccctttcaagtgagcaacaccacaatgactgtctaaagcatgccttatttagcctctcctgtaagggtgatctagccaggtacattttaaacaatgcttcagtgtagaaggtgtaaactattttgggcttgatgtgctgtgaatgttgcttttttttttcctttgttaaaatatttaaataaaagtgaaaaggtcctctgaggatcaaatcatgcatgcgccattttttacttaatgcagctgttaaattggcaaagctctaaaatgcactgctgccatctagggatacacttttgtaaagtacagcaaaacctacagatatatacagtatataaatatatatatatatatatttatatttttgggggtgggagaaatccaaaataaagtaaatgcttgtttcatttttaagctgctgatattcattccttattgtatgttgtcagatgaggaaattgtgcagttctggtacataaagatgagtaatataaactgaaatctataattttaagggcttaacctgtgactttaataagctggaacagtccactgaatgggtataatgaattgcagtatatacgtatgattgctttttaagtgattatcttttcttctgttaagtcatgtaaattcataaatccttttgcactgatgtgttgaaccttattcttgtacattcattcaatcaaggcaaacttttataatttttcttttgtttccaatgaccttgaaatgttatagcatggtaatattctatgcaactatagttatactttttggtttgacactgtattttttcacattgatttactggttgatgatagatt

SEQ ID NO: 61024 - DNA, 4590 bp, Homo sapiens
tttcgtcccccctccgcgactgcggataatgagcgcctcgggccgcccagcgcagccggagtatccacctcgatgaccacgggctgagccccgcgccgccaccatgtccgtggccttcgcgtctgcccggccaagaggcaaaggggaggttacgcagcaaaccatccagaagatgctggacgagaaccaccacctgatccagtgcatcctggagtaccagagcaagggcaagacggccgagtgcacgcagtaccagcagatcctgcaccggaacctggtatacctggccacgatcgcagactccaaccagaacatgcagtccctgcttcctgccccgcccacgcagaacatgaacctgggccctggagccctgactcagagcggctccagccagggcctgcactctcagggcagcctgagtgacgccatcagcacgggcctgccaccctcctccctcctgcagggccagattggcaacgggccgagccacgtgtccatgcagcagacggcgcctaacacgctgcccaccacctccatgagcatctctgggcccggctacagccacgcgggacccgcctcgcagggcgtccccatgcaggggcaaggcaccatcggcaactacgtgtctcggaccaacatcaacatgcagtccaacccagtctccatgatgcagcagcaggcggccacgtcgcactacagctcggcgcagggcggcagccagcactaccagggccagtcgtccatcgccatgatggggcagggcagccaggggagcagcatgatggggcagcggcccatggcgccctaccggccctcccagcaaggctcttcccagcagtacctgggccaggcagcagtactatggcgagcagtacagccacagccagggcagctgcgcagccccatgggccagcagtcatacaccggaggcccatgtcgattacgcctaccagcagtcatcttacacggagcagagctacgccaggtcattcgaggagtccacgcagcactactatgaggggggaaactcccagtacagccagcagcaggccgggtaccagcagggtgccgcgcagcagcagacgtactcccagcagcagtaccccagcccagcagagctaccccgggcagcagcagggctacgggtctgcccagggagccccgtcacagtaccccggctaccagcaaggccaaggccagcagtacggaagctaccgagcaccgcagacagcgccgtctgcccagcagcagcggccctacggctatgaacagggccagtatggaaattaccagcagtaagggacacacattctggctggagcccttgtggtagcgtgttcatccaggggccggatgggctggcggcagctctggtgaattgtgacatgttggttacctgttcgcccagtgccacgtctgcatgtgaagcgtgctcatttcatgctgggtatgacgccgagcgcacaccactggcgtgagacagcgcttggtggtgtgatacttttggtgctgtgtatagtattgtatgtcggtacacggagaggtatcctttttttgtcccccgcccccttctcaatgtttctagctagctttgggggtcattttgtcatcagagcattctgtgcccagggacaggacagatctcgaggacaccacagtccacctgttcccgtcaacagacgttaggtctcattttcctcctcatgcagtgttgtagtgtgggttgtcaacttttctttaactggctacgccacagctggacacacatgcagcccctggagggcagcctcttcctgtgcctcgatggggtgggtgggagggcatcttctgtgcgttgggtcagtttctgttacgtaacgaaaaggataaacatctcccacgggagaggccacagatggccacttccagagcttgcccattgcctgtctctcgccaattccgtttatccaaaaaggtacatgtttttgtattaaaaagtaaacagggatcagtgactgtattccaaataaatatgaatccctaagggccgtggacaaattgcctaacccagggccagcggtattgctgaaggaaaggggcagctctctgggaagtgggccctcagagattactctggctttgacccttgtttagctgatggtcatttctgggattggaatatttaataagcccaattctaagttgataggtaattttaaatattcaaaccaaatcttcccaacagttggcaagttgtttattttatattatttcttccaggacctacttgctcagatctccaagcaagcatttcttttcttttagggatgtctgaaagtcacatccagttacattactgtgttctttctaatgaaaagtaaaggttttatatagagaaacttgagtaatttttacatttctaagacattaaatcccatttaaattctgtgtgaacattaaagacagcacacttgcaaaagtatggtcaaaggaaaaaaatcccacatttcaattaacaagtagcatggacatttgatcaacctttagttggaataataatattcatatttgctatgaatccttttaaaaaaatctttggataaatgctgacagatttccaagaactaccaagaaaatacaagagatatccaatgcttgatatatgaggcctagtaataacgatatttctctttaattgatgttttgttttaaaagttaaaagtaattcttggcgtggtggttcacgcctgtaatcccagcactttgggaggccgaagcgggcggatcacctgaggtcgggagttcgagaccagcctgaccaacatggagaaaccccgtccctactaaaaatacaaaattagccaggtatggtggtgcatacctgtaatcccagctactcgggaacctgaggcaggagaatggcttgaacccaggagacagaggtggtggtggggcaagatcgcaccattgcacccgagcctaggcaacaagagtggaaattccgtctcaaaaaaataaataaataaataaataaataagttaaaattaattctttatccagagtcgggtgctttagaatttataagtcacttatgtgttttgcttgaattaattctgacagcccctatgaggaaatctggaggcaggtaacagttcccattttagagatgaagaactgaggcacagattaaaggacttgcctgtgttgaataccagtcctgttctaggacattctcccctctcctaggagacggatgtcacgcacaaatggggagagaagtgtttattttgtaggcactaagggtttctaaaacccttaacactggtaagggctcaaaaataaacgtatgtgttcatattcgatcaccgaaatgagagttcttaattgctaattgacaaacgcgttagcaatttcagttagggagtcatctcccttgattgtgttcttttcctgtcaattttcatagacctaatttgcaaactcaatcggggactaaaatttcccactgaaaatgttaaacattttagataactgtgaagatagtttatttttattccttgccaatctgggaatatgccttttttgtgtgtttgtgtgtttttttaagtgctgtattaataatactttctgaaagaaaaggacacttaccccaaaacttcaatctgaaatgtcttacattaagaatatcttgaatgttgtgtatatattttaaaaagcactttgcaaaatagtttgtacatttatttcctaatttatacatgatttttggtgttaatatatttaatgattaataacagaatgtttatttaatgtgctgtccatttttatgtaatattatggggaaagtgatgccagcagttccttttcattattctatcttctgtcatatgaatgttgagcaaagcttaggccaacatgaattgtttgtgaagtgtggttgatggtgctttgtttttttctgactacttctatggaaggccagtgaagaagcaaaggaagacatgaaaattgacgctcattcttcttcctattgttccctgacatccagcaaattgtgaatttgaaaaatgatggccagttttcagaagtgctgacaaattcatattgggtatgcaaaagctcatcacccattaaggtttgttgttgaatcaacagtactcagcatattaaaacagtacatcagaactcatgccaacagtctttatgatgggattaaggtggacaagatctcctaagatctgtgaatgggattaaggtggacaagatctcctaagatctgaaaagaaaccttaatacgctcatatggttggagtgttaagtgaacctctgattttgtcagggtttttctacgtgtaggcgtgaatagggggcaccccttcaaaactgtacaaagaagacgactgttttccatttccatttaaacatttttagccacttcatttctatttattgaacaggtcaaatttgtcttgttatttgtgagtacagtacatttaaaaaacatccttatcggttatttttttttcagtcggagtttgacgtataaattgtttatgcttttggtgtaatctctttaattaaactggttcttcaaaaatcaaaaaaaaaaa

SEQ ID NO: 61025 - DNA, 2314 bp, Homo sapiens
tttcgtgtggagaaagcctgcccacgtggctggcgggagcctcccggcctgggattggtcgaaaaggaggggcgtggggcgggcgtgggggcagttccccagcccaggtcctcctctcacccgggccagttttcaaggcgggctgtaactggtggcatttgtcccgggaccaggctggagtgcaacggtgcgatctcggctcatcacaacctccacctctcgggttcaaacgattctcctgccttagcctcccaagtagctgggattacaggtccacagttttatgtgtgagcaagatggaggctgacctgtctggctttaacatcgatgccccccgttgggaccagcgcaccttcctggggagagtgaagcacttcctaaacatcacggacccccgcactgtctttgtatctgagcgggagctggactgggccaaggtgatggtggagaagagcaggatgggggttgtgcccccaggcacccaagtggagcagctgctgtatgccaagaagctgtatgactcggccttccaccccgacactggggagaagatgaatgtcatcgggcgcatgtctttccagcttcctggcggcatgatcatcacgggcttcatgctccagttctacaggacgatgccggcggtgatcttctggcagtgggtgaaccagtccttcaatgccttagtcaactacaccaacaggaatgcggcttcccccacatcagtcaggcagatggccctttcctacttcacagccacaaccactgctgtggccacggctgtgggcatgaacatgttgacaaagaaagcgccgcccttggtgggccgctgggtgccctttgccgctgtggctgcggctaactgtgtcaatatccccatgatgcgacagcaggagctcataaagggaatctgcgtgaaggacaggaatgaaaatgagattggtcattcccggagagctgcggccataggcatcacccaagtagttatttctcggatcaccatgtcagctcctgggatgatcttgctgccagtcatcatggaaaggcttgagaaattgcacttcatgcagaaagtcaaggtcctgacgccccattgcaggtcatgctgagcgggtgcttcctcatcttcatggtgccagtggcgtgtgggcttttcccacagaaatgtgaattgccagtttcctatctggaaccgaagctccaagacactatcaaggccaagtatggagaacttgagccttatgtctacttcaataagggtctctaaatgccccacttcagcaaggaccagtctattcccatattcaccagctcctccttagctacgtgcacacttgtgtcctccttcccctttgccaacaaggcctgaaggccagggtagattggggggtgggacaatgaatgcctcatacttacaccctggtactggttgattggacctcaggggaaaaaagtgaaaaagggtagcaaaggccaatgtcttctagctgcttcctcaacccctgtcccctggagaccagaagctgaggccctctcagggaggagacatccaagcaaatcatttggaaaagttaggaaacctttaggattctggttccagccagggttgaggaaaagaccttggatcaaaaggaagcttctatacctctttcttcttcgcttcctcctctcccaagcaatggaaacttttacccatgtaattctagctgaactcaggaaaaagaagggggaaaggactctgtccccttggggctcatcacccttccacatcctcctcctcgttgccccctggtcaggcagcttctttttttttttttaaaaagggagttttgttttgccccccaggcggaaaggcaggggcccaatttgggtaaatggaaaatttgccctcgggattaaaggaaattttctggcttaaccctttaaaggaagggggaataacggggcccctgccccccccccggggttatttttggattttaagggaaaaggggtttaaccatggtggccaaaaggggtttaaacccctgaccttaggggaaccccccccccaaacctttgaaattggggggattaccgggttggacccccaaacccagcccggaagggttttttgggagggggggtaaccttggaattttcaaacccttaggggtttttagggctaaaaaggggaccggcccaggccacaaaattaacggggttttaaaaacatggttgaacctaattttggaaattttctttaaaaaagggaaggttttttaacccaatggccaaaaactttggtttaaaaaaatagccccataactgggaagaa

SEQ ID NO: 61026 - DNA, 2202 bp, Homo sapiens
cgctccgcaattcccgtgtcgacgatttcgtccacagcggcctaggggtgaaaggacagccagggttagatgttctgaggaggcgggagcaaccgagagagcacgtgagcatctgtcctttctacccgttcctctttatctttagtggtcagtagcagcggggatagcccggggcccggtgtatggccacggagttacagtgtccggactccatgccctgtcacaaccagcaagtaaactctgcctcaaccccaagtcccgagcagctgcgacctggcgatctgatcctggaccacgcagggggaaacagagcctccagggccaaggtgattctcctcacggggtacgcccattctagcctgccggccgagctggactctggggcctgcggcggctccagcctcaactcagagggcaacagtggtagtggtgacagtagcagctatgacgcaccagctggcaactccttcctagaggactgcgaactctcccggcagatcggggcgcagcttaagctgctgcctatgaatgatcagatacgggagctacagaccatcatccgggacaagacagccagtagaggtgacttcatgttttctgcggatcgtttgatcagacttgttgtggaagagggattgaatcagctgccatataaagaatgcatggtgaccactccaacagggtacaagtatgaaggagtgaaatttgagaagggaaattgtggggtcagcataatgagaagcggtgaggcaatggaacaaggtttacgagactgctgtcgatccatacgaattggaaagatcctgattcagagtgatgaggagacacaaagagccaaagtatattatgccaaattccccccagacatttaccggagaaaagtccttctgatgtatccaattctccagactgggaaatactgtaattgaagctgtaaaggttcttatagaacatggagttcaacccagtgttatcatcctactcagtctgttctccactcctcatggtgccaaatcaatcattcaggagtttccagagatcacaattttaactactgaagttcatcctgttgcacctacacattttggacagaaatactttggaacagactaagttatttaagtaaaataattgtcttatgtaatattacaatcatgttttgattttctatttgttttactgattcacttgagggtggcagagaaaaatgtgttaaaatgctttttagttttggaagtgggtatatttgaggttatatctcatttagttatttgtttactgttggcaccgaattcaacaatgaagtatatgcaactcttacaaaacataaattttaataatattctaatgcaaattactgaaccctcagtgcattaaaattatttcctaatttatgagcctcttagtttggaggttgcttgaagccacaaataaaactcaaatgagagtcagttctttgtcccactgtagtttgcattttgtttagtttggttttagctctactaaggtttcacatatgtggctattgccacattcctctactgttttctttctgatactggacatgctagtaacttggagaggagaataaaagaatgtctcctggaattttacattcccattaatgtcctcattcaattggcagacctaggatgtatggttaactctcaggccattatgtttttcatggctcatttcccaaactgcattgttggtaggtgccttgctaagctgtaatgcagtgaagaagatggtggggcatttttagtaattggaactgtaacattaatttacaagattgaaccggggatgtctggatgctgacaagggagagccaagtactgttaatgccatcaatcctctaggaaggaattggtggtttttctgaagtgtgggggaaagggtggtttcttgctggatttcatggccagtaagtaaatttaaatgcttcatttttaatttggatgtttctgctagagacctttgatttggaaattagttattttgcatgtttgtcaactgtatatgtatgaaaatagaaaaaaaacatgctttttgtaaaaacccctaagatttgtatatgttcatctttaggcttctgaaagggagagaaatcatattggaaatcagtgttggtgttttgaaatctgcttgtaaaactctcatctcattttacattgatattaaaacattttaacagtg

SEQ ID NO: 61027 - DNA, 3393 bp, Homo sapiens
tttcgtgccggagcctgcttgttgcagctgtgggtgaggacggctctagctaggtgagcggctccggccaggtgagcggggcgcataggtgacggagggccgagggcacgggtatgagtttctgccgggggcgaggtgagcggcttctgggaggaggccttttcttgacagtttagggtagcgggggaatggatgatccgggagtcccctgcggatgtcgtcccgcaccaggccgggaccgatttctggctccagtttccccagaattgcggagtgcgcacacctggaaggacccaagtcccgttttatagttgagaaactcaagactcagacaagtgaaacgacttttgcttcatgacagctggaactggaacccagttcccttttagactatggcgacatacctggagttcatccagcagaatgaagaacgggatggtgtgcgttttagttggaacgtgtggccttccagccggctggaggctacaagaatggttgtacccctggcttgtctccttactcctttgaaagaacgtccagacctacctcctgtacaatatgaacctgtgctttgcagcaggccaacttgtaaagctgttctcaacccactttgtcaggttgattatcgagcaaaactttgggcctgtaatttctgttttcaaagaaatcagtttcctccagcttatggaggcatatctgaggtgaatcaacctgccgaattgatgccccagttttctacaattgagtacgtgatacagcgaggtgctcagtcccctctgatctttctctatgtggttgacacatgcctggaggaagatgaccttcaagcactcaaagagtccctgcagatgtccctgagtcttcttcctccagatgctctggtgggtctgatcacatttggaaggatggtgcaggttcatgagctaagctgtgaaggaatctccaaaagttatgtcttccgagggaccaaggatttaactgcaaagcaaatacaggatatgttgggcctgaccaagccagccatgcccatgcagcaagcacgacctgcacaaccacaggagcacccttttgcttcaagcagatttctgcagccctgttcacaagattgatatgaacctcactgatcttcttggggagctacagagggacccatggccagtaactcaggggaagagacctttgcgatccactggtgtggctttgtccatttgctgttggcttgctggagggcacttttccaaacacagggagccaggatcatgctgtttactggaggtccccctacccaagggcctggcatggtggttggagatgaattaaagattcctattcgttcttggcatgatattgagaaagataatgcacgattcatgaaaaaggcaaccaagcactatgagatgcttgctaatcgaacagctgcaaatggtcactgcattgatatttatgcttgtgcccttgatcaaactggacttttggagatgaagtgttgtgcaaatcttactggaggctacatggtaatgggagattctttcaacacttctctcttcaagcagacattccaaagaatctttactaaagattttaatggagatttccgaatggcatttggtgctactttggacgtaaagacctctcgggaactgaagattgcaggagccattggtccatgcatatctctgaatgtgaaaggaccgtgtgtgtcagaaaatgagcttggtgttggtggcacgagtcagtggaaaatctgtggcctagatcctacatctacacttggcatctattttgaagttgtcaatcagcacaacaccccgatcccccaaggaggcagaggagccatccagtttgtcacgcattatcagcactccagcacccagagacgcatccgcgtgaccaccatcgcccgaaattgggcagatgtacagagtcagctcaggcacatagaagcagcatttgaccaggaggctgcggcagtgttgatggcacggcttggggtgttccgagcggagtcagaggaggggcccgatgtgctccggtggctggaccgacaactcatccgactgtgtcaaaagtttggacagtataacaaagaagaccccacttcttttaggttatcagattccttttctctatatcctcagtttatgttccatctgagaagatctccatttcttcaagtgtttaacaacagtcctgatgagtcgtcatattacagacatcattttgcccggcaggacctgacccagtccctcatcatgatccagcccattctctactcttactcctttcatgggccaccagagccagtactcttggatagcagcagcattctagctgacagaattttgctgatggatactttctttcaaattgtcatttatcttggtgagaccatagcccagtggcgtaaagctggctaccaggacatgcccgagtatgaaaacttcaagcaccttctgcaggcaccactggatgatgctcaagaaattctgcaagcacgcttcccgatgccacgttacatcaacacggagcatggaggcagtcaggctcgattccttttgtccaaagtgaacccatctcagacacacaataacctgtatgcttggggacaggaaactggagcacccatcctaactgatgatgttagcctgcaggtgttcatggaccatttgaagaagctggctgtctccagtgcctgttaagctgaggatacaaccaggaaatgcaacggtgtcagattgtgttcaaaatgtctagaaaggcttgataacattcctgttacttttctagcagattttaacaaataatcaaggacattttatatgtaactctttagattataatttatttgtattcctgtctttgtcctttttcttgcactataaaattataaggtcataaatgttttggtacttgtagatgtttatgtgctttttgtatcctaacttttagaatctaaataaaatcagaggtaatgtattttggcagcttgtttaggtgagaatcttaatgatcataaaaggaaataaatctagatgcagaaagtactggctaaaatattgctaatacaaatgtgatttcctgaggtctctgtgtgagtgtgtatgtgttttaagtgacttccttaagaggtgtttccctgaaccctaattccccataattaaagtaatgtatatgccaggatcaaaatgaaacaaatataccttatccctaaagagctcataacaaataagttacctccactctataaactcagacctactttttgaagataactgcttttaacctctccttacaagatttttgttgttgatgtatttaattttagcccatgtctcaattctcattttcaaagaaatcaatatattaatatacctttggtcaaaaaaaaaaaaa

SEQ ID NO: 61028 - DNA, 1895 bp, Homo sapiens
cccacgcgtccgccgccgccaccgtaaggctaggccgcgagcttagtcctgggagccgcctccgtcgccgccgtcagagccgccctatcagattatcttaacaagaaaaccaactggaaaaaaaaatgaaattccttatcttcgcatttttcggtggtgttcaccttttatccctgtgctctgggaaagctatatgcaagaatggcatctctaagaggacttttgaagaaataaaagaagaaatagccagctgtggagatgttgctaaagcaatcatcaacctagctgtttatggtaaagcccagaacagatcctatgagcgattggcacttctggttgatactgttggacccagactgagtggctccaagaacctagaaaaagccatccaaattatgtaccaaaacctgcagcaagatgggctggagaaagttcacctggagccagtgagaataccccactgggagaggggagaagaatcagctgtgatgctggagccaagaattcataagatagccatcctgggtcttggcagcagcattgggactcctccagaaggcattacagcagaagttctggtggtgacctctttcgatgaactgcagagaagggcctcagaagcaagagggaagattgttgtttataaccaaccttacatcaactactcaaggacggtgcaataccgaacgcagggggcggtggaagctgccaaggttggggctttggcatctctcattcgatccgtggcctccttctccatctacagtcctcacacaggtattcaggaataccaggatggcgtgcccaagattccaacagcctgtattacggtggaagatgcagaaatgatgtcaagaatggcttctcatgggatcaaaattgtcattcagctaaagatgggggcaaagacctacccagatactgattccttcaacactgtagcagagatcactgggagcaaatatccagaacaggttgtactggtcagtggacatctggacagctgggatgttgggcagggtgccatggatgatggcggtggagcctttatatcatgggaagcactctcacttattaaagatcttgggctgcgtccaaagaggactctgcggctggtgctctggactgcagaagaacaaggtggagttggtgccttccagtattatcagttacacaaggtaaatatttccaactacagtctggtgatggagtctgacgcaggaaccttcttacccactgggctgcaattcactggcagtgaaaaggccagggccatcatggaggaggttatgagcctgctgcagcccctcaatatcactcaggtcctgagccatggagaagggacagacatcaacttttggatccaagctggagtgcctggagccagtctacttgatgacttatacaagtatttcttcttccatcactcccacggagacaccatgactgtccatgggatccaaacgcagatgaatgtttgctgctgctgttttgggctgttgtttcttatgtgtgttgcagacatggaagaaatgctgcctaggtcctagaaacagtaagaaagaaaccgttttcatgcttctggcccaggaatccctgggtctgcaactttgggaaaacccctcttcacataaccattttcatcccaattcatcttcaaagcacaactctaatttcatgctttctcgttattatctttcttggatactttccaaattctctggattctaggaaaaagggaatcattctcccctcccctccccacccacatagaatcaacatatggtagggattacagtgggggcattttctttatatcacctcttaaaaacattgtttccactttaaaaagttaaacacttaataaatttttggaaataatctgaaaaaaaaaa

SEQ ID NO: 61029 - DNA, 1678 bp, Homo sapiens
gaggcagtaaggacttggactcctctgtccagcttttaacaatctaagttacgccctcttctgggtcacgctagaatcagatctgctctccagcatcttctgtttcctggcaagtgtttcctgctactttggattggccacgatgggctggagctgccttgtgacaggagcaggagggcttctgggtcagaggatcgtccgcctgttggtggaagagaaggaactgaaggagatcagggccttggacaaggccttcagaccagaattgagagaggaattttctaagctccagaacaggaccaagctgactgtacttgaaggagacattctggatgagccattcctgaaaagagcctgccaggacgtctcggtcgtcatccacaccgcctgtatcattgatgtctttggtgtcactcacagagagtccatcatgaatgtcaatgtgaaaggtacccagctactgttggaggcctgtgtccaagccagtgtgccagtcttcatctacaccagtagcatagaggtagccgggcccaactcctacaaggaaatcatccagaacggccacgaagaagagcctctggaaaacacatggcccactccatacccgtacagcaaaaagcttgctgagaaggctgtgctggcggctaatgggtggaatctaaaaaatggtgataccttgtacacttgtgcgttaagaccccacatatatctatggggaaggaggcccattcctttctgccagtataaatgaggccctgaacaacaatgggatcctgtcaagtgttggaaagttctctacagtcaacccagtctatgttggcaacgtggcctgggcccacattctggccttgagggctctgcgggaccccaagaaggccccaagtgtccgaggtcaattctattacatctcagatgacacgcctcaccaaagctatgataaccttaattacatcctgagcaaagagtttggcctccgccttgattccagatggagccttcctttaaccctgatgtactggattggcttcctgctggaagtagtgagcttcctactcagcccaatttactcctatcaaccccccttcaaccgccacacagtcacattatcaaatagtgtgttcaccttctcttacaagaaggctcagcgagatctggcgtataagccactctacagctgggaggaagccaagcagaaaaccgtggagtgggttggttcccttgtggaccggcacaaggagaccctgaagtccaagactcagtgatttaaggatgacagagatgtgcatgtgggtattgttaggaaatgtcatcaaactccacccacctggcttcatacagaaggcaacaggggcacaagcccaggtcctgctgcctctctttcacacaatgcccaacttactgtcttcttcatgtcatcaaaatctgcacagtcactggcccaaccagaactttctgtcctaatcatacaccagaagacaaacaatatgatttgctgttaccaaatctcagtggctgattctgaacaattgtggtctctcttaacttgaggttctcttttgactaatagagctccatttcccctcttaaatgagaaagcatttcttttctctttaatctcctattccttcacacagttcaacataaagagcaataaatgttttaatgcttaaaaaaaaaa

SEQ ID NO: 61030 - DNA, 2783 bp, Homo sapiens
ttttttttttttgatcttcttcaacttggatttatgtccatgattcgtgcaaatagctatccagggatggacagccaccctaatctgggcttctggcaccacaggcctccagctatggggtccagggtctgaacctcagggcctggcagcttcaggctggcgcccctcggcggacgtggctggcatggccttctcccatctgtgatggcttcagcaaggctactgtgagtggtggtggagagggccccagagccagaatatccatcattctcttctgttctggagacaaacccacacttcccacagctcctcacagaggggtaggggtgtgcgtggggcaaggtccctgctacagagcttgaaagcaaaaattaaacacacacaacaaattggtcatggcaactagagggcctgaaaccacttccgggaggttttgaaggaagggggtcttggctgcctcccactcttaggattgctgctcctggaggcttctgcaacggatggtgggtcaaagccggatgaggcctctctccactcagcagcagggaaggagtttttcccagtcactcccagcagagtacaaatgaaagccttctgggtggagcctccccagtcctgtaaacagctcagttcagggactggtatacaagctggccacccatctcagcctctcatccagctgaggctctggccacaccgtgcaagtggcttctagtttcttggcaatctgagatcagctggctctgcaagatgaaggtggagccaaatgacacaatctggtctcactgaggcccctcacggtcattttttggagactctggttctgtaggcctggctgtgggagggtccatcacttgggagctctgatttggatttcgaacccctccacagggtagacgccaggtgtattccggcagatggaagaggcgcgagttggggagtgggggcgggtgctccatggccatggggggaggggggtagcggatctgggaccagtcctcgaagccatggtgtggcaccatggctggcatgggcgggtaggcgtaggggtaggccccgcagagatgttctgggtggggctccacatggtaacgctctcctgaggcctttgctttcctcttctgctgtctgagggcttctcttgccttctcctcatctttgaatgcttttagctgggcatttgacagggtgacctgggcctgcagcttctccacttgcttcttcagctcttccttctcctcattcatgcgctcacgatcactgcgctccctctggaagtcctcctcgaagatcttcacctgctgtttcagcaactcattctgcgtgaccagctcctgtttccttaggagggcccctgctccttctgggctcccaaatgctgttggtggagatgatggcggggtttggatgctcagtgcttcctccagggccttgttgagccgctggatctccttttcctggtactcacgctgtcgggtgagtgggctcagctgatcctgcaggtacttgaccttttggcgcagctccttggcctctgctgtcagctgctccttgtcggtctcctccatttcaatcttggacttggccaggaggagcttgcggtcaaagtcacgctgcttctgctcccgctcggcctccaggtcagtcacctgcttctgcaaatcagccagcttctgacgcagctcagtgatcttctgctcatactgctgcttcatggaccggaaatgctggtcccactgcttgttcacttccagcagctcactgcgctgctgctccagcatcttcaccttcttctcggctgcgcccaaggccaccacctctgggaccttacctgccgtcacactagcctgctgctgtccagccactgccttcttgcctgtcccttccatcttcggtgagcctggccgcccagacgcaccctctttgttgccattgctcatcaacaacttcttgagctccaaattttcctcccgcagcctctcggcagcctgatcccgctgttccaggcccttatccaacttggccttcagagcctcgttctccttccgaagctgctcacacagggtctgcagaatggaggtgcgctgctcattcttgtgcaccttggatgccagtcggttgaactccagggccatgcggcccaggtgggtgaagagctggccgtggtccggctcctcggcacacacactcagcgtggtctccaggcgctgcaggtgcagcatcaggttgccgtcctcacggggcagggggcccagcgccatcgcattggcatggctgctgctctctggtgaattctgctcctcaggagtgaccacttcaaattcagaggaggtgccactggatggaggcttctggactggtgctggcttgtcactggggcatgcaggggctgtgggagatgctgtgacatttgagcccttatcctgtgagctcagccaggggggtcgaaaggagcccaaggagggagaaggtggtgggagcagctcgttgtccttcactagctcctctgccttctgccggagcctggtcgcttccatctgggactcttccaaaagctcccctaacatctttatcccttgcattttttccttcagccgggaattctccttcactaggcgctcaaaagctgcggatgcctctcctgagggcacgctgcccccagggtcgtagatccggtacggtcctctcccttccatgagggtagctcagcccctgccgtggtgcccgcctggctggggaagggcaggagaatacgagggtgtgtgcaccaggggcggctgtcc

SEQ ID NO: 61031 - DNA, 2359 bp, Homo sapiens
ttcggcagaggccgaacctggcttcgctaacgccctcccagctccctcgggtctgacttccggtttcctcgcgcgtccctggcgcgacccgcggacagcggcagccccttttccggctgagagctcatccacacttccaatcactttccggagtgcttcccctccctccggcccgtgctggtcccgacggcgggcctgggtctcgcgcgcgtattgctgggtaacgggccttctcccgcgtcggcccggcccctcctgcctcggctcgtccctccttccagaacgtcccgggctcctgccgagtcagaagaaatgggactccctccgcgacgtgcccggagcagctcccttcgctgtggaagcggcggtgtcttcgaagaaaccggaagcccgtggtgacccctggcgacccggtttgttttcggtccgtttccaaacactaaggaatcgaaactcggcggccttgggggcggccctacgtagcctggcttctggttgtcatggatgcactggtagaagatgatatctgtattctgaatcatgaaaaagcccataagagagatacagtgactccagtttcaatatattcaggagatgaatctgttgcttcccattttgctcttgtcactgcatatgaagacatcaaaaaacgacttaaggattcagagaaagagaactctttgttaaagaagagaataagatttttggaagaaaagctaatagctcgatttgaagaagaaacaagttccgtgggacgagaacaagtaaataaggcctatcatgcatatcgagaggtttgcattgatagagataatttgaagagcaaactggacaaaatgaataaagacaactctgaatctttgaaagtattgaatgagcagctacaatctaaagaagtagaactcctccagctgaggacagaggtggaaactcagcaggtgatgaggaatttaaatccaccttcatcaaactgggaggtggaaaagttgagctgtgacctgaagatccatggtttggaacaagagctggaactgatgaggaaagaatgtagcgatctcaaaatagaactacagaaagccaaacaaacggatccatatcaggaagacaatctgaagagcagagatctccaaaaactaagcatttcaagtgataatatgcagcatgcatactgggaactgaagagagaaatgtctaatttacatctggtgactcaagtacaagctgaactactaagaaaactgaaaacctcaactgcaatcaagaaagcctgtgcccctgtaggatgcagtgaagaccttggaagagacagcacaaaactgcacttgatgaattttactgcaacatacacaagacatccccctctcttaccaaatggcaaagctctttgtcataccacatcttcccctttaccaggagatgtaaaggttttatcagagaaagcaatcctccaatcatggacagacaatgagagatccattcctaatgatggtacatgctttcaggaacacagttcttatggcagaaattctctggaagacaattcctgggtatttccaagtcctcctaaatcaagtgagacagcatttggggaaactaaaactaaaactttgcctttacccaaccttccaccactgcattacttggatcaacataatcagaactgcctttataagaattaatttggaagagattcacgatttcaccatgaggacacttatctctttcagtggtcctcccaagaaattatttaacaaactgaaaggagattttgattaaaattttgcagaggtcttcagtatctatatttgaacacactgtacaatagtacaaaaaccaacatagttggttttctagtatgaaagagcaccctctagctccatattctaagaatctgaaatatgctactatactaattaataagtaaacttaaggtgtttaaaaaactctgccttctatattaattgtaaaattttgcctctcagaagaatggaattggagattgtagacgtggttttacaaaatgtgaaatgtctaaatatctgttcataaaaataaaaggaaaacatgtttcttcaaattgcataatggaacaaatggcaatgtgagtaggttacatttctgttgttataatgcgtaaagatattgaaaatataatgaaataaaagcatcttaggttataccatctttatatgctattgcgtttcaatatttaagatttaaagtgattttttggtcacagtgttttgttgataaaatttttttagaattgaagtttgaattctaagacttgaaacaacctgatcactgaagccaactttgtcccagcacattccttaagtcctaattgggaaaaaaaaaa

SEQ ID NO: 61032 - DNA, 2159 bp, Homo sapiens
tttcgtcggcgacggggcgctctcgggctgccggcggggccgagcgccgcgcgtcccgagcatggcaggctccctgcctccctgcgtggtggactgtggcaccgggtataccaagcttggctacgcaggcaacactgagccccagttcattattccttcatgtattgccatcagagagtcagcaaaggtagttgaccaagctcaaaggagagtgttgaggggagttgatgaccttgactttttcataggagatgaagccatcgataaacctacatatgctacaaagtggccgatacgacatggaatcattgaagactgggatcttatggaaaggttcatggagcaagtggtttttaaatatcttcgagctgaacctgaggaccattattttttaatgacagaacctccactcaatacaccagaaaacagagagtatcttgcagaaattatgtttgaatcatttaacgtaccaggactctacattgcagttcaggcagtgctggccttggcggcatcttggacatctcgacaagtgggtgaacgtacgttaacggggatagtcattgacagcggagatggagtcacccatgttatcccagtggcagaaggttatgtaattggaagctgcatcaaacacatcccgattgcaggtagagatattacgtatttcattcaacagctgctaagggagagggaggtgggaatccctcctgagcagtcactggagaccgcaaaagccattaaggagaaatactgttacatttgccccgatatagtcaaggaatttgccaagtatgatgtggatccccggaagtggatcaaacagtacacgggtatcaatgcgatcaaccagaagaagtttgttatagacgttggttacgaaagattcctgggacctgaaatattctttcacccggagtttgccaacccagactttatggagtccatctcagatgttgttgatgaagtaatacagaactgccccatcgatgtgcggcgcccgctgtataagaatgtcgtactctcaggaggctccaccatgttcagggatttcggacgccgactgcagagggatttgaagagagtggtggatgctaggctgaggctcagcgaggagctcagcggcggcgaggatcaagccgaagcctgtggaggtccaggtggtcacgcatcacatgcagcgctacgccgtgtggttcggagggctccatgctggcctcgactcccgagttctttcaggtctgccacaccaagaaggactatgaagagtacgggcccagcatctgccgccacaaccccgtctttggagtcatgtcctagtgtctgcctgaacgcgtcgttcgatggtgtcacgttggggaacaagtgtccttcacaacccagagaaggccgccgttctgtaaatagcgacgtcggtgttgctgcccagcagcgtgcttgcattgccggtgcatgaggcgcggcgcgggcccttcagtaaaagccatttatccgtgtgccgaccgctgtctgccagcctcctccttctcccgccctcctcaccctcgctctccctcctcctcctcctccgagctgctagctgacaaatacaattctgaaggaatccaaatgtgactttgaaaattgttagagaaaacaacattaggaaaatgggcgcaaaatcgttaggtcccaggagagaatgtgggggcgcaaacccttttcctcccagcctatttttgtaaataaaatgtttaaacttgaaatacaaatcgatgtttatatttcctatcattttgtattttatggtatttggtacaactggctgatactaagcacgaatagatattgatgttatggagtgctgtaatccaaagtttttaattgtgaggcatgttctgatatgtttataggcaaacaaataaaacagcaaacttttttgccacatgtttgctagaaaatgattatactttattggagtgacatgaagtttgaacactaaacagtaatgtatgagaattactacagatacatgtatcttttagttttttttgtttgaactttctggagctgttttatagaagatgatggtttgttgtcggtgagtgttggatgaaatacttccttgctctcattgtaataaaagctgttagaatatttgtaaatatcaaaaaaaaaaa

SEQ ID NO: 61033 - DNA, 1191 bp, Homo sapiens
  misc_feature (1)...(1191): n = a,t,c or g
gttggggatccagagccatgtcggacctgctactactgggcctgattgggggcctgactctcttactgctgctgacgctgctggcctttgccgggggccccctgataagtgccgatgtgccgtgggcagcatcctgagtgaaggtgaggaatcgccctcccctgagctcatcgacctctaccagaaatttggcttcaaggtgttctccttcccggcacccagccatgtggtgacagccaccttcccctacaccaccattctgtccatctggctggctacccgccgtgtccatcctgccttggacacctacatcaaggagcggaagctgtgtgcctatcctcggctggagatctaccaggaagaccagatccatttcatgtgcccactggcacggcagggagacttctatgtgcctgagatgaaggagacagagtggaaatggcgggggcttgtggaggccattgacacccaggtggatggcacaggagctgacacaatgagtgacacgagttctgtaagcttggaagtgagccctggcagccgggagacttcagctgccacactgtcacctggggcgagcagccgtggctgggatgacggtgacacccgcagcgagcacagctacagcgagtcaggtgccagcggctcctcttttgaggagctggacttggagggcgaggggcccttaggggagtcacggctggaccctgggactgagcccctggggactaccaagtggctctgggagcccactgcccctgagaagggcaaggagtaacccatggcctgcaccctcctgcagtgcagttgctgaggaactgagcagactctccagcagactctccagccctcttcctccttcctctgggggaggaggggttcctgagggacctgacttcccctgctccaggcctcttgctaagccttctcctcactgccctttaggctcccagggccagaggagccagggactattttctgcaccagcccccagggctgccgcccctgttgtgtctttttttcagactcacagtggagcttccaggacccagaataaagccaatgatttacttgtttcacctggnnnnnnnnnnnnnngggggggccgttttaaaggatccttgggggggccaaagcttacgggggcaggcaacggaatagttttttccttatagggagccgaattatacc

SEQ ID NO: 61034 - DNA, 3892 bp, Homo sapiens
ttcacagatgcactgctcaggcctggcctggcatcctgacatagccacccagttagtgctgtgctcagaggatgatcgacttcccgtgattcagctgtgggacttgcgctttgcctcctcgcccttgaaggtgctggagagccacagcagggggatcttgtcagtgtcatggagccaggctgatgctgagctgctgctcactagtgctaaggacagccagatcttgtgccggaacctggggagcagtgaggtggtatataagctaccaacacagagcagctggtgctttgatgtgcagtggtgccctcgggacccttcagtgttctctgctgcctccttcaacggctggatcagtttgtactctgtgatgggtaggagctgggaagtccagcatatgagacaggctgacaagatctcctcttccttcagcaaaggccagcctctcccaccactgcaggtgccagagcaagtggcacaagcaccactgatacctcccctgaaaaaaccccccaaatggattagaagaccaacaggtgtttcatttgcttttggagggaagctggttacttttggcctccccagcacccctgcccatctggtgccacagccttgcccccgcctagtcttcatcagtcaagtcaccacagaatctgaattcctgatgcgatcagctgagctgcaggaggccttgggatcaggaaatctactgaattactgtcagaacaagagccagcaagctttactgcaaagtgaaaagatgctgtggcagttcctgaaggtgaccttagagcaagactccagaatgaaattcctaaagcttttaggatacagtaaagatgagcttcagaagaaggtggccacatggttgaagagtgacgtggggctaggtgagagtcctcagcccaagggaaatgacctcaacagtgacagacaacaggccttctgcagccaggcctccaaacacaccacaaaggaagcctctgcttcctcagccttctttgatgagctggtccctcagaacatgactccttgggagatccccatcacaaaagatattgatggactcctaagccaggctctcctgcttggggaactgggtccggccgtggagctgtgtctgaaggaggagcgctttgctgatgccattatcctggcccaggctgggggtacagatctgctgaagcaaacacaggagcgctacttggccaagaagaaaaccaaaatctcctcgcttctagcctgtgttgtgcaaaagaattggaaggatgtggtgtgtacctgtagcctgaagaactggagagaggcactggctttgctactgacatactcaggcacagagaaatttcccgagctctgtgacatgctgggaactcgcatggaacaggagggcagcagggcactaacctccgaagccagactctgttatgtgtgctcagggagtgtggagcggctggtggagtgctgggcaaaatgccaccaggctttgtcccccatggctctgcaggacctgatggagaaggtgatggttcttaacaggagcttggagcaactgcggggtcctcatggggtgagcccaggccctgccacaacctacagggtcactcagtatgccaacctcctggcagcccagggcagcctggccactgccatgagctttctacccagggactgtgctcagccaccagttcagcagctaagagatcggctttttcatgctcaaggttctgctgtcttgggccaacagtctccccctttccccttcccccggattgttgtgggagttaccctccactctaaagagacatcatcttacagattgggatccccagccttctcaccaggtcccaactccatctccaaggccaagggttttcacccctcagtcatcaccagcgatgcccttggcaccttcccatcctagcccttatcagggtcccaggacacagaatataagtgactacagggcacctgggccccaggccatccagcctttgcctttgagccctggggtaaggcctgcttcatctcagccacagctattaggagggcaaagggtgcaagttcctaacccggtgggattccctgggacatggcctcttcctggttcccctctacccatggcatgcccaggcatcatgcgacctggctctacctccctgcctgagactcctagactgttccctctgcttcctctgagaccactaggtcccggccgcatggtctcccacaccccagcccctcctgcaagcttccctgtgccataccttccaggggacccaggtgccccatgctctagtgtcctcccaaccactggcatcttgactcctcacccaggacctcaagattcctggaaagaagccccagcccccaggggaaacctccagaggaacaagctgccagagacatttatgcccccagcaccaattactgctccagttatgagcctcacccctgagctacaagggattcttccctcacagccccctgtctccagtgtgagtcatgctcccccaggagttccaggagaactcagcctgcagcagcttcagcacctgccacctgagaagatggaaaggaaggagctgcccccagagcatcagtccttgaagagcagctttgaggcgcttctccaacgctgctccctgtctgcaactgacttaaagacaaaaaggaagctggaagaggcagcccagcgtctggagtatctatatgagaagctctgtgaggggacactctcacctcatgtcgtggctgggctccatgaggttgcccgatgtgtggatgcaggaagctttgagcagggccttgcagtgcatgcccaggtggcgggctgtagcagcttcagcgaggtgtccagcttcatgcctatcctgaaggctgtcctcatcatcgctcataagctgctggtctaaaccaggcagcctctcttgctaggaggccacttctgctgttacataactcctccctgcagaagaggggacttctgcaacagattctgtttctttttcccgactcttttccttgctgccaggtatgtgatgctgtaggcttggctccaaaccagctgagtgcctgctttttactcctttatgtctggccttctaggatctgtccaagacactctcaggcctggagggagggcatagaatcagttcttcactctccctaatactacactctgtaaggacctggggcaggatatcttctcccccagggatcttctatttaagtggcttctgagagggtgaacaggattgttacttttaagcctacctctgctgtgacccatcatgtgggtcttttgtttctcccttctgtggtttatgagcctgcccttaccttttccctgcctctgacttggtatttccaggtccgtatttctctgtagcccagggtctggggtagagctgactgctgttcaccctttgaacaactcatggacgtgagggatgggtgctgagcagaaccaagagaggaaactttggcgctgttaaaatggaatttctcatctgccggcattattaagggtgggctaggttggatggaaggtgaaagggatgaactgccttttgctggaagctgtcttaggctgtgagacaggagcaggggaaccacagcctatggggaactgcccttgactccacctatgttggagccttagcccaaggccattccttctgtgatgataaagcccagttctggaattggagccatattaaggaatgattctcttccagcgctgctcctcaagggttgggggtccttctccctcgcagccaccacatgtctcagggctaccttctccgattggatttgcatttgtggcactgtctttgatgcagtgatgtacttaatggtgcaataaagctgcttcgatttggtaaaaaaaaaa

SEQ ID NO: 61035 - DNA, 2652 bp, Homo sapiens
tttcgtgcgccatgtgagggggctcgggggccgcggggggccgggcgctccccgccggagatgaggaaactgaggctcagagaggtcacatggcttgctcgaggccccccagccagtgtgaacccacatccctgcccccagggccacctgcaggacgccgacacctacccctcagcagacgccggagagaaatgagtagcaacaaagagcagcggtcagcagtgttcgtgatcctctttgccctcatcaccatcctcatcctctacagctccaacagtgccaatgaggtcttccattacggctccctgcggggccgtagccgccgacctgtcaacctcaagaagtggagcatcactgacggctatgtccccattctcggcaacaagacactgccctctcggtgccaccagtgtgtgattgtcagcagctccagccacctgctgggcaccaagctgggccctgagatcgagcgggctgagtgtacaatccgcatgaatgatgcacccaccactggctactcagctgatgtgggcaacaagaccacctaccgcgtcgtggcccattccagtgtgttccgcgtgctgaggaggccccaggagtttgtcaaccggacccctgaaaccgtgttcatcttctgggggcccccgagcaagatgcagaagccccagggcagcctcgtgcgtgtgatccagcgagcgggcctggtgttccccaacatggaagcatatgccgtctctcccggccgcatgcggcaatttgacgacctcttccggggtgagacgggcaaggacagggagaagtctcattcgtggttgagcacaggctggtttaccatggtgatcgcggtggagttgtgtgaccacgtgcatgtctatggcatggtcccccccaactactgcagccagcggccccgcctccagcgcatgccctaccactactacgagcccaaggggccggacgaatgtgtcacctacatccagaatgagcacagtcgcaagggcaaccaccaccgcttcatcaccgagaaaagggtcttctcatcgtgggcccagctgtatggcatcaccttctcccacccctcctggacctaggccacccagcctgtgggacctcaggagggtcagaggagaagcagcctccgcccagccgctaggccagggaccatcttctggccaatcaaggcttgctggagtgtctcccagccaatcagggccttgaggaggatgtatcctccagccaatcagggcctggggaatctgttggcgaatcagggatttgggagtctatgtggttaatcaggggtgtctttcttgtgcagtcagggtctgcgcacagtcaatcagggtagagggggtatttctgagtcaatctgaggctaaggacatgtcctttcccatgaggccttggttcagagccccaggaatggaccccccaatcactccccactctgctgggataatggggtcctgtcccaaggagctgggaacttggtgttgccccctcaatttccagcaccagaaagagagattgtgtgggggtagaagctgtctggaggcccggccagagaatttgtggggttgtggaggttgtgggggcggtggggaggtcccagaggtgggaggctggcatccaggtcttggctctgccctgagaccttggacaaacccttccccctctctgggcacccttctgcccacaccagtttccagtgcggagtctgagaccctttccacctcccctacaagtgccctcgggtctgtcctccccgtctggaccctcccagccactatcccttgctggaaggctcagctctttggggggtctggggtgacctccccacctcctggaaaactttagggtatttttgcgcaaactccttcagggttgggggactctgaaggaaacgggacaaaaccttaagctgttttcttagcccctcagccagctgccattagcttggctcttaaagggccaggcctccttttctgccctctagcagggaggttttccaactgttggaggcgcctttggggctgcccctttgtctggagtcactgggggcttccgagggtctccctcgaccctctgtcgtcctgggatggctgtcgggagctgtatcacctgggttctgtcccctggctctgtatcaggcactttattaaagctgggcctcagtggggtgtgtttgtctcctgctcttctggagcctggaaggaaagggcttcaggaggaggctgtgaggctggagggaccagatggaggaggccagcagctagccattgcacactggggtgatgggtgggggcggtgactgccccagacttggttttgtaatgatttgtacaggaataaacacacctacgctccggcttcgtgtcctgtgtcgcctgggtcgagcacagccttctggtccagcgctgcatgcggcctcaggaccacgtcttccggttgggggctcccagtaaagcgatcctcagcttcttcagcagccagtggccagtgagagcactgacacggctcccgggacctcggcaggatggaagagaagctgaagaaaaccaagatcatctttgtggtgggtgggcctggctcaaggaagggcacccagtgtgagaagatcgtgcagaagtatggctacacccacctctccac

SEQ ID NO: 61036 - DNA, 2123 bp, Homo sapiens
  misc_feature (1)...(2123): n = a,t,c or g
aggtaccgcgccggaattcccggggacggtcgcaaggattacattcgcctgacccggcccggcttgaccctgcccgggcgcgccatgttcgcgcgtgggtcccggaggcgccgctccgggcgtgcgcctccagaggcagaggacccagaccggggccagccctgcaactcctgtagggagcagtgccctggcttcctgctccacggctggagaaagatctgccagcattgcaaatgcccgcgggaggagcatgcagtgcacgcggtgcctgtggacctggaacgcatcatgtgtcggctaatctcggacttccagcgccactccatctccgacgacgactcaggctgtgcatcggaggagtatgcctgggtgcccccaggccttaagccggagcaggtatatcaatttttcagctgcctcccagaggacaaggtcccctacgtcaacagtcctggggagaaatacaggatcaagcagctgctgcaccagctgcccccacacgacagtgaggcacagtactgcacagcacttggaagaaggaggaaaagaaagagctccgagcctttagccagcagcggaagcgggagaatcttggggccttggcatcgtgcgcatcttcccggtgaccatcacttggggccatcttgtgaggagtgcggaaagcagattggaggtggggacatcgcagtgttttgccagccgtgcaagccttgggttgctgnttggacaaccaagttgctttcgtgtgtaccacgtgccaggaactgctggttgacctcatctacttctaccatgttggcaaggtctactgcgggcgtcaccatgccgaatgcctgcgtccacgctgccaagcctgtgacgagatcatcttctcccctgagtgcacggaggctgagggccgccactggcacatggatcacttctgctgctttgagtgtgaagcttcactaggagggcagcgctatgtcatgcgtcagagccgcccccactgctgcgcctgctacgaggcccgccacgcggagtactgtgatggctgtggggagcacatcggcctggaccaaggccagatggcttacgagggccagcactggcatgcctcagaccgctgcttctgctgtagtcgctgtgggcgggccctgctgggccgcccattcctgccacgccgaggcctaatcttctgctctcgagcctgcagccttgggtccgagcccacagctccagggccgagccgccgcagctggagtgccggccctgtcacagccccacttgcagcctccacagcctctttctctgctgtgaagggggcatcagagaccaccaccaaaggcaccagcacagagttagcgccagctacaggccctgaggagccctcccgctttctgagaggggctccccaccgccactccatgccggaactggggctccgcagtgtccccgagccgcccccagagtcccccggccagcctaacctgcgcccagatgatagtgccttcggtcgtcagagcaccccacgcgtcagcttccgcgaccctctggtgtctgaaggaggcccgcgccggaccctgagtgcacccccggcccagcgccgcaggccacgcagtcccccacccagggcccccagccgtcgccgccaccatcatcataatcaccatcaccatcacaaccgccacccaagcagacgtcgccactatcaatgtgacgcgggatcagggtcagactcggaatcttgctccagctcgccctccagttccagttccgaatcatcagaggatgatggcttcttcctaggagagcgcatccctctgcccccgcatttgtgcaggcccatgcctgctcaggacactgcaatggagaccttcaactccccatctttatcgctccccagggactctcgcgcagggatgcctcgtcaggcccgagacaagaactgcatcgtggcttgaaggcaggccgtcctggagggggctccattctccagtcagagtagatgatgaggcccatgcccctcacccccacgccccgcccctacaacctaagtcataaatcctcttcctccctcctttatcagattggttctatttttggttctggtttagagacttggtctaccctattggccaggc

SEQ ID NO: 61037 - DNA, 827 bp, Homo sapiens; identical to SEQ ID NO: 60912
  misc_feature (1)...(827): n = a,t,c or g

SEQ ID NO: 61038 - DNA, 6345 bp, Homo sapiens
ttttttttttgttctttaaagcactttattaatgaaagttcggaaacctaaaaattgaacagtagtttaataaaatgtggcacatatgatggaatatcatgcagccattaagagatgtagaaatatacttgacacagcaagacagtcatggtattgttgagtgaaaaaaagttacaaaacagtatgtacactttgatcccattaaaaatatctataaatgcacagaaaagtctggaaggccatatacttaaataacagtggttctccctggatgatggaattatcagtgatttttctttctcactgaatcttttttctttttgccaacagggctatgacttgtattataaaaaagcattaacaattctttaaaaagtgtcctttgaagtaagaatgagagcagaacttagcaatctaagaggcacagggatgtacacatggtttctgatactgttttaacggtttgtcaaggtgttttgatgttagtcaccaattaaaaggcactgtgttgagtgaaaacgtggatggtggtagtgcttactttagactaagcaatccattcctagaaaccttccacagcaaacaagtactggcattctaagcaatacttcccactatgatatccttataccttcctacccacttgtaatacagcccagaagtttcccctacatggacagggcactgttgttggttaagggttacagaaggcagagaggatttttcaagtgatgtcagagaataggcctgaaggtgaaatgaatgttctcttagttctattgcagtggttctcaagcttagagtgcaacagtattactcaaacagcttttacaacagattgctgggctccactctcagagtttgattcagtaggtctctgaaaaggcttataaatttgcatttttctttcattcaacaaaaatttattgagttcatactatgtcctagatcttgtgctaagagttgggaatgtaactgccatcaaaagaattatagtttttatctcagggagcctacattctagagtgacagatatacactaaacaaataaattataaaaataactataattacaatgactactgctagaacacaattaagattagaagactcagtttttgtcttaaaatatttaaaaagctgtcacatggaagactgattccatgagcccttgaaaacaaaaaataagtaaaaatgaaggtagaaagttcttgaaaatagtaatcagcattttaaacaagtctccaggagatgccaatattgccggtctggggtctcacactttgccaatcactgctctactgagtagacattttttctttccttgagacaagagtcttattctatcacccaggttggagtgcagtggtgcaatcttggctcactgtagcctctgcctctggggttcaagtgattctcctgcctcagcctcccgagtagctggaattacaggtgcacgccaccatgcccggctaatttttatattttcagtagagacagggtttccccatgttggccaggctggtctcgaactcctgacctcagatgatccacccgcctcagcctccaaagtgctgggattacaggcatgagccacggcacccaggccctgagtagactttctaatgagcgtaatatgggagaaagggcaggggtggttgtggaactctctctccagcgtttgagactcacatgaggtaaaagccacttcatcttatctggaggtcttgaggcaaagttggctataggctaaactatgaagctatctctccattacagcacctcactgaagcttaaagtgctaaatagtagggcaatatttcagaatttcaggtgtttgggagatagggaaggaatttttctggaattctgtcagcatggaggtgagtggggcctctatgggtaaacaagtctgtgggtttttgccttgccctccattgtcttctccactccacagtttatcccagaaatgtttccccaacactagcttcccagtctcactttgttctttgttcagggggaggataacaggagactatgaagatgactctaccccactggtgatcctggcctcaggatttatttcccatgtgacgcagagtgaggaggcacattcccatttttgagacctcatttcttgcaacatcaatttttctgattagcaccataaaaagttttaacaccatgaccgtttaggttagattactttgaggaaaaaggtagacacaatccaatcactttttttttcatttatagaagagcctacaattattttagtttttcattcatatgtgcatccttcacatgtcactatactttcagattaagctcagtggcacagagcttatttaaacaattctgaactgcaccatgaattaataggcttcccaagctttttcttccacgcccaagaaacttcaggcctttacctgagtaaaaactaaacttgactttaaaataagccaaaaccaaaataaaacccaaacaaccaaaccccattaaaataaaaagcaataaacctaagaacaagcatatatattgtggtggttctgtggtagacaaacgtaccagaagcctttgaagcttaacattattgaaggtttctgtacattactgggtaactaaaatcaactttcacttgatggaaagctgaaagttctgaaaaatgatttatactgactgtgggaaggttaaacctggggtctgatttaaagagggtggaggataggattgatagagagaaaacagagcccagatgtaaaagaggtatctctggtgcacagtgatatgcaaggcctatagacttggtaggtcaggatgctacaggggctaacaaggggaaactgatatttacaggatgtgtttactatgtgccaagcctttccctgaaaggcacctgaaatacaagataacatttgctaatcctcacaaccaccctatggtgtcataattattgtcctcattttactggtaaggaaaaggcagttatacatctcatttgaagcttaaagagcacaatatgtgaggaagcctggatttgaacccaggaccatttcactccattaccgatattctttcccctgtattactacatttcccataaacctaattcatagttgctgtttaagtcgatctgaagttttggtatgatctttcaaagcctaaatctggacttataaaacacaatagatggtactctaggctgtagaacttcctttctgaggggagagaaaatttcatttacttggttttacagaaaactgaccagcttgagcagcttttcagggtttctttaagaatatggcaattgagagtgagtcaaaacatcttgtacaactataaaactgcagaagaatttgtctcatggcacagaaataaaagggtaactactacttttaaagtttagactgtgagttaaattgtcaacatgtttaccaagttcttattaggagctcttaacacaaaattttaaaacggtgtttaagtattcatttttttaaaagtaccaaaaagtatcattttaatagcttaacattccctcaataaatgaactatacttttgtacttcatgcttaagttagagtaaattgctttagttgtcagaatgtgctatgctatcttggttacacatctttttatctggaacagttcttccccagaccctctctcactcccaaaactggagttacatgactcccaaatacagtaccttgtattttccccatcacaccacgaatcctactataggataattgcttaattttctgtatcctttaatggtctttaagctctgcaggggcaagaactgtgtgcatattgttcaggacagtatccccagttgaccagcacagtatctggccctcaacaaatgtttgttgaatgaatgaattagaacagaagtcttaacatggaaacaatgatttatagcaatggccccaacagcaattttctagcttccaatgtgtcactaataatttcattagtatgtgtttcataagcagagatcctcatcaagatagcctgtgttcattaataaattttcaatgttttaatagtaagctcagagtgacccaatttattttgttcgtatacaatttataatgtagttgcattattccgtatttgtatacaaatctgctgttcaataagaacacattctctttactgtaccacagtacagtaaatggatccaatcccaattatgcattaaattgtgccaattgaataatcttaaaaactttatgtttaatgaagtaaatttgtcctagattttctagaaccttaactacaaatttatcagagaaatacggtattgcttttcaagaactagttgttcttaaatttaaaagaaaccattcagtagtgtttaaaaaaccaaacaactctgaaaataacccatcaaaacataatattaaaatcatttgatttctgttgggaaaaccagggtaaacatagtttaaatgcgtttttgtctatggaaagcattcaggaaaattctacttttcacaaaagaggtttatatcctacagctctttttaagaccgaaagtttaaaataaattttaattttattctttggctattatttatacctaataaatgagtcgctgatatcaattcacaatagatttaattttacataaaaggaaaaggcttgctgttaatgaaaaatcccagtagaaaacagttctgctttaagttgaggctcaaaagtagaagctgcttattagtgaaacctcaataaaaagagaattttcgtaagaaaacattcttcggcatgaaagctctaacataaattctgtaatgaaatatttaccatgcaactttattggcagaaaggccagtttctgatggctggtattttcagtctcttaacacattaacatgggaaggatacttaacctgctttatttagagttaattgtatataaatacaatgtcatgatgggcaacctttccataagtccacctacttaattggagcagttctaagtaggtaattgggcaccttgcccttctgggtttcccctttcccccattagccagtctgaatcccatcccaacaacactgaacacagtgatcaccctcaactgcccagaagtgaataattccagtactgtttgctgccatccataaatccataagagaaccccggccctttcctgctgcccactacactcccttaaggtcactgaggttggaaggagaggtgattactaggccacttgttgaaagccatggcagaagaaccaatcgcatttggtaaaactgatggtacaggtgtcacagaagtctgatttgttgttactaagataattggatggaaaacttcccagttgtttctggaggtccaacatatactggtaacactggtgcatagtaagtcatctggggcttctacaaagtcattcagacagcgaaggtgatgggcatgtgtactgctgattccctctagcagaagtctggtaatctctgcttgacgatcaaattcactttgagttattcttaattcctgttcagatgaatttctagtttcctgcaagcttttgcccttttttagtctcgtttttgcagcatccaaatccagtctcttattttgcaatagtttcctttctttagcaattgttttgtaatcctgccttcctaataaagtttcttaaaggagtaagaaaatttaaggctgacgtttgaatcagttctctgtctgctgttccaattcttttttgggtttctcccacattttataagggcattcccataagctgttcctgggccaaactcaggtccctgcatcaatcatatattgtcccaaaagttctgggttgtttatacgacttggagcttttctatccagtttctcataaacaaattcttctatcctggcatttggatttggctgcaataacacttcagtttgtttcattattttttctgtccatattttggtacattcagctttgctaaggaggttctctaagtgagcatccaattctgtcttctcagcctggccaagcttttcttctgtgaactgcacggcgcgactgaggaaggtgcctgcgtcggccgccagcttcttcacgttgaagtccatgatattcatcctaggcggcagccgggcggagccggccgacctagcggcggcgaggcggaggtgccgcggccgggctggggcgcagggctagagcggcgagggcagacgtggtaggtggaagggagggcgccagccccgcagccgcagctgtcgtttccgtgaacggggaggatgaaggcggggcgagggaggagaacaagcgcgcggcggcagcgccaaggatgggtcagtcggctcggagaacggccgctaac

SEQ ID NO: 61039 - DNA, 5245 bp, Homo sapiens
gaattcccgggtcgacgatttcgtgccgctcctcctttgaagaggttttgcgtctctttccgccggtggcgtcggcgctcacgcaggggcgggtcccggtagcgccaggcggtgcagggcgggaaggggattcgtggcgacggcggcggcagggacagcaggagcagtggtgctgtcagcgcggccgtcggagacatgggagacccggggtcggagataatagaatctgtccctccagctggccctgaggcatctgagtcaacaacggatgaaaatgaagacgacattcagtttgtcagtgaaggaccattacgacctgttcttgaatacattgatctggtcagcagtgatgatgaagagcctagcacctcttatactgatgagaatattaaacgtaaagaccatattgattatcagaaggataaagttgctttaactctggctcgtctagcccgccatgttgaagtggagaaacagcagaaagaagagaagaatagagcattcagagaaaaaattgattttcagcatgctcatgggttacaagaattggaatttattcgaggacattctgatacagaagcagcaagactgtgtgtggaccagtggctaaaaatgccaggactcaaaacaggcacaattaattgtggaacaaaaagttcattccgaagaggaggccacacgtgggtgtctgggaaaccaattttatgtcctataatgcactgtaacaaggagtttgacaatgggcaccttctcttaggacatttgaaaaggttcgatcactctccatgtgatccaacaattacactacatggacctttcttcagctcctttgcttgtgtagtatgttataaaaaatttgttactcaacaacaatatagagatcacctttttgataaggaagccacagatgatggacataacaacaaccttcttcctcagattattcagtgttttgcatgtccaaattgcttccttctttttagcagaaaggaggagtgttcaaagcatatgtctggaaagaatcatttccatcagagtttcaaactgggtgataacaaaggaattgcacatccaatatctttcccatcttttgcaaagaaacttttgatctctctgtgcaaagatgttccctttcaagttaagtgtgtggcctgccacaagacactgcgttcccacatggagctcactgcccatttcagagttcattgtcgaaatgctggacctgtagctgtagctgagaagagcattacccaggttgcagagaaattcatattaagaggttattgtccagattgcaatcaagtctttgtggatgaaaccagcacccaaaatcataagcagaattcaggacacaaagtccgagtcattaactcagtggaagaatcagtcttactctattgccacagcagcgaagggaacaaggatccttcttctgacttgcatttattgttggatcaatcaaaattttcatcacttaaaagaaccatgtctattaaagaatctagctcactggagtgcattgccattccaaaaaaagaagatgaatttaaaagataaaagccatgaaggtgttgcttgtgtccagaaagaaaaatcagtagttaaaacctggttctgtgaatgcaatcagcgattcccaagtgaagatgcagtagaaaagcatgttttctcagcaaacacaatgggttataaatgtgtggtctgtggaaaggtatgtgatgattcaggggtcattcgtttacacatgagccggattcacggaggggcacatttaaataactttcttttctggtgtcggacatgcaaaaaggagttaacaaggaaagatactatcatggcacatgtgactgaatttcataatggacacagatatttttatgagatggatgaggtagaaggtgaaactttgccatcatcctctacaacattggataatttgactgctaacaagccttcatcagctattactgttattgatcattccccggcaaatagttctccgaggggtaaatggcaatgccggatttgtgaagatatgtttgattcccaggaatatgtaaaacagcactgcatgtctttggcaagccacaagtttcatagatacagctgtgctcactgcagaaagccttttcataagatagaaacattgtaccgacattgccaagatgagcatgacaatgagataaagattaaatacttctgtgggctttgtgatcttatctttaatgtggaagaagcatttctgagtcattatgaggagcaccacagcatagattatgtatttgtgtcagaaaaaactgaaacttcaattaaaaccgaagatgattttccagtaatagagaccagtaaccagttaacttgtggttgccgtgagagttacatctgtaaagtcaacagaaaagaagattatagcagatgtctccaaatcatgctggataaaggaaaactgtggtttcgctgcagtttatgttcggcaacagcacagaatttaaccgacatgaacactcatatccatcaagtgcacaaagaaaagagtgatgaggaggagcagcagtatgtaatcaagtgtggcacctgcaccaaagcatttcatgatcctgagagtgcacagcagcatttccatagaaaacattgcttcttacagaaacccagtgtggctcattttggatctgaaaaatccaaacctgttacaagttttactgctagtgcctcacatacagagagaaaactgaaacaggcaataaactattccaaaaagtttagaacatggagaaaggatttgagaatgaacctaagctatccgaatatagaagaagaaattgttgagcttccagatttggattacctgcgaaccatgactcatatagtctttgtagattttgataactggtcaaacttttttggtcatctaccagggcatctaaaccaaggaacatttatttggggctttcaaggaggaaacaccaattggaagcctccgctcaactgtaagatttataactacctgaacaggattggatgcttcttccttcatcctcgctgtagtaaaagaaaagatgctgctgattttgccatatgtatgcatgcgtggccgtctagatgaacaactacccaagcaaattcctttcaccatcctctcaggagatcaaggttttctggagctagagaatcaatttaagaagactcagaggccagcttcatatacttaaaccctcaccacttaggagggagattatgatgtgtgccttgttaaatagcatatctgataccaccaaagaatgtgacagtgatgataacatgggtgccaaaaatacttcaataggagaagaatttatatccacagaagatgtggaattagaagaagctattagaagaagtcttgaggaaatgtaattaaagatattaccacacaacatcaagtggccttgaagagactgagataacgaattcttgagtttgttttctaaaggagaccagaaatccactattacaaatgtatttgaaaacatgtttttgctttcatatgttcaaaatctgatctttgttttgtatttttgtgctaatgtgcaaacatgtacagaagaaatagaatacatgttcatgcaaatataaattatgtattctaatataggtgtaacagtttcccagttaactttgaatttatatatttagatttaaaggattaaaaaaaaaggaaagctcttgacagttgtttcccaaatagcattagttctttaattttatttgtactgtacaaatgatgctagtttatttttttagcagtgaaaatgaatataaaaaaaggtgacataggtcaagttttccataaattctacttctcatgtggcactattatataatacctttgagatctttggtttacgtttattaagaagagggtaatggaaactgatcatggaaacatttaaaattttatcagcaatgttctttgtgggtgccatgcatatgtaaattattgctttaattagagcagcacattgctaaaataaaaaatacaccttaatttttaagaaataatttaaatgaaacaatttcccattcccttttacctgcttagactttttatgtgacttgtatggtctcctggttaaagggaatggtgtcagaatatttgcataaaattatttttcataacagtccttttttatatattggtgtaaacataatattcttcaagaaataatgttgaaagcctactcaggaataatcttccttaactctttaaatttttatttcatgtgaagtgttttcagtttagttattcactgaattgtcagtttccttcatttggtattacatatttaattcttaaatattgaggccccattgtgagtaataaaaaatacgacataagtagaagactaagaagggcttgtcatattatctttgtgtatatgcttcatgttatttaaccagaaatgtcttatctctaaaaatttttagtagtaattatttaccaaacttaaaaacatttctataaatataaagcttttctttatatttaagacaaaatataaaggctagaatttggttccttctctgtaacactaaatattttagtgtgaaattgaatttttttattactatagtcttttcaatctataatttgtgtttttaatttcttgatatgtcacttctgttcctccctgcttgcattttttaaaaactagacattgtggcttgagaatttatcaatcatctttccgaaatgaccacattgtgcttttagtttgtatgtttaagtggtcaagcaaggctctaggaggtagtcactgagctggaccttaaacacatctgcaggagctcacaaaatgggagcaaaagaggcattccagaaagaagagtagttaagcagatgtgggggcagggcaagaggagacagcaccttgttgccagagattctacacaaaggtgtgatggacactgatgctctattaagaagcttttgtggtgtgtgtggtagagaataattaaggcttctgataagacaggaaagggatatttcatcatgactgttaagaaaaggtaactgggttgtttaatgttttaattgataattgtcactgatcgtatttctacttgttaaataattaaaaatcatcttaaaattcatactttgactttaatttagacacaaggagatgtaatcgctgtgtaacatcagagaaagctatatggattatcgtcagaagtaaatgtttcctaaccattgacaaaaaaaaaa

SEQ ID NO: 61040 - DNA, 1719 bp, Homo sapiens
tttttttttttatagagttcattcaacaagagtttattggggttgtactgtgagctcggccagagctgtcttgagtggcgggtgtggacggatctggtccgggatcatttcatggggccatggtctgttacatagctgacttctaggctccggctggcgttgagcagagtccgggagtcctcgtggctgaccacacacgtgtaggtggctggctgagggctgggcggggctgggacacgcagcacactccagggcccagaacgtggtgctcctggggctttggaagggggcgtgcgggggcaaacccagaagtgttcacctcaccgtggtcctccagccacatcaggaggatgttggggggcgagaagccagacacctcacacaggagccacgaggctcgcctcgggagggtcagacgaggccagcaggttcagggaaagcttgacgggtgcctgcgcagcgggttctctcagcgccatcaacctctggggtgggaggctgggatggttcagtgtgcaggtgacggaggtccccgcgttccacaaggacctgggcagggtcagacggctgtgctggctctgggagccgttgctgtgccgctccagcagcccttcctccacgccccctgtggggaccttcccagccacctcccaggtcaggtgagcatccttcaggtcactgcccaccacgaagcaggtgaaggtggctttgtcccggagccacaggtcctgcactgcaggggttagcaggtagacgccaagaggctgggtgtggctcggacactctggtgtctttgtctctctctcttcttgttcctctttctccttctccttcttcttctcttctcctcctcttcctgtgttacgggtggtggctggggctgtggttgccttggcgaggctgccctctgcttggggttgtgcagtgggcactgaggaggcctgtgcctttggagactctggccagcggaagatctccttcttactcttgctggcggtgtgctggaccacgcatttgtactcgccttggcgccactgctggaggggggtggagagctggctgcttgtcatgtagtagctgtcccgtctttgtatctcagggaaggttctctggcgcctggctctgtgtccccatgtaccaggtgacagtcaacggacgttgggtggtacccagttatcaagcatgccaggaccacagggctgttatcctttgggtgtctgcaccctgatatgatggggaacacatccggagccttggtgggtgctgaagagacggtgaccattgtcccttggccccagatatcaaaagcatagtcaccgtgatctgttgcacagtaatacacggccgtgtcctcagatctcaggctgctcagctccatgtaggctgtgtctgtagatgtgtcctcggtcatggtgactctgccctggaacttctgtgcgtagattgtttcaccatcttcaggatcaaaagctcccatccactcaagcccttttccaggagcctgtcgcacccagtgcatggataattcagtgagggtgtatccggaaaccttgcaggagaccttcactgaggccccaggcttcttcacctcagccccagactgtaccagctggacctgggcgtgggtgcctgtagctgctgccaccaagaagaggatcctccaggtgcagtccatggtgaggtgctgcactctgggggcttctgtaggggagggatgtg

SEQ ID NO: 61041 - DNA, 2016 bp, Homo sapiens
actaagaagacaagacagaagacaaagaataggtaaaacaggatgtaaaagtttatatacaagaatataatgtttatctgaaatatttacagtgttggttaaagcaatatttttacaacttttaaaggtaaactactatgtatattacaggtaagctacaatgggtttaatttgcaaaagttaagtaagaaatgttttaaacaaggcttaaagtactcaagtcaattataaaatttatatcttttgccttttacttgaagaaatcatgctatagaaatggttaatgtgcttctaataaatggaagtattgtagctggaatgtgatacatgtaacagtttaagttcccattgaaggtataaaatgatgaattgttgtaagacttagacactgagtctcagtctggagctgatgaagatgttgagataacagccagctttatctcaacagggtttgtgacccacaagtttgggccacagagaaaattgaagcaatttgcatgttatgacaacctcagtgggaagtgaaaatcagctgactcaaaacaacaaacaacaaccaaccagacccaagtcacagttgcacctattcaaaactagctttaaagtgagctatttttaaacttcataaaaatattcatgattttattagtttgaatatttctacaagattcgggtgggcttttcctttaggtgaaaacagctatccactcctgtggccttataactcaggaaatgctggggatgcaaacgtgcaaaaggcagggggaagctgcccaggctgagactggagcagctaggagtgtgcttggggaacgggagctgagatcccggagcagaaatggtcagccgtgctctggagcaggcctgtcggagccatcaggatgccgggactagcactgcagcttgcggatgctgcgggagatgcgcttgaactctctctgccccttctgccaccgcttcaccgaggtgatcaccagctccccaccctgtttctgtcccatgaccagatagggcgcgttgatgtcgttcatctcctcacaggtgcactgcaagctgtctttgagccacagcaccgatttcttcaggtccctttcggacacaccgttcagcttgtaaatggtcttgctcttggtctccaggatgattttggtatctcggttgatgtaggttatctccttcacttttattttcagtgcaaaatcatttttacaaagcgtttccattaatgtcgttgttcatcatcatttttatttttgcaggcttcacataccctttggagcttcctcggtggctggcagggaggtgtccgctgctagcggagggggatgcaaaggtcgttgtcctgggggaaacggtcgcactcaagcatgtcgggccaggggaagccgaaggcggacatgaccggggcgcagcggtccttcacctgcacgcagagcgagtggcatggctggatggtctcgtctaggtcatcgaggcagacgggggcgaagagcgagcacaggaacttcttggtgtccgggtggcactgcttcatgaccagcgggatccaagcgccggcctgctccagcacctccttcatggtctcgtggcccagcaggttgggcagccgcatgttctggtattcgatgccgtggcacagctgcaggttggccgggatgggcttgcaattgctgcgcttgtaggagaagtcgggctggccaaagaggaagagcccgcgcgccgagcccaggcagcagtgcgaggcgaggaagagcagcagcagcgagccagggccctgcagcatcgtgggcgcgcgaccccgagggggcagagggagcggagccggggaagggcgaggcggccggagttcgagcttgtcccgggcccgctctcttcgctgggtgcgactcggggccccgaaaagctggcaccggcggctggggcgcggagaagcgggacaccgggaggacacgcgggcgagcgctgcaagcccgcgcgcagctccggggggctccgacccgggggagcagaatgagc

SEQ ID NO: 61042 - DNA, 4116 bp, Homo sapiens
  misc_feature (1)...(4116): n = a,t,c or g
ttttttttttttaagtattttaggcatatttaataaataacttcagtaaatagcactgtaaaaagtgaactgttaaaactaaaggcacttaaaacaagaatgtgactagtgtgaaacaagatgggcaactcaaatggtgagaagtaaacatacagtggtctgttatggcactaactcaaagtaagactcgcgtaggtgagagctgttgcatagccacagtataacttcacatgttcattaaaaaggcaaattgaccgctaaaacttcaaagaaaaagtactcataaaaaaagtcttaccccaaaattgcaaacaaatacattaaaagattagaagaggtgatagaaagcaccagacattaaacaaaataaaaataataaaataaattcaactcaaaaggtccccattcagcaaatactttgtaaagtatggcctgtatgtaaatagtgctaaatcaaggactttttagcagaaaattgctcggttcttttatctaaggcttgaatttgtaaagtgaaggcataaaagttaccaaacattaagtaactcttaaaatggcacacaggttttaaagctattggtttttccttcctaactctctgaatttttcccatggcctttgtagatcaactatttcaaacgtattttacaccagcaactctcaacatacttgtctttcagatatgtcatcagtcatgtctaacaggcaaatagcaaaataacagatttaaaacaatccttaactagctagcaggacatttactttggattctgcataactgcaaactgacatatttgtaaagctaaaaatcagttttaatacatgattaacagaaactctcatcatgctcattactttaactattgccctttcaatcgctatagaaatatcacttaatccaataagcttgatttcaatagtccaggaagaaaaggtcaaaaaggcacaatgtgaccttagctgacaagaataaccatcctgtctcaagtcttttgtcagtccctggcatgaattacaacattattttcaaaataataaaacattttaaaaattatacatattgtacattttcaaaacctgcacatgagtaaaaccatggcaatattgccctaaagctacctaactgtgactatggaaattgctactttgcattcagtgttgtgggatttgcacgggcagtactcattttccctcatacttcggattgaccacagttgttacggcactcttataaataggattttcacccgtgtcccatttggcattcattttctccttttcaaatttagcaaactcccttctgtcatgaattatcattaaaagcttccatatcagcagtaatgcaaggccaataagaacaattccagcaaccacaccagctacaattggaatgatgtctggaccagtgggacactctggattctccacaacatgaaccatgacctcgttgttcccattcactgaatacgtaaaatagaaccaacagtcgtcaacatccttctccttacaatgggacacaggatcaggttggaccggctggggtaatttgtcccgactttctaccttggtaatgttaaaataggaacattcctgtgtgcatgtgtctttcttttctcctttattgaaggctctgcactgaacacattctttatgctcagcacagacaccaaggcaggtctgacacatctcacacgtttgcccttgaaacttcggatctgtacacttacagacaccacactcgcagatgccccggccattgcagatctgtccgttgctggcttcacaagtactagtatccaaagaacagtcacatgcactgccagtgtagttggggttgcactcacacacacgacacttgcaaacaccatttcctccacaaattaagccattggatctatcacagttgaaattatcacactcgcagaatttgccagaataaatttcatttgtattatccctcttcctacaaacacactgtccgcagacgcactctccattgttactgcagatttctgaactgttttctttcctggcagtaaagcatccaatgtcttcactgttaacttcatctgtgctgcattcacaatgtctaccaacacgcccttcattgcacctgcacgcgccacactcaaatgtcccatttccttcatgacacttgggactttcagggatgccttcgctttggcattcacattcacagatgtactgaagaataacctctacttcctccgtaaagcccagaggcctaattttaaagctgtcagaatccttttttggacacttatttgaagttatgctaatttcaaattgaacctcatctccaatggaaatattggaacattttcttccattttcccctgttccattcaccccgttcttgccagtaagattggtaacttatggttactccttctgacaatttgccgttttccaaaatgacttctgaggaaagggaattgtatgcatcaatgatcaactgaattacattgctagaatttgcagataatgttcctactgctgacttagggatcaagtttttcagctccttgtaaacaggctgaaattcttcagtaactgcaaaaattgtctgaatattattttcactcagtttctggacaaggtgagcaatagaaggataatcataataatggctcattgtgtacatattattttccaggtgacattgtccatcatttggtaaaacaatgccaccaagtttcccatctccagcaaagtgaaacccggcatctgtggaaaacaccagcagccgtgtaacattcctccagccaatcagtgatccgcaaactgcaacttgcatgatggcatcgaaaccaccttctggagaatccaaatttccagatatgcgctgttttccaacaagttcattaaatacttctcctttattagtaagactgagcacatttttgtagctaaatgggctggtgcagttctgttcacttgtgcaagggttcctgagcttagctggtgttgtgctaatgtaaggcatcacagtcttttccacaaatgagccaaatccaattctgaagtccgaagtaatcctcctcatttcattcatcagatctgttccaagactttttacattctccaaatcgtctttcattgaataagacaggtccataaggtagtagaggtcaatgggatagtcttcagctctcttgaattttaatgtaaatgtctgtggctcccctgatcttaatcgcaaaaccaactgctgtggttggatctgagtaatatcctctggcttgagcttctctgctgttcctttgctacggttggttacatttttatttttctttatatctttggagcctctgggattttctatgtcatctggagggcaacccttcttttttaaggcttctaaatcatcacatcgtgcagaagtaggcattccttcctgtaaaaatgttgaatttgtgcaccacccacaatttggccctgcttgtatacattctccacatgatttggcatttgcttttaaacatctattttcatctgtttgagcaaacacacagcaaactgaactgatcagtccaatccagaaaattggttgtaaattcatatcaggcagcagctatcctccaactcctcgaacgagagaatgagagaaacatgcaggctgctttatagggtagatgtggaaaccaacgctctggaagtacagtactctgacaaaggtcacacagaaattcagtggcagacccggcactgacacccaggtttcctgtctcccaatcgagaagcctttagtacatcaaactgcttctctgatcaggtatctgaaaataaattaccacaaagaaatgtgaccaatgaagtctttctgtctttaactcaaacatgccaatcactggaaaaacccagaaatacctatgtcactcacaaaaatgcctctcaaaggaattagaagttcagagaagaaactggggaaggtaaatgcttttctagattcctcttcctccacccccccttgactattaaaagtgttcccaggtcctccttcagcccgtttttcactccacaccctcctttggtgtttgcatgcacagcctatagcttcaaccagcaatagcgtngnnttgtcaaattacgaaa

SEQ ID NO: 61043 - DNA, 3810 bp, Homo sapiens
  misc_feature (1)...(3810): n = a,t,c or g
ttttttttttttactatctacaaaaatttattatatatttacagaagaaaagcatgcatatcattaaacaaataaaatactttttatcacaacacagtacatatttgtcatttttaaaaagccacacaatagaaacaagacaccaagatatttaattatcttgttgactcctgtaaaatagctaaacactcatcattcgcggtgcaatactcatagacataagttcctgaaacaatagtttgcatgcgtaaggcattcgcaccaaagaaatctgggttttattgcggcagcccctgcattcatatgtatgggtcctggtgttggcaatcgccattattccacaaagattgcaaacatgaacctgatatggatctgatgcctcaaacaatctttcccttaaaaactgggctgctccatgggcaatctgacaatctcgttccatttctccaaaacgcaggccaccatcacgagatctaccctccatgggctgtctattgaggatctgaataggtcccctagcacgagagtgaatcttatcatccaccatatgcttcaaacgctggtaataagtggggccaataaatatttgtgatgtgatttttcgaccagtgaacccattgtacaggacctcatttcctctgagatgatagccataatcagataaaagattagaaatcttctgcacgttaacagcatcattaaatggagtggcatcaccaatttcacccttgttagccgataccttcccttgaaggcattcaattaagtgaccaatagtcatacgagaggggatggcatggggattgatgatgatatcaggggtgataccttcacaggtgaaaggcatatcctcttgtctatactgaataccacaagtacccttttggaccatgtcgaactagcaaattgtctcccaatctgtgggaacccctaacagagcgtaccccttattttaacaaaatttaatatcccttccctggattgaagagttacccataacctgatcccacaatgcccgtctcactagttcctgagaaaagtgctacagtctcttcttggtatagcggtctattggtgctctcccaaattcatcttcattttccaggcaaggtgactgttttgcctataataacatcatctcctgataccacgaaccccctgggagctatcaaaaccnatcatcatccagcttgtcgtaaatggcatgcgcgtcntgccctggcatggttcacgtgtaggcttctcaaaaacttcttcttgatcaaatccttttttagactcctgttctttgtatgagcgatagaaaacagacctgaagaagccgcggtcctacagctgaacgattcatgataacagagtcttccctgattatatcccagtgtatgatgcaatggccacaattgagttgatgcctgctggcagctctctaaatcgtagatattccatagaccgtgtagtcacaagtggcttttgaggataatagagaacatgggccaatgtgtccatgcgaacatggaagttggtgatgtaaactcccatagcctgcttacccatagcagactggtatgtgtttctaggggactggttatgatcaggaaagggaataatagatgcacagacaccaaggatcattgagggatgaatctcacagtgtgtatatgtggaacaataagctacttctttctcctgtaaatcatctggagtcattgcaagcatcactgtttcttcttccagggtatcaatatactccactaccccactggccacaagatcctgccaactatagttgttatattctctctctttcaattggtcaatatgcctcttcttcaaaagtagcttttgtttttccacaatcagaagtggtctacaaatacggcctgcatccgtatagatccgaatctccctctctcgaatatctctgatcatagaaacttcagacacaatgatgtccatctgacgtctcaatttccttagggtgttcataagttgttcgggatctttatgtattccaacccagcagccattaacaaaaatcttggttgcatcagcaatagctgcaggagaaatttcttctaaattttccatactccattcttctaaaaattccagaattggagatggttgagatccaactgaaatatacgccatcaaggctaaattcttcacaagtcctacagcatggccctctggggtctcggcaggacacaccattccccacaacgtattatgcaactgtcttggttttgctagcttgccgtctctaccaataggagaatttaaacgacgcaggtgagaaagagtagacgcaaaagtcaggcggtttaacacctgagatactccagctctggcttgatgagctttcttttgatcaccccagtttccagtagctaaagagtattttaggccatcagatatgatccgtgttttaattgccaactccaagttaaaatcctttcctcgatcaataaatttctgtgcatagatccgcacttctttaagcaaattcttaaacatacctctaaataagaatgcaagcagcggcccagcaagatccaatctcttgtttccatagtgatctctgtcatctagttctcttctacccaaagctgccagaagtaacctatgaaccatgtatcccaagaaataggcttttttggtctcacaaaaatcactgacaccaacatgagggagcatttctttttgtaaaacttcctttgcatatttaattcttttctctttagtaacaccaggctttgctcctcttgaaccaatgaaatttagtgcaacattctgttcttggatgacaaaagcttcatcgagagaaggtttaaccatttccatcatctctggatcttcaaaatcataaataatatgttctaaaatatctctgtcggacacaaaacctaatgctctgaacacaataatgatgggaacttcttgcttgatatatggtagagttgccacaatgcgctgaccaatagcactcttcttggcaccctgtcctcctcttgccagcatgctaacccatatagtactggtgggtcgggaagaattctcaagacatgatctacactctcctgtgtaggcatatttagaatcctttttggcaaacacataaactgtgtttgttgccattttctcttgggcaatcagaaccttttctgatccattaataatgaaatagccaccaggatccaaagggcattcatttaactcacaaagatcacgatctgtcaagccattcaaaaggcagtaagttgaccgcaacataattggaatttttcctataaaagttttctgatgctgagtctgaagttgttcttcaccttctttaatgactgtttttgttatatcaacataaagcggagcagaatacgtgagattccttaatctagcttcattgggcatcattggtgaaggagcaccatctctttcccaatgggtaggcttggaaagataaatttgttcaaacttcagcaaatatcgtggcggttcttcaacttctccactagcatgctgagcttcagcctgtaggtctataggaggagcgtcttccacaattctttgaacagacatctgaataaactcatcaaaagaatccagctgttgtctaaccaagcctttctcgtcaaaataggaactgattacaatccagcatgcttcttgccacaaatccggggtgatttcatcatcatcctcatcatattgcatatcctcatccgcgtcgtacatattgccaaacggttctcgagctcctaactcttgaaatcaaaagacaaaaaccgcccagaagccagcagcgccagg

SEQ ID NO: 61044 - DNA, 1330 bp, Homo sapiens
tttgtttttccccactccctgccttccctacaattgtttctttcacctgtccctcgcctactatcggctgcccttgctttctctgtgcctgtttataacctactgctcccctccctaccttaccttactctttcttcttccccttacctctcgctgcccctatccctgccttgcccttccctctctttctctcctccccttcttcccctcacctctcggtccctattgccttctctactggtctcctcccctctctttctctccccttctccttccgtcccctctccctttctatctccctcctcctgctctctttgagtggctacagcaaaccaaacagcccagcagcccagcagcccagccatgcggcgcctcacagtcgatgactttgaaatcgggcgtcccctgggcaaggggaaatttgggaatgtgtacctggctcggctcaaggaaagccatttcattgtggccctgaaggttctcttcaagtcgcagatagagaaggaaggactggagcaccagctgcgccgggaaattgagatccaggctcatctacaacaccccaatatcctgcgcctgtataactatttccatgatgcacgccgggtgtacctgattctggaatatgctccaaggggtgagctctacaaggagctgcagaaaagcgagaaattagatgaacagcgcacagccacgataatagaggagttggcagatgccctgacctactgccatgacaagaaagtgattcacagagatattaagccagagaacctgctgctggggttcaggggtgaggtgaagattgcagattttggctggtctgtgcacacccccctccctgaggaggaagacaatgtgtgggacactggactacttgccgccagaaatgattgaggggagaacatatgatgaaaaggtggatttgtggtgcattggagtgctctgctatgagctgctggtgggatatccaccctttgagagcgcctcccacagtgagacttacagacgcatcctcaaggtagatgtgaggtttccactatcaatgcctctgggggcccgggacttgatttccaggcttctcagataccagcccttggagagactgcccctggcccagatcctgaagcacccctgggttcaggcccactcccgaagggtgctgcctccctgtgctcagatggcttcctgagccctgtctgcctctgttccctttgtgtgtgttcagggagctctcactggctctgccacctcatttgtctttatttttttctcttttaagatgtaagatgctaattaataaaagctgaatcacttcataccaaaaaaa

SEQ ID NO: 61045 - DNA, 5115 bp, Homo sapiens
aagacaatgggaagcccccgtcctccgccccgtcccggcccagacccccgcggaggaagcggagagagtccacctcggcagaagaggacatcattgatggatttgccatgaccagctttgtcacttttgaagcgctggagaaagatgtagcacttaagcctcaggaacgtgtggagaaacgccagacgcccctgaccaagaagaaacgagaagcacttaccaatggcttgtcctttcattcaaagaagagcagactcagccacccacaccactacagctcagatcgagaaaatgaccgcaatctctgccagcaccttgggaagagaaagaaaatgccgaaggcactcagacagctcaagccaggacagaacagctgcagggacagtgacagtgaaagtgccagtggagaatccaagggcttccaccggagcagctctcgggaaaggctcagtgatagttcagctccttccagcttgggaacaggctacttctgtgacagtgacagtgaccaggaagagaaggcatcagatgccagctctgaaaaactcttcaacactgttattgtaaacaaagatccggagttaggtgttggcacgctaccagaacatgacagccaggatgcagggccgattgtccccaagatatcgggtctagagagaagccaggagaagagccaggactgttgcaaagagccaatctttgagcctgtggtgcttaaagacccctgccctcaggtcgcacagccaataccccagccgcagacggagccccaactccgagctccttctccggaccctgacttggtgcagcgcacagaggccccacctcaacccccacctctgagtacacagccaccacagggccctcctgaggcccagctccagcctgccccgcagcctcaggtgcagaggccacccaggccacagtcccccacccagctgctccatcagaacctcccacctgtgcaggcccacccctctgctcagagcctctcccagccattgtcagcctacaacagcagtagcttaagcctcaacagtttaagcagcagcagaagcagcactccagcgaagactcagcccgccccacctcacatctcccaccacccctctgcctccccgttccccctctccctgcccaaccacagccccctgcacagcttcacacccaccctccagccccccgcacactcacatcaccccaatatgtttgcccctcccactgctctgcctcctccaccaccactgacatcaggaagtctgcaggtggccggacacccggccgggagcacttactcagagcaagacatcttgcgacaggaactgaacactcgttttttggcctctcagagtgctgaccgcggggcttccctgggccctccgccctacctgcggaccgagttccatcagcaccagcaccagcaccagcacacccaccagcacacgcaccagcacaccttcacgccgttcccccacgccatcccacccaccgccatcatgccgacgccagcacctcccatgtttgacaaataccctacaaaagttgacccattctaccggcacagtctcttccattcctatcctcctgcagtgtcgggcatcccccctatgatcccacccactggcccttttggttcactacaaggagcatttcagccgaagacatccaaccctatcgatgtcgctgctcggcctgggacagtcccacacactttactccaaaaggacccgaggttgacagatcctttcagacctatgttaaggaaaccagggaagtggtgtgctatgcatgttcacatcgcctggcagatttaccaccaccaacagaaagtcaagaaacagatgcagtcagacccacataagctggactttggactgaaacctgagttcctgagccgccctccaggccccagtctttttggagccatccaccacccccatgacctggcacggccttcaactttgttctctgccgctggtgctgcacacccaactgggaccccttttgggccacctcctcatcacagcaacttcctcaaccctgctgcccacctagagccttttaatcggccgtctacattcacaggcctagcagcagttggtggcaatgccttcgggggacttggaaatccttccgttacacccaactcaatgttcggccacaaggatggccccagtgtgcagaactttagcaaccctcacgaaccctggaaccggctgcaccgaacgcctccgtcgttcccgacccctccgccctggctgaagccaggggagctggagcgcagcgcgtccgctgcagctcatgacagagatagagatgtagataaacgagactcatctgttagtaaagatgacaaagaaagggaaagcgtcgagaagagacactccagccacccttcaccagcacctgtcctcccggtgaatgccctgggacatacccgcagctccactgaacagatccgggctcatctgaacactgaggctcgggagaaggacaaacccaaagagagggagagagaccactcggaatcccgcaaggacctggccgccgacgagcacaaggcgaaagagggccacctgcccgagaaggacgggcacggccacgaggggcgcgccgcgggcgaagaggccaagcagctggcccgggtgccgtctccctacgtgcggaccccggtggtggagagtgccaggcccaacagcacctcgagccgggaggccgagccgcgcaagggtgagccggcctacgagaaccccaagaagagctccgaggtcaaggtgaaggaggagcggaaggaagaccatgacctgcctccagaggccccgcagacccaccgggcctcggagccgccgcctcccaactcctcgtccagcgtgcacccggggcccctggcctcgatgcccatgacggtgggggtgacgggcattcaccccatgaacagcatcagcagcctggacaggactcgcatgatgacccccttcatgggcatcagccccctcccgggcggagagcgcttcccgtacccttctttccactgggaccccatccgggaccccttgagggatccttaccgagaacttgacattcaccggagagacccgctgggcagggacttcctgctaaggaacgacccgctccaccggctctcgactccccggctgtacgaagccgaccgctccttcagggaccgggagcctcacgactacagccaccaccaccaccaccaccaccacccgctgtctgtggaccctcggcgggagcacgagcggggaggccacctggacgagcgggagcgcttgcacatgctcagagaagactacgagcacacgcggctccactccgtgcaccccgcctccctcgacggacacctcccccaccccagcctcatcaccccgggactccccagcatgcactatccccgcatcagccccaccgcgggcaaccagaacggactcctcaacaagacccctccgacagcagcgctgagcgcacctcccccgctcatctccacgctggggggccgcccggttcttttccagaaggacgacttctcttttcgcagagataaggggagaggcccccttcccacacgctgaaggatatcgaggcccgataagccgagaacaggagcaagaacgaggaagaagaaaccctaggcagacaccaggccaggcttgagagacagaactcctgcatggctcacacagactgggggggaaagccccaccccttccccttgtaaaaaatgtatagactcagtgcacattttgaaatgttttgtatattatatgttgagatttttcagatcttttagcccagtcatatgttctcacgtctcctactttttgtttctcgtataaaactttttgatttgaaccaaaacagtgaagatgacaacacacaccaattggatgataattgtagcgggggcggtggggggggagaagtccacgccatccatcatgcaaaattctttcagatgaggtgggaaggccgtgtacatagttatgtaaaaagagattgcttcatgagctaatggttcatatatgcaaaagggtaagatgaaagctttactttgtacaaatgtaaatagataaagtaacataatacattaatacttcttaaaatgtgctatttgcaaacttacttaatatcagtgaacacagtcggctaaagctgtgttcccatatattgttatagacagctaaacccttcaactatgcaatgaatgttcgggcttttcacaaaagcccgcctaactcaaaggagccttttcaaatccatttacagcatacttaaggtcatattttccctgaacaagcgcttacgtgatatgactctgttttccttgcttgttttttttcaaacggagaaacatcctgttttgcaaattggaccccaggctggaacttagcatctgaagttgccgcttgtgggctctgggggaaagtgtagccccggagaggtaactgaggacatgagcaaccagtgccagggagggtgggatttgccagatgccaaaatcaggggacgggtggtggtgtctgtcagacacacacaggtcgccagtgacttcacacacacctcatgtgagaaccatgccttttttagtgtgtcctatttcatacctgtacacacttcctcgttttgtaatgagatttacttacacccaaacagatcctgaaagaaagcttcaagttttctcagatgatggatatgttttcactgtattcaataactgacggatgtaaggtgcacgtttcctgatgtgacgcactgtattccagctggtgatcaagtctgggaacagccgtaacaggtcaaccttgtggagccatcgcgagttagagggtgaaagatggcagaaaaaaaagtcttgtgtgtgagtgtgttttttgagtttgcatcaatcttaatgtctcttcataatacttttataatacattaagcctcttgtctacatatttggagagaatatgactttactagcagagaaatacaatatatcttgtctactggactgtaaaatatatgtatgaaataaaattagttccatttggtcttctagtatattaaagtgctatctgacgttgttatcctgtttttgcaaaaaaaaaa

SEQ ID NO: 61046 - DNA, 4707 bp, Homo sapiens
  misc_feature (1)...(4707): n = a,t,c or g
ttttttttttttctgggttccgataaaactttatttggcctgacctgatcaagtttaataatgtttaataaattttttaaaaacattagtagttataacaattcctctgtaataacagttatatatgaactcctggtcaaggccagcagcttgttcctttaccaaaaaagtaaagccgccctctgaggacaaaatggcacatgaggagtggtgtacatttctttttcttaaagaaaaaacaaaacccaaacacttcctatttacatattttccatttaaaagttggtcagtgtgattaattctgtttttaaatataagtttctaatgtgttgcaggtttcaacgtacaaattatagtttgctgattagatttaaggtgctgtgatgtgagggtgaacgcagcccaagaccaactggtggaatcctctacctggaaactggctggacttcctgtgggtatctttgggagtgttgggggaagagaaggagctgaacaccagtggcagaaatggtagaatgttcctggggaccagataggggctgtcagtgtccccaccccacgcttctgcagagggcctgtgtctacacaccattaccccatgctctgtgggtgagcacacaggtttgcatgcaccaaactcaccttagcctacactatgaggggcattgctgctttgagtcccttcctttgtcatgaggtctccatgctggtgcctgacccctaagagcccttgctgttgacacctctcttttcatatcttcctacctttctggattccttgcccccaaggtcacgacgtgctctccaacacatctctgtagggtctgctgtttgtcaaggctaaatggatgatcaaactcaggaaagtattgatgaaggatgttgggtcccatgtgaaaccttctctcctaacacatttgctctatggcaggacctcactgctgtcctccaaatgagcagttcatgtagagaacattaggtcccgaggtaggtctggagaggcgctgtggttaggtgggggggccgggtgtggggtgaagggggagtgctggcagggaggttggagggattcttggaattggtgccttcaacctcactggggtaggacgcccagtggggaaagagggctgtgtctttgcgtgtcaggaaagtgcatagggagtgctgagggggtgtgtgcacaggcctgggagaagggctgattttacccacagaccccaggctgttctgacctgaaacgaagatttccgaccatgcaggggtgaggcaaatacaggggtgcgacagatgagaacatttaagtacttggggagccaggaaagtatgcttggtgactaggagaaacaaactggttcagtttccagtttcagaatacaagaaacattgctttgaataaaagaacatcgaatggtaatggacagggaagaaacatctcagaccaagtttctaacaaaaagccagaacgaccccagtagaggaagacattctatggtggacagaccctggcctgggggccaggagactgggatttcaagctcgtcctcacactaagcctgtgatcttaagcgagtgtctctgcctctctgggcctaattgcctttcctcagctgtcagttgaggctagttgggccagatggtttcggagctacctctgcaagatttctcggcatcctgccacccaggtggggcccgcagactgctgtctaaagccgtttcttccctgtgcaccacatgtggtctcccctttgctaggaaaatgatcaacccctaagccagggtcctgttcaaacccgctcccacaggttaaaggctagttattaaggcagtttaagaaatggacattcctctcgctcctcggatccttcacgtgttctgccaaccccaaggcagcagagagggcggaggcggccgcctcctgccagccccggctttctctgggggtctcctgctctgtggggcctggagcggcccctccgccctcaccacctttctttggagaaggcctcggtctgcacgaggtcgccagggtgctcggggatgcacgcaccattgaggtcgcccagtttattgtccggcaggtcctcgggcttggtgcagagcttcagggcgcgggagatgaacacgtccaggtcgaactgggggctggcgcccgncgtccaccggggccgggcggccggggggcgaggcagacaagcggcgctcggcgtcgtcggcgggcgggctggcgtgctctgggccgccctgcgtgctcttgacccactgcgcgatcctccaggaagaggctggccggctcgtcctcgcgcgcccccgtgtccgccagcccccgtggccgtggggggcgcgccggccgcctgcttccagtgcgacaggtccaggatgagcttgggctccgagtagtggtgcggcttgttgtcgcgccacagcagcttgtccaggtaggacggcgaccccaccttgtagtcgcaggagcgcccgtagtcggcctcgaaggcgcgctccatggacgagtgcgactgctctaggaagcgctcggagctgctgtgcgagtccttgcgcgggtccacctgcacgttctcagccagtggcgccgaacccgcgcgcgggtcgcgctgtacctcgctggcgtcctggcaccggtcaggccgccactccaggtccgacgacaggctcacagggtacctggaactgcacgtgtcccagttggacagctggctctggttagcggccatcagcacgatgtcgtcgatctcatcctcaatgcggaaggggtgttgtgaggtgggctcgtcctcagggcacgagtatgggctcatgtaggggtgttgcagccccatctcagctgttaggcgatccatggggttaaaggtcaggatcttctccagaaagtcgatggcttcactgttcacttcagggagcagcttgcgcagaggcctcttcacctcccaggtgctgctgacaaaggaaggcatcaccctgagcagctcgtccttgtcttcctcccggattacagggatggtctccaggatgagttgcatctgctccagctcatgggccccagcaaagagcattctccccgtaagcatctcagccaggatgcagccggcggcccacatgtcgatggctttggtgtagttattgggggaaaggagcagtcgtggggaacggtaccactttgttaccaacccttctgacagataacccttgttgggagtaatgctgatcaacgatccttgccaacccgaaatccccaatcttgagcacgaggtcctctgtgctgatgaagatgttggcgggcttcaggtccctgtgcagcacgttggcggagtggatgtacttgagcccgcggagcagctggtacatgaacagcttggcatgctcttctgccagcgtgccctgctccagcaggcgtgccaggtcggtctccatgtactcctggacgatgtacgccacgctgaacttgaacagctcaccctgcaggtcagtgcccttgggaccgagcacctcgtacactttgacgatgttgtcgtggtccaggcgccgaatgatcttgatctctcggagcgcgtgcttcatgctgcgggcatcgctcagggcaatcttcttcacagcgaccttccggcaggcccggctgtccacggccgacagcaccaaaccattgacaccgaagcccaggggttggaagtcaacaaagcgcccaccgaggtcatacccatagacactggcgatgcagtcacccttctcagccattgtgggctcagtgatctggagctgcccaggtaacacaggggcagtcaggaaaggccaagtctcggctagcggcctccctcgcgcacctcattctgtcaagtcccacggctgagggatgtgttttctcctagtgaggtcactgccaccagctctctggagacgagaatggcatatggtcatgctcgctgagctgtgctagttgggggcgcaggctgtcgtcttaacctgcattgggagggctgtctactaattcctgtgtttcctgaacccttcttaaagcttagaatggctcatatttcttttaaagctggcatcttggaaagaaaacccagtatcattatctatggaatgtcaagttttctaccatagtggactgcaaagtaaaagatgcagaaactctcccctttggaatactttgttacaagaggctctttctgggctgaaatgcaagagtttgttttgctggagctggagctccttaaaatgctccaaaagctcagctgtgtcacagcctctgtctgtgttcccaagcagttatgccagggatccccatcaatggaattctgggaaggcatccccaggggcttctttcctaccctctccctgtttcctacccagctcacccttagaattcccaaaacctgagcccagtctggtaaggcactggtgaaaaaaagctggagaaacacaagcacctttcatgagctctacacccaagttacgcctgaggttcccaaatgcaggggagctcagctgcccaggcccaggatcctctggagcctttggatgtgggcagcatcctctttcaccagctcatccacgccacctcgcccaagactgtattccactgcaccaagagaggctgcaggaatgtggcatctttcagaccaagtctccttcccgaggcagagcccgagagcgtggcggcccgggcgcgagccgccctttgtctgcggccgc

SEQ ID NO: 61047 - DNA, 3015 bp, Homo sapiens
  misc_feature (1)...(3015): n = a,t,c or g
cgggggtttgtctgggcaccgtcggggtaggatccggaacgcattcggaaggctttttgcaagcatttacttggaaggagaacttgggatctttctgggaaccccccgccccggctggattggccgagcaagcctggaaaatggtaaatgatcatttggatcaattacaggcttttagctggcttgtctgtcataattcatgattcggggctgggaaaaagaccaacagcctacgtgccaaaaaaggggcagagtttgatggagccgggtggacttttctatgccatttgcctccacacctagaggataagcacttttgcagacattcagtgcaagggagatcatgtttgactgtatggatgttctgtcagtgagtcctgggcaaatcctggatttctacactgcgagtccgtcttcctgcatgctccaggagaaagctctcaaagcatgcttcagtggattgacccaaaccgaatggcagcatcggcacactgctcaatcaattgaaacacagagcaccagctctgaggaactcgtcccaagccccccatctccacttcctccccctcgagtgtacaaaccctgcttcgtctgccaggacaaatcatcagggtaccactatggggtcagcgcctgtgagggatgtaagggctttttccgcagaagtattcagaagaatatgatttacacttgtcaccgagataagaactgtgttattaataaagtcaccaggaatcgatgccaatactgtcgactccagaagtgctttgaagtgggaatgtccaaagaatctgtcaggaatgacaggaacaagaaaaagaaggagacttcgaagcaagaatgcacagagagctatgaaatgacagctgagttggacgatctcacagagaagatccgaaaagctcaccaggaaactttcccttcactctgccagctgggtaaatacaccacgaattccagtgctgaccatcgagtccgactggacctgggcctctgggacaaattcagtgaactggccaccaagtgcattattaagatcgtggagtttgctaaacgtctgcctggtttcactggcttgaccatcgcagaccaaattaccctgctgaaggccgcctgcctgggacatcctgattcttagaatttgcaccaggtataccccagaacaagacaccatgactttctcagacgggncttaccctaaatcgaactcagatgcacaatgctggatttggtcctctgactgaccttgtgttcacctttgccaaccagctcctgcctttggaaatggatgacacagaaacaggccttctcagtgccatctgcttaatctgtggagaccgccaggaccttgaggaaccgacaaaagtagataagctacaagaaccattgctggaagcactaaaaatttatatcagaaaaagacgacccagcaagcctcacatgtttccaaagatcttaatgaaaatcacagatctccgtagcatcagtgctaaaggtgcagagcgtgtaattaccttgaaaatggaaattcctggatcaatgccacctctcattcaagaaatgatggagaattctgaaggacatgaacccttgaccccaagttcaagtgggaacacagcagagcacagtcctagcatctcacccagctcagtggaaaacagtggggtcagtcagtcaccactcgtgcaataagacattttctagctacttcaaacattccccagtaccttcagttccaggatttaaaatgcaagaaaaaacatttttactgctgcttagtttttggactgaaaagatattaaaactcaagaaggaccaagaagttttcatatgtatcaatatatatactcctcactgtgtaacttacctagaaatacaaacttttccaattttaaaaaatcagccatttcatgcaaccagaaactagttaaaagcttctattttcctctttgaacactcaagattgcatggcaaagacccagtcaaaatgatttacccctggttaagtttctgaagactttgtacatacagaagtatggctctgttctttctatactgtatgtttggtgctttccttttgtcttgcatactcaaaataaccatgacaccaaggttatgaaatagactactgtacacgtctacctaggttcaaaaagataactgtcttgctttcatggaatagtcaagacatcaaggtaaggaaacaggactattgacaggactattgtacagtatgacaagataaggctgaagatattctactttagttagtatggaagcttgtctttgctctttctgatgctctcaaactgcatcttttatttcatgttgcccagtaaaagtatacaaattccctgcactagcagaagagaattctgtatcagtgtaactgccagttcagttaatcaaatgtcatttgttcaattgttaatgtcactttaaattaaaagtggtttattacttgtttaatgacataactacacagttagttaaaaaaaatttttttacagtaatgatagcctccaaggcagaaacacttttcagtgttaagtttttgtttacttgttcacaagccattagggaaatttcatgggataattagcaggctggtctaccacctggaccatgtaactctagtgtccttcctgattcatgcctgatattgggatttttttttccagccttcttgatgccaaggggctaattaatattaacaactcccaaagaaacaggcatagaatctgcctcctttgaccttgttcaatcactatgaagcagagtgaaagctgtggtagagtggttaacagatacaagtgtcagtttcttagttctcatttaagcactagtggaattttttttttttgatatattagcaagtctgtgatgtactttcactggctctgtttgtacattgagattgtttgtttaacaatgctttctatgttcatatactgtttacctttttccatggagtctcctggcaaagaataaaatatatttattttaaaaaaaaaa

SEQ ID NO: 61048 - DNA, 4413 bp, Homo sapiens
  misc_feature (1)...(4413): n = a,t,c or g
actcggccggcagcggaccgcagccaccagccgcccgcgccctccagccccgtccgggagtccccggcccgctgcggtgccgtgagtacctccaaccccctgcgccccggagggaggccgaggggcttagccaccagggctcggaagtgggggccgaatccggtgcgagacccaaggagaggggagcagagccggagttggggagactgtggctgaaaactgtgtcttcctggagactaggctggcattttgactttggggttgctgaaaagccaggagtcaaaatgactgagcgctttgactgccaccattgcaacgaatctctctttggcaagaagtacatcctgcgggaggagagcccctactgcgtggtgtgctttgagaccctgttcgccaacacctgcgaggagtgtgggaagcccatcggctgtgactgcaaggtgcaacattagaggaaatcaatcagcactgggactggctggaacaaaatctcctccacaccttgtctgtctttgataataaagatgacattgccagttttgtcaaagggaaggtaaagccgtgtgtctgggtggctgacggatgacacagctgagccattctcctcatcaggtgtgactgtcgttgaagcagcgcacacttctcgggggcctgtgcacctcagtccctcctgcttcctgtcccttgcaccccctgccttcccattgctggctcactgagcagggactgtcatctctgtgtgtcaggctctgatagccgaggagaccagcagcaggctcgccgagcaggaggaggaacccgagaaattccgagaagccctggtgaagttcgaggccaggttcaacttccccgaggcggagaagctggtcacctactactcctgctgctgttggaagggcagggtgccccgccagggctggctgtacctcagcatcaaccacctctgcttctactccttcttcctgggcaaggaacttaaacttgtggttccgtgggttgatatccagaaattagaaagaacgtccaatgtctttctgacggataccatccgaatcaccacgcagaataaggagcgtgacttctccatgttcctgaacctggatgaggtgtttaaggtcatggagcagctggccgacgtgacgctgcgaaggctgctggataatgaggtctttgacctcgaccccgatctgcaggagccgagccagatcaccaagagggacctggaagccagagcacagaatgagttcttccgggctttcttcaggttgccgaggaaggagaagctgcacgcggttgtggactgttcgctctggacgccgttcagtcgctgtcacaccgcggggcggatgttcgcctctgacagctacatctgctttgccagcagagaagatggctgctgtaagatcatcctgccactcagagaggtggtgagcatcgagaagatggaggacacgagcctgctgccgcatcccatcattgtcagtatcagaagcaaggtggccttccagttcattgagctccgggaccgagacagcctggtggaggcgctgcttgcgaggttgaagcaggtccacgccaaccaccccgtgcactacgacacctctgcggatgatgacatggcttcactcgtgtttcattcaacaaggcatgtgccagtgaccacagatttggggatcctgaaataatgtcttctcaaaatagcgaggagagtgagaaagagaagagcccgctgatgcaccccgatgnccctggtcaccgccttccagcagtcaggcagccagagccctgactcccgaatgtccagagaacagataaaaataagcctgtggaatgaccactttgtggaatacggcagaaccgtgtgtatgtttcgcacagagaagattcggaagctcgtagccatgggcatccctgaatctttgcgagggagactctggcttctcttctcagatgcggtgacggatcttgcctcacaccctggttactacgggaatctggtggaggagtccctggggaaatgctgcctggtaaccgaggagatagaacgagacctgcaccgctccctgccagagcaccccgccttccagaacgaaacgggaattgctgctttgaggagagtcttgacggcctatgcccaccggaaccccaagattggatactgccagtccatgaacatcctgacctccgtgctgctgctgtacaccaaggaggaggaagccttctggctgttggttgctgtgtgtgagcggatgctgcccgattacttcaaccaccgagtgatcggggcacaagttgaccagtctgtcttcgaggagctcatcaagggtcatctcccagagctggcagagcacatgaacgacctctcagccctggcgtccgtctctctctcgtggttcctgaccctgttcctcagcatcatgcctctagagagtgcggtgaatgtggtagactgcttcttctatgatggcatcaaagccatcttccagctgggactggctgtgcttgaggccaatgctgaggacctgtgcagcagcaaggatgatggccaggccttgatgatcctcagcaggtttctagatcacattaagaatgaggacagcccagggcctccagttggcagccaccatgcctttttctccgacgaccaggagccctaccctgtgactgatatttcggacctgatccgggattcctatgagaaatttggagaccagtctgtggagcagatcgagcacctacgttacaagcacaggatcagggtcctccaaggccacgaggacaccacaaagcagaacgtgcttcgagtcgttatcccggaagtctcaattcttcctgaagacctagaggagctctacgacttattcaagagagaacatatgatgagctgttactgggagcagcccaggcccatggcctcacgccacgaccccagccggccctatgctgagcagtaccgcatagacgcccggcagtttgcacacctgtttcagctagtctcgccctggacctgcggggcccacacggagatcctcgccgaaaggacgttcaggctcttggatgacaacatggaccagctcatcgagttcaaagcgtttgtgagctgcctcgatattatgtataatggagaaatgaatgagaagattaaactattatacaggcttcatatccctccagcactcactgaaaatgaccgagacagccagtcgccgttgaggaatcctctgttgtcaacatcgagacccctggttttcgggaaacccaatggtgatgcagttgattatcagaaacagctgaagcagatgattaaggatttagccaaagaaaaagataaaactgagaaagaattgcccaaaatgagccagagagaatttatccagttctgtaaaactctgtacagtatgttccatgaagatccagaagaaaatgatttgtatcaagccatcgccacagtcaccacactgctgctgcagatcggggaggtggggcagcgaggcagcagctctggaagctgctcccaggagtgtggggaggagctgcgggcttcagctccttctcctgaggactcggtttttgcagacactgggaagacgccccaggactcccaggcatttccagaggcggcagaaagggactggactgtctcccttgaacatattttagcttcacttctgactgaacagtcattagtcaacttttttgaaaagccactggacatgaaatccaaacttgaaaatgccaagatcaatcagtacaatctcaaaacttttgaaatgagccaccaatcacaatctgaacttaagctgagtaacttgtagcaagacagcagctgctatgcacactggagtccaccataccaaagcacgaaccagactgtttcttggggtcagccctaaaccgagatttcagtctaccttaccaatggggcatctggctaaacaacctgacaaactgtggccaggggaaccgacacaaccctcaagcatttctatgtattgagaattgtcagtgccctaaggtatccattggttcccttgatgccaacttacaatttttaccggatttgctgaaatgggcacttctgctgtgatgctagtgttgattttgctctcagatgaacacaatgtctcatactaaccaagaagcaagaaaagccccatgctttcatttttcacttggagtgacaatgggagaggtcaggaatcaagttcactttcaagatctaagggagtccactatctgtgcaattgtatttggcttttttttgcactgtttcaatgctggtaattgaaaccattttaatatatttggttgtattcactttatatgtccttccaaaaatgttgttgtgtacataccatgctttcaatgttggcttccaagttttttaataagaaactttttgtaaaaaaaaaa

SEQ ID NO: 61049 - DNA, 3608 bp, Homo sapiens
caaaagggtagagtttattcagtttctttaaaagcaaatatctattatccagatagtgaacaaagaaacccccagaaagggtgttcctgcctgaagtttaccttttattgaacaggcagttggacagacagcattgtaatcaggacattttgagggctcagacttggtggagatgtctttatacccctcagatcacagagtctaggaggaaagagatggaaaagactgaaaatcagtgagtccattcccaaaagctctgtattgttttctatagcaaataagacaagctccgaagaattctttgtatatacagatggtgaaggtaggtgattcagaactggggtttattttttccctcatggctttcaacaatcttcctgtcattcgtcagacgggggcatgctggctgcggtggttcctggggtgctgctctcctcacacttccctgtactgcggatgtgtgtatttgtttggcgtatcaggttttcatgacagagcatgcaaggattgttgtaggtttggccatcgtcaccacagacaggctttaaatcctttggacaaagatagcctatcctgggcaatactcggtagtctttgcacatctcagaatccagagaactgaaagagtctgggctgtcttcctcttgagaaagctctaacatgggatggcttttcttgaagctttgccctttccaaagcttctgttagaaagacagctctgcacatgtagcacttgtttgtatagaactttccatcagcaccgtgcactgggtcattctctctagggcagatgagttcattgttccttatatagtttcgaaattcactgcactcatcctttgcattatttgagggcttgctacttgatttctcttcatctttcttttttctttcattagcttctcgatcaaagatgctctgacacatagcacatttattgatgtgcatcttgccatatgggccttcaaccagggttattttctctggtgcagataagctttccatttctctgcatgcttcgaaattcacgacacagatcctctttgtcattgctcctttctcctgtattgctcctttctcctgtattgctcctgtcttcatcctctttcttttttttttcagctgcttccctttccagtttttccttacacatagtacacttattaccatgtgtcttgccatctggaccccggacagggtcactttctcgagtgcagataagttttccatttttcatttggcttctaaactcatcacatgtatccttccctgattctgatccagtcccatttgatctggagcgagaatactcattttttctctctgcttctctttccaattttgctttacacatggtacactgattgttgtacgatttgccatcagcatcacgtacaggatcactctcccgagtacagctgagtcttccatttttcatttgttcccgatactcagcacattcgtcctgagtgtttcctcctccaccaccactggaaccatgtcctgcagcatttctctgatcttcctcttctttcctctttctttcctcattttctttctggaagactgccttacacatggcacacttgttgccatgggtcttgccatctgggccacgcacaggatcattttctcttgtgcagaaaagttttccattttgcaaaagtctccgaaattcatcgcatgtctccttttcagcttctcttttgacttttgctctgggttcagctctttctttttcttttgcttcttgctggaagaaggcttcacacatggagcaggtgttgccgtggattttcccatctagaccctcaataggatcattctctctggtacaggggagtcgtccattcctcacataatgacgatattcactgcacagctcctgaactgcttctctcttaactttttcagcctcaactttccctttttcttctttatcatttttcttctcttcttcttcaagtttgaacacactggcacacatggcacacttgtttccatgcattttgccatctggtccacggacaggattatgctccctggtgcatataagtgttccattcctcacttggtcccgaaattcactgcagatttcctttgcagcttctcttttagcctttgctcttgctctttcttcttgttgaaagaaggcctcacacatggagcaggtgttgccatgcatttttccatctgggccctggatggggtcattctctctggtgcaaaaaagccgtccgtttttcctggatttgcggtattcactacacaactcctcaaaggaagctcgtactcttagattgtcttttgtttcttgatttaccttccttctttttcttttcttcttcttctgcttggaagaagacctcacacatggagcaggtgttgccatgcactttcccatctgggccctggataggatcgttctctctggtgcaagcaagttttccgttcctcacaagctttcgatattcactgcaaagctctgcatatgaggttgcttttccagattctcttttgtttctagctcgtgcttcagcctttttcttttcttcattttctgcttggaagtaggcttgacacatggaacacaagttgccatgcattttcccatctggaccacgaatagggtcattttctctggtacagaaaagtattccattctttgcctgattttgatattgactgcagagtttcacaatttctcttttaactttagttttttcttcagcttttcccaaattttgatctgttttactgttttcctctgaaaaacgctgcttgaaaatttcagcacacagggcacatttgttgccatgcatcctgccgtcagggccacggactggatcactctcccgtgtacaaaaaagccttccatttctcacttgtttttcatattccttgcaaaaatccttttcagcatttcgtcgaattctagtttcaccctctcgcttggcattttcagcttcttttaaaaacagctcagcacacattgcacacttattgccatgcgtcttcccatcaggaccaagaacaggatcattttcccttgtgcatccaagtcttccatctctaacaaagggccgaaaagcactgcatacatcctgctctggattactgctcttacattccccttcactttttacaccaatttgggacccggttttcgcattctcagcacacagtgcacatctgttgtcatatgttttcccatctgtgccacaaacagcttcataataatcaggacagataaaatccccatctctttctccttttttaaaatcatcacaattcagctctgttggggcagtagccttgggagctcttgctaaatgcctggccctcttctgtgattttgcttctttttccagtatcattttgcacgtggcacatttattgatgaacattattccatcaagactttgaaaaaatttcttatcctggggacagaacagttttccatttttcataaatgcctgaaattcatggcacatttcctgatcttcattcttactggcagcatcttgtatgaggcaaagagccaagggcagaagcactgacactgtggctatcttcatgttgaagacgatgcaagtcgcctacaggtc

SEQ ID NO: 61050 - DNA, 1047 bp, Homo sapiens
ttttttttttttccaaaagccttgtttttatttatatagagtcctaaccacttcggtggtaggaggagtgggagaggctcctttttcaatccagggacctccatgatgttggtttgttgttaccaaacacacaggtaagtggcatcacggatctggtaaactaacgacaatgtttagtctctctctgctagagcaacaaggtgagcatcaatctctgcttctgtaagaatcctgaatttaggattttcaactgtcactactccaacttctatttctgaaggtttgaaatcaattgatagaacagtagacaggcatgtaattgcagtttccactgtctgttcaaatgtccaatcaaatttcttcttcacttttttttcaaggaagctggttgactcagtttgtttaactcccgctgcagtggctttaaacccacagtagtaacctgcaggatcacacttatatacctgagggccttgctcttcatctataccaattaaaatcatacaacaaccaagaggcctcatttcagcattctgtgtgtagacctgagaaatatcggcaattcttttacacagcatgtccacaggaatctcatagccatacttgtatttccagttagctgcctcatagcgtgccctctgtacctgggatctgctgtcagctgtcattccggtcatcacacaaccaatgttttcagttatcttgaataagtgagtcactgtgctggaatccaataatttgtcaggtactttcttctgtgtgacaattactgcacagtctttccctctgacagctactgatgtaaggccaccctggttaatagccttaaaagcatattctacttggtagagccgaccctcgggtgaaaaaatggtaatgtggcggtcaaaaccggcgctggaaccacgggacatgttggtagaagcactactttaaacacaatccctgggccccgtagctcccgcaccaggcacacaagcacctcccggaagttgcagcgactgcttccggggtaccagccgcacgaaatcgtcgtccgggaattcc

SEQ ID NO: 61051 - DNA, 2548 bp, Homo sapiens
cttcggcgtcgcgtcgctcctgcgctggagctctaggccggcgtctctccgcgagccgcgggtcaagtgccagtggctaagggtgcgcgagtagccgccacccgttcggcgttggctctggcgtcggggtcgttgtgtcgtgacaaccgctgcggtagccgtttccgaggcagcagttgcggccgctttagccctgagcgggatctgcggctgcctgcgagtctctgctgtgccgacccttctcttcgcggaccccacgccaagcagcgaccctgagccgacagccggagcgcccggcaatggcggcctcgacggcctcgcaccggcccatcaaggggatcttgaagaacaagacctctacgacttcctctatggaggcgtcggccgaacagccccgcgggcattgtcgacgaggagctgagcaaaaaatcccagaagtgggatgaaatgaacatcttggcgacgtatcatccagcagacaaagactatggtttaatgaaaatagatgaaccaagcactccttaccatagtatgatgggggatgatgaagatgcctgtagtgacaccgaggccactgaagccatggcgccagacatcttagccaggaaattagctgcagctgaaggcttggagccaaagtatcggattcaggaacaagaaagcagtggagaggaggatagtgacctctcacctgaagaacgagaaaaaaagcgacaatttgaaatgaaaaggaagcttcactacaatgaaggactcaatatcaaactagccagacaattaatttcaaaagacctacatgatgatgatgaagatgaagaaatgttagagactgcagatggagaaagcatgaatacggaagaatcaaatcaaggatctactccaagtgaccaacagcaaaacaaattacgaagttcatagacgagatttgttcaacactgcaattgtttgttagatgtaaaccctgtgactatagtacgttgcttcttgttcttcacaattcatgacttaagtaccaaaatgcataccagttattatatattgccaagaattaaatgataaacttagagactgattagactgaaaatgcctaatcgatatatatattcttgtgcctagtactttaccacaaatacagtgtaatatcatcagtccaaaactgcattacttttgtaaaaacactggttaatttgtataagatattatagagctttttatgctttagaagttaaacaatatctttgggggggaactaatttattttcatcacttgaaatgtggtagctcttacaaagtttattgatttgtttttttaaaaatcaaaagccaattgaacaacaggatatatagactgataaatatttaggctgaatagtattttaacacttgtcttcaacttgatttgtctgtttaattgaaaagaattataagagttactgttgcattttctgacctactatttttaaaattcctgttgagtttctttgtgtttacaaggaaaggactgaactttttctcatcaaaactagcttttttccccacaaataaattatcaggttaaactttcaccaatgtctgctctgttttttgtttttggggggtttttgtttgtttttgttttttaatgtttttggtacactgggcagacttcagagcagttttttaaaaaaataaatattctaatgtagctatctcgccattccctttaaatacctgtcttaacctcctgcttttctttcctactcctttccacacatacgcacacaatcttctaccttttaaaggatcattaagactgtcaccacattaggagctctttctctcactcttctgtcatttgctgctatgttgaaattcttattttgaccatcaatgcctatgaattcttctaatacgtgaagaaaatagtttgagtagcagcagtgctataggtgggaaatacagtttagctgctgaatttctatacctctctgatttacagattgctaattaaatggctattattagtttggattaattcgacttaagaaaacaactaactgagggttttttttgtttgttttttgagggttttctttgcatgagaattgtatgtaaccagtgatatgattattcctgaatgtacagacagaagtaagcctggacattgttaaatagtccctgctttaagggactacgataatgtgtactatgacaaacgtgctttattcttctaacgcagtaagaattaggtggaattttttccttcaaccaagtgcaggaaagccctgtgtgtcttggtttagttatggtttcatttctagccatacaattgatgaattgtgtacaacttttgttagtaccaaaataatctgttatatgaacagacttctaaaataacgtctgtatattttatatatagatacatatatgaaagaaggcttttattgaacagcttatcttccacttgcaggtttatggaaacagcagtatttgaaaataaataaaaagtgggagaattccttgctgttagaagaatgtggccattattttgattttttgaatgagatat

SEQ ID NO: 61052 - DNA, 868 bp, Homo sapiens
  misc_feature (1)...(868): n = a,t,c or g
ttttttttttttggcatttcaaaacgggctttaaatactcatcagggtgccacacaaaggagctggggtgagaacttcgtacatgtgagtgtggggctggggtgccctgagagagaaaaaggggacccatctgtcagggcagctggggtgccccacaccccatttctgggactagggagcagagtagaaaatttctctggagggtcccagggctaacctgggagccagccctcttttcgaggtagacaatcggggaagggaacccangaagtagctcccatggtggcaagtggcttcctcaagtggtactgctgatagcttggggtagcctggggccggtggtgacatccttagggggcagcttggcttggggtcctccaggaatgggggcgcatttcggaactgctggggctgtgtagcgagtgaggaggatgccaacgccctcaatgagggccaacaggatgccccccatcattgctgagcccaccatggccagtgggccactgcgggcagccagcacagccccggtcaatgctccactggtgatagagttccagggatcctccttgccccgaagccgcaccaggccacagtcgatggtggagaacaggcccccccacactgcgaagctacctccaatctggggggctcggatcctcacagcattggcactacctctcaaccggtgccgaattccaacaggggcattgcggaaacccttgatggcctggaagactccgccaccgatgacacccatagtgaaggctccaccgcaatcatccacaattcgccatgggcagggctcccgagcgtactcctccatggcgctggcacgaaatcgtcggncgggaaagcggatngatggtca

SEQ ID NO: 61053 - DNA, 1515 bp, Homo sapiens
ataaacctgccaacccccgggtattaaaatttgttttttttaaagggccccccctttttttttttttgattttataatagtttatatttgcacacaaattctgccacattgttcagtaccaccaaagtaaaattcttgaatctttcattgaaaatgaaaaacccatctgtcacctgttcccagtaaaaaactgattgttctatgaaatcggctgttttagtcagataggaactgaagtttgaaagacagcctttccaagttgccaggtcatcaaataatgaccattctaggaacatggtaggaccaaagacaatgacaaggccaagcagaaggattagcaaaaataacttataaaagctccagggaatcttgctaatgaatgtgccagtgtcttgaggcaaagaaagtttatccacatcgactagttttatgtcttcccactgactggtatcaaagttcttcattaaagggcttgcaggcaaattagagggaggtaaaggagtttccttgattactttgattttctctctaaactcctgcatctgttgcagaaatacaatgggttctgacacatctttgaaagcctcagcaatgttaaaggccatccgttgctcctgcaagatggtgttgagtttgttgatctctgggtcatatgcttgcataacagcaagtttcatggtctcaaagtcagacagaatttcattcttcttttgatccagtgtgtgttgtaacttctcaaaaaattccttcactttatctgaatctttagtcagtaactgtagggatttcctcttactagtttccaaggtatccaagcgagaaagagcatctccccgacgccaggtctcaaagctctggaagagggactcaaaggcatccctttcctgagcataggcatcttcaatagaacagaagacatgtttggtgtgctccccacgagtagccacagatccccacaaatccagctgcatatcagtccaggccagaaaatgttgagaggctgccccaaagtgtcctttgcatactggcattttgggagagatcttgatcttgttatacttttccacaatacccttcagggagtaattaacctgcaggggtattaattccagtagctgaagtttccttacggcatgtaggacacttgaatggagctggtctccacaaggaattccgcacactcccttctaagataccttctaagcattttttgcagaagttgtgggagcaaggcaaaacccgtggatcatcaaacagactacaacaaatagggcatgtgagatcttcttcaagcagctccatcacatcctctgtctcctacaagctgatgtatttggcagggttactatttcccagggcaaagcaggtcttttttttcacgttttgactaacgaactagaggctactccggctagtgggaaaggccgcgcgaccgcccgtcctccaactacagggaccgcacggtacgcgccaagcacagccccaaaatggactcgcggctccggctagctccgc

SEQ ID NO: 61054 - DNA, 1081 bp, Homo sapiens
  misc_feature (1)...(1081): n = a,t,c or g
ttttttttttttctagacataccaaaccagaccagaaaatagcctttaattttacatgtacaaatgctgctgtaaattcgtaacagcgaagaaaaatatatacgaaccgggtttaaaaggaaaagtaaaaaacaatccacagttgagcagttgatgtgcaaaatcatcccaggaatccaactttctggtctcttgggccccnaggctttctttcctggtggcacaacactcctgccaaggaggcatgcagtaccttgcccacacgcttggcaagtctccatcatctcgaaagatgctctctgggtcccaggcttgcccttccccccactttcctcaatgcacgtcacaactccccttgctgggtcaccgacaccaggcaagctggccagcgagcaggcctcctcctgaagaggtatgcatccaccacatgccgatagccaattttggcacagagtgacaatggcaggggggacattctccacactttagtcgtatgcagtcataagggtcatctgacaattcaatggtccttcgacccctcttcatcctccaaaactcgaacccttggtatccttgtattgaagagagcagcctttacagcaatggaaatggcatcaaacaaatttccaccacattcccagaaagcagcacatcccacatagagaacccaacaagtgctcccggaggacttaatgcagagggtctttaagtcggacactgcttttaattgttaaatatccggatagagggtgttagcgatctcggtgcccaaggtcatcacctcctctaccttcaaattgcaggggtagcactggctgaacagtcaacaaagaactccaagtagccttcatttggtttctccagcttcggcgtccccatttctgcctttcactcccaccaagatgtctgtgtgaacccagcttgaccctggcggacccactagtgttggacaccacatcagtttaccacttcgacacatcggtagtccctcacagccacggccatccacacggaggtcttcctggacgccatgcacgatgtacaccttctccgcctcgctcagcgtcacggacgccatgct

SEQ ID NO: 61055 - DNA, 3292 bp, Homo sapiens
tttcgtctcggggccagcgcatggggctgctgagaccgctccggacgtgcgaagcgttcgcggtgcggtaggaagctgaagtcttcagcagaaccctgacctaggtagggagtctcaatggccctgggtgaagaaaaggcagaagcggaagcatctgaagacacaaaggcccagtcctatgggagagggagctgcagggagcgggagctggacatcccagggcccatgagtggggagcagcccccacgcctggaagctgagggagggctcatctcccctgtatggggggcagaagggatacctgcccctacttgctggattgggactgaccctggcggcccctctagagcccaccagccacaggccagtgatgccaacagagagcccgtagctgagaggtctgagcctgcactcagtggcctgcctcctgccaccatggggtctggagaccttctgctctccggggaaagccaggtggagaagaccaagctttcttcctccgaggagttccctcagactctgagccttcccagaacaactatttgctcaggacatgatgctgataccgaagatgatccatccctagcagatttgccccaggcactggacctcagccagcagcctcacagctcaggtctctcttgcctgtcacagtggaagtccgtgctgagcccaggttccgcagctcagccttccagctgcagcatctctgcttcctccacaggcagcagtctccagggtcaccaggagagggcggagcctcgtggtggttctctggccaaggtctcctcctccctggagccggtcgtcccccaggaaccttcctctgtggtggggctaggacctcggccccagtggtcaccacagcctgtgttctctgggggtgatgcttctgggctaggcaggagacgcctctccttccaggctgagtactgggcctgtgtgctgccagattccctgcctccatcacccgaccgccactcccctctctggaacccaaataaagagtatgaagatctgcttgactatacttacccactgaggcccgggcctcagctcccaaagcaccttgatagccgtgtgccagctgaccctgtcctgcaggactccggggtagacctggatagcttctctgtctctccagcaagcaccctcaaatcacctactaatgtctcccccaactgcccaccagcagaggccactgccctgccattttctgggcccagagagccaagccttaagcagtggccctccagagtaccccagaaacagggtggcatgggcttggcatcttggagccaacttgcatctacccccagagccccaggcagtagggatgctcgttgggagcgcagagagccagccctgaggggtgcgaaggaccggctgactataggcaagcaccttgatatgggctctccccagctaaggacacgggacagagggtggccctcgcccaggccagagagggagaagaggaccagccagagtgcccggcgccctacctgcacagagtctaggtggaaatcagaagaggaagtggaaagtgatgacgagtatcttgccctccccgctcggctgacacaggtttctagcctggtttcgtatctaggatccatttctaccttggttaccctgcccactggggatatcaaagggcagagccccttggaagtgtcagacagtgatgggccagcttccttcccttcaagctccagccaaagccagcttccccctggagctgccctccaaggatctggggatcctgagggccagaatccctgtttcctgcgctccttcgtccgtgcccacgactccgcaggggaaggcagtctggggagcagccaggccctcggggtctcctctggactgctgaaaacacgcccctccttgccagctaggttggaccggtggccattctcagacccagatgttgaagggcagcttcccaggaaaggaggagaacagggaaaagaatcactggtgcaatgtgctgaagacattttgcctgtcagctggaagagctgatctgctggctgtataatgttgtcagatgttactgaccacgggactccagccaggtccaatcttacaagtctcaaagtcttctctgcagctttaccggcaatttaagaaagatatagatgaacatcagtctctgacggagagtgtcttacagaagggggagattcttcttcagtgcctgttggagaacaccccagttttagaggatgtccttgggaggatcgcaaagcagtctggtgagctggagagccacgcagatcgcctgtatgactctatcttggcctctctggacatgctggctggctgcacccttatccctgacaaaaagcccatggcggcaatggagcacccatgtgaaggggtttaacctggcatcttctcaggcagaggtgcaacctgtcggccaaacactggctagtgagaaaaaaatccttcaagaagtccttgcaagagccattcaacactgaagtcaagggggaaaccttcaatatactagctttaaaatgcctttctcctccctgaatggagggctgagttactatttttatttacaatgaatccttccaaactaaggttttccttttggtgcttctccacaaagagcgtgtagctttgcaatttttgataaaataagacgtgttgccttcccctctatcccattaaaaaagagcagataaagctcaaactattccacctggtagggtcatttaccaagggctggtaggagattccgaatactcaatattctcaggcatgcaagaggacctaagagactgaaaaaagtgaattgttggccagaaaccttgggtcttttcataaaaggaaatttgggcttgtcaatccctctttaaagatataggtagaaagaagagatttttaaccctttgtctgcaaaagaaaaagggttaaatgaagcatctatacagatgactttgggagattatgacaccttttgccatcttcagggcttacgtctttactttcttggctaaccagtttcttagaagaaaatgtgtcagggacttggggatctacagtcatgctttagcatggctatggagctaattatcaagcttaaagggtaactttgggaggactcctcccttccctcctagtttcccctggaaaagcagtcccaggctcagggaagggaatggataggatgacacagtaagtacagaaactgaagctgtcaatagtgaaggaaaaaggggaattttttgttgctttggcattgacaccataagtacttttattaaaaaaaaaa

SEQ ID NO: 61056 - DNA, 1875 bp, Homo sapiens
tcaggctgcctgatctgcccagctttccagctttcctctggattccggcctctggtcatccctccccaccctctctccaaggccctctcctggtctcccttcttctagaaccccttcctccacctccctctctgcagaacttctcctttaccccccaccccccaccactgccccctttccttttctgacctccttttggagggctcagcgctgcccagaccataggagagatgtgggaggctcagttcctgggcttgctgtttctgcagccgctttgggtggctccagtgaagcctctccagccaggggctgaggtcccggtggtgtgggcccaggagggggctcctgcccagctcccctgcagccccacaatccccctccaggatctcagccttctgcgaagagcaggggtcacttggcagcatcagccagacagtggcccgcccgctgccgcccccggccatcccctggcccccggccctcacccggcggcgccctcctcctgggggcccaggccccgccgctacacggtgctgagcgtgggtcccggaggcctgcgcagcgggaggctgcccctgcagccccgcgtccagctggatgagcgcggccggcagcgcggggacttctcgctatggctgcgcccagcccggcgcgcggacgccggcgagtaccgcgccgcggtgcacctcagggaccgcgccctctcctgccgcctccgtctgcgcctgggccaggcctcgatgactgccagccccccaggatctctcagagcctccgactgggtcattttgaactgctccttcagccgccctgaccgcccagcctctgtgcattggttccggaaccggggccagggccgagtccctgtccgggagtccccccatcaccacttagcggaaagcttcctcttcctgccccaagtcagccccatggactctgggccctggggctgcatcctcacctacagagatggcttcaacgtctccatcatgtataacctcactgttctgggtctggagcccccaactcccttgacagtgtacgctggagcaggttccagggtggggctgccctgccgcctgcctgctggtgtggggacccggtctttcctcactgccaagtggactcctcctgggggaggccctgacctcctggtgactggagacaatggcgactttacccttcgactagaggatgtgagccaggcccaggctgggacctacacctgccatatccatctgcaggaacagcagctcaatgccactgtcacattggcaatcatcacagtgactcccaaatcctttgggtcacctggatccctggggaagctgctttgtgaggtgactccagtatctggacaagaacgctttgtgtggagctctctggacaccccatcccagaggagtttctcaggaccttggctggaggcacaggaggcccagctcctttcccagccttggcaatgccagctgtaccagggggagaggcttcttggagcagcagtgtacttcacagagctgtctagcccaggtgcccaacgctctgggagagccccaggtgccctcccagcaggccacctcctgctgtttctcacccttggtgtcctttctctgctccttttggtgactggcacctttggctttcacctttggagaagacagtgccgacccaagacgattttctgccttagagcaagggattcacaccttcgccaggctcagagcaagatagaggagctggagcaagaaccggagccggagccggagccggaaccggagcccgagcccgagcccgagccggagcagctctgacctggagctgaggcagccagcagatctcagcagcccagtccaaataaacgtcctgtctagcagc

SEQ ID NO: 61057 - DNA, 1731 bp, Homo sapiens
  misc_feature (1)...(1731): n = a,t,c or g
ttttttttttttgctagctatcataactttattaaacaagaaaagccctgacgcgtaaataaaaaacacctgagttctgatgaccccgccccgcccagtcccgcccgccgaggtccgtgtccaagtcccgngtttttcaggagctatgtttctgccgcttccaaaagcgcttgacgtcgctgtgcccggccggggtcaccaccatgagccgcttggccggagtttctcgaacacgagcacgcccagcttcggggcgtgggccagcaagcagctcaaagtccacttgcgacaggaactggttatacaggacaccctcagtgaaccggagtctgtccctttccagctcccagagccggatctggtcggtgatggtggggggcagcacaggtgtctgtttgagcatcactgggtgggctcttgtccttaggaaatggattatctgctgggctgtgatgccactggcgattgcctgctgcacactctccccgggtcaccctcgccaaccaccatgttgggggaacggataaagcatctcagagaagagggcaatgagggcaatctgcagctccgactccgtgtaggcatacagtcggtaattggtttccacggacaatgaaacctggctgatgcacagtgcccccagctccagagacacctgatgagagattgatggccaaggcggtgtggggtagtaacgccgagatttcctcttcctctggaaaacaagcccaaactcacgcagatgttgcaggaagttcaacagagaatcactcataccttccacagagtaatccttgcccagagtagagaagctgagctggaagaggaaggagagaatctctaccaggtccatgccccggctctgggctgtctgcaaatactgcaacataaagtaccagagctgagccggggtgtccagcaacaggaactggaagccagcggaagtaatgcagggcggctctccaggttcagtactcttcatgagcccagcctggctgaggagctgagccaagtcctggctgacagctgcactgggggagcccaccatgaagtgcaagaccacctcccatcgctcctcggcgtacttgtcaagggagggaacgtcccgggcatgcttgtctggtcccagctgacttgtgtcatcagaccaggccttccccccacccagaagggcaatgcggaggttctggcggaaaatggggttgaggatgaggccctggagcccgcctgggagcagctgggtgtgccagatccggaggccgctcagcagccctgtactttcctcctgagccttgctgaattccttctttacccacagagctacagcagcctgtggcaaaggctgctccagaaagagcatccgcatcacccagttcttagccaaggatgggagctccctgaagacagccagacatgtggcagggtgcccatacaatcggtccaataccccagggctcaggccccctaagaattcctgcagattcctgcattgtaggtgtactcggttcagtccccttgaaggggtgctctccatcaccactctgtcgatcctcctcgcgcaccccaagtctcgggccgtcgcttaatcggagccaaagtctcgcattggctcctggagattgagggaaagatggtgaaaaaatgcgaggaaaagatggggaaagcaaagaaagatttcacaggcaagagcccagaatggagaattcagaagagaagggaggtaaggggagg

SEQ ID NO: 61058 - DNA, 1383 bp, Homo sapiens
acctgtctggtagcagccatgaggcgcttggtttcagtgtcctcgcgggccagcgacgggcaggacgccccgttcgcctagcgcgtgctcaggagttggtgtcctgcctgcgctcaggatgagggggaatctggccctggtgggcgttctaatcagcctggccttcctgtcactgctgccatctggacatcctcagccggctggcgatgacgcctgctctgtgcagatcctcgtccctggcctcaaaggggatgcgggagagaagggagacaaaggcgcccccggacggcctggaagagtcggccccacgggagaaaaaggagacatgggggacaaaggacagaaaggcagtgtgggtcgtcatggaaaaattggtcccattggctctaaaggtgagaaaggagattccggtgacataggaccccctggtcctaatggagaaccaggcctcccatgtgagtgcagccagctgcgcaaggccatcggggagatggacaaccaggtctctcagctgaccagcgagctcaagttcatcaagaatgctgtcgccggtgtgcgcgagacggagagcaagatctacctgctggtgaaggaggagaagcgctacgcggacgcccagctgtcctgccagggccgcgggggcacgctgagcatgcccaaggacgaggctgccaatggcctgatggccgcatacctggcgcaagccggcctggcccgtgtcttcatcggcatcaacgacctggagaaggagggcgccttcgtgtactctgaccactcccccatgcggaccttcaacaagtggcgcagcggtgagcccaacaatgcctacgacgaggaggactgcgtggagatggtggcctcgggcggctggaacgacgtggcctgccacaccaccatgtacttcatgtgtgagtttgacaaggagaacatgtgagcctcaggctggggctgcccattgggggccccacatgtccctgcagggttggcagggacagagcccagaccatggtgccagccagggagctgtccctctgtgaagggtggaggctcactgagtagagggctgttgtctaaactgagaaaatggcctatgcttaagaggaaaatgaaagtgttcctggggtgctgtctctgaagaagcagagtttcattacctgtattgtagccccaatgtcattatgtaattattacccagaattgctcttccataaagcttgtgcctttgtccaagctatacaataaaatctttaagtagtgcagtagttaagtccaaatagtggcaatggggtcttgaattactaccttttaatttctatatggaaaagaactcactttgaccaacacttctgtaaattacattacaatataggttccttcacacta

SEQ ID NO: 61059 - DNA, 3750 bp, Homo sapiens
ataacaaattttcccattcccaaggttttaaaaaacgcccccggcccaaactttaaaatccccccccataaagaaaaaaatattatttttcctccccccgtaaaacttgggccccccaaggattctttaaaaccgcccccccttttttttttttttgagatttaacattgtacattttattaaatactggactttattacaacaaattaatttacttccgatagaagtttcattttaaaaaatgtggttgtgttcaaattcttaattgacacttgttttggggtaaacatcctatttttactggtggtatcatcaatcattatgagcagaaagattaattttgtataacagaacaaaggaatttctcaagtggtccaatactctatatatataaagggaatatactcccaaagagtgggcatgaccacagcagagtatatgatcagagaacatattgcttttatggtatatatatatatatatatatatctctacatataacatcaagtcatgcacattaagtctttactacctactgaaggcttctaccttacacatgaaaattgttcatgtcccagggtttggcatccagccaaaatttaaacaatgatgaagaatggctgtcaaactggcttttcagaccacccctgaaaagctgtcagctgtaatatccatcctggaatcgtggcggaaagttcctgggagttgccttttcctgtgttttgatcaagtctataatagctgacagtactgcacagtctctggatttagtgtcattccagtctacaggatgaggactttcaatcttctcttgcagaagaatatctagttcctttcttaattccttaacaagatgggcaattcttgctggagactgaaatacaatccactcatctacagcaatagtttcctgatcgttatccttctggatggaaatgtcacctccaaaaaacaagagacagtatggggaaacctctgtgcagtcatacaagtatatactgcttgttctcatctttaggtgatagataagccagttgtagtgaaagtctgtttgctccacattaacagatttaggatgaacagcaaccaggccatcggtttttgtgtaaacttttaccatttttctttttttacccaaatttagtcgaattttagcaactttgggatataaaccagcacagatgacagctttaattatcttctcattatctgaatttatattagattctggatctttaggatttctactgcttacaaatccagctccaagaagatgctcagcaaactgtcctttcatgttatgcagcatctgcagtgtgtttgaagacagaaaatattcccagcaatagtccttttcgtatctgaaaccacgtcgcctagcctcttcccagccctcaaacgcattcacaactgttaagtgatcacttctagtatcctttgccaattcctttcttcttgcatctgcaatcttttcttttcccagtggaatgacaaatggatctttgaaactgagactagcagcaatagtgagtactgggtctaagcagcagaacagtgctccaaaaagaatcatttttccaatatgtggctcaacgggtaatcgtgccaagtggactccaagaggtgtcaattcttcttgtttatccaaagcgttcagctccatcaggtgtcttatggagagtaacactgcctcatttgatggtgggtccattaatctactcagaaaataagcaattccacctagccttaaaatctttatttgtaaacaaagttcttccaaaggagttctcaaaatttctggcagttgatagtcatctagaagacttgctctaagcccattatacagatgatagcaatggccaggttgaactcttccagctcgaccttttctctgtttggcattagctttactaacccactcagcggacattgtactgatattgttctgagtatcaaaatgcgtctcttttatttttcctccatctatcacataaacgacatcatctatggtaatgctagtctccgcaatgttggtagcaattactattttccgaacaccaggaggggttcttttaaacacctgtgtctggttaactgtaggcatcagtgaatgtaaaggtataattaaaaatttatctgatttaaacattacttgtgacatcaagagatcatgtaaagtgctgatattgtcccagcctggcagaaagaccagtatcgcaccatcctcttcttccaaaacaatgtatcggatgagggcaacaatcaaattcagatcaactttatcatcctccatcatttctataacatctacagtacttgcagaataccttcttcgcagttcccttacataatctggccaacgttctttatatattgcttctttttcttctttttcttggctatttacatgcccttgcatgaaacccctcttaaactgggatctgtgttctttttgttctggaacataccttattttttcaattacatcttccaaaagatattccacaaccggaaaggtaaaaccaggtatgtgtatcattggacagttaccaaaatattctgaaaacttttctgcattcaatgttgcactcatcaatattactttcaagtcagatcgaaaattgagaaggtctttaacaacagtcattaaaacatctgactgcagatttctttcatggatttcatcaagtacgatatgactaacactggacaaatacgggtctgactggagccactgaaggatgattcctgttgtacagtataagatagaaccctgtttccttggcaaccgactctggagacgaatttgatatccagtactattaccactgccacaagattctgccctttctgcagctactctttccgcaactgaaatggcactaattcttcttggctgagtacaaactattctgcaagcagatccttttcctctttcaatgtagttatccaaaatgaactgagtaacttgagtggttttgccacaaccagtttcaccacttattactgttacctgatggttatcaattaaatttaccaattccttttgcattccatacgaaggcagcttttctctgaaatgctgcatttcaatataccgaaggtcattttttttcttttgtaaatcttccaataatttttggtctaaagttccatctggttcattttcttgcaagagatactcagaatctcggtcaatatatgatctgttcctgattctaaacatttttttttcttgatttatcaacttcttttcctggatgtcaagtttgttctctgagcatggtgtgttcttagtagaaacttcagtaccgtatccatgatcctcaggagcaaaccaggatatctgtgcttctgactctttatcattcttcgcttgaacagaattcagtaactgtacaatttgttcttctcgtcgttcatccatgtgtactacagctctctcttgcctctccgcttccttgttcttctgcccctgttttttcgcgtaccacatgccgatttcgcggcctttcaggtgcccgggatgccggcccctgccgcctcgaccaccccctccgccgccgccgcctcctccggagcctcggttacctccatgaccccctgctggcccccctccatagcccccaccggagctgcggggacccccatcacggccccagttctgatggtagtcataactcattgtcctggcagactacaacccgtcagaaccagcaaccgctggaaatggcgtcccccacgcgtccg

SEQ ID NO: 61060 - DNA, 1471 bp, Homo sapiens
ttttttttttttgagtgtggggtcaattttattgggcatgcgtcagtcagaggctgggctggccagggtcgggtagggcaagcagtttgtctggaccccgagaaacccaactggaatccagggcctcatctgcttcaaagccaaagtcttcctcaaccttaatctgcaccggggccagctctggagtcagcgcatttcctgctcggcgtccatcccgtggcactcgccgcctcttccgcccactgggcccctcaccgggggctgggactgccgggtttctgggggtgcaggagtccttctgggcggggacagtgtctctttctctggaggctcattctccgcattgcctggggtgggggcatccgtgccctggctgccctcatcctggcaggcaggagggggaggtaggtgatgggtgggtcctgagctcccagttcctgaccctcctggaggcccaacactcacctccagcacaatggtgaactggctggcccggtagtcatccccgtaggagtccagcactctcatgaggaacctgctcagggggagaagccaccaacggaataacttatctcctagcggctggggaaaagggccacaggatagagctcagctcccactccactcaacgccaaagctgtcctggagccagacggtcctgagctctggcactggaggcctgggagccatgcccttgaccagccttgagacctcgagcaagacaaggcaaccattctgaggctgagtttcctgctctgcaaacgacatgacaccctcggctggatgttgcagcggtgacactgaagtagtgacaccagacgatttctgtacttaatgtgatgtcagcacttagtaaacattcatatgtgagttataatttttattgataactgaagagaggggagtacagaacgctcctcctaatgacctcacctcttataaacacccccttctcttttttccccagcccctgcctccagagttccttaaggttcaattgatggaatgcctcctctgcaccagcacctgggcaggtttgttgttgttgttttgcgacggagtcttactctgtcacccaggctggagtgcagtggcatgatattggctcaccacaacctccacctcccaggttcaagcgattctcctgcctcagcctcctgagtagctgggattacaggtgcccgccaccacacccagctaatttttgtatatttagtagagacagggtttcaccatttgggccaggctggtcttgaactcctgaccttgtgatccacccacctcggcctcccaaagtgctgggattacaggcgtgagccaccgcgcccggcctattatgcttttaagactcagaagtatctggccactactgatgtttacaaagtaggaaatttagcctgtagttccagctactccagaggctgagggggtaagatcacataagcccaagaggctgcagtgaggtacgatt

SEQ ID NO: 61061 - DNA, 1755 bp, Homo sapiens
  misc_feature (1)...(1755): n = a,t,c or g
ttttttttttttattttttgaacggtcacaatatgcatttattaatgaatgtatttatacacaatacaaacgtgcggggacaccgtccccttcacagcccagaacccagggtcagaagatgagggatccagcctcagaggggagatatgcgacttcccaagagcagttcttggcctgggaggggccatgagagtgcaagacacggggccgtggccggggcggggctacgggaacggggcgtggccggcccctgaggttactataggggaatgggccccggccaggtccccttttctttggggcagtgggaagacagcggggcccacggcatagagctgctacacgtagggcgtttctgccgtatttgccaaagctgctgtcgccttcttggtccgaggtggcgacgggcatcacggacacgggagcctggtagggccgccgggcgctggcggctgggtcctcgtcagagccgcagcagcaggcggagcagaggcagaggccacccaggatggagatcagtgaggcgctccaccccaggtagagggcggggcccagctcgtacttggttccggggtacaaggggtccgagaagtccccgggtgatgttgaaggcgtaccaggaggatggccaccatcccgcagatacccggcaagattgtgaggggcccctgcggtggccgccagcttggctttcctggagagctccaggcccccaatgttggtgcagcgcaggcccgctatgcctagcaagaggccgaggaagcccaggaggatggcggtgatcatgagtgcccggcaggcctgaatatacccagagagggccagcatggacgggaactcccagcagttgtagacgcccagggagtcggtggcacagctaaaccagaggttctcgaagatggtgttggtggtgatgacgttcccgtgcacagtggacactcgccagtagctgtttggcagagtcacccccagcatcagcagccccacagttgccatgaagaagccaaaggtttccacagccatcgacatggtgggatgcaggaccctggggggctggtgccccagagagggggaggggcagaacccctagggaactggaaggggctgcggctaaggagggttgtccaggcaggctggggtggaatcagcctcagcctctgcctgcctcttcctcgggctcaggtccgtctccactttctgcctccctcctgctctgtgggtctctctgcttcctggcaggtcagaggaatgagctaagcctgcgcgcggcagcctggagccactgacggatacagccaaggaggggcccccaagggaggcactgggaactgaggggaagcgtctgtctctgactcagctttcattgggggccaaagaacggagtaagagggacaaggagtgaaaagatgacagagacagacgtgagagcaataagggacagagacggagagagaatgaacagcagccttcagtggtgaaggacggaggaaccacgagaacaatctaagatactcagaccaaggggttggggcgtatgagtctcttaaggaagatcaagctggaatgaggggatgggagggtaggagacccacagctctgggctccatccagcctggaatggaactcggccccaccatccattcaccagggaactcagacgggagagttttagtcccctgagcttctgctctgtcagtgacaannccgnctgcttcgnnnttccnccgcnctggcctagtgtactgcaaatcgagg

SEQ ID NO: 61062 - DNA, 2761 bp, Homo sapiens
tggtcagactggagataaattttgaagggagcaccaacaggactttgtttaaaaaattagtgcaggggctgggcatggtggctggtgctctcccccaactttcatactggaacaagagttaggctcaggtttacatgatcctctactattcttttgtgaagaatgacaactgagtcagttggttgagcttgaagtgttccagtcctaagggattcactctcacttaatgtcatatattggtaaggtgcctacatgaggtcagtgtttgtggctacatataaagaccaatgatgaaatgaggaattatttttttttcttttaataagggatggggtcttgttatgttgcccatgctggactcaaactcccagactcaaattcctgggcttaagctattctcctgcatcagcctcccaaatagctgggactacaggtgcatgccaccacacccagctagaggcaatgattcttaaagtctccgctggctatctaggactcttattaaatatcctgttactttaaaaaggccatccaaatatattttcttgaaagaaacatttatttatgatctttattggtgaaataatttcaaacaaatccagaacaggttctcacactttgagcctttagtgcaaaaacactatgccatgcgggaaataaaatgcttatccagtggagcgctcccctgatgcattgaaatattaggatactcaagcagaagacgacttatgtgacagaaatctgctcataaatctgcttgaaaaagggcatgataaacctcatattaaggtttctcacaacataaatatgcttaagcaacttaattccaacttaatttcaaaacaccccaggaatcaactatccctttaaataaaaaaaataatcaatttatattcttcttaaaagaactccaacaatttaaaataagttccaattccatatatatatatatatatatatatatatatatatatatacacacacacacacacacacacatttataacttaggtgctcttttgcgctatatactttaattcatgcaaaagtgatagaggactggacttgaggctctacagaggcctttctgagaaagctgtgtagctccttactctggcgaagaacaagggggtgtacatcttgtcaatctcaaaagcactgactgcagtctcaccagttgatttgtaagtaatgtgacaagaatgatgtatccagatgagtttgttgaacctctggtgaccactggaacatagctgtagccccacatgaaaactctgatctgcttcttgtacagggacacgacgaaaatatctgtatttatagtcaagtggtttttcttcttttttcttagttattacagcaaatactttggtctgattgtctgtgtcttgtgacaagcgatagtgacccagtagaattgcatcagtcctggtattcctagttcttaaacgtggaacaatggactgaggctcttcaggggttgtcaacatcatcacatggccatcaggaaagaatcttatgtacctgtaatattccacttggtgccaggctctatagaaaccatcaagagactgttccccttgacgaatatatgtggttttactgatatacacgccatcaaaccgaacacgaggccgttctaaaaacatctctctccaggacgtgtacggaacaagtttaatacagcttctgccccaaactttcaagcaggccagacgccatatttcagggtctctggcacagatgtagaatcctctgcacaccagcgacaactgctccaatgatctgaggtccaagtcactagacaccacccatcggaagatgtacatcaggacctccattggcagcactgatatgtgaatctgactgctctcaagctcaggctgacacagtttaagcacagactcctgaaatgtgagttgctgctggaagtaggacaagagatctgccattttgctgtcatcatcattatcttcaatgtagctgtttccaacgccatcaccatctggagaccgggtataagtaatcttgaactctatatcaggtacaagttgcatagccctacgataaaacttgatggcttcatagagagctccattttgttcttcttctactgcttttaggaagagttctcgagccttttcttcttttgcctgttcttgttttcctttggtatctgccgatgttttctggagagagcctcttgctgctctgcaaggtcgattttctaaattgctagagcttacacctggagcaagttcaaacatccactgagctcggaacatctggagttgtgcctgcagatctgtttcagcaggactttcattttcttcatcatcatctgctctgacagtatcagaatgacaatcttcctcagcttctgccatgctggcggggcggcctgctgcgctcgaggggctctccgtgccccctctgcaccgccccccggaggaggggtgctgggtgtccgggtgtctactcctgcctgtctctgcagcggagcttagcagagttctcggtcggagaagcgcaccaggcagcggcaataactgcgggcccggcgtacggcagccatcttcgcggggcagggggccagatcggggcgcgctggggtggcggcggctgccggggactcggggagtggagggacgcccgttgccagccgaggcgggggattgtgcgagcaccggagcgtcagccctactggagaccccggacgccgccgcggagctgccccctcagctgcggaaacctgcgccga

SEQ ID NO: 61063 - DNA, 1154 bp, Homo sapiens
accctctgcgctggtcgtgcgtccgttttactaaacaaaaagctgacgcccagacccgacaagcaactctacaaggtctcccggccataagtggcgaagcctggatttgaacccgggtctaccataggattctgtgaagcgagaggccaccttccaattccgttcccgaagtccttgaacctccagatattggtatcaacttgactgaccctatgttcagaggaatttataggggggttcaaaagcatcaagatgacttacaggatgtaatagggagagctgtcgagattggtgttaaaaagtttatgattacaggtggaaatctacaagacagtaaagatgcactgcatttggcacaaacaaatggtatgtttttcagtacagttggatgtcatcctacaagatgtggtgaatttgaaaagaataaccctgatctttacttaaaggagttgctaaatcttgctgaaaacaataaagggaaagttgtggcaataggagaatgcggacttgattttgaccgactgcagttttgtcccaaagatactcaactcaaatattttgaaaaacagtttgaactgtcagaacaaacaaaattaccaatgtttcttcattgtcgaaactcacatgctgaatttttggacataatgaaaagaaatagagatcggtgtgtagggggagtggtgcattcatttgatggtaccaaggaagcagccagctgcttgaattaccttggatctttatataggatttaatggttgctcactgaaaactgaagctaatttggaagttttgaagtcaattcctagtgaaaaattaatgattgagacagatgcacccttggtgtggagtcaaaagtacacatgctggatcaaaatatataagaactgcatttcctaccaaaaagaagtgggaaagtgggcactgcttaaaagacagaaatgaaccctgccatataattcaaatattggagataatgtcagcagtgagagatgaggatccactggaattagccaatacactatataacaatactattaaagtattttttcctggaatataattggtatatgtcttccactttccatcatgtatgtaaaatttcatagtaaaacttcctgatagtttcaataaagaaattatctgcaaaaaaaaaa

SEQ ID NO: 61064 - DNA, 1483 bp, Homo sapiens
atcgagaccatagaccacgtcggggaattcgccatggcagcccaggcagctggtgtatctaggcagcgggcagccactcaaggtcttggctccaaccaaaacgctttgaagtacttgggccaggatttcaagaccctgaggcaacagtgcttggactcaggggtcctatttaaggaccctgagttcccagcatgtccatcagctttgggctacaaggatcttggaccaggctctccgcaaactcaaggcatcatctggaagcggcccacggagttgtgtcccagccctcagtttatcgttggtggagccacgcgcacagacatttgtcagggtggtctaggtgactgctggcttctggctgccattgcctccctgaccctgaatgaagagctgctttaccgggtggtccccagggaccaggacttccaggagaactatgcgggaatctttcactttcagccgctgtgtcccccctccccagttctggcagtacggagagtgggtggaggtggtcattgacgacaggctgcccaccaagaatggacagctgctcttcctacactcggaacaaggcaatgaattctggagtgccctgctggagaaagcctatgccaagcttaatggttgttatgaggctctcgctggaggttccacagtggaggggtttgaggatttcacaggtggcatctctgagttttatgacctgaagaaaccaccagccaatctatatcagatcatccggaaggccctctgtgcggggtctctgctgggctgctccattgatgtctacagtgcagccgaagccgaagccatcaccagccagaagctggttaagagtcatgcgtactctgtcactggagtcgaagaggtgaatttccagggccatccagagaagctgatcagactcaggaatccatggggtgaagtggagtggtcgggagcctggagcgatgatgcaccagagtggaatcacatagacccccggcggaaggaagaactggacaagaaagttgaggatggagaattctggatgtcactttcagatttcgtgaggcagttctctcggttggagatctgcaacctgtccccggactctctgagtagcgaggaggtgcacaaatggaacctggtcctgttcaacggccactggacccggggctccacagctgggggctgccagaactacccaggctcctcctaggttgaatcagctgaggcagcacctgatgaagaaactcaggaagacagccccacatctctaaggagaaatgaagaaaagcaaatcctgctctctctactttttcacctccctctccccatgttccctgcctggtttgctgttgatctgttgattgacttagactgtaagcgcatggggcagggccagtcactttcttctcatgacagagctcactgcagggctgtgctcggtgctagggaagcagcattagaataaaaccccacctggatgcaaaaaaaaaaa

SEQ ID NO: 61065 - DNA, 1422 bp, Homo sapiens
gagagatgctgccgctgctgctgccgctgcccctgctgtgggcagggccctcgctcaggatgcaagattccggctggagatgccagagtccgtgacggtgcaggagggtctgtgcatctttgtgcactgttcggtcttctacctcgagtatggctggaaagattctacccctgcttatggccactggttccgggaaggggtcagtgtagaccaggagactccagtggccacaaacaactcaactcaaaaagtgcagaaggagacccagggccgattccacctcctcggtgatccctcaaggaacaactgctccctgagcatcagagacgccaggaggagggacaacggttcatacttcttttgggtggcgagaggaagaacaaaatttagttacaaatattccccgctctctgtgtatgtgacagccctgacccacaggcccgacatcctcatcccggagttcctaaagtctggccatcccagcaacctgacctgctctgtgccctgggtctgtgagcagggaacaccccccatcttctcctggatgtcagctgcccccacctccctgggccccaggaccctccactcctcagtgctcacgatcatcccacggcctcaggaccacggcaccaacctcatctgtcaggtgacgttccccggagctggtgtgaccacggagagaaccatccagctcagtgtctcctggaaatcaggaaccgtggaagaggtggttgttttggccgtgggggtagtggctgtgaagatcctgcttctctgcctttgcctcatcatcctcagtttccacaagaagaaggcggtgagggcagtggaggttgaggagaatgtatatgctgtcatgggttaatctctcaggcctccagactgtacttccagatgtctcctcatccagttcctccacagtctgaatggccatgtttcttcttcattgctggagaatgaagtgcaaatgccactgcctggactgaaggcctttcacgatctgtcttctgctggactctgctcctgatcccccttctccttgcatcacccgaagtctccctacacccaccaggccaagccctctgtgattctgagactttgcatgtgtagttacttctcctgaaatggccttcctccccattcctgccaatccaggtccttatcatccttcaggttgtcttaaatgtcatccaggtgtgtgtatttttatgtaatccttgtatgatattaagcggagatgtggcatttgttcattaatttgtagacatattcagtaaccatactgaatacatataatgactatgtgccagcatttccgtatgtgcaagaagttcatcaatagatatagactcaaagagctctgtcatcaagctgttgttctgaagagcagaaggatacaaataaaaagaaataagtaaaata

SEQ ID NO: 61066 - DNA, 3120 bp, Homo sapiens
cgttcaaaataaaaatgtttttaaaagtgtaatttcctttttatttgcatctgtttatgactgaaaaaatgactagttattatgaagacactactgttgaagatggatattttaacatggagtttcaacaaaattacttcttgagacagagctgatgtgttttttaaataacgtgattttaagcatatatttgaacaaaactaaaacatttagtattatgaatatgaaaaaagatcagtaaatcaatgtactcttctaggctgaattaaggtagactatttaaggtttcaaaaaagtttggctggggcagaataagttttacaaaacccatgccatccaaaattaagatgacatgtagcagcaagaagtattccaatgtctcataaccagttctcgcaagcaatgtgtattccttactttaaggaagtgtcaaacaaatagaaaaatctggaagaatttactaagtgtaataaattagaggtaaatcgtaataaaagaatttatgtctcacaaaaatattcacaagtgggagttttcttctaccaacttctcagagtccttctagccccctcttcacttctgaaagatgggatttaccaaaatctggtttacatttaacttttcagggacacatgacctgaaaagaaagatgtcagataatactgacattgcctcatgcactttctttgtatcagtccttcttctgtaagtaatcagaattgggtccaaatggcatagaatcaaacattatgtatcatgccaaataccacttcctgcccaacaaaatttcatttttctccagtaatgaagaggtggacattcttgttggactgtagcatctgtgccgcccgctccacaccaaccacggcagctaacctctgggcatcatatttggagtagagaacagtgcaggtccacgtggcctcttctcctctgttggtggctctcagcatattacagatttcactgtaaaagtgtggatatgtcggcagttcatagaaaatcaggttcctgatgccttttattgtataccttttgtagaaatggaagcgctctgtgaaaagtagaaactgtttctctccttgaaggaagaagtgtctggccctggagacaccagacttctgcgtgtactcgcagatgtgggtaaaattcaattcctccttcttgaagtaatttcgaagacgcacgaagtcaaagtaggaggggatatagatgagcgtgtgagacatgactgcatcacgatactgtggcaaaatcttgttcacaaaaaagttaaacctggcatcaatcactgaagctaggttttcagcttccatcctctggaagacatgtgggagctgcaccaggacatgactgatagagcctgtcattgggacattcctcacggccacctggccttgcatgttgacacagtacttgttgaacactgagttgatctgggcatcctgaagggccccaaatagcagtgtctggcgatagtacttggaccaattattgaggctccacatccgcactcgagaaaagtctaccccatgtgagtccaggggtagtaggttcatgtgattcatcaaatgcaggacatgctcccagttctgcatcaggtaaatgtcagcttgatcaatgatgagaagctcgatagaagacagaaagtcaaaatctctcttcttctctccttctccaccaatgatggtcctcaagcccaggggggaagcaatgaggatatccgaggagtaaaacggggcatagagtcggatgcttctctgaagtattgccactccaatcctgaagtggtcatcaatattgcccacaaatacggcttcataatcctcaggcctcttcaagttgggtggtctctcctcgggatctgatccatattctccctgaaacctctttttgttgctcacaatgattttcttcttgctgtcaccctcgaggaggctgatgaagagctgcaccacccgcaaagcagcttcccggaatggcaccactatcagtaccttgggccttgttaacccttggtctctgaagtcatcatcatcacccactccaaacttctggcttcggcgtctgctattgttgccaagcacctgggcattggctttgaggatgtgatttatcacatgcaggcaatacacatggcggatctcttccccgttcttcagagcagtcctttccgggtagaacaggtccccggtaaagaattcataattaagaagagttctttctggaggggggtgaatgggctgcttgatttttggggaccagataggaactggctgttggtcttagtccaggtggattccagaggcttctggagatgaagtgactttaagtcaatatcctttgggggtttaaatgttccccccttctgaaacttagaggaaaagaaaagctggcccagaataggccatttaagctcgtgggtagttttgggatttgtgggcaacagcctgaattgccttttctttcagttccttgttcacatgttgaagaaatggatcttgagaggctttcaaagaagagttgtctccactttcctcttctagaaaattggtttccaggctgaacagtgactcgtgttttgcatctgtgaactcttcaggggatgtttgtgatgtgcccggtggctcttccccatcttcttttccctcagggtcagcagataaagctacattctctggactttcagtagactctgcagccatctcttcttccacactgacatcgctaccaccatcttcatcgttcatttctgcatcatctacaatactgtcttcttcctcttcctcctcctcatcttcctcttcttcctcagaaacattctttaatgtagcaagtagtctgtggtagccagaaacttgttgtggttcactctctgagtcgctttcagaatctgaagaatctgaactctctgacagttgacaaatctgtggctttgcttcctttctggaaaccctgtcatagaagggatgctcctcgccgaaatctcgaagatgtttcttctgctttttagttagggtgttgagtagctggctctggctccggctcccgcgtttgcccatagcgaaaacgtcaagtttgcccacttgcaagagtcgcggttttccaccaggaagttgt

SEQ ID NO: 61067 - DNA, 2846 bp, Homo sapiens
tttcgtgtttgttgcagctacctgcacttctagatgctccccaggttcatcctgtgtcgtctcccccacctaccagtcatcttcttgtgagccctgggcttaggagtcaccatggcaactgaagagttcatcatccgcatccccccataccactatatccatgtgctggaccagaacagcaacgtgtcccgtgtggaggtcgggccaaagacctacatccggcaggacaatgagagggtactgtttgcccccatgcgcatggtgaccgtccccccacgtcactactgcacagtggccaaccctgtgtctcgggatgcccagggcttggtgctgtttgatgtcacagggcaagttcggcttcgccacgctgacctcgagatccggctggcccaggaccccttccccctgtacccaggggaggtgctggaaaaggacatcacacccctgcaggtggttctgcccaacactgccctccatctaaaggcgctgcttgattttgaggataaagatggagacaaggtggtggcaggagatgagtggcttttcgagggacctggcacgtacatcccccggaaggaagtggaggtcgtggagatcattcaggccaccatcatcaggcagaaccaggctctgcggctcagggcccgcaaggagtgctgggaccgggacggcaaggagagggtgacaggggaagaatggctggtcaccacagtaggggcgtacctcccagcggtgtttgaggaggttctggatttggtggacgccgtcatccttacggaaaagacagccctgcacctccgggctcggcggaacttccgggacttcaggggagtgtcccgccgcactggggaggagtggctggtaacagtgcaggacacagaggcccacgtgccagatgtccacgaggaggtgctgggggttgtgcccatcaccaccctgggcccccacaactactgcgtgattctcgaccctgtcggaccggatggcaagaatcagctggggcagaagcgcgtggtcaagggagagaagtcttttttcctccagccaggagagcagctggaacaaggcatccaggatgtgtatgtgctgtcggagcagcaggggctgctgctgagggccctgcagcccctggaggagggggaggatgaggagaaggtctcacaccaggctggggaccactggctcatccgcggacccctggagtatgtgccatctgccaaagtggaggtggtggaggagcgccaggccatccctctagacgagaacgagggcatctatgtgcaggatgtcaagaccggaaaggtgcgcgctgtgattggaagcacctacatgctgacccaggacgaagtcctgtgggagaaagagctgcctcccggggtggaggagctgctgaacaaggggcaggaccctctggcagacaggggtgagaaggacacagctaagagcctccagcccttggcgccccggaacaagacccgtgtggtcagctaccgcgtgccccacaacgctgcggtgcaggtgtacgactaccgagagaagcgagcccgcgtggtcttcgggcctgagctggtgtcgctgggtcctgaggagcagttcacagtgttgtccctctcagctgggcggcccaagcgtccccatgcccgccgtgcgctctgcctgctgctggggcctgacttcttcacagacgtcatcaccatcgaaacggcggatcatgccaggctgcaactgcagctggcctacaactggcactttgaggtgaatgaccggaaggacccccaagagacggccaagctcttttcagtgccagactttgtaggtgatgcctgcaaagccatcgcatcccgggtgcggggggccgtggcctctgtcactttcgatgacttccataagaactcagcccgcatcattcgcactgctgtctttggctttgagacctcggaagcgaagggccccgatggcatggccctgcccaggccccgggaccaggctgtcttcccccaaaacgggctggtggtcagcagtgtggacgtgcagtcagtggagcctgtggatcagaggacccgggacgccctgcaacgcagcgtccagctggccatcgagatcaccaccaactcccaggaagcggcggccaagcatgaggctcagagactggagcaggaagcccgcggccggcttgagcggcagaagatcctggaccagtcagaagccgagaaagctcgcaaggaacttttggagctggaggctctgagcatggccgtggagagcaccgggactgccaaggcggaggccgagtcccgtgcggaggcagcccggattgagggagaagggtccgtgctgcaggccaagctaaaagcacaggccttggccattgaaacggaggctgagctccagagggtccagaaggtccgagagctggaactggtctatgcccgggcccagctggagctggaggtgagcaaggctcagcagctggctgaggtggaggtgaagaagttcaagcagatgacagaggccataggccccagcaccatcagggaccttgctgtggctgggcctgagatgcaggtaaaactgctccagtccctgggcctgaaatcaaccctcatcaccgatggctccactcccatcaacctcttcaacacagcctttgggctgctggggatggggcccgagggtcagcccctgggcagaagggtggccagtgggcccagccctggggaggggatatccccccagtctgctcaggcccctcaagctcctggagacaaccacgtggtgcctgtactgcgctaactcctgattaatacaatggaagtttctgggcatttacaatttcaaaaaaaaaa

SEQ ID NO: 61068 - DNA, 1845 bp, Homo sapiens
  misc_feature (1)...(1845): n = a,t,c or g
ttttttttttttccaccgtgttcctggagctgcccgctgccctctgccctgtccgtccccggcagagctgggagccggccctcagcatgaccaccgaaactttatttacaacacgaggctggagtaagaggggtgggatggaggacagcagcagggccgacaggaccctacttctgctcccgcctccagacgatgaccatgccgctggcgtcactggaggccagtaggctctcgtcgcagttgaagctgacatcaagcacaggtgcactgtggccctgcagcttgttgacagcagccttggccgcccgctccacatcaaagaagtgcacgcacatgtcctcactgcccgtcaccacgcaggccccctggcggaaggacatgaggggacagaagatgctgcgcacaggatgtgagctctgctcgatggggaagcttctcttcagctgcagggtcccctcgttgtctaccaccctgtagagcagcaacttgttgaggcaagcattgatgagcagtgagggatcccgggcctcgcggctgacccaggaccgggctgagatgctggtcacagggctcccctcatgcaccaccaaacgcttggctttggtcagcttccctgtggccatatcaaagaggaaagagaagacactgccacggtcatcacccgcccagagcagccggccaggggcatcaaaggacagagcaaggacacggcctgtcagcttgctggagccccccttcactttcttgcctgtggagatgttcatgacatgcacgttgtgcttggcgttccccaccacagtgaggttgttgttgacaggctggaaggtgcagcagagcagttcagcgctatcggggtcagggatctctcggatgcagcgaccatcctcagaggcccagatgcgcatggtggcatccagtgaggtggacacgaggatgtcattggagagggaccaggcgaagtcggagacaccacgggtgtggccccgtagcacgcgaagcactgtgggtggggcaggcaccagctggcacagggagatgctgccgtcgagtgagcagcaggccaggcggtgtcggtcatcattggcgaagcgcacccttgggactgcctcatccacgtgctggtcaaaaacatgatacatgcccgcaaaggcatagttctcgctcagtgacgtgtccccggccatggcccgacttgcctctgctgctgacgtgggcaccacgctgccagggggcctgtcctcatagacggcacggttcatctgcgcctgcagctggtaggagcctctgctgacagaacgacggtgcccacgggcccccagggcccgaggatcatcctcaaagtcctccatgcggtcaagagtagtgcggctactgcggacgatgctgttgctataggcacgagcactgcctggctcggagaggggcccgtagcgctggcccagcagctgcccccgaagcctcaggtactgccgacgcagcgctggggggtgcccagccttggcattctcccgcagcagctggctgcgccggcggatatactgcgtccgaaactgtggaaacgttggtgtgcggtacgcgttgtacctcgcgtccactgctaagacttgctgccacaccgcggccattccccggcctcctcctctggcgtgtccgcccgcggcagcctccggggctgcctccggttcttgaggccccccggagcggccctgagaccactgtcgccggttccttctgtctctcctccctttctcaggctccaggcaagatggctgcccctcgtgccaagctggcggtctgngccagggtcatcaacgggctcatcattggcgggnccnnngggactct

SEQ ID NO: 61069 - DNA, 1627 bp, Homo sapiens
cgactccgctgggccacccgcccctcaccctcggcctgacccagcctctccgtgcctcccctagccgcctcctcccagcagtcccccaggagcgagctgcgagatgccccaaatcggacccctccccagttggaaaaaaaaaacgactcctgacctttcccagcctcctcggtccactgagggaacccgcagccccgggcctcgagcagactgctgggactgcggggcggccgggcgcggggcctgaggcggggcggggcgggtcgggtcgggggcctttaagaggcgcggtcgccgggaccgacacagacgcggacagcgccgggactcgccgccccgggactcgcgcagcccgcagcgctccggctcctcctctcgcgaccgccctccgcagcgatggacggagacggtgacccagagagcgtgggccagcccgaggaggcaagcccggaggagcagccagaggaggcgagtgctgaggaggagcggccggaggaccagcaggaggaggaggcggccgccgccgccgtacgctggacgagctgcccgagccgctgctcgctcgcgcgtgctggccgcactgccgcggcacgagcatggtgcaggcctgccgcactggtgtgcctgcgctggaaggagctggtggacggcgccccgctgtggctgctcaagtgccagcaggaggggctggtgcccgagggcggcgtggaggaggagcgcgaccactggcagcagttctacttcctgagcaagcggcgccgcaaccttctgcgtaacccgtgtggggaagaggacttggaaggctggtgtgacgtggagcatggtggggacggctggagggtggaggagctgcctggagacagtggggtggagttcacccacgatgagagcgtcaagaagtacttcgcctcctcctttgagtggtgtcgcaaagcacaggtcattgacctgcaggctgagggctactgggaggagctgctggacacgactcagccggccatcgtggtgaaggactggtactcgggccgcagcgacgctggttgcctctacgagctcaccgttaagctactgtccgagcacgagaacgtgctggctgagttcagcagcgggcaggtggcagtgccccaagacagtgacggcgggggctggatggagatctcccacaccttcaccgactacgggccgggcgtccgcttcgtccgcttcgagcacggggggcaggactccgtctactggaagggctggttcggggcccgggtgaccaacagcagcgtgtgggtagaaccctgagcgaccctgcctccgctctcccccagctgcctggaggggcaaaggtcgagggtagataggccttaacttagtccatagcgtcctcaccttccccaagccacacatcctcctcccatcccttgctccgatcccagcccctgagcagggagagagaagttttgttggcataggtttgcttaggtagccggcttctagaatgtagatccgtgagggcgtgagcttggactggacccactgctgattccctgcacctagcacagtgcttgccacaaagtgggctctcaataaatattatttgtccaaggaaggaatgaatgaaaaaatggataaacactga

SEQ ID NO: 61070 - DNA, 1878 bp, Homo sapiens
  misc_feature (1)...(1878): n = a,t,c or g
cggagctacccaggcggctggtgtgcagcaagctccgcgccgaccccggacgcctgacgcctgacgcctgtacccggcccggcatgagccgctacctgctgccgctgtcggcgctgggcacggtagcaggcgccgccgtgctgctcaaggactatgtcaccggtggggcttgccccagcaaggccaccatccctgggaagacggtcatcgtgacgggcgccaacacaggcatcgggaagcagaccgccttggaactggccaggagaggaggcaacatcatcctggcctgccgagacatggagaagtgtgaggcggcagcaaaggacatccgcggggagaccctcaatcaccatgtcaacgcccggcacctggacttggcttccctcaagtctatccgagagtttgcagcaaagatcattgaagaggaggagcgagtggacattctaatcaacaacgcgggtgtgatgcggtgcccccactggaccaccgaggacgggcttcgagatgcagtttggcgttaaccacctgggtcactttctcttgacaaacttgctgctggacaagctgaaagcctcagccccttcgcggatcatcaacctctcgtccctggcccatgttgctgggcacatagactttgacgacttgaactggcagacgaggaagtataacaccaaagccgcctactgccagagcaagctcgccatcgtcctcttcaccaaggagctgagccggcggctgcaaggctctggtgtgactgtcaacgccctgcaccccggcgtggccaggacagagctgggcagacacacgggcatccatggctccaccttctccagcaccacactcgggcccatcttctggctgctggtcaagagccccgagctggccgcccagcccagcacatacctggccgtggcggaggaactggcggatgtttccggaaagtacttcgatggactcaaacagaaggccccggcccccgaggctgaggatgaggaggtggcccggaggctttgggctgaaagtgcccgcctggtgggcttagaggctccctctgtgagggagcagcccctccccagataacctctggagcagatttgaaagccaggatggcgcctccagaccgaggacagctgtccgccatgcccgcagcttcctggcactacctgagccgggagacccaggactggcggccgccatgcccgcagtaggttctagggggcggtgctggccgcagtggactggcctgcaggtgagcactgccctgggctctggctggttccgtctgctctgctgccagcaggggagaggggccatctgatgcttcccctgggaatctaaactgggaatggccgaggaggaaggggctccgtgcacttgcaggccacgtcaggagagccagcggtgcctgtcaggggagggttccaaggtcgctccgtgaagagcatgggcaaagttgtcttgacacttggtgggattctttgggtccctgtgggactcgtgtggcatgcatggtcctctctgaagccttggttttctttcagcagtgaagatgctcagaaataacttgcttgtctcccatggatgggtgttggtacagcgagctttttgttctnggctaattggcattggctgtgcccgggggtgttttgcttaaggggcttcctgtgcccagagcccagcccagagagcaggtgcaggtgtcatccctgagttcaggctctgcacggcatggagtgggaaccccaccagctgctgctacaggacctgggattgcctgggactcccaccttcctatcaattctcatggtagtccaaactgcagactctcaaacttgctcatttaaaagaaaaaaaaaagaagaaaatgtaaaaaaaaaa

SEQ ID NO: 61071 - DNA, 1298 bp, Homo sapiens
ttttttttttttggcaggttcagacaaagagaaaattttattttcttattcttgaaatgactgtacgatttttcaatgttaaagttcactttcaagtatgatcaataacaagacatcaaatgtaaaaattatgctgtattatcattttctccattgcttcttaaaccactgaaagtaatttcacaattcaccacatttaggcatcttctttttcactttcttcattttttacttctttaggcaacaatggatcaatcttcagtaataaaccttcacttgttgaactacgaaggaaagcacgtaccacaaagggacccaaattcagcggtctgtgcctacaaacttcattaataactgcttgcagattggcagctatctggtcacttgacatatccaatgttgctattttggtctggagaaagttctccctttcttcatctaccttaatttcatgtccatttttaaataattcaagcattttggggatgtcacggccaatggaatttcgagaaagctttggatattttttattcagtttcttccttaatcgattaagttcaggcattatttctggaacagctacgtaaaagtctgcaacaatttcatcatcccaaatcttctgtatcagactagtgcctcctgcaaatgcagctccattttcttccgctattttgacctctgatgcattctctgtaaatacagcaactttattgatttcggaagcaaatgggtatgggcaaactaaggaacactgggtaaatgggctccacggtttttcttctttcccagtgccatatccagtgtcaaatcaagataaacactttgctttggactagtaaagtcaagaatttgaaatttcttaagtaagtgaacagctttctccacctcatatatctgtctcgggtataagcgttttaaatagacatcatcctcaggttcgccttccatatagggatatgcttttattttttctatttcatcttttttctcatctggtgttttttctttagcacctttttttgttttctttgcagactttgtagcagcagcaaaatgtctgttgggcactcggatgtttacagaacaagaacaaagtgatgtctgataaaccatcttggaaaggctatgcctttgatgatgtatcaaggctctacccatgcaccttacggccgccgccatgttgggcactccggattgcgttcacgaaattgttcctacgtttctactgggaagaattaaaaaaaggttccgttctagaatccgcaaagagggaaggagttaaaaaaaaaactcgtgcc

SEQ ID NO: 61072 - DNA, 1870 bp, Homo sapiens
ttttttttttttgacagatcttgacaatgtccttttaattgtactcttttcaaaaaatctcctttctcagttaaaaaaggacaaggcatgatgaagacctgctctgagcccattactgggcggtgatctcggtcctgggggaggccaggccgggactcttccaaggcctcctccctgggcagtcccagcaatggggccagtggcagggcaggttctccctgccagaacccgatcctagcccttcagaaggactggacctctgtgtcccttcagtgggaagccaccttggacacacgcagtcattcaggtggacataaggccactcttctcgcccttgaccttgaggaactcagccatgctggagaaatacttctggttggcctcagccaccttcttctctgccgcctgtgggttcacaatctccaggccctggagtggggtgaaggccacgctggaggccgtgcccgaggagcggtcgcggatggtggacttcccgccatatacgacgctctgcttctgcagggtccgctgcagcgtcttggagatcctggccttggtggcctcgtttacctgtgtctgccgcacacgcccactgcccgacttgcccaggtggcccaggctgaatcccaggtcctcctggtaggcgtcctcctcgatctctccgaagctcatacggttggcctgcttccggatctccgtcagccccagccgctccttcatcttgcggtacctgcggccgcctcgcttcttccgctgtccatccaggggcgcaggcagcggcttcacctgcttcacaggcggcggctcctgccacttgtcgaatttgcgctcgatctcatccttcagttcgtagcccaccttcccttctgtgctctcgtggaaactgtccacacgggctgccagtgtgcacttggcggccaccagccgggccgctttccgccgcagatcctggagcaacggaaaacgggggtggaatcggtggcagggactgcacgatgtcactgtggtagatgtagccggtgtggggcagcactgaggtagacgagaagcccgacagcgtcttgcgctgggccccgagcagcatgatgttgcaggcgggcatcttggagaggttggtcaggccgccggccacacccatgatcttggcggccgtggatgccccgataatgatggacaggttgggtgcgatgaaggacatccgggactccacatactcgtagatgcggtgcttggaggcgttcagctccagcgccatgtcgcaggcctcctccagccgctccagctcctcctccgacagctgctgcccctgggtggtggaggcggtgacgctgacgaccatgatggtggcattggtgaggatctgctgcaggttctcattgttcttgcacttgtccaggctgttgcccagctccttgaccgtgcggatgtaatccagtgcattggggaccaaggactccagttcagggaatctctttgagtacttatcccggatgaacttatggatgatgttcagctcgttttcgatctccacggtcaggttgttggcatccacgatgacgcggtattcaggcgcggcctccactggtcccatcacttctgaagctttggcttgcttgctgatatactcctcaatcttcatcataatctcagcaaacatcttactatcccatagcttggcgatggtcttgactgaatccccggaaagatccagctgtgtctcctcctgcacatcctcgatcgctggctcctcttcttcctccccatagcttcctccttcctcctcttctgctgcctcttcgagatcagctaagagctcatctgccagagacatcccgaggcctctcctctccgcgcaccactgtttctagcg

SEQ ID NO: 61073 - DNA, 2348 bp, Homo sapiens
tagcggtcccaggagtttccaaggtaaccgcgcagtagggcggatctcattaggcggaaagcgaaacccggaagtgacgctcttaccgggtgtcagcagcgagagggttcgaagatggcggcgcgcaagggtcggcgtcgcacgtgtgaaaccggggaacccatggaagccgagtccggcgacacaagttccgagggcccggcccaggtctacctgcccggccgggggccgccgctacgcgaaggggaggagctggtcatggacgaggaggcctatgtgctctaccaccgagcgcagactggcgccccctgtctcagctttgacatagtccgggatcacctgggagacaaccggacagagcttcctcttacactttacttgtgtgctgggacccaggctgagagcgcccagagcaacagactgatgatgcttcggatgcacaatctgcatgggacaaagcccccaccctcagagggcagtgatgaagaagaagaggaggaagatgaagaggatgaagaagagcggaaacctcagctggagttggccatggtgccccactatggtggcatcaaccgagttcgggtgtcatggctgggtgaagagcctgtggctggggtgtggtcagagaagggccaggtggaggtgtttgcgctgcggcggcttctgcaggtggtggaggagccccaggccctggcagccttcctccgggatgagcaggcccaaatgaagcccatcttctccttcgctggacacatgggcgagggctttgcccttgactggtccccccgggtgaccggtcgcctgctgaccggtgactgtcaaaagaacatccacctctggacacctacggacggcggctcctggcacgtggaccagcggccattcgtgggccacacacgctctgtggaggacctgcagtggtcaccgactgagaacacggtgtttgcctcctgctcagctgacgcctccatccgcatctgggacatccgggcagcccccagcaaggcctgcatgctcaccacagccaccgcccatgatggggacgtcaatgtcatcagctggagccgccgggagcccttcctgctcagtggcggggatgatggggccctcaagatctgggaccttcggcagttcaagtctggttccccagtggccaccttcaagcagcacgtggcccccgtgacctccgtcgagtggcacccccaggacagcggggtctttgcagcctcgggtgcagaccaccagatcacacagtgggaccttggcaagtggagcgggaccctgaggcgggcgacgtggaggccgaccccggactggccgacctcccgcagcagctgctgttcgtgcaccagggcgagaccgagctgaaggagctgcactggcacccgcagtgcccagggctcctggtcagcacggcgctgtcaggcttcaccatcttccgcaccatcagcgtctgaggcgtcccactggctctgatcttgcttcctgcttggaaactgaagtcgaattgggctcccctggaaggggttcattcaggtctgttgactgagactggccggcctgtgggctgccgtgatggattctgtttgacgtattgttctctagaaggcctggctctgatccagtgacccctctcaccaaagaactcggtttaaccagggctctgtaagaccactcccacccagagacttgtgtggcctggtgtggcctgtgtgtcggattccttcctgtcagctgtgacccatttgacctgtgtccccagaacccagttttttgtttgtttgtttgagacggagtcttggtctgtcgcccaggctggagtgcagtagcacgatcttggctcactgcaacctccgcctcctgggttaaagtgattctctcagctcagtctcccaggtagctgggattacaggcatgtgccaccacaccccgttaatttttgtatttttagtagagacggggtttcaccatgttggccaggctggtctcaaattcttgatctcaagtgatctgtccgccccggcctcccagagtgctgggttgggattacaggcgtgagccaccgcgtccggctcaggacccagttttggctgctggttcccagcaggggactcgggggatatacagtggctgcaccaaattggaggtgtgggttcctccaacacaatttgcttctgcccgttgtcttcctgccagctgggtttggccaggatttctccgtgtgggggctacatgcgaccctctcccctcctccctgactttagaggctggtgctgtgtcgggaggaaggtcagggctcctgagcagcaataaaggaccaggaagaggcctgaggtgtaaaaaaaaaa

SEQ ID NO: 61074 - DNA, 2537 bp, Homo sapiens
ggcgcagagcggagatgcagcggcttggggccaccctgctgtgcctgctgctggcggcggcggtccccacggcccccgcgcccgctccgacggcgacctcggctccagtcaagcccggcccggctctcagctacccgcaggaggaggccaccctcaatgagatgttccgcgaggttgaggaactgatggaggacacgcagcacaaattgcgcagcgcggtggaagagatggaggcagaagaagctgctgctaaagcatcatcagaagtgaacctggcaaacttacctcccagctatcacaatgagaccaacacagacacgaaggttggaaataataccatccatgtgcaccgagaaattcacaagataaccaacaaccagactggacaaatggtcttttcagagacagttatcacatctgtgggagacgaagaaggcagaaggagccacgagtgcatcatcgacgaggactgtgggcccagcatgtactgccagtttgccagcttccagtacacctgccagccatgccggggccagaggatgctctgcacccgggacagtgagtgctgtggagaccagctgtgtgtctggggtcactgcaccaaaatggccaccaggggcagcaatgggaccatctgtgacaaccagagggactgccagccggggctgtgctgtgccttccagagaggcctgctgttccctgtgtgcacacccctgcccgtggagggcgagctttgccatgaccccgccagccggcttctggacctcatcacctgggagctagagcctgatggagccttggaccgatgcccttgtgccagtggcctcctctgccagccccacagccacagcctggtgtatgtgtgcaagccgaccttcgtggggagccgtgaccaaaatggggagatcctgctgcccagagaggtccccgatgagtatgaagttggcagcttcatggaggaggtgcgccaggagctggaggacctggagaggagcctgactgaagagatggcgctgggggagcctgcggctgccgccgctgcactgctgggaggggaagagatttagatctggaccaggctgtgggtagatgtgcaatagaaatagctaatttatttccccaggtgtgtgctttaggcgtgggctgaccaggcttcttcctacatcttcttcccagtaagtttcccctctggcttgacagcatgaggtgttgtgcatttgttcagctcccccaggctgttctccaggcttcacagtctggtgcttgggagagtcaggcagggttaaactgcaggagcagtttgccacccctgtccagattattggctgctttgcctctaccagttggcagacagccgtttgttctacatggctttgataattgtttgaggggaggagatggaaacaatgtggagtctccctctgattggttttggggaaatgtggagaagagtgccctgctttgcaaacatcaacctggcaaaaatgcaacaaatgaattttccacgcagttctttccatgggcataggtaagctgtgccttcagctgttgcagatgaaatgttctgttcaccctgcattacatgtgtttattcatccagcagtgttgctcagctcctacctctgtgccagggcagcattttcatatccaagatcaattccctctctcagcacagcctggggagggggtcattgttctcctcgtccatcagggatctcagaggctcagagactgcaagctgcttgcccaagtcacacagctagtgaagaccagagcagtttcatctggttgtgactctaagctcagtgctctctccactaccccacaccagccttggtgccaccaaaagtgctccccaaaaggaaggagaatgggatttttcttttgaggcatgcacatctggaattaaggtcaaactaattctcacatccctctaaaagtaaactactgttaggaacagcagtgttctcacagtgtggggcagccgtccttctaatgaagacaatgatattgacactgtccctctttggcagttgcattagtaactttgaaaggtatatgactgagcgtagcatacaggttaacctgcagaaacagtacttaggtaattgtagggcgaggattataaatgaaatttgcaaaatcacttagcagcaactgaagacaattatcaaccacgtggagaaaatcaaaccgagcagggctgtgtgaaacatggttgtaatatgcgactgcgaacactgaactctacgccactccacaaatgatgttttcaggtgtcatggactgttgccaccatgtattcatccagagttcttaaagtttaaagttgcacatgattgtataagcatgctttctttgagttttaaattatgtataaacataagttgcatttagaaatcaagcataaatcacttcaactgctcttctgtagttcttggatttcttttcccttttgactttgaataaatgtaaaatcctttcagccagaaaaagtaaaatagaaacaacctgtattaaaaatcttccatagaagc

SEQ ID NO: 61075 - DNA, 2491 bp, Homo sapiens
ttttttttttttacaacaaaattagtcacttttatttaaaagaaacattacaaataagtgtgcaaaattaaacatcatgattaaatacacatgaaaggaacatgcatactttacagcaacatccacagagaattagctgattacatgacagtgacagtaaagaactaaagaaaccggcaaaaccgagaactcgctgctatgcaggttttacatgtttgcaatctgaaatcaaaaccataaaatagagtttaacgggaatttaagaaaattaaatatatatcccaagtagctgacaatgtagagcccataacctagttaccaaatgttaaaaaaagttatgtgcctctccttcccaaaatgttagtgtgtagctattcttacaaatgaggggaggggagacggtggacctgggggctcggaggccagaccagggcatttccctccacaccagcgggaactgcatggaccctcccagaccctgctctggcagacgaccccgaagttaaaggatgttttccccataacgaatgttcaaagttcgtgcatcactctgctgttccctacacataaccgggaaacaggtttaatccaaaatgtaaccaggagaccccccgtccccgccccgcacacgcctgaggtgtgacggctcggcttctagagtggcctggtgtctgcctcattctaatggccccaacggagacggggacgccacgcacgggcacaggtgacgtcacgggcacagatgaccacgttgcgggtacggagaagaccacaggctgggctcacacgaggggaaacattcacactgtgttctctctacagggtcaggtcgtttttcttcatgttcgggcgggaaaaggaattcctttctccttttctaaggcaagctgctggtgttgtattcaatctgcttatcatgtaagaacttacatctgcacacttgttcactcccccgctgcagactcagtaagaacgacggaatctgctgcaaaaacaaacctgaactcgtccaccctctcagcccagtccccaggtccgtatggagcccccgtcagtgtgaggatgcggcggagccactgaagctaacgtcacagctgaactcatgggaacagccagtggccgccagtcgagctggtcacagccactgagttacctacggtgccttgatgatgattctctctttaatactggaaatgggagtccttaggaaagcagacaaccacgtatggcttcgagaccaaggtccctgggcagcccctccagcccgtggcccaggaggcccctggggcactggcaccagccccgagagtctgaaggcggcaggtggtgggtgctgtggcgcccccagctggagtcacagcttgtcatcggtcatctctagaaactgcgcgtagacatctcggatgcactcccccttggggttgaacaggaatttgtagtagctgccgtctgcacaaattgcaatgacggcgtttggctctgttccaaaggcacaaatgcacggagagcctgagggaacctgaaacttggagaaactccacttggaactgaagtattttggaaggaaactggctgaggccaaactggactgtttattcctttttggatcttcagctgcaaaaatatgcactgtgccgtggtcgctggatacgcagatgagggacgcatcctgattgaagttgatgcagtaaatattggctgcttgagatcctcttcgcagttcctggattaaatgccctgatgaagtatcaaatattcttataagcgtccctttctcggatgcagttgcaattcttgttccctgcaggttgagtgcaatgcagctcaggacaccctcgtgtgcaggaatgtccacgggtggcttctccgtgctggccaggtccacaagctgcacatggcccgtgtgcgtgcccggaaaggccaggagggagttgttactattgggacaaaggacacagaggcctttggggttatagcaggttttcgaagacgtgcaactgatgggggattgtgtgtgaatgtgaacaccttaatcatggagtccaaaaccaccacaattttatcctcgccgcagcttgactgccttgacttctgtagaaaattctatttcaataacagtcttcttcttcaggtcatcccagatcattactttgttgggagggtatttcggcttttttccaccaccaactaaagctaaatagttgcagcgaaataacatttcaacatggccaactcctccttctagaaattcttgtttctctttttcttttagtggatcagtgttatagactcggaatccattttccatcccacacgcaaagcatccgtggtcctggttgaagccggcgtagagcagcccgttgccgtgagggttacacggcaggaggttcatggcgccgccgtgctgggtcgccgctcctcagcgctgcatgcctctcactggggacggcggcctggtcccttcgggccggcgctgaggccgccgacgaaa

SEQ ID NO: 61076 - DNA, 2178 bp, Homo sapiens
tttttttactctaccataaattactttcattttaatgatcctttacaaaatggggccgcatattgattttttttgacattacacaggtgggtaggttatattacctgtgaactcactgtggtgtaatggaaggaatgtcacaaaatatgtcgctaaagagggcactgagtttgatagatttgggaccaaccaacctcgggtgcttgggaagcatcatttccttagaaagtcagaagtcacccatgacatttctacccccagcccctccttccatgagtacactatgtggacttaccacattttttacttgtggttaaaagtcatcagcaaagtttctctcctatgtggattctctgatgtcaaataacatggaagcacccacagaaggctcttccaccccaataacgtgcacagggtttttctcttgcatgattttttggatgtcaaacaaagccagggctctgctttccggctgccctgcctttgctccgcctgcagagctctttctggagttcgggtgttgatgctgaaccaggtgtgagttcctgctcgaggattgttcacgccgccggcttcgcccatggggctgctcctctctggtgtgagttatctggtgccggatgaggtgagagctctgaatgaaacacttcccacactgattacatttgaagggtctgtcgcttcggtgagtcctctcatcttgactcaaaggtgggtcacaggcccagggcttctgtccattcatgctttgtgagagctggcgtctgctcaaagatcagcctctggcggcactcaaagggcttctcccccgcgtgcttccgctggtgctgggccagggatgagctgtgcctgaagccctttccgcagtgggtacacttcgatggcctcttcctcgtgtgagttctcaggtgcaggaaaaaggcaagtggtccgagagaagggattcccacacacacttgcaggtgtatggcttctttcccaagtggtgtccctcttgtgcccgccccaagggaagagtattggttgaaggcccttcccacagtccttgacactcataagggcttttccccgtgtgaatcctccgatggacggtaaggagtgtactatggcacaaagacttcccacattcggcacacttgtagggcttgtctccagtgtggatgcgctcatgctggacgagggaggagttctggctgaaggctttcccacactccttgcacatataaggtctttctcccgtatgaatcctcttgtgcacggtgaggtgtgcgttatggttaaacgacttcccacagtcagtacatttgtagggtttgtcctgcacctggctttttgtgagttccgtaattggaatggcctgactggaatctctgtgacagtcactgttttcaccgggctgttttcctggggagcctgtctgctgactgactaagctggagttatgttctgagtctgtaatctgtgagtcgtaagtatacaaatactcccctctagagatctctgggaatggatttgggcttgaactcaggacgcagttttccctgagtctgagagttttgtaggcttgatcttgaactggtgcttccttgaggccaaattccaactgcttcaagttattctgctccttgagtgccagactctggctctgacactccctgtctttccctaacgtggtgggataaggagcatctgtcgggaatccttcccttcccgtgacatgggatggctcctcttcaggcaggccctcttccttgcgtgatgcttggctttcagatcgaggctcccaggctggatggcagccctgggtggttcctctctcagccacccatagctcggtcccttgctccagctgggagatgacttcaggcttcggaagctcaggacctatggagagcaggtgaccaaaggtctccagcatcacgtcacggtagaggatcctctgggtagggtccagctgcccccattcctcctgggtaaagtccacagccacatcccggaaggtcactggttcctgaagccgggccgccggcggccccacagacatcactcccgctaccccttcgtcctcggggtccatgctggatcgcccagtgaaggacagcgcctgaggtgatccccagaccagagaggcactccagccaaagggaccacccgactcgccgaactccggacacgaaa

SEQ ID NO: 61077 - DNA, 2361 bp, Homo sapiens
  misc_feature (1)...(2361): n = a,t,c or g
tttcgtccttgggttccgctgtaggggaggtcccgtgcgaaagaatgaggagatcctggggccttacctactagcggaatcgactgaagagacgcctgccagtgcgggaggtaggaagctcgatccccaaagaaaagagcgagtgggcaggcagctgcgagacagaaccggagtgtgcagggtccctagaggccggttcctggtctgtgctgctctcctggaagccatggtacaggcagagctcagggcgatccccaggtgagggcagcggctctgcctgggattccaccgcagtacaaccgggtagatgcggggtggagaagaaaggatgttgcctgcactgctcgccaatagcaccctgagaggctacatttgcagaagcagcagcagcagaagacacagcgccggtccaggaggcggctcgagctgttcgtaaagtcgcccgacagctttttctccgtagtatgcgagttgacaaaacagccagagaacagggctccccattacaatcttttcgagatcttttcccttgctaaccggatctgatttgtgcgaaaacatgccttgcacttgtacctggaggaactggagacagtggattcgacctttagtagcggtcatctacctggtgtcaatagtggttgcggttcccctatgcgtgtgggaattacagaaactggaggttggaatacacaccaaggcttggtttattgctggaatctttttgctgttgactattcctatatcactgtgggtgatattgcaacacttagtgcattatacacaacctgaactacaaaaaccaataataaggattctttggatggtacctatttacagtttagatagttggatagctttgaaatatcccggaattgcaatatatgtggatacctgcagagaatgctatgaagcttatgtaatttacaactttatgggattccttaccaattatctaactaaccggtatccaaatctggtattaatccttgaagccaaagatcaacagaaacatttccctcctttatgttgctgtccaccatgggctatgggagaagtattgctgtttaggtgcaaactaggtgtattacagtacacagttgtcagacctttcaccaccatcgttgctttaatctgtgagctgcttggtatatatgacgaagggaactttagcttttcaaatgcttggacttatttggttataataaacaacatgtcacagttgtttgccatgtattgtctcctgctcttttataaagtactaaaagaagaactgagcccaatccaacctgttggcaaatttctttgtgtaaagctggtggtttttgtttctttttggcaagcagtagttattgctttgttggtaaaagttggcgttatttctgaaaagcatacgtgggaatggcaaactgtagaagctgtggccaccggactccaggattttattatctgtattgagatgttcctcgctgccattgctccatcattacacattctcatataaaccatatgtccaagaagcagaagagggctcatgctttgattcctttcttgccatgtgggatgtctcagatattagagatgatatttctgaacaagtaaggcatgttggacggacagtcaggggacatcccaggaaaaaattgtttcccgaggatcaagatcaaaatgaacatacaagtttattatcatcatcatcacaagatgcaatttccattgcttcttctatgccaccttcacccatgggtcactaccaagggtttggacacactgtgactccccagactacacctaccacagctaagatatctgatgaaatccttagtgatactataggagagaaaaaagaaccttcagataaatccgtggattcctgaacagtatggaaaagcaaactgtgcaactactacattatatcattacctggtatcccatggattttgtgcttgggacagaccataaatgatggaaaatgtcaacacaaaaatagctgaaagccaggtacaactactgcatttatatatgtaagttttgtatatcaaaaataattggtctaaatttcctagacttagacttgatttcttaacattagggtatcgcatactcaaatggtagacaatgaccccaactaaatcttcctgatgttacactgctttatcaagaggatggactttttttttttgagacagacaaacttttggctctgtcacccgggctgggagtgcagtgggcgcaatctcggggtcactgcaagctctgcctcccaagttcatgccattctcctgcctcagccttcccaagtaggctgggggactacagggcaccctggccacccatggcccaggntaatttttttttttt

SEQ ID NO: 61078 - DNA, 1002 bp, Homo sapiens
ccgttcgacgatttcgtcgaaggactatggcaggggagaacttcgctacgccgttccacgggcacgtgggccgcggcgccttcagcgacgtgtacgagcccgcggaggacacgtttctgcttttggacgcgctcgaggcagcggctgccgaactggcaggagtggaaatatgcctggaagtagggtcagggtctggtgtagtatctgcattcctagcctctatgataggccctcaggctttgtacatgtgcactgatatcaaccctgaggcagcagcttgtaccctagagacagcacgctgtaacaaagttcacattcaaccagttattacagatttggtcaaaggcttgctaccaagattgaccgaaaaagttgatcttctggtgtttaatcccccctatgtagtgactccacctcaagaggtaggaagtcacggaatagaggcagcttgggctggtggcagaaatggtcgggaagtcatggacaggtttttttcccctggttccagatctcctttcaccaagaggattattctatttagttaccattaaagaaaacaacccagaagaaattttgaaaataatgaagacaaaaggtctgcaaggaaccactgcactttccagacaagcaggccaagaaactctttcagtcctcaagttcaccaagtcttagcatacagtgtgtgcccagaactactggaaactgaatgcatttagcatattttgaaactgaagtcattcattaggtaacaaggaattttatcagaaatttgtcattaaaaaaaggtagaaaggtggaacattccctttcagtcaggcctatagaattatttgcacaagtacaagtaaatatgtgtattatatttatagtttgcattttaaatataaaaattatgtatgaaatatttatttcagcattatgtggtaaggcaatggaattgatctggcaaatgtcttttttttcataccagtccataaaggcagtttgctttcaaaaaaaaaa

SEQ ID NO: 61079 - DNA, 2628 bp, Homo sapiens
ttttttttttttcagtgggagaaagaatgtttaataaatggtattgagacaaatagctatctgtttggaataaaaataaaattagatccttaaatcttgtaccatataaaaaaatacatattactgatggatccaagagttaaaaaataaaaatgtaaatatccaaaattttacatacaattttagggggtacacagattctttgaagcccacccatggatcccagattattatctataagaggaactgttaattataacctctattaaaatctcaatgccaaatactagctgtatttaagtcacatgcaacaaatgaaaatgaacacattaactcattgttataactttataaaatctccaaactggactagaaacagaggcatgtcaatacaaatggccacgtgacttaaaaaaaaatacaccaatttaaataagtttgaatgcatactgtacacgtgtatccatgtctgttagcctttcagaaatataaaatcagttaaatctgtagtacttaaaattcaacatatgtaacgttattctcaaacttcattaaaataataaatatacaagttatgtttaatatgagtaactgcaacatacttaaacatctaaacatataatagggaattctatattaaaatgcaatactttcacctgcattaatctcttacacaatgaaaaaatacttgcagataattagcattaagaatgcaaatatatttttactgtggaagaaaaattccagtaataaggttagaaatcatatatctgtataatctacaatgaagctgtagatagtctacattatgatattctatcttaaaatgaaaacaattcaatatttaagcttacaacaaatttactcaaggcaaaatatgtttattacagaacaggatcttaaagtaagcaaggcaacatgagatcaaccattttagatttttttttaatgaagtgtagctttgaaattgtaataaaggtgaacataaattctaacatgctcttctcttcttataaatgggatgatgtagaaaagcaaagcttcaatgtatagggattggaaccattcggcactcttatctgatagtgattcagtgccgtaagggcttctactgcatcagttttgcactcccattctaatagcccagaaagtgttttggctgaaggttttgcatcaaacactttatatttgatgaatgtaagaacttcatggtcattacacaactttgtgaaggtctcttctgtgacacacaatggaacattataataatgcaaaacacaggagggtggctggattatattcttagatgcttggccagcacttgtaaagcgattatttttgctcattgcaaaatctttgtagctgctggtaccatcctccagctcaaatatttgacttggaacaactgaatgttgtttagacacgcaaacattaagtcttttcccaaataatttgacattattaaggtgtgtgacagctctttctacagcatactcatcacccatttctaccagtgctgtaccaggaatggtcttcataaattttaccttctcaatatttccatataagcagaacaggttgaagactcttgaacaattcatttttagttgatgtaatccactaaccattacaactgaaccagagggatttcctccatgcatgtaagaggaagaagcctgtggtaatggataagcaacaagttcaggtgtatctcgagagcccattctgtaacgacttggtaaaggcaataatggaccatgggatccatagccatcatgtctaaacgaagaagggtgttctcccaaaatggcttgtctctggcgaccctttcctctatctcgtcttcccaaatatggtttagtgtagtcccaactgtcattgtcattcctaataacatttagacgagttggccgtgcatattcaatttttagtgtgcaacatccagcatatatatcagctccattgagtgctgctttagctttctgggcacaaaggactgattcaaactcaaccattgcttgtatcccatttctcttgaatataacaatacgttgcactttgccaacagggttgcatacagtatataaaacatccactgtaattggataaagcggattctgaattgagagcagaagaactttgttgcctcctgatggatcatcagtatttcctggccgagtgatccttttgcttgtagaatagttgaaaaaagcctgttgaccagcaatgtacacgggttcatctgcagcaaatgtcacacattctttggcactatctatgttttcaaattccactagagcctgtcgtttaaatggcatcatcatcacatagcatattgtcccaaatttttccagcgcttccacgaggtctgcttccaccacagattcacagagtcctcgaacatggacgacgggtgaaacagaaactttatgatgacttccacctgcctccggctgagagaagctccggccgccgccgccgccatcgcccccgccccggggcgtcgcttcccggcggttctcgccttcctcggccgagtagtcgatctccccctcctcggtcttgagacgcttggcctggctctcgtactcccggtcctcctcgtacgtctcccgagccaacattcag

SEQ ID NO: 61080 - DNA, 1631 bp, Homo sapiens
ccggccgtcccgggtcgacgatttcgtgcggaagcatccatggcggagggcggcagcccatacgggcgggcagggccgggctccgcaggtcaggtcgtaatctgaaggagtggctgagggagcaattttgtgatcatccgctggagcactgtgaggacacgaggctccatgatgcagcttacgtcggggacctccagaccctcaggagcctattgcaagaggagagctaccggagccgcatcaacgagaagtctgtctggtgctgtggctggctcccctgcacaccgttgcgaatcgcggccactgcaggccatgggagctgtgtggacttcctcatccggaagggggccgaggtggatctggtggacgtaaaaggacagacggccctgtatgtggctgtggtgaacgggcacctagagagtacccagatccttctcgaagctggcgcggaccccaacggaagccggcaccatcgcagcacccctgtctaccacgcctctcgcgtgggccgggcagacatcctgaaggccctcatcaggtacggggctgatgttgacgtcaaccaccacctgactcctgatgtccagcctcgattctcccggcggctcacctccttggtggtctgccccttgtacatcagcgcagcctaccacaacctccagtgcttccggctgctcctcctggctggcgcgaaccctgacttcaactgcaatggtcctgtcaacacacagggattctacaggggctcccctgggtgcgtcatggatgctgttctgcgccacggctgtgaggcagccttcgtgagcctgctggtagaatttggagccaacctgaatctagtgaagtgggaatcgctgggcccagagtcgagaggaagaagaaaagtggaccctgaggccttgcaggtcttttaaagaggccagaagtgttcccagaaccttgctgtgtctgtgccgtgtggctgtgagaagagctcttggcaaacaccggcttcatctgattccttcgctgcctctgccagaccccataaagaagtttctactccatgagtagactccaagtgctgcggttgattccagtgagggagaaagtgatctgcagggaggtggacaccgagccctgagtgctgtgctgctgctggtctcctgatggctgttgctgcagaagatgtcctcgtagactgtcattgctcctcacacacatgaagacgtgcccgcttcccctttgctttctgccatgattgtaagtttcctgaggcgtccccagccctgcagaactcagcccgggggcacaggcacgcagaagagactttcccacagcggttcccagagccctggatgaggcgtcctccaaaggattatgtcaccaagtttctgcaggtgggcacggcctgacgactggattgtccaacaaaacacagaaagtgtagacaagagaacagcagaaagtgacgcctgcagccacagagatgtgctcccagtctccctcttttctgactgctgggggtgcacaccacagcgaggcccaagggctgtgatggaggcctaggatggaaggtggctggtccctgaattacttctaggagaggcaccatctgctgagcaggaacccctgcctgggacagttgcaag

SEQ ID NO: 61081 - DNA, 2012 bp, Homo sapiens
  misc_feature (1)...(2012): n = a,t,c or g
accggccggattcccggtcgacgatttctgaaggcgggagggagggggcggcacctccggtcggctccagtcgctccggaggaaggaagaagaggacgccgggcgcgcagctcggtgctgattatcacaactgtttggtgacctacttcactgacctgtgaggattccttcccttcaagtactggattcttgatctttctgcatcatcaagaatggaaacagactgtaatcccatggagctaagcagtatgtcaggatttgaagaaggttcagagctgaacggttttgaaggaactgacatgaaagacatgaggctcgaagctgaagcagttgtaaatgatgttctctttgctgttaacaacatgtttgtctcgaaaagcctgcggtgtgcggatgatgtggcctatatcaatgtggaaacaaaggaaagaaacagatattgcctagaactcactgaagcagggctcaaggtggtaggctatgcttttgaccaggtagatgatcatttacagactccctaccatgaaacagtctactccttgttggatacactcaggccccgcctaccgagaagcatttggcaaacgcactgcttcaaagactggaagctttgaaaagagatggacagtcatgactacactttttcctttcagaggggctggtgctggtacagaatgttgatataaagcttaaaattcttgcatatggtcatagaaaatgcatctttggttttgtgtttttatcacttgcttccaacttaggcttttggctcagaagattattgaataatgatttgtcttagtttctgtttcagtaagggaattctgaggccgttgctatgataccatcattaagacattcacatgtcttcatataatatctcttcatttcaaatcctaatcactatttcatactattacagggctttgatgctgccagcactgtcttttacataggaaattctagatttgcacagtaatagaggaattagaagtacctaactatacactttgattcagcctgctaaatcaggggttcaatactagcttggacaaactttgtagtaattaattgctaccagccttattggaaacaaattatcaactagtttcccctgcacaaattttgaaattcactgcttcacttaatctatttatattactaataatggattaataaagatgaattaattatatattacttaactagtattaaatgaaaaacagggactgaaatagttctgtattccgtgtttgcaacagccagccaactaagcagaggataaaccgttagcaaatgaatgtaataattactcatttccaagatatctaagcacataagcaaatacaggaacagacttcattctttttcttaacaaaaaagcatcttcagtgtgtgatttaaaagaaagaagattctggtttcctagaaaacaatattttggcctgtgttgattcttattctgaatgtgtgtttacataatgtacagtatatattcagaaagtatttttgcttcaacgtttactttctatgatgtagtgctttggtattcctacagcaccccaccttccccaacagatgtacagtgttctgtctccattcgaaatctacaatgtaatatgagtgcattgtatgggtttgaaaccaaaggatgaatgaagcattcagagacttaatatttgaaaaaggaatacgtcacgtattttatattttattacaggtactgatatttataaatttaataaactgtaccatgctgctgcatgttttcaagtacatgttgaacagtaaggattggggagttgttttttaatggtcacctaaagcagctgctatagaaatgttgaactaaaattttgcatctggtcataccctcatggcatttaatcatttncagataattttccatcattaataaaaaacaggaacttttaggcnccgaagatcaggngaccagngccaaataaaggtcngttgtgtcncaatccatgccaggactccgtggaangctt

SEQ ID NO: 61082 - DNA, 1847 bp, Homo sapiens
tgactctgggctagagacctccccaacagagctgaggccaaggccgactccccctctcaaatggcgtggtctgggcctatgacggcccctgcagtggagtctgtactggctgcgggggaccctgctcatttgaaaatctgacatcagctgggcagtcgcccccctcctcctttcctccctctactctgacacagcacttagcacctgaatcttcgtttctctcccagggaccctccattttccatatccaggaaaatgtgatgcgccacaggtatcagcgtctggatcgccacttcacgttttagccacaagtgactcagtggaagatccagagtcaacagaggctcgtcaggaagatgtctacagaaaaggtagaccaaaaggaggaagctggggaaaaagaggtgtgcggagaccagatcaaaggaccggacaaagaggaggaaccaccagctgctgcatcccatggccaggggtggcgtccaggtggcagagcagctaggaacgcaaggcctgaacctggggccagacaccctgctctcccggccatggtcaacgaccctccagtacctgccttactgtgggcccaggaggtgggccaagtcttggcaggccgtgcccgcaggctgctgctgcagtttggggtgctcttctgcaccatcctccttttgctctgggtgtctgtcttcctctatggctccttctactattcctatatgccgacagtcagccacctcagccctgtgcatttctactacaggaccgactgtgattcctccaccacctcactctgctccttccctgttgccaatgtctcgctgactaagggtggacgtgatcgggtgctgatgtatggacagccgtatcgtgttaccttagagcttgagctgccagagtcccctgtgaatcaagatttgggcatgttcttggtcaccatttcctgctacaccagaggtggccgaatcatctccacttcttcgcgttcggtgatgctgcattaccgctcagacctgctccagatgctggacacactggtcttctctagcctcctgctatttggctttgcagagcagaagcagctgctggaggtggaactctacgcagactatagagagaactcgtacgtgccgaccactggagcgatcattgagatccacagcaagcgcatccagctgtatggagcctacctccgcatccacgcgcacttcactgggctcagatacctgctatacaacttcccgatgacctgcgccttcataggtgttgccagcaacttcaccttcctcagcgtcatcgtgctcttcagctacatgcagtgggtgtgggggggcatctggccccgacaccgcttctctttgcaggttaacatccgaaaaagagacaattcccggaaggaagtccaacgaaggatctctgctcatcagccagggcctgaaggccaggaggagtcaactccgcaatcagatgttacagaggatggtgagagccctgaagatccctcagggacagagggtcagctgtccgaggaggagaaaccagatcagcagcccctgagcggagaagaggagctagagcctgaggccagtgatggttcaggctcctgggaagatgcagctttgctgacggaggccaacctgcctgctcctgctcctgcttctgcttctgcccctgtcctagagactctgggcagctctgaacctgctgggggtgctctccgacagcgccccacctgctctagttcctgaagaaaaggggcagactcctcacattccagcactttcccacctgactcctctcccctcgtttttccttcaataaactattttgtgtcagcttcaaaaaaaaaa

SEQ ID NO: 61083 - DNA, 6309 bp, Homo sapiens
  misc_feature (1)...(6309): n = a,t,c or g
gtacacggctcggaattcccgggtcgacgatttcgtctcggccgcggctctgtgcccttgctgctgagggccacttcctgggtcattcctggaccgggagccgggctggggctcacacgggggctcccgcgtggccgtctcggcgcctgcgtgacctccccgccggcgggatgtggcgactacgtcgggccgctgtggcctgtgaggtctgccagtctttagtgaaacacagctctggaataaaaggaagtttaccactacaaaaactacatctggtttcacgaagcatttatcattcacatcatcctaccttaaagcttcaacgaccccaattaaggacatcctttcagcagttctcttctctgacaaaccttcctttacgtaaactgaaattctctccaattaaatatggctaccagcctcgcaggaatttttggccagcaagattagctacgagactcttaaaacttcgctatctcatactaggatcggctgttgggggtggctacacagccaaaaagacttttgatcagtggaaagatatgataccggaccttagtgaatataaatggattgtgcctgacattgtgtgggaaattgatgagtatatcgattttgagaaaattagaaaagcccttcctagttcagaagaccttgtaaagttagcaccagactttgacaagattgttgaaagccttagcttattgaaggacttttttacctcaggttctccggaagaaacggcgtttagagcaacagatcgtggatctgaaagtgacaagcattttagaaaggtgtcagacaaagagaaaattgaccaacttcaggaagaacttctgcacactcagttgaagtatcagagaatcttggaacgattagaaaaggagaacaaagaattgagaaaattagtattgcagaaagatgacaaaggcattccattcatagaaagcttaaggaaatctttgattgacatgtattctgaagttcttgatgttctctctgattatgatgccagttataatacgcaagatcatctgccacgggttgttgtggttggagatcagagtgctggaaagactagtgtgttggaaatgattgcccaagctcgaatattcccaagaggatctggggagatgatgacacgttctccagttaaggtgactctgagtgaaggtcctcaccatgtggccctatttaaagatagttctcgggagtttgatcttaccaaagaagaagatcttgcagcattaagacatgaaatagaacttcgaatgaggaaaaatgtgaaagaaggctgtaccgttagccctgagaccatatccttaaatgtaaaaggccctggactacagaggatggtgcttgttgacttaccaggtgtgattaatactgtgacatcaggcatggctcctgacacaaaggaaactattttcagtatcagcaaagcttacatgcaggatcctaatgccatcatactgtgtattcaagatggatctgtggatgctgaacgcagtattgttacagacttggtcagtcaaatggaccctcatggaaggagaaccatattcgttttgaccaaagtagacctggcagagaaaaatgtagccagtccaagcaggattcagcagataattgaaggaaagctcttcccaatgaaagctttaggttattttgctgttgtaacaggaaaagggaacagctctgaaagcattgaagctataagagaatatgaagaagagttttttcagaattcaaagctcctaaagacaagcatgctaaaggcacaccaagtgactacaagaaatttaagccttgcagtatcagactgcttttggaaaatggtacgagagtctgttgaacaacaggctgatagtttcaaagcaacacgttttaaccttgaaactgaatggaagaataactatcctcgcctgcgggaacttgaccggaatgaactatttgaaaaagctaaaaatgaaatccttgatgaagttatcagtctgagccaggttacaccaaaacattgggaggaaatccttcaacaatctttgtgggaaagagtatcaactcatgtgattgaaaacatctaccttccagctgcgcagaccatgaattcaggaacttttaacaccacagtggatatcaagcttaaacagtggactgataaacaacttcctaataaagcagtagaggttgcttgggagaccctacaagaagaattttcccgctttatgacagaaccgaaagggaaagagcatgatgacatatttgataaacttaaagaggccgttaaggaagaaagtattaaacgacacaagtggaatgactttgcggaggacagcttgagggttattcaacacaatgctttggaagaccgatccatatctgataaacagcaatgggatgcagctatttattttatggaagaggctctgcaggctcgtctcaaggatactgaaaatgcaattgaaaacatggtgggtccagacctggaaaaagaggtggttatactggaagaatcggacccaagaacagtgtgttcacaatgaaaccaagaatgaattggagaagatgttgaaatgtaatgaggagcacccagcttatcttgcaagtgatgaaataaccacagtccggaagaaccttgaatcccgaggagtagaagtagatccaagcttgattaaggatacttggcatcaagtttatagaagacattttttaaaaacagctctaaaccattgtaacctttgtcgaagaggtttttattactaccaaaggcattttgtagattctgagttggaatgcaatgatgtggtcttgttttggcgtatacagcgcatgcttgctatcaccgcaaatactttaaggcaacaacttacaaatactgaagttaggcgattagagaaaaatgttaaagaggtattggaagattttgctgaagatggtgagaagaagattaaattgcttactggtaaacgcgttcaactggcggaagacctcaagaaagttagagaaattcaagaaaaacttgatgctttcattgaagctcttcatcaggagaaataaattaaaatcgtactcataatcagctctgcatacatctgaagaacaaaaacatcaacgtcttttgtccagcctctttttcttctgctgttccacctttctaaacatacaataaagtcatgggataaaaataatcgatgtatgttacgggcgctttaaccatcagctgcctctcgaatggaagaacagtggtaatggattaacatcctattttgttgtactaaagtgacaaatcggaataatataattggtatggccattaggttcagtccttgaagataagaaacttgttctctgtttgttgtcttatttgtggtggcactcgtttaatggattaactgaggttgctcaatgttcagtttcttttccagaaatacaatgctaggtgttttgaaataaaacttatatagcaattgtttaaagttatcaattgtatataaaatcacagtagcctgctaaatcattgtatgtgtctgtagtattctattcccagaaactatttgaccatgataattcagtttatattcaccacatgaaagaaaaatgggtaacagaagaacccctaaaacaggttaatttggattgtaacgttcagtgaaagaaatttcaacccttcatagccagcgaagaaatttgccttggaagccaagtcagtaccagcttacctatttgattcagttgctgttttctcactctctatatccatttgaaattgatttattttagatgttgtatacttacgttaggctttctgttaatagtggtttttctcctgttgacagagccaccggattatgacacaggatgaggaagattaaggataatcaattgactaatttcatttagaatattatcaaacatttcaactaggtatcagaaaaaggctttctttcataagactattttaaatagaaattatttcaacaattaaagtaatgttgaccatccccctggcagctgaataaagaaaaatttagttcaatttattgcaatttaattacaatactaccttcacaacattttcatgtgttttaaataaatattttttaattggctaaaggacattcaagcaaagaaatgctttctttacttaaaatgtctatctcatttgctgccttttcactaagcctttactttgttaataaaagtgtccattgtgtgatgtttttgattttacagtttgctaaatcttattttcttggagttgctttttggtaacagccccattgctactccccattttattgttttacatcaatgcatgcttcgttgtgatccctcaagatgtaacacttggtatgctcggttgaggatatgaaaaaatacttccgaaaccaggaattcaatgtatgtttgttttatactgtttgataagaaaagtaggtccagccttaagcagcacagatgcgctggtagatgcatagtcaggaactttttttatttcttttaggtctagggacaggagtgaatagaaagggaggagagctctattatgttctatacacagattaggagatgaccttactgggtacacccctctaaccagtgcttacaggttaatgcatgttaatgaatatttttgcagttgtaaagcataacaattacaactacacatctatttctaaagaataaaacaggaccatatttatttacttctgtcaactatagaaagaaagaccttcagctgtatttccacagatttctcccaaggaaaaggctaatattagtcactactgttatcacatccctttgtataagttttaaaaagagatggagggagatcttcatttctttgaggagatcagtattgtaacgtatgtgaatagatgataacaattaatattactaaaagtcccacatgagagtcctgacgccctctccaatgccccacagtaatgtgggcttctttcatgggtttttttttcttctttttagctgatctcatcctaagcatgctttatttttccttgaaagctaggtatttatcaactgcagatgttattgaaagaaaataaaattcagtctcaagagtaaaccctgtgtcttgtgtctgtagttcaaaagtcagaaatgattctaatttaaacaaaaagatattaaatatacagaagttaaattcgaactagccacagaatcatttgtttttatgtcagaatttgcaaagagtggagtggacaaagctctgtatggaagactgaacaactgtaaatagatgatatccaaacttaatttggctaggacttcaattttaaaaatcagtgtacctaggcagtgcacagcacgaaataagtggcccttgcagcttccccgtttaacccactgtgctatagttgcgggtggaacagtcaacctttctagtagtttatgatattgccctctttgtattcccattttctacagttttttccgcagacttctttctgcaaattattcagcctccaaatgcaaatgaatgatataaaaataagtagggaaccatggcaaagagtggtgcttcccaccctcccaatgtgggaatttgacgataggatgagagtcagagtataggtttaaaagataaaatctttagttaataattttgtatttatttattctagatgtatgtatctgaggaaagaaatctggtatttttgctttccaataaaagaggggggggngggngggaatttccaaaagtaatggtttttctctcagttctctaagctggtcctatgttatagccctagcagtatggaaatgtgcctttaaaatatgccttaccttttgaatgatcatggctatatgttgttgagatatttgaaacttaccttggttttcacttgtgcactgtgaatgaactttgtattatttttttaaaaccttcacattacgtgtagatattattgcaacttatattttgcctgtgcttgatcaaaggtcatttgtgtagatgagtaattaaaaaatatttaaatcacattataattctattattggagagcatcttttaaatttttttctgttttaacgagggaaagagaaacctgtatacctagggtcattatttgaccccatagtataaccagattcatggtctaacaagctctcagtgtggcttttctctgaatgcttgaatttcacatgccttgcatttcacagttgtactccatggtcaaccggtgctttttttcacatcgtggtacttgtcaaaacattttgttattttccttggtaaaatatataaaaaaggttttcttaattttcaaaaaaaaaaaa

SEQ ID NO: 61084 - DNA, 1761 bp, Homo sapiens
ttagtcctctccttgtcgccgtcgcctccgacatattgcccgcaggagctgcggcggcgaagcggagagcaccggggggaggagatgggaggacgaagaggtcccaacaggacatcttactgtcgaaatccgctctgtgagccgggatcctcggggggctctagtggaagccacacttccagtgcatcggtgaccagtgttcgttcccgcaccaggagcagttctggaacaggcctctccagccctcctctggccacccaaactgttgtgcctctacagcactgcaagatccccgagctgccagtccaggccagcattctgtttgagttgcagctcttcttctgccagctcatagcactcttcgtccactacatcaacatctacaagacagtgtggtggtatccaccttcccacccaccctcccacacctccctgaacttccatctgatcgacttcaacttgctgatggtgaccaccatcgttctgggccgccgcttcattgggtccatcgtgaaggaggcctctcagagggggaaggtctccctctttcgctccatcctgctgttcctcactcgcttcaccgttctcacggcaacaggctggagtctgtgccgatccctcatccacctcttcaggacctactccttcctgaacctcctgttcctctgctatccgtttgggatgtacattccgttcctgcagctgaattgcgacctccgcaagacaagcctcttcaaccacatggcctccatggggccccgggaggcggtcagtggcctggcaaagagccgggactacctcctgacactgcgggagacgtggaagcagcacacaagacagctgtatggcccggacgccatgcccacccatgcctgctgcctgtcacccagcctcatccgcagtgaggtggagttcctcaagatggacttcaactggcgcatgaaggaagtgctcgtcagctccatgctgagcgcctactatgtggcctttgtgcctgtctggttcgtgaagaacacacattactatgacaagcgctggtcctgtgaactcttcctgctggtgtccatcagcacctccgtgatcctcatgcagcacctgctgcctgccagctactgtgacctgctgcacaaggccgccgcccatctgggctgttggcagaaggtggacccagcgctgtgctccaacgtgctgcagcacccgtggactgaagaatgcatgtggccgcagggcgtgctggtgaagcacagcaagaacgtctacaaagccgtaggccactacaacgtggctatcccctctgacgtctcccacttccgcttccatttctttttcagcaaacccctgcggatcctcaacatcctcctgctgctggagggcgctgtcattgtctatcagctgtactccctaatgtcctctgaaaagtggcaccagaccatctcgctggccctcatcctcttcagcaactactatgccttcttcaagctgctccgggaccgcttggtattgggcaaggcctactcatactctgctagcccccagagagacctggaccaccgtttctcctgagccctggggtcacctcagggacagcgtccaggcttcagccaagggctccctggcaaggggctgttgggtagaagtggtggtgggggggacaaaagacaaaaaaatccaccagagctttgtatttttgttacgtactgtttctttgataattgatgtgataaggaaaaaagtcctatttttatactcccaaaaaaaaaa

SEQ ID NO: 61085 - DNA, 950 bp, Homo sapiens
tcctagtgagtatcgagttggtcttattatcgcgtgaactgggagcctttgtttcctgcgtgtcgcaggaagtgacgtttcgggtacagccgctaccagagtccctttctcgcgaggcggaagaaccccgatcgctgaggagcaagggggcgctaggaatgggaactgggttgcgacggtccggcgagagagagctggggtgctggggtgcggggaagttggggagcagaggccgcttggtgtccgagtagggtaagaccgcaccgacccagtccgttaggaaagaagggaaacgaggcaattgtcgggcggatccccggacggagggctaaggttgtgtggaaggcgctgctccccggatggcgaccgcagatactccggccccggcctccagtggcctctcgccgaaggaagaaggggagcttgaagatggggaaatcagtgacgacgataataacagccagatacggagtcggagcagcagcagcagcagcggcggcgggctgttaccctatccgcggcgaaggcctcctcactcggcccggggcggtggatctggcggaggcggtggctcttcctcgtcatcgtcctcttctcagcagcagctgaggaatttctcacgctcgcggcacgcgtctgagcggggccacctcaggggacccagcagctaccgacccaaagaaccgttccggtctcatccgccttctgtacggatgccttcgagctcactgtccgaaagcagtccccggccgtctttctgggagcggagccacctcgccttggaccgtttccgctttcgaggcaggccttaccggggtgggagtcgctggagtcgggggcgaggagtgggtgagcgaggaggcaagccggggtgcagacctcctctgggaggaggagcaggatccgggttcagcagcagtcagagctggcgagagccctctccacctcgg

SEQ ID NO: 61086 - DNA, 1618 bp, Homo sapiens
tttcgtctcgctgctggagatgaaaaaccaataatcccagaaaacagcgcatagggtaggctgggccagccgaggattatgtgaaggttcgttgggaccctccggaggccagtggggtactgcaaagagccatgggggtgttgatgtccaagcggcagacagtggagcaggtgcagaaggtgagtctggctgtgtctgctttcaaggatgggctgcgggacaggccttccatccgacgcacaggtgagctgccagggtcccgccgtggcactgtagagggctccgtccaggaggtacaggaggagaaggaagcagaagcaggaacctcggtggtccaggaagagagtagtgccggccgcgcagcctgggagcggctccgagatgggcgcggcgtggagcctgaggagtttgacaggacaagtcgattcacaccccctgcgttcatccgccccacccggaagcttggatgatgacaaacctccagaaatcttgcctgggagcccagagagcctgtttttcaacgattgagatgtgtgatgtttgtgaggtctggacagctgagagcctcttcccgtgcagggtctgcaccagggttttccatgatggctgcctgcgccgcatgggctacatccaaggagacagtgcagcggaggtgacggagatggcccacacagaaacaggctggagctgccactactgtgacaacatcaacttgctgcttactgaggaggaaatgtatagcctcacggagacctttcagcggtgtaaagtcatccctgattgctccctgacactggaggactttctgcgttaccgccaccaagcagccaagcggggggaccgtgacagggccctgagtgaggagcaagaagagcaggcggcccgccagtttgctgccctggaccctgaacatcgaggccacatagagtggcctgacttcttgtcccatgagtccctcctgcttctgcagcagttgcgtccccagaactctctgttgaggcttctgacagtgaaggagcgggagcgagcccgacccgccttcctggctcggggcagtgggagcaccgtcagtgaggcagagtgccgccgggcccagcactcttggttttgcaaacggttcccagaggctccttcctgcagtgtcagcatcagccatgtgggtcccatcgcagatagcagcccagccagcagcagcagcaagagtcaggacaagaccctgctgcccacagagcaggagtccagatttgtggactggcctaccttcctgcaagagaatgtcctctacatcctggctgctcgccccaacagcgcagccattcacctgaagcccccaggatagcatggagcagagaagctcggtttgaggacagtgacatcctctccctcctttcctttctcccttcccccaccaacctctggcacagagactcatggggttgggacactgccagcgtcttaacttgtcactaagctttaaggcactgaaatcaccattcccctcacaatagaggcagtgaatgcattgccacaaggagaagccctgggagctgtggcagcatcctctcctggaccgcccctgccccacatcatagacgggacctgccaccacacatgtatt

SEQ ID NO: 61087 - DNA, 3277 bp, Homo sapiens
tttcgtcgcggactcgggagatggaggaaaaggagatattacggcggcagatccgcctactgcagggtctgattgatgactacaaaaccctccacggcaatgccccggcccctggtaccccagcagcttctgggtggcagccacccacttaccacagtggcagagcctttagtgcccgctaccctcgtccaagccggaggggctactcttcccaccatgggccttcgtggcgcaagaaatactccctcgtgaatcggcccccgggaccctcagaccctcctgccgaccatgctgtgcggccgttgcacggggcccgggggggccagcctcctgtcccgcagcagcatgtccttgagagacaggtccagctcagtcagggtcagaacgtggtcatcaaagttaaaccgccatcaaagtctggctctgccagtgcctcaggggcccagcggggctctttggaagaatttgaggacaccccctggagtgaccaaaggccccgggaaggtgaaggtgagccccctcggggacagctgcagccctcgaggccaacaagagccagggggacctgcagtgtggaagatcctcttctggtctgccagaaggagcctggtaagcccaggatggtgaagtcagtgggcagtgtgggcgacagcccccgggagccccgccggacagtcagtgagagtgtgattgccgtcaaggcgagcttcccatcctccgctctgcccccacgcactggcgtggccctgggccggaagctgggttctcattccgtggccagctgtgctccacagctccttggggacaggagagtagatgctggccacacagatcagccagttccgtctggctcagtggggggccccgccagaccggcctcaggacccaggcaggcccgggaggcctcgctggttgtgacctgtcgaactaacaagttccggaaaaacaactacaaatgggtggctgcctcctcgaagagtccccgggttgctcggagggccctcagtcccagagtggctgcagagaatgtgtgcaaggcctctgctggcatggcaaacaaggtggagaagccgcagctcatagctgacccagagcccaagcccaggaagccagccacgtcctccaagccagggtctgcccccagcaagtacaagtggaaggcctccagcccctctgcctcctcctcttcctccttccgttggcagtcggaggccggcagcaaggaccatgcctcccagctctccccagtcctgtctaggtccccgtcgggggaccagaccagcattagcacacagtggcttgaagcccctctctggggagaccccactctcggcttacaaagtgaagacccgcaccaagatcatccggagacgcggcagcacaagccttcctggagacaagaaaagcggcacctcacctgccgccaccgccaagagccacctcagcctccggcggagacaggccctcagggggaagagcagccctgtcctgaagaagacccccaacaagggcctggtacaggtcaccaagcaccgactatgtcgcctgccaccgagccgggcccacctccccaccaaggaagcgtccagcctgcatgccgtgcggactgcacccaccagcaaggtgatcaagacccgctaccgcattgtcaagaagacgccggcctcgcctctcagcgccccgcccttccccctgtctctgccctcctggcgggcccggcggctctcactatccaggtccctggtgctgaaccgcctgcgtccagttgccagcgggggtgggaaagcccaaccgggctccccttggtggcggagcaaaggctaccgctgcatcggaggggtcctctacaaagtatctgccaacaagctctccaagacctccggccagcccagtgatgcgggcagcaggcccctcctgcgcacaggccggctggatcctgcaggcagctgtagccgttccctggccagccgggcagtgcagcgcagcctggccatcatccggcaggcgcggcagcgcagggagaagaggaaggagtactgcatgtactacaaccgcttcggcaggtgcaaccgtggcgagcgctgcccctacatccacgatcccgagaaggtggccgtgtgcaccaggtttgtccggggcacctgcaagaaaacggatgggacctgccccttctcccaccatgtgtccaaggagaagatgccggtgtgctcctacttcctgaagggcatctgcagcaacagcaactgtccctatagccacgtgtacgtgtcccgcaaggccgaggtctgcagcgacttcctcaaaggctactgccccctgggtgcaaagtgcaagaagaaacacacgctgctgtgccccgactttgcccgcaggggggcgtgtccccgcggcgcccagtgccagctgctccaccgtacccagaaacgccacagtcggcgggcagccacgtcccccgccccagggcccagcgacgcaaccgccaggagcagggtctcggccagccacgggcccaggaagccttcagcatcccagcgccccaccaggcagacgcccagctcggctgccctcactgcggctgccgtggctgcacctccccactgcccaggggggtcagcctctccctcatcctcgaaggcttcctcctcctcctcctcctcctcatcccctcccgcttccttggaccacgagggcaccatctctccaggaggctgccttagcagcagcgtgctccaacaggctctgcaagctgccttccttcatctccctgcagtcctcgccgagcccaggagcccagcccagggtccgggcccctagggcccccctcaccaaggactcagggaagcctctgcacatcaaaccacgtctgtgaggaccccagggaccggcctgcacctacctcagaccctcatccttggagaggaaagaggctctgtccaccactctaccccacaggagggccgcccgccaccaagcctcacctgggggccacagggacactgctctgcctgcctggccctcaaccttccatgaccagcgtgtgcgcagggcctggtcttcctcccccaagccaggcccctgtccccaccccaccaccttccagggtgccaggcagggctggcctccaggcctgtccccgactgccattggcaacaggtggccctgcagcccccagccctccccacccaggttttcggcccagtgaagaggccatctggccaggcctcccaggtcaggtgttttatgttcagcaataaaggttctatccgtaaaaaaaaaa

SEQ ID NO: 61088 - DNA, 8320 bp, Homo sapiens
tttcgtggagccgagctgggtgcggtgaggcgcgcagatcaccgcggttcctgggcagggcacggaaggctaagcaaggctgacctgctgcagctcccgcctcgtgcgctcgccccacccggccgccgcccgagcgctcgagaaagtcctctcgggagaagcagcgcctgttcccggggcagatccaggttcaggtcctggctataagtcaccatggcacagcaagctgccgataagtatctctatgtggataaaaacttcatcaacaatccgctggcccaggccgactgggctgccaagaagctggtatgggtgccttccgacaagagtggctttgagccagccagcctcaaggaggaggtgggcgaagaggccatcgtggagctggtggagaatgggaagaaggtgaaggtgaacaaggatgacatccagaagatgaacccgcccaagttctccaaggtggaggacatggcagagctcacgtgcctcaacgaagcctcggtgctgcacaacctcaaggagcgttactactcagggctcatctacacctattcaggcctgttctgtgtggtcatcaatccttacaagaacctgcccatctactctgaagagattgtggaaatgtacaagggcaagaagaggcacgagatgccccctcacatctatgccatcacagacaccgcctacaggagtatgatgcaagaccgagaagatcaatccatcttgtgcactggtgaatctggagctggcaagacggagaacaccaagaaggtcatccagtatctggcgtacgtggcgtcctcgcacaagagcaagaaggaccagggcgagctggagcggcagctgctgcaggccaaccccatcctggaggccttcgggaacgccaagaccgtgaagaatgacaactcctcccgcttcggcaaattcattcgcatcaactttgatgtcaatggctacattgttggagccaacattgagacttatcttttggagaaatctcgtgctatccgccaagccaaggaagaacggaccttccacatcttctattatctcctgtctggggctggagagcacctgaagaccgatctcctgttggagccgtacaacaaataccgcttcctgtccaatggacacgtcaccatccccgggcagcaggacaaggacatgttccaggagaccatggaggccatgaggattatgggcatcccagaagaggagcaaatgggcctgctgcgggtcatctcaggggttcttcagctcggcaacatcgtcttcaagaaggagcggaacactgaccaggcgtccatgcccgacaacacagctgcccaaaaggtgtcccatctcttgggtatcaatgtgaccgatttcaccagaggaatcctcaccccgcgcatcaaggtgggacgggattacgtccagaaggcgcagactaaagagcaggctgactttgccatcgaggccttggccaaggcgacctatgagcggatgttccgctggctggtgctgcgcatcaacaaggctctggacaagaccaagaggcagggcgcctccttcatcgggatcctggacattgccggcttcgagatctttgatctgaactcgtttgagcagctgtgcatcaattacaccaatgagaagctgcagcagctcttcaaccacaccatgttcatcctggagcaggaggagtaccagcgcgagggcatcgagtggaacttcatcgactttggcctcgacctgcagccctgcatcgacctcattgagaagccagcaggccccccgggcattctggccctgctggacgaggagtgctggttccccaaagccaccgacaagagcttcgtggagaaggtgatgcaggagcagggcacccaccccaagttccagaagcccaagcagctgaaggacaaagctgatttctgcattatccactatgccggcaaggtggattacaaagctgacgagtggctgatgaagaacatggatcccctgaatgacaacatcgccacactgctccaccagtcctctgacaagtttgtctcggagctgtggaaggatgtggaccgcatcatcggcctggaccaggtggccggcatgtcggagaccgcactgcccggggccttcaagacgcggaagggcatgttccgcactgtggggcagctttacaaggagcagctggccaagctgatggctacgctgaggaacacgaaccccaactttgtccgctgcatcatccccaaccacgagaagaaggccggcaagctggacccgcatctcgtgctggaccagctgcgctgcaacggtgttctcgagggcatccgtatctgccgccagggcttccccaacagggtggtcttccaggagtttcggcagagatatgagatcctgactccaaactccattcccaagggtttcatggacgggaagcaggcgtgcgtgctcatgataaaagccctggagctcgacagcaatctgtaccgcattggccagagcaaagtcttcttccgtgccggtgtgctggcccacctggaggaggagcgagacctgaagatcaccgacgtcatcatagggttccaggcctgctgcaggggctacctggccaggaaagcatttgccaagcggcagcagcagcttaccgccatgaaggtcctccagcggaactgcgctgcctacctgaagctgcggaactggcagtggtggcggctcttcaccaaggtcaagccgctgctgcaggtgagccggcaggaggaggagatgatggccaaggaggaggagctggtgaaggtcagagagaagcagctggctgcggagaacaggctcacggagatggagacgctgcagtctcagctcatggcagagaaattgcagctgcaggagcagctccaggcagaaaccgagctgtgtgccgaggctgaggagctccgggcccgcctgaccgccaaagaagcagggaattagaagagatctgccatgacctagaggccagggtggaggaggaggaggagcgctgccagcacctgcaggcggagaagaagaagatgcagcagaacatccaggagcttgaggagcagctggaggaggaggagagcgcccggcagaagctgcagctggagaaggtgaccaccgaggcgaagctgaaaaagctggaggaggagcagatcatcctggaggaccagaactgcaagctggccaaggaaaagaaactgctggaagacagaatagctgagttcaccaccaacctcacagaagaggaggagaaatctaagagcctcgccaagctcaagaacaagcatgaggcaatgatcactgacttggaagagcgcctccgcagggaggagaagcagcgacaggagctggagaagacccgccggaagctggagggagactccacagacctcagcgaccagatcgccgagctccaggcccagcatcgcggagctcaagatgcagctggccaagaaagaggaggagctccaggccgccctggccagagtggaagaggaagctgcccagaagaacatggccctcaagaagatccgggagctggaatctcagatctctgaactccaggaagacctgaagtgcgagcggggcttccaggaataaagctgagaagcagaaacgggaccttggggaagagctagaggcgctgaaaacagagttggaggacacgctggattccacagctgcccagcaggagctcaggtcaaaacgtgagcaggaggtgaacatcctgaagaagaccctggaggaggaggccaagacccacgaggcccagatccaggagatgaggcagaagcactcacaggccgtggaggagctggcggagcagctggagcagacgaagcgggtgaaagcaaacctcgagaaggcaaagcagactctggagaacgagcggggggagctggccaacgaggtgaaggtgctgctgcagggcaaaggggactcggagcacaagcgcaagaaagtggaggcgcagctgcaggagctgcaggtcaagttcaacgagggagagcgcgtgcgcacagagctggccgacaaggtcaccaagctgcaggtggagctggacaacgtgaccgggcttctcagccagtccgacagcaagtccagcaagctcaccaaggacttctccgcgctggagtcccagctgcaggacactcaggagctgctgcaggaggagaaccggcagaagctgagcctgagcaccaagctcaagcaggtggaggacgagaagaattcccttccgggagcagctggaggaggaggaggaggaggccaagcacaacctggagaagcagatcgccaccctccatgcccaggtggccgacatgaaaaagaagatggaggacagtgtggggtgcctggaaactgctgaggaggtgaagaggaagctccagaaggacctggagggcctgagccagcggcacgaggagaaggtggccgcctacgacaagctggagaagaccaagacgcggctgcagcaggagctggacgacctgctggtggacctggaccaccagcgccagagcgcgtgcaacctggagaagaagcagaagaagtttgaccagctcctggcggaggagaagaccatctctgccaagtatgcagaggagcgcgaccgggctgaggcggaggcccgagagaaggagaccaaggctctgtcgctggcccgggccctggaggaagccatggagcagaaggcggagctggagcggctcaacaagcagttccgcacggagatggaggaccttatgagctccaaggatgatgtgggcaagagtgtccacgagctggagaagtccaagcgggcaatagagcagcaggtggaggagatgaagacgcagctggaagagctggaggacgagctgcaggccaccgaagatgccaagctgcggttggaggtcaacctgcaggccatgaaggcccagttcgagcgggacctgcagggccgggacgagcagagcgaggagaagaagaagcagctggtcagacaggtgcgggagatggaggcagagctggaggacgagaggaagcagcgctcgatggcagtggccgcccggaagaagctggagatggacctgaaggacctggaggcgcacatcgactcggccaacaagaaccgggacgaagccatcaaacagctgcggaagctgcaggcccagatgaaggactgcatgcgcgagctggatgacacccgcgcctctcgtgaggagatcctggcccaggccaaagagaacgagaagaagctgaagagcatggaggccgagatgatccagttgcaggaggaactggcagccgcggagcgtgccaagcgccaggcccagcaggagcgggatgagctggctgacgagatcgccaacagcagcggcaaaggagccctggcgttagaggagaagcggcgtctggaggcccgcatcgcccagctggaggaggagctggaggaggagcagggcaacacggagctgatcaacgaccggctgaagaaggccaacctgcagatcgaccagatcaacaccgacctgaacctggagcgcagccacgcccagaagaacgagaatgctcggcagcagctggaacgccagaacaaggagcttaaggtcaagctgcaggagatggagggcactgtcaagtccaagtacaaggcctccatcaccgccctcgaggccaagattgcacagctggaggagcagctggacaacgagaccaaggagcgccaggcagcctgcaaacaggtgcgtcggaccgagaagaagctgaaggatgtgctgctgcaggtggatgacgagcggaggaacgccgagcagtacaaggaccaggccgacaaggcatctacccgcctgaagcagctcaagcggcagctggaggaggccgaagaggaggcccagcgggccaacgcctcccgccggaaactgcagcgcgagctggaggacgccactgagacggccgatgccatgaaccgcgaagtcagctccctaaagaacaagctcaggcgcggggacctgccgtttgtcgtgccccgccgaatggcccggaaaggcgccggggatggctccgacgaagaggtagatggcaaagcggatggggctgaggccaaacctgccgaataagcctcttctcctgcagcctgagatggatggacagacagacaccacagcctccccttcccagaccccgcagcacgcctctccccaccttcttgggactgctgtgaacatgcctcctcctgccctccgccccgtccccccatcccgtttccctccaggtgttgttgagggcatttggcttcctctgctgcatccccttccagctccctcccctgctcagaatctgataccaaagagacagggcccgggcccaggcagagagcgaccagcaggctcctcagccctctcttgccaaaaagcacaagatgttgaggcgagcagggcaggcccccggggaggggccagagttttctatgaatctatttttcttcagactgaggccttttggtagtcggagcccccgcagtcgtcagcctccctgacgtctgccaccagcgcccccactcctcctcctttctttgctgtttgcaatcacacgtggtgacctcacacacctctgccccttgggcctcccactcccatggctctgggcggtccagaaggagcaggccctgggcctccacctctgtgcagggcacagaaggctggggtggggggaggagtggattcctccccaccctgtcccaggcagcgccactgtccgctgtctccctcctgattctaaaatgtctcaagtgcaatgccccctcccctcctttaccgaggacagcctgcctctgccacagcaaggctgtcggggtcaagctggaaaggccagcagccttccagtggcttctcccaacactcttggggaccaaatatatttaatggttaagggacttgtcccaagtctgacagccagagcgttagaggggccagcggccctcccaggcgatcttgtgtctactctaggactgggcccgagggtggtttacctgcaccgttgactcagtatagtttaaaaatctgccacctgcacaggtatttttgaaagcaaaataaggttttcttttttcccctttcttgtaataaatgataaaattccgagtctttctcactgcctttgtttagaagagagtagctcgtcctcactggtctacactggttgccgaatttacttgtattcctaactgttttgtatatgctgcattgagacttacggcaagaaggcattttttttttttaaaggaaacaaactctcaaatcatgaagggatataaaagctgcatatgcctacaaagctctgaattcaggtcccagttgctgtcacaaaggagtgagtgaaactcccaccctacccccttttttatataataaaagtgccttagcatgtgttgcagctgtcaccactacagtaagctggtttacagatgttttccactgagcatcacaataaagagaaccatgtgctaaccagcttactgtagtggtgacagctgcaacacatgctaaggcacttttattatataaaaaagggggtagggtgggagtttcactcactcctttgtgacagcaactgggacctgaattcagagctttgtaggcatatgcagcttttatatcacttcatgatttgagagtttgtttcctttaaaaaaaaaaaatgccttcttgccgtaagtctcaatgcagcatatacaaaacagttaggaatacaagtaaattccgcaaccagtgtagaccagtgaggacgagctactctcttctaaacaaaggcagtgagaaagactcggaattgtatcatttattacaagaaaggggaaaaaagaaaaccttattttgctttcaaaaatacctgtgcaggtggcagatttttaaactatactgagtcaacggtgcaggtaaaccaccctcgggcccagtcctagagtagacacaagatcgcctgggagggccgctggcccctctaacgctctggctgtcagacttgggacaagtcccttaaccattaaatatatttggtccccaagagtgttgggagaagccactggaaggctgctggcctttccatctcaggctgcaggagaagaggcttattcggcaggtttggcctcagccccatccgctttgccatctacctcttcgtcggagccatccccggcgcctttccgggccattcggcggggcacgacaaacggcaggtccccgcgcctgagcttgttctttagggagctgactttgcggttcatggcatccgccgtctcagtggcgtactccagctcgcgctgcagttcccgccg

SEQ ID NO: 61089 - DNA, 3156 bp, Homo sapiens
accggaccggaatgccgggtcgacgatttcgttgctgagcgggcctgggacagcgggtcgcggcacctcccgcctgcgcgtgtctaatccgtctgtcgggtcccgaaagagctaagccgagcctgcgccggacgggtgggctggactgagagaattctctgagctggtgacaggtgccacaggcactggggatctcaccagaaaggaaccgacggagctaggggccagcgagatggcggacgaggccttagctgggctggatgagggagcccttcggaagctgctggaggtcacagcagatctggcagagcggcggcgcatccgctcagccatccgggaactgcagcggcaggagctggagcgcgaggaggaggccctggcatccaagcgtttccgtgccgagcggcaggacaacaaggagaactggctgcactctcagcagcgggaagctgagcagagggctgccctggcacggctggcagggcagctggagtccatgaacgatgtggaggaattgactgcactgttgcgaagcgctggtgagtatgaggagcgcaagctgatccgagctgccatccgccgtgtacgggctcaggagattgaggctgccaccttggctgggaggttgtacagcgggcgtcccaacagtggctcaagagaggacagcaaggggctagcggcacacaggctggaacagtgtgaggtgccagagcgagaggaacaggaacagcaggcagaggtttcaaagccaacccccacccctgaaggcaccagccaggatgtgaccacagtgacactcctgctgcgagccccacctgggagcacatccagctcacctgcctcacccagcagttcacccacccctgcctctcctgagcctccattggagcctgccgaggcccagtgccttacagctgaggttccaggcagcccagagccaccccccagcccacccaagaccaccagccctgagcctcaggagtctccaacgctccccagcactgagggccaggtggtcaacaagcttctgtctggccccaaagagacccctgctgcccagagccccaccagaggcccctctgacaccaagagagcagacgtggctggaccccgaccctgccaacgctccctgtcggtgctcagcccccgccaaccagcccagaaccgagagtccaccccccttgccagcggaccttcctcattccagcgggctggctctgtgcgggatcgtgtccacaagttcacatctgattctcctatggctgctaggctccaggatggcacaccccaggctgccctaagtcccctgacccccgcaaggctcctgggcccctccctcaccagcaccacccctgcctcctcctccagcggctcctcctctcggggccccagtgatacctcctcccggttcagcaaggagcaacgaggagtagcccagcccctggcccagcttcgaagctgcccccaggaggagggccccagggggcggggcttggctgctaggccccttgaaaacagagcaggggggcctgtggcacgttcagaggagcctggtgccccgctgcccgtggccgtcggcactgccgagccagggggcagtatgaagaccacattcaccatcgagatcaaggacggccgtggccaggcctccacaggccgggtgctgctgcccacaggcaaccagagggcagaactgacactggggctgcgggcgcccccgaccctactcagcaccagtagtgggggcaagagcaccatcacccgtgtcaacagccctgggaccctggctcggctgggcagtgtcactcatgtcaccagcttcagccatgccccccccagtagccgaggaggctgcagcatcaagatggaagcagagccagcagagcctctcgctgcagcagtggaagcggccaatggggctgagcagacccgagtgaacaaagcaccagaagggcggagccctctgagcgctgaggagctgatgactattgaggatgaaggagtcttggacaagatgctggatcagagcacggactttgaagagcggaagctcatccgggctgcacttcgtgagctccgacaaaggaagagagaccagcgggacaaggagcgggaacggcggctgcaggaggcacggggccggccaggggaggggcgcggcaacacagccactgagaccaccacgaggcacagccagcgggcagctgatggctctgctgtcagcactgttaccaagactgagcggctcgtccactccaatgatggcacacggacggcccgcaccaccacagtggagtcgagtttcgtgaggcgctcggagaatggcagtggcagcaccatgatgcaaaccaagaccttctcctcttcctcctcatccaagaagatgggcagcatcttcgaccgcgaggaccaggccagcccacgggccggcagcctggcggcgctcgagaaacggcaggccgagaagaagaaagagctgatgaaggcgcagagtctgcccaagacctcagcctcccaggcgcgcaaggccatgattgagaagctggagaaggagggcgcggccggcagccctggcggaccccgcgcagccgtgcagcgatccaccagcttcggggtccccaacgccaacagcatcaagcagatgctgctggactggtgtcgagccaagactcgcggcctacgagcacgtcgacatccagaacttctcattccagctggagtgatgggatggccttctgtgccctggtgcacaactcttcccatgaggccttcgactatgggcagcttagccctcagaaccgacgccagaacttcgagggtggccttctcatctgcggagatgctggtggactgtgtgcccctggtggaggtggacgacatgatgatcatgggcaagaagcctgaccccaagtgtgtcttcacctatgtgcagtcgctctacaaccacctgcgacgccacgaactgcgcctgcgcggcaagaatgtctagcctgcccgcccgcatggccagccagtggcaagctgccgcccccactctccgggcaccgtctcctgcctgtgcgtccgcccaccgctgccctgtctgttgcgacaccctcccccccacatacacacgcagcgttttgataaattattggttttcaacgaaaaaaaaaa

SEQ ID NO: 61090 - DNA, 2730 bp, Homo sapiens
tttttttgttttttattttttctttttaagtttgattttttttatttcaaaatgctttgcaattaaatgaattactgttcagaagtctcccacttttcatacaaaaatactgtgctactgatacagttgaaaaaattcaatgatgtctctcctgcaggagaaattcacagcatccccagggtcaacatgaaatctggccctgtccccgccactgggggctccccaggcctgcgttcctgataaactgggacaggttttccaggcactgaccaactatccaccaagggtcctctgcctccaagacagaccctgaatcaatagcagcaactttcccatatttcatgtagggatatgtggagggggacaggaactctcccatttccccagctgggcctactacctgcctgccctgttcactctggtgccatgaggcaggttcagtgattgattggtcttgcctgctgcagaggacctggccagctccagaagggtcactcatcaggtcctgcaaaggtctgtatcattaatcagtgtcatcagtgtcctcagaagacactagcagagtccagggtgatgcgttcagccacaagcacaaagactgctttttctaaagagcaggatgaggtgaatgtgggaacggaaagcagttgtcacgaaggctgtgtggctctgctgggggagaggcatccacagtctgtgccaaggaggtacctcaccctgtgcagcaggagcgttaaggccaaaaaacaaaaggggccaacagaaaacagctcaggtgatggggggaggagcagcaagaaaaaacgacaaccgagaccaactgaaggttcggtcaggaatgcaggctcttccgtctatacagtgtttaaaaagatccaaatgtgactgagatcattccagcctgcactttttatttgtaggcagaaggaacgggataggttgaggggcatgacgggggctctcgccacctcttgtctgcacctctggaacaggtgggagccgaatcattcaagtcctacctggtcagactcccaaccacgctgaggcaggcccttaccttggattgcctcatgggcctccctcttgaaaagaccctcactctgtttggaaaagatcccttagcagccataatcaggaaagagactctagagcgagcccagggcttccccaaagcgggattttctgtcctgttttcagctggaaattgaagtccttgggggcctcgaagatgagcacgatggtggagcccaggttgaactcgcccaggtgctcgcccttacgcatggggacgccctctctattggtgtgcgtcacgaagctgaagtcattgtaggagcccttgctgtgccttgggctgtttgtgtgcaggtcccggtcaaagtagatgcgaatggagccccagttgggtggcccccacagctgtcagtgagaagaagccatgtttccagtcccccgtcaggaccacccgctcgttatggcagaagagctctttgatccagcgagccatgccagggttcactgacatcagggagcctgggaagtggcgccggtgggacacagtccagtcggtgggggagtggaagcagtggtagtccccaggggccaggtagatgacacagtgatagagctcattcccttcccgggtgaccagctggttcttgaaggagtcacacgacgcggctggtgggaagggcaggtcctctgtgcacatacgcgggcccaggaacgactccagggagtaggtgaccccctttacctgctccacctcacagttcttcacctgcccaaagttgaggatccttccatccgatgggctaatcacgctgtgcaggccacagacaggccgggcctgcggcttcagcttgcgccggaagaactcgctgaggttgcggtagtgatgcaggtcctccacagcggcctctttcatgttcaccccaaacgtccagatgtacaggctgtagacgggcctgcgcagccagtgtggcagctccacctgattgaggcgaccccaggcccgtgacagcaagcgcgttggcactgacttgtacaaagccaccctgcttacgggcctccatcccacccggctgagcggtctgagggcgccgaagggcaggaggtagtagaggacggtcaagggccaggagcgcagtttcagagcgggtctggacatgcagctcagctgccccagcctccgcctcagggccagctgggggaagtgcaaccatttcgccgcgcggagctctggtccttgccgcgcctctgactgacacatcatgggccggcgcagggagggcggggcgaggctcactcgatcactccctttgttttcctctttcctccccttcccccgagccagcagatctcctgtgctgtcactgctccagggcctctgcctctgcgaggctggttggtggcgccgcttcctgggtttggttcagtctcggtggctcacagggtgcagaatagagggtcagggccgcgcccggcaggagataagatgtggaggaagtgagctcacgcagcccgggccgtgcccacgtggggacggaaaaaaagcccacgactcgctcaaccttgtccgcggggctcctcaggccggggccgcgtcgtcacagctgggagagcccacctgcgaccgaaggccctagaagggcacccccacccggcactggccctctgagcgggcagggtggggcgcctccctgagaagtcacctggggctccacgaaa

SEQ ID NO: 61091 - DNA, 790 bp, Homo sapiens
ttttttttttttcctgtgatgtcgtaaatcaaagtactattttattaaatgagttattttacacaatatgaacatcaatataattacaattgtaaaaaaattttttataacaaggatggactgattttcatatttccaaatcagagtcaactgtacatttacacagaattgtctttgcatgaagcccaagagggaacagcataaaaatgagtgtttctgtagcccctttatttttgctgatcaacagtttgttagaaaagcagctgcaggtatgttacctaaggtctgagacagtagaagagtcaaaggtgtcatgaattcacctgtaaacaaccttatgcctgaacatcagctaattctggaggaagtggagtcttaggatgcttgctctcaaagtgctgcttgaaggtcttagggtctggcatttgtgtccaaccaaaaattgtgccaaagagagcctacagacagtgcaggtatatattaaggcagctttggcagcagccttttggtcatgtccttgtttcttcttttgtccagcttgctttttggcatttttctgctgagactgaattttctgctgtccacgagccatatccgggccgggacagtcttgcgtcggagagacagtgcagcgcgagagggccgggagaggacgccggagggaaaggaagggggagcgcgcccagcaccgcttgggcctcctccacccgctcaggaggggaaacacgagagccgggagcacaacagcctcgcacgcccgccgccgccgcgcgcccgccgccgcacgaaa

SEQ ID NO: 61092 - DNA, 2347 bp, Homo sapiens
ttttttttttttgaacatttggtaattttttatttgcttttcttggcactcataacattttttaccctttaaaacagattcaagtgattcaaattccagttacctctaagttatattctgttaacaaccaccttgtataaattggtttcataaataaaaactgctcttaaatgattctgtcagtggatgtctatccacaagctttccagcctggtctgctttatgtgtacatcctgaaaatttgccaaaatagcagcaacaactgatgatatcatagggaaaaaactcactgccacaagaaaccaagcattgttgagtcaacttctttttggtcacttgttttatacttactagataagccaaaagacctgtttgttacacaaacatgcatgcatccaggtattaatccattctcacactgctatgaagaaatacccgagactgggtaattataaaagaggtttaattttctgactcacagttccacatggctgggaaggcctcaggaaacttaacaatcacggtggaaggcacctcttcacagggcggcaagagtgagaatgagagccagtaggggaaatgccaggcacttataaaaccatcagatcttatgaaagctcactatcatgagaatagcatgagggaaactgcccccatgattcaattacctaccacaacacctgggaattatgaggattaaaattcaagatgagacttgggtggggatacatccaaaccatatcaatccatatatggctgaaatttacatcagacaatggtaaatatctatgttcaaagtccattgatgctttgagattctgagctattttctggtatggaaaacagacttagcatctccatctccattggatgtatgctgcctcctgtgatgatcaaggaatgcaatggttctcccaagtccacagtgcacatttgccttaaagtgcctgctgcaattttctggtcgtcggctccaaccctgggctaagccaacacaaagtgtctcctcggtaactgctggttcttctcctcgtattctttgattttgaacaatctccagaagctgctgggctgcttggtttacactcatataccgtggaggttcatagatcttccttcccttgattagattttccaaagactgctcctttactttgatgtctagtaaacataatgtgtgcatgccattttgtctgttcttcttcactttgtcaaagaagctttctggtctccaagtgtctgtccaaaaaacaatagaaactgtctctccaaacttatataactgtaaaccacagcagcctacagcattcattatggaggcattgtgaataactctataaggaattcccagctttgttgctcttagaacaagatcactgtgtgttgtggccccaaatggatcaccaaccacaaggaatgcaacatcactgatatcagcatcctttaaaatattatctgcttcttgttccacttcttctctatcagcaacaaccaattttcttccataaaactcttccaaggcttccttccctacagttaggactgaggtgtaggcttccagatacactcgactgcagcgtctaacaacttccaggcccttgactgtgatgtccttggcatctcccaggcccaacccgatgagataaagcatttcaaacttgaggagaagagagactaggagcagccaattacccgctgagagaatcgtaggtagttctctggcctttacaaattcttaactaccacctttccgcagaagcaactgcaaaagcgccggctccgtgcagagaaaagccccacgccgccggcctcacctacggtgccgcaaaatgctggtgcctttactgcactttacgactagcgggagggggccgggctagcgggctactgggctgcggagaccagagcccggctccactgaagaaacccgccggctgctggggcagggcggcgaaaggtcagtcggccgagaggagtccgtggagccaccgtttcatagcctcagggaaaggatcgggcgtgctcacgagccctctaacccatggcttaaacacccgcttcctaagcctgggttcttatgcctttgtttgaaaaacatggttccctgtgaaattttacatgtagaagaaagcttcacactacgagagctctcaggatataattatttcagacagatactgggaacataagatggcttatcaatctaagatggccttcctgtccttcggattgaactgaaaccatccctgattccagggataggtagatgatccgggtttggacaatcaaaatattgaaccaccctggacctacaagtgtttctgggatgggaacatgcaaacgttgg

SEQ ID NO: 61093 - DNA, 4562 bp, Homo sapiens
gctctggagttcccgggtcgacgatttcgtagggccggtggcggcggcggctgcggctacggccggagacggcagtgttggcggtagtggtgggtggcaggggcctgtgaccgggagctgcccccggacccgggcaccatgagccaaggccccccccacaggggagagcagcgagcccgaagcaaaagtcctccacactaagcggctttaccgggctgtggtggaggctgtgcatcgacttgacctcatcctttgcaacaaaactgcttatcaagaagtattcaaaccagaaaacattagcctgaggaacaagctgcgtgagctctgcgtcaagcttatgttcctgcacccagtggactatgggagaaaggctgaggagctgctgtggagaaaggtatactatgaagttatccagcttatcaagactaacaaaaagcacatccacagccggagcactttggaatgtgcctacaggacgcacctggttgctggtattggcttctaccagcatctccttctctatatccagtcccactaccagctggaactgcagtgctgcatcgactggacccatgtcactgaccccctcataggatgcaagaagccagtgtctgcctcagggaaggagatggattgggcacagatggcatgtcaccgatgtctggtgtatctgggggatttgtcccgatatcagaatgaattagctggcgtagataccgagctgctagccgagagattttactaccaagccctgtcagtagctcctcagattggaatgcccttcaatcagctgggcaccctggcaggcagcaagtactataatgtggaagccatgtattgctacctgcgctgcatccagtcagaagtgtcctttgagggagcctatgggaacctcaagcggctgtatgacaaggcagccaaaatgtaccaccaactgaagaagtgtgagactcggaaactgtctcctggcaaaaagcgatgtaaagacattaaaaggttgctagtgaactttatgtatctgcaaagcctcctacagcccaaaagcagctccgtggactcagagctgacctcactttgccagtcagtcctggaggacttcaacctctgcctcttctacctgccctcctcacccaacctcagcctggccagtgaggatgaggaggagtatgagagtggatatgctttcctcccggaccttctcatctttcaaatggtcatcatctgccttatgtgtgtgcacagcttggagagagcaggatccaagcagtacagtgcagccattgccttcaccctggccctcttttcccacctcgtcaatcatgtcaacatacggctgcaggctgagctggaagagggcgagaatcccgtcccggcattccagagtgatggcacagatgaaccagagtccaaggaacctgtggagaaagaggaggagccagatcctgagcctcctcctgtaacaccccaagtgggtgagggcagaaagagccgtaagttctctcgcctctcctgtctccgccgtcgccgccacccacccaaagttggtgatgacagtgacctgagtgaaggctttgaatcggactcaagccatgactcagcccgggccagtgagggctcagacagtggctctgacaagagtcttgaaggtgggggaacggcctttgatgctgaaacagactcggaaatgaatagccaggagtcccgatcagacttggaagatatggaggaagaggaggggacacggtcaccaaccctggagccccctcggggcagatcagaggctcccgattccctcaatggcccactgggccccagtgaggctagcattgccagcaatctacaagccatgtccacccagatgttccagactaagcgctgcttccgactggcccccacctttagcaacctgctcctccagcccaccaccaaccctcatacctcggccagccacaggccttgcgtcaatggggatgtagacaagccttcagagccagcctctgaggagggctctgagtcggaggggagtgagtccagtggacgctcctgtcggaatgagcgcagcatccaggagaagcttcaggtcctgatggccgaaggtctgcttcctgctgtgaaagtcttcctggactggcttcggaccaaccccgacctcatcatcgtgtgtgcacagagctctcaaagtctgtggaaccgcctgtctgtgttgctgaatctgttgcctgctgctggtgaactccaagagtctggcctggccttgtgtcctgaggtccaagatcttcttgaaggttgtgaactgcctgacctcccctctagccttctgctcccagaggacatggctcttcgtaacctgcccccgctccgagctgcccacagacgctttaactttgacacggatcggcccctgctcagcaccttagaggagtcagtggtgcgcatctgctgcatccgcagctttggtcatttcatcgcccgcctgcaaggcagcatcctgcagttcaacccagaggttggcatcttcgtcagcattgcccagtctgagcaggagagcctgctgcagcaggcccaggcacagttccgaatggcacaggaggaagctcgtcggaacaggctcatgagagacatggctcagctacgacttcagctcgaagtgtctcagctggagggcagcctgcagcagcccaaggcccagtcagccatgtctccctacctcgtccctgacacccaggccctctgccaccatctccctgtcatccgccaactggccaccagtggccgcttcattgtcatcatcccaaggacagtgatcgatggcctggatttgctgaagaaggaacacccaggggcccgggatgggattcggtacctggaggcagagtttaaaaaaggaaacaggtacattcgctgccagaaagaggtgggaaagagctttgagcggcataagctgaagaggcaggatgcagatgcctggactctctataagatcctagacagctgcaaacagctgacttttggcccagggggcaggtgaggaggatccgagtggcatggtgaccatcatcacaggccttccactggacaaccccagcttgctttcaggccccatgcaggcagccctgcaggccgctgcccacgccagtgtggacatcaagaatgttctggacttctacaagcagtggaaggaaattggttgatactgacccccaggccctgcagtggggctgactccagatctctcctgccctccctggcagccaggaccagcacctgtagtcaccccaccacacgcagactcatgcacgcacacaggagggaggcctagctgctcagaggctgcagggagggcccaggagccggctgggagggtggggtccctttgttgccaagacgttaggaaagcgaggaaagtgcttggattaggagggtcttgtgggcccctggccagccttcctgcctcagctcccctgctgtctccaggggcaggtggtaggcatgggtacctgcatttcactggagtgggttcttggatctctgaggggaaggaacagcaaaagaggcccttcttcctcacccaagatgcagggtggttggggccaggagtttggaccctctaggtcttgggggaagagctgggtaatacctggtgtctgagtgattctctgcagacccttcccctcctcaaggatcacccatcctcctttcagccccctttatggggaccaggcagctctggagccagccacaggggctgttagagaagcaaggcctggagtggcctgcaccgagtagcagggtcagggttcgtgtgctcctcctcctgctgcaggggctgcacatcccattgccccacttctgctttgtgtctccctctgtctagcttccagggcagggagcaggccccacctagggctgcaggcagtctggcctgtgccagcacggtctcctgtgcccaccagccccacaggtgctgtgctttgtgctcttggctgctgtgctgggacagaatgggatgccaggaagagaagaaagggggtgcagtctgaggccaccaccccccttcctatctaagggagggctgaagacaaggggccggcattcagtgggcagcagaaaggagaggctccttgaagctgctcagtcagaggcccccgtccctccttttgccttccgcaggactgaagacctgaaggggctggcttttggagtgttgaggtgaatatctgggagcagagatcatgaatagctcagggcagtgaatggcgcaccaagagcagggctgtgtgtgggaggctgcagccaggattgcctcagctcctccccctcaggctgggaggatagcacaggctaggggctcggggtggagggtctcagctctgctgcccccaccccagtactagcctagcttcccaagctgtggcttagaggatagttggcttcctgcctctctcctctaaaatagcaagtctgggaaatcctggggtgagtggagtcaccccactcccagttgctggcagagactgagactaaagcatcacttaataaaccccccaagcccaaaaaaaaaa

SEQ ID NO: 61094 - DNA, 5102 bp, Homo sapiens
cggggcggcggcgggggccgggggggcccgggcgcgcgggagcgggagcggccgggggagccggagcgcaccatggaggcggcggcaggcggccgcggctgtttccagccgcacccggggctgcagaagacgctggagcagttccacctgagctccatgagctcgctgggcggcccggccgctttctcggcgcgctgggcgcaggaggcctacaagaaggagagcgccaaggaggcgggcgcggccgcggtgccggcgccggtgcccgcagccaccgagccgccgcccgtgctgcacctgcccgccatccagccgccgccgcccgtgctgcccgggcccttcttcatgccgtccgaccgctccaccgagcgctgcgagaccgtactggaaggcgagaccatctcgtgcttcgtggtgggaggcgagaagcgcctgtgtctgccgcagattctcaactcggtgctgcgcgacttctcgctgcagcagatcaacgcggtgtgcgacgagctccacatctactgctcgcgctgcacggccgaccagctggagatcctcaaagtcatgggcatcctgcccttctcggcgccctcgtgcgggctcatcaccaagacggacgccgagcgcctgtgcaacgcgctgctctacggcggcgcctacccgccgccctgcaagaaggagctggccgccagcctggcgctgggcctggagctcagcgagcgcagcgtccgcgtgtaccacgagtggcttcggcaagtgtaaggggctggctggtgcccgagctctacagcagcccgagcgccgcctgcatccagtgcctggactggccgcctcatgtacccgccgcacaagttcgtggtgcactcgcacaaggccctggagaaccggacctgccactggggctttcgactcggccaaactggcgggcctacatcctgctgagccaggattacacgggcaaggaggagcaggcgcgcctcggccgcatgcctggacgacgtgaaggagaaattcgactatggcaacaagtacaagcggcgggtgccccgggtctcctctgagcctccggcctccataagacccaaaacagatgacacctcttcccagtcccccgcgccttccgaaaaggacaagccgtccagctggctgcggaccttggccggctcttccaataagagcctgggctgtgttcaccctcgccagcgcctctctgctttccgaccctggtcccccgcagtgtcagcgagtgagaaagagctctccccacacctcccggccctcatccgagacagcttctactcctacaagagctttgagacagccgtggcgcccaacgtggccctcgcaccgccggcccagcagaaggttgtgagcagccctccgtgtgccgccgccgtctcccgggcccccgagcctctcgccacttgcacccagcctcggaagcggaagctgactgtggacaccccaggagccccagagacgctggcgcccgtggctgccccagaggaggacaaggactcggaggcggaggtggaagttgaaagcagggaggaattcacctcctccttgtcctcgctctcttccccgtcctttacctcatccagctccgccaaggacctgggctccccgggtgcgcgtgccctgccctcggccgtccctgatgctgcggcccctgccgacgcccccagtgggctggaggcggagctggagcacctgcggcaggcactggagggcggcctggacaccaaggaagccaaagagaagttcctgcatgaggtggtcaagatgcgcgtgaagcaggaggagaagctcagcgcagccctgcaggccaagcgcagcctccaccaggagctggagttcctacgcgtggccaagaaggagaagctgcgggaggccacggaggccaagcgtaacctgcggaaggagatcgagcgtctccgcgccgagaacgagaagaagatgaaagaggccaacgagtcacggctgcgcctgaagcgggagctggagcaggcgcggcaggcccgggtgtgcgacaagggctgcgaggcgggccgcctgcgcgccaagtactcggcccagatcgaagacctgcaggtgaagctgcagcacgcggaggcggaccgggagcagctgcgggccgacctgctgcgggagcgcgaggcccgggagcacctggagaaaggtggtgaaaggagctgcaggaacagctgtggccgcgggcccgccccgaggctgcgggcagcgagggccgctgcggagctggagccgtagattccgtggcctgccgccgcagcgccgccgacatcgcgggtgccaggggggcgcggctgggcggtgcagctccgcccggctccggcccttcaagcccacacagccaccaacggtctttaccggtgccttattacccagggaggtgtttgtaacccatgtaggttttggaaccccactgccaaaaattttctactggccaagttcaagtgagtaagccgcgtcccccaactacagctggagacgggcccagctcggcggcctgctggtcctctgcttgctggaacattctaacatttacacttttgttataagctatttaaaaccagtaaggagacttgaaattcagaaaatcaacacatttttaaatgactaacttctaaaagccccaacacatgacgccatctgaagacccgcaacggagtgggggtggcggccgccccaccctccccacccggggaagccatcacagctcatctgcccgcggctgcgtgaggacagcaggggtttttcttcagagtctattttttcagcgacaaggacccaggtcttcctgctgctgccagggagagcagggacagtgccgcgtgcgagatgagctcgaacactgcccgccttactgccgcctaccccgcccgccacgccgccgtcgatgccagcgctgtccccacgggtaccaggaagtgcagagccgcacaggagctgccccggagctgaggggacggtcttcggctcctctgcaccccgtgattctgcccacgctcctccaccacgaggcactgacctgcgtcgggtggtgaccgtggctggcggtcacgccctcagcccctccgggcacacgtgccgcctgaccgggcgacccttttcagttcggcaaacgtcgctcccttcattttgggactgaggctgcagcattggaacaaaagagcattatttcaatttttctttctttttttttgttcgttcatttaaacgtatatttagaactgcactttgtccacaaccttcccttctctttctattccccagtgaactgaggtttttaccgatttatagagcagtcaaatccgaagtgctcgagtgcttagaaaccccctctggtgcttggttgaacaagggaatcacaagaaaacgaaaatgcaaaaactgaacttcgggggtcgttctgtgccttccagcatcttgtacagcaaatcctgactcgtgtctttttacccccaagatatctgtcttcagtagcgactgaatctgccactctcagaataagttccttgcatttattccaaataatctcgtttactctcacctgtttatgcaaattgtataaggtttcttatgcccaagcttgaaaaatgatttcccagtagacaagaggcggctacctatcctacagttacggtatttatttacataagaagatcttacaggagttctttgcttgaatccgttctaacacccgcggcagctgcacgcgctcacagaaggtggaggttacttgcccagggtacaggacggacctcgggcgcagtgacgagcaaagaccagagactgctgagccctcgcatctgggtggcggaattgcctgcgggggttttgcccttggtttactgaggggggtcttggttgctgctgaagcccccccaccccttctaaagtgcaatgcaaaagggacatcatgtatatgcagcgtttgtttggaattttctttgcttttgttttctttgcggttgttctgtgtgcatggattccacacctctgccgtaggtagatccgtcagcgggcattattaccgtgtcttgtaaagggtcggttttgttatgcaacacgcagaatgctgtttttagccttgttttaccagagttgttttttttttcagttatttcttcaagggaaactaaatgatttagttggagcaaagctttaagtgtgttggcgtgcttctgtgtggctgtcctgtgtcgccaggtcgaagatcacagtgaggtagaggccctgccccatccccagggccgccaggcttgctccgtttgctttgagtttttagaccccagagggagatgagcttttccaagctgtgtctgggccagagcctctccttgcccttgctccatcccgacggtcaccgttgggtccacgcctccaccgccccatcttgccccaaacggaaagcgctgtatctgcagtggcagcccttccccacttcggctctgggagggtccagccagtgtcacctgggcccaccctttcctgcagctgccaggcccgtgcggtcagtgggacccggacgtgggcaggcgagctcgggaccctcccaggcagttcccacagctcttgcctcggctcaccagggtcacttccactgtcaggggcctgagggggcagctgtggctgcagggctgctctggactgaggggtcccaggccccgaggggtgcacgcctggctccccttggcacaggtgcgagtccgtttcttttcagcagaagggggaagaggtgtccgctgtgtgggctgctgactcctctgtgtgtgaggcccttcatctaagtgattgtgtattcagtttaattctcattatatttctatactgaaagaagatttttaacgaagggaaaaacaacagcaataacattcatatctctggagcagctaactcatacacgtaatgtctgcttttcgtacagaactagccaatgtaaaaacagttcacctgtaaatactttttcctttttcaccgttgtattatacatgtatatgctgggtcctttttccagaaactcttttcttacctgagagttgtcttgttttctgggctgtttttaactgaggaaaaaaaaa

SEQ ID NO: 61095 - DNA, 2888 bp, Homo sapiens
cgcctcccccccccccccaggagcgggggggaaggactaacaagacgagcgctctggatcttactaaaggaataagcgtgcggccgcagggccatgctagccttgcgcgttgcgcggacatccgatggggggccctgctgtggcgccgtatgggctccgggaacgcggccgagtaagcgacgcgcctgctgggccctgctgccgcccgtgccctgctgcttgggctgcctggccgaacgctggaggctgcgtccggccgctcttggcttgcggctgcccgggatcggccagcggaaccactgttcgggcgcggggaaggcggctccccgggccagcggccggagcgggcgccgctgccgaagccccgggcggccagtggggcccggcgagcacccccagcctgtatgaaaacccatggacaatcccgaatatgttgtcaatgacgagaattggcttggccccagttctgggctatttgattattgaagaagattttaatattgcactaggagtttttgctttagctggactaacagatttgttggatggatttattgctcgaaactgggccaatcaaagatcagctttgggaagtgctcttgatccacttgctgataaaatacttatcagtatcttatatgttagcttgacctatgcagatcttattccagttccacttacttacatgatcatttcgagagatgtaatgttgattgctgctgttttttatgtcagataccgaactcttccaacaccacgaacacttgccaagtatttcaatccttgctatgccactgctaggttaaaaccaacattcatcagcaaggtgaatacagcagtccagttaatcttggtggcagcttctttggcagctccagttttcaactatgctgacagcatttatcttcagatactatggtgttttacagctttcaccacagctgcatcagcttatagttactatcattatggccggaagactgttcaggtgataaaagactgatgaaagtcatccctcactgttagtaaggaagcagtatacatcaatgggaacagggcccatggaaatgtacaggagtttccctattttggtgttcagcttgaaaaaggacttgtcagaatcaactgtgtcatcaaaatttaagtaatgtgcattgaaaataaggttgatcatgggaatatgcagaatttccaatgtatttttaaatacaaataaaattgtaatttagaatttttaatcttaggtttcttgattaatttataagagatcaattattgtcagtcttttttgtatgttttttaaaaacatagtccagagcatgggcagaattgacacctctcttttaagtgaaatttggattgctcacaaagcactaggaaatgtcatggggttcaaatatatatcctacacaactgggcaatacatttttgtttgatttttaggtctgtgtatacattaacagttcatgtaattaatacctgatcatttgggataatgaaagtgaagttagttgtagatgaagtaaagttataaaagagattaaaaatgcggtaactttttaagataataatcatacagaaggtatgaagttcattttcggtagtcttccaacctctcaggtgcctaataatttatgtttgaggataacaggtaacaaagatagtcgagataggagaacgtgtctattagtctttgcatctaaaaggcagtgagttacgttcctgccttccactgtgtttctgacatagcaatgtttgtttgatattggaacctggattcatattttatgtaaataatatcaagctgtatatttttcaaaggttttttaaactttggagactctttcttttgttaagcagttaaaggaataaaagagctggaaaaaaaattgtaccttcaactcaggttgttccatataacatacgtattctctgctgttacgtaagttttccgattcacagagtccattcatgtacatcacttacacttaaattgtaaaaataattagtctgaccatctgactttaaaagactgttgctacacgtacatcatgtttaggagaatgtgggatatggggaaggggagaagaagacagtccagtggtgactagttgctgctgcttaacctatggcctattgctgcccattgtccctggttttaatccaagcctattatggaatactgcagtgagattatccattctcagcctgttgagctgcattaaattagaatgggaggctgtaagtaaaactcatgcctcttggccaggcattctgcaccagcgtgtccctctgtggcttgctggtcctggttgttctcagactggcagctgagctgcgcttggcttgaagcatactgaagcctgcagccagggacaccgccattgaatcagatggagggggatgaaaaagcagagaagggggcatgtggctggctattcttgctctctggagaacagcttcattgttaggagtagttaggctgaaagtggacttcccactgctgagccacccaagaggcacactgagcattagtgacgggtgagccacataagaataatgtttaaaaaagagaggacttgaagtagctatgcgaaaatttagaactttgcactttgttaacgcttatttatggtttagtgttgatgccatttggagtgacctatgggttggacccatatctttttattattaaggtctcaatctggctctggttaataaacgtttcccgcttcatcccttaggaaaatggtccaagtctcctcaggcttttggatactgaattgttataaaacacatcaattctgccagtttataaaacactggaattgtattagacatgtctgagtatgtacttgtttatagactcaaaacatgatgaaaattca

SEQ ID NO: 61096 - DNA, 1433 bp, Homo sapiens
ggaattcaattacccagcctaaccatttctcaggtgcttgcgaggtgatcagaaggcaaagatgtcggagcgaaaagtattaaacaaatactacccgccggactttgacccatcaaagatccccaaactcaagctccccaaagaccggcagtacgtggtgcggctgatggcccccttcaacatgaggtgtaagacgtgcggagaatacatctacaaggggaagaaattcaatgctcggaaggagacggtgcagaacgaggtctacctgggcctgcccatcttccgcttttacatcaagtgcacgcgctgcctggcagagatcaccttcaagacagaccctgaaaacacagactataccatggagcatggagccacgcggaatttccaggctgagaagctcctggaggaggaggagaagagggtgcagaaggagcgggaggacgaggagctgaacaaccccatgaaggtgctggagaaccggaccaaggactccaagctggagatggaggtgctggagaacctccaggagctgaaagacctgaaccagcggcaggcgcacgtggacttcgaggctatgctgaggcagcaccgcctgtcggaggaggagcggcggaggcagcagcaggaggaggacgagcaggagaccgcggccctgttggaggaagccagaaagcgaagactgctggaggactccgactcagaggatgaggctgctccctcgcccctgcagccagcccttcggcccaaccccaccgccatcctggatgaggccccaaagcccaagaggaaggtggaggtctgggagcagagcgttggcagcctgggcagccggcccccgctgtcgaggctggtcgtggtgaagaaggcaaaggccgacccggactgcagcaacgggcagcctcaggcggcccccaccccaggagccccgcagaacaggaaggaggccaaccctacacccctgacgcctggcgcgtcctccctgagccaactgggtgcatacctggacagtgacgacagcaacggcagcaactgagccctcccaggaccccctcacggggtcaaagtcacacgtccagcttcagccacattgaggccagcattgctggtggtcagggcaggaggccttggcgtgactggaggccggacagacaagcgccagcgtgctccaacacatagggccaccaggggcctcagccccaggaggtcccttctctgtgccctcaccagcctctcaacacctcggggacccctgctgctcctgcccccacctgtcactgtgcttagggctgcaacatccctggagcagcttccaacactacttcagggtggcagtgtttggggcactgggcgagcctgccggcctctagatggcctcatctcttccttccacaaactgtctagaaccaataaaaggaaacctgccaaaaaaaaaa

SEQ ID NO: 61097 - DNA, 855 bp, Homo sapiens
ttttttcagggtcttacagaaaaatataactttaataaggaaattcaactaagggtaggagtactccaggaacaatggtaatccccacatgatgatctgattctcttttgggagcaaaacattgcaaccagacaggatggacaaggcatctaaaaacccagtatccttcaccttccgaaagtgagggagggactgtagagttgcccaggaaaaaggtcaagagtcttcacttctcctggaacttgcagttggtacagggtgtagaagacagtttgcccttcatcggctgaacgcatctgctgggtgtggtatgccattccttcatgaccacatcgagggcagcgcctgtcaaccacaggtccctggcactcaggcccttcctccaccgacataggcatggctgtccccagttggtggaacacaaccgaagtcttcacaaccttcccctcaaagtcccgaacgttgatgttgaagccacagcgaatacaggtgaccgtatcctgagccccgggcagaggcaggaccgagccgcaatctgaacagaaatccaggtccgactgaaagctggagcaagtattggcgaggtccatgacagacatgcggtcgggtctgaggagggagttggaagtttattaacaaaagagagaagagttcctgtcccagaggtcgtaactattctgtcccaggacctaggagtatataacccgaaccctcctgccacgcacgcctcctgcctctgcgaccaaggagccgaaacgcccggaattcccagacagcgtcgggtactaaagcacttggaaccctttccgaattccccgcgctgtacatggtctcaacctttttttccttacattc

SEQ ID NO: 61098 - DNA, 2225 bp, Homo sapiens
  misc_feature (1)...(2225): n = a,t,c or g
acggagggataggtccccaacaccgagaagccccggctcgcgctctggcccgggcgaatcgggctataggaagggccacacggatggaagtcctagtccgggtgctcacctcttgtggaacgtgcaaagcctgtcccaggacctctttacactctgggggtctctgcccaggcacgcttgctgcttccggacacagctgtgggcggagctagtaggggcggggctacgtgattgacacttctctcctcagacttcaagggctaccactggacccttcccctgtcttgaaccctgagccggcaccatgcacggacgcctgaaggtgaagacgtcagaagagcaggcggaggccaaaaggctagagcgagagcagaagctgaagctataccagtcagccacccaggccgtattccagaagcgccaggctggtgagctggatgagtccgtgctggaactgacaagccagattctgggagccaaccctgattttgccaccctctggaactgccgacgagaggtgctccagcagctggagactcagaagtctcctgaagagttggctgctctggtgaaggcagaactgggcttcctggagagctgcctgcgggtgaaccccaagtcttatggtacctggcaccaccgatgctggctgctaggccgcctgcctgagcccaactggacccgagagctggagctctgtgcccgtttcctggaggtggatgagcggaactttcactgctgggactatcggcggtttgtggccacacaggcagccgtgccccctgcagaagagctagccttcactgacagcctcatcacccgaaacttctccaactactcttcctggcattaccgctcctgtctcttgccccagctgcacccccagccggattctggaccacaggggcgcctccctgaggatgtgctgctcaaagagctggagctggtgcagaatgccttcttcactgaccccaatgaccagagtgcctggttttatcaccgttggctcctaggccgagctgacccccaggatgcactgcgctgcctgcatgtgagccgggacgaggcctgtctgactgtctccttctctcggcccctcttagtgggctccaggatggagatcttgctgctcatggttgatgattctcccctgattgtggagtggaggaccccagatggcaggaaccggcccagccatgtctggctctgtgacctgcctgctgcctccctcaacgaccagttgccccaacatacatttcgcgtcatttggacagcaggcgatgtccagaaagaatgcgtgcttttaaaaggccgccaggagggctggtgccgggactccacgacagacgagcagctattcaggtgtgagctgtcagtggagaagtccacagtgctgcagtctgagctggaatcctgtaaggagctgcaggagctggagcctgagaataaatggtgcctggcttaccatcatcctgctgatgcgggcactggaccccctgctgtatgagaaggagaccctgcagtacttccagaccctcaagggccgtggaccccatgcgggcaacgtattcttgatgacctgcgcagcaagttcttgctggagaatagcgtgctcaagatggagtatgccgaggtgcgtgtgctgcacctggctcacaaggatctgacagtgctctgccatctggaacagctgctcttggtcacccatcttgacttgtcacacaatcgcctccgaaccctgccacctgcactggctgccctgcgctgccttgaggaccctccaccccgaacaggtgctgcaggccagtgataatgccatagagtccctggacggcgtcaccaacctaccccggctgcaggagctgctactgtgcaacaaccgcctccagcagcctgcagtgctccagcctcttgcctcctgccccaggctggtcctcctcaacctgcagggtaacccgctgtgccaagcggtgggcatcttggagcaactggctgaactgctgccttcagttagcagcgtcctcacctaagaggccctgccccctacccttgccctttaacttattgggactgaataaagaatggagaggccctctcaggctaccaaaaaaaaaaagaagaaatttaagcaacttattaaacaaaananggggggcctctctatactgagggggccgacaaaaacccctataaaacccggggggctctacttttgcaccgccctt

SEQ ID NO: 61099 - DNA, 3067 bp, Homo sapiens
ttgtatctagctctccaccagcagaatggtggtccgggcagcgttccgggaatcactctgcctttgcatgtggtagtccggagaagatcctgattgcccacatcagacagtgtgggctgcagattccttatgaggcagaaataggttttcatcttttccatgctccagagcttctctgatttgcttgggtaacctttattttctaagataaaggaggaaatgatacgatcccagtcttcattcttggtatcaagcaaaaccaggatcaggtcaaatcgacttaagagtgggctgccgagggcaatgttcacagacacggactcctgggggtcgtactggcctttggggttcgttgctgccaggatggtggtccttgtgttcagcttgcacacgaggtttgttctccgcctttgtcctaatccacaccagcaggtggagccgcagttaaagtttccgagtccattccgggagcgggagcccatcttgctggctgccgaggccctcgctggaggaggagggtcagaactcgggtgcagccaatcgagggcaacgctgctacttatcagagcagaatgggctgtagtttagtgaaataggaaagctgcaaaacactgtggagtgctcccgtgtaaataaaaagaggaaaaaagtttctcaagtcgccgctgcacgacgtctggccggcgctggagcgggggtctgcgctctcccgagcggccgcgcgctggactttattgtgccgcaaccagccccagttcccattgtttgtgtttttttcaaaatatggcaaaggttcaggtgaacaatgtagtggtgctggataacccttctcctttctacaacccgttccagttcgagatcaccttcgagtgcatcgaggacctgtctgaagacttggaatggaaaattatctatgtgggctctgcagaaagtgaagaatacgatcaagttttagactctgttttagtgggtcctgttcccgcaggaaggcatatgtttgtatttcaggctgatgcacctaatccaggactcattccagatgcagatgcagtaggcgtaactgttgtgctaaatacttgtacctatcgaggacaagaatttattagagatggctattatgtaaataatgaatatactgagacagaattaaggggaaaatccaccagtaaaaccagacttttctaagcttcaaaggaatattttggcatctaatcccaggggtcacaagattccacattaattgggaagataacacagaaaaactggaagatgcagagagcagtaatccaaatctacagtcacttctttcaacagatgcattaccttcagcatcaaagggatggtccacatcagaaaactcactaaatgtcatgttagaatcccacatggactgcatgtgaccacctaccatccctttagtacaaattaagctattaaaaatacacagaactatttccctgaaattccgtaagtacatagtcaaaacacaatgtgaagaatttgtttaaaaacatcctgtagaaagtttataagaaaaccagtatttgaacaaattgtggaatataaatacaactattttaaggtaatttttttctctaatgtgttattttatttgttctgaaactaatctgattaaagcatatatattattttcttctcctttatatgtaatgaaagcacttataaagaaacaggaatcattagaccaggttgtaaagatgtcttggcctcccagacagtctttggaccactattttactggcctttgaaagaacaaagtttacttcaactaaaatgtttcttcctgtgaagacatatggtatcattttaatttaaggggcagatttccattcttttttggcatgtccttaaaaagaggatttgaaatcaactatatgctaccaagaactttaggatccaattttccaagccaccgtgaagcctcttatggctactattatagttcatgagatgttggacagcatttggtttgtttggtaagagaagaacaaatatggctaattgttaataaggtcccctggctatggtttttgttcttataacagagtttagaatatcagagcatttcttgaatcatacatcattattgtccagtgaattcaagaccaaatacaatatcgggagaaaatacaaactccctgtgtttaagaataggggattataatggctcaaattggttcatttgatttctaaaaataccatgacctttaaaaattcttttaatagatcatgttattggcagtatttatataaaaaccatggatttagaaaggtatatttagctttattataatagatacgttactattttggaaatatatatattttcacacctgtagtactcttccccatttcctctgacactcatgcagaatgagatcaggcatatttgtggttgacatactctagatagcttttccaacaaatctttgaaaagcaatcttggaaaggaattcattaactaaatggggtaaaaggtttctttttctttgagagttaagtccttcctcaaaaaattttcttatgctccataaaattgaggtagaatattttcattattcttgcagctaagcaagacagccatatgatgcaggttatgcagtgccttcatatctaaaacttttatactgcactttttaaagcttttatgttgaggaaaggaaaagggcatttgtctaaacatggattctgagttgtatatattccccatccattcctaaaaaagtgaatttgtgaagcaaagttttgcccagatgttaaactttgaatttaatataccagattattaaaatattgtccattaactagttcatagattttaaaagtaaaatacttctgactgttaaaactatataaagaaaatctcatttgtctaattgcaattaaaagaaaaatgttaaaatattaaaatgaaaataaaagcattactttccaacaaagagctcagtggttaatataataggaacaacatatgtgcttattagaaataaagcatatacagccaaatcaccaaataaagccatttactgctgagtttttatcggaa

SEQ ID NO: 61100 - DNA, 2115 bp, Homo sapiens
ctgcccgggctgcgcggcgtctgcaggcgccaccgctgcctctttccggctgtgaccctcctcgccgccgccgcttggctgcgtcctccgactccccgcgccgccgagaccaggctcccgctccggttgcggccgcaccgccctccgcggccgccccctggggatccagcgagcgcggtcgtccttggtggaaggaaccatgaactggcatctccccctcttcctcttggcctctgtgactctgccttccatctgctcccacttcaatcctctgtctctcgaggaactaggctccaacacggggatccaggttttcaatcagattgtgaagtcgaggcctcatgacaacatcgtgatctctccccatgggattgcgtcgggtcctggggatgcttcagctgggggcggacggcaggaccaagaagcagctcgccatggtgatgagatacggcgtaaatggagttggtaaaatattaaagaagatcaacaaggccatcgtctccaagaagaataaagacattgtgacagtggctaacgccgtgtttgttaagaatgcctctgaaattgaagtgccttttgttacaaggaacaaagatgtgttccagtgtgaggtccggaatgtgaactttgaggatccagcctctgcctgtgattccatcaatgcatgggttaaaaatgaaaccagggatatgattgacaatctgctgtccccagatcttattgatggtgtgctcaccagactggtcctcgtcaacgcagtgtatttcaagggtctgtggaaatcacggttccaacccgagaacacaaagaaacgcactttcgtggcagccgacgggaaatcctatcaagtgccaatgctggcccagctctccgtgttccggtgtgggtcgacaagtgcccccaatgatttatggtacaacttcattgaactgccctaccacggggaaagcatcagcatgctgattgcactgccgactgagagctccactccgctgtctgccatcatcccacacatcagcaccaagaccatagacagctggatgagcatcatggtgcccaagagggtgcaggtgatcctgcccaagttcacagctgtagcacaaacagatttgaaggagccgctgaaagttcttggcattactgacatgtttgattcatcaaaggcaaattttgcaaaaataacaaggtcagaaaacctccatgtttctcatatcttgcaaaaagcaaaaattgaagtcagtgaagatggaaccaaagcttcagcagcaacaactgcaattctcattgcaagatcatcgcctccctggtttatagtagacagaccttttctgtttttcatccgacataatcctacaggtgctgtgttattcatggggcagataaacaaaccctgaagagtatacaaaagaaaccatgcaaagcaacgactactttgctacgaagaaagactcctttcctgcatctttcatagttctgttaaatatttttgtacatcgcttctttttcaaaactagttcttaggaacagactcgatgcaagtgtttctgttctgggaggtattggagggaaaaaacaagcaggatggctggaacactgtactgaggaatgaatagaaaggcttccagatgtctaaaagattctttaaactactgaactgttacctaggttaacaaccctgttgagtatttgctgtttgtccagttcaggaatttttgttttgttttgtctatatgtgcggcttttcagaagaaatttaatcagtgtgacagaaaaaaaaatgttttatggtagcttttactttttatgaaaaaaaaattatttgccttttaaattcttttcccccatccccctccaaagtcttgatagcaagcgttattttgggggtagaaacggtgaaatctctagcctctttgtgtttttgttgttgttgttgttgttgttttatataatgcatgtattcactaaaataaaatttaaaaaactcctgtcttgctagacaaggttgctgttgtgcagtgtgcctgtcactactggtctgtactccttggatttgcatttttgtattttgtacaaagtaaaaataaactgttatgagtagtaaaaataaaaaaaaaa

SEQ ID NO: 61101 - DNA, 2585 bp, Homo sapiens
tttttttttaattcctgaggggtggttgctgcttttgctacatgacttgccagcgcccgagcctgcggtccaactgcgctgctgccggagcgctcagtgccgccgctgccgcccgccgcccccccgcgccccgttcggcacccaccggtcgccgcgccgcccgcgcgccgctgtcccgctcccgcgccgccgccgccgtttccccccgacgactgggtgatgctggacatgggagataggaaagaggtgaaaatgatccccaagtcctcgttcagcatcaacagcctggtgcccgagggcctccagaacgacaaccaccacgcgagccacggccaccacaacagccaccacccccagcaccaccaccaccaccaccaccatcaccaccacccgccgccgcccgccccgcaaccgccgccgccccgagccgcgcagcagcagcagccgccgccgccgccgctcgccccgcaggccggcggcgccgcgcaatcgaacgacgaaaagggcccccagctgcttctgctcccgccgaccgaccaccaccggccgccgtccggagctaaagccggaggctgctgccggcctggggagctggggcccgtcgggccggacgagaaggagaagggcgccggcgctgggggggaggagaagaagggcgcgggcgagggcggcaaggacggggaggggggcaaggagggcgagaagaagaacggcaagtacgagaagccgccgttcagctacaacgcgctcatcatgatggccatccggcagagccccgagaagcgcctcacgctcaacggcatctacgagttcatcatgaagaacttcccttactaccgcgagaacaagcagggctggcagaactccatccgccacaatctgtccctcaacaagtgcttcgtgaaggtgccgcgccactacgacgacccgggcaagggcaactactggatgctggacccgtcgagcgacgacgtgttcatcggcggcaccacgggcaagctgcggcgccgctccaccacctcgcgggccaagctggccttcaagcgcggtgccgcgcctcacctccaccggcctcaccttcatggaccgcgccggctccctctactggcccatgtcgcccttcctgtccctgcaccacccgcgcgccagcagcactttgagttacaacggcaccacgtcggcctaccccagccaccccatgccctacagctccgtgttgactcagaactcgctgggcaacaaccactccttctccaccgccaacggcctgagcgtggaccggctggtcaacggggagatcccgtacgccacgcaccacctcacggccgccgcgctagccgcctcggtgccctgcggcctgtcggtgccctgctctgggacctactccctcaacccctgctccgtcaacctgctcgcgggccagaccagttactttttcccccacgtcccgcacccgtcaatgacttcgcagagcagcacgtccatgagcgccagggccgcgtcctcctccacgtcgccgcaggccccctcgaccctgccctgtgagtctttaagaccctctttgccaagttttacgacgggactgtctgggggactgtctgattatttcacacatcaaaatcaggggtcttcttccaaccctttaatacattaacatccctgggaccagactgtaagtgaacgttttacacacatttgcattgtaaatgataattaaaaaaataagtccaggtattttttattaagcccccccctcccatttctgtacgtttgttcagtctctagggttgtttattattctaacaaggtgtggagtgtcagcgaggtgcaatgtggggagaatacattgtagaatataaggtttggaagtcaaattatagtagaatgtgtatctaaatagtgactgctttgccatttcattcaaacctgacaagtctatctctaagagccgccagatttccatgtgtgcagtattataagttatcatggaactatatggtggacgcagaccttgagaacaacctaaattatggggagaattttaaaatgttaaactgtaatttgtatttaaaaagcattcgtagtaaaggtgcccaagaaattattttggccatttattgttttgtccttttctttaaagaactgtttttttttcttttgtttacttttagaccaaagattgggttctagaaaatgcgccttagtatacccaagtattaaaacaaacaaaaaggaaagttgtttcagttggcaacactgcccattcaattgaatcagaaggggacaaaattaacgattgccttcagtttgtgttgtgtatattttgatgtatgtggtcactaacaggtcacttttattttttctaaatgtagtgaaatgttaatacctattgtacttataggtaaaccttgcaaatatgtaacctgtgttgcgcaaatgccgcataaatttgagtgattgttaatgttgtcttaaaatttcttgattgtgatactgtggtcatatgcccgtgtttgtcacttacaaaaatgtttactatgaacacacagaaataaaaaataggctaaattcatataaaaaaaaaa

SEQ ID NO: 61102 - DNA, 4136 bp, Homo sapiens
gaattcgcggccgctcgacgctcagcagagctaccagctgccctgttggcttcgctggtcggatcgtcctcctggccccgccaaacaggcggggggagcggccccgactgtggggccatggcagtagtctcctcgttctccgccgccgctagcctagctgagtcgccggcttctgcgctaggggctcccaccgcctccgcaggctaaggagccgctgccaccaacgagctgtgagggttactatgctccctctttgccgccgtctcctcctcttgcccgcgcaggcacccctctggctgctcagtcctgcctcagtgtcaaaccagaagagaagtaaaattcaacaaaaatttatgtgtggagttccttcttaaaagaagaaaaaagtgattatttagactatggatcggagcaaacggaattcaattgcaggatttcctccacgtgtggagccgtcttgaagagtttgaaggaggtggtggaggagaaggaaatgtgagccaggtgggaagagtttggccatcttcgtatcgagctcttataagtgcctttttcagactgacgcgtttggatgatttcacctgtgaaaaaatagggtctggcttcttttctgaagtgttcaaggtacgacaccgagcttctggtcaggtgatggctcttaagatgaacacattgagcagtaaccgggcaaacatgctgaaagaagtacagctcatgaatagactctcccatcccaacatccttaggtatatcaactccgggaacctggaacagttgctagacagtaacctgcatttgccttggactgtgagggtaaaactggcctatgacatagcagtgggcctcagctaccttcacttcaaaggcatttttcatcgggacctcacatctaagaactgcctgataaagagggatgagaatggttactctgcagtggtagctgactttggcctggctgagaagatccccgatgtcagcatggggagtgagaagctggccgtggtgggttccccattctggatggcacctgaggttctccgagatgagccctataatgaaaaggcagatgtgttctcttatggtatcatcctctgcgagatcatcgcccgcatccaggccgatccggactatcttccccgcacagagaatttcgggctggactatgatgctttccagcacatggtgggagactgtcccccagattttctgcaacttactttcaactgctgtaacatggatcccaaactgcgcccatcttttgtggagattgggaagaccctggaggaaattctgagccgcctacaggaagaagagcaggagagggataggaagctgcagcccacagccaggggactcttggagaaagcacctggggtgaagcgactaagctcactggatgacaagatcccccacaagtcaccatgcccaagacgtaccatctggctgtctcgaagccagtcagatatcttttcccgtaagcccccacgtacagtgagtgtcttggacccatactaccggccacgagatggtgctgcccgcacccccaaagtcaacccttttagtgctcgccaggacctcatggggggcaagatcaagttttttgacctgcccagcaagtctgtcatctctctggtatttgacctggatgcaccagggcccggaactatgcccctggctgactggcaggagcccctggccccacctattcgccggtggcgttccttgcctggttcgcctgagttcttgcatcaagaggcttgtccatttgtgggccgggaagaatcgctatctgatgggcccccaccacgcctaagtagtctcaagtacagagttaaagagatcccaccattccgggcatctgccctaccagctgctcaagcccatgaggctatggactgctccattctccaggaagaaaatggttttgggtccaggccccaggggaccagtccatgccctgcgggtgcttctgaggagatggaggtagaagaaaggccagcaggctcaactccagccaccttctccacctcaggcataggcctgcaaacccagggaaagcaggatgggtgagggggtttagtccctgcctcaccttggggatggaccttcagctgaaaccatatggccccctaggtgcacagccttgattcttccctggagcctacagagcaggcaggctaggccaagccaggctcaacttctgggctcccagtgcccattggctgtgtatgacgggaggcagcagtgagaggccttcctagttagggccaacagctgataccaagcctctgaaatccagcaaggaggtctgcctcccaccagaccctctccagtgtacttccccagataggaccagaggatgtctagttctaggctgagctggcaggcagctattaccccggttctttccccaccccaggtctgtctcttgccttttcttggggcatataagctactgagtggaacatggagctgatcaagaggccgtaacggtcatggctgtttcccagacctgaatattggggtgcttcttgccagtattctaagacatttgagtaattgctgtttgcacttactgcatggtcagaccacgtcactacatttctatgcaaggggacagcaaggcagcgtggtggtcatggctcttagctaacctattcaaagaccttttcctgttgattaatctattttcatatttataaaggagtcttaatgttctgccccataagactttcaaccttgtggttgggagtggggctggttttgtaggccctagggcctgcttctatgtatttatcaacatgtgatacattcaattggttaaatggtttatacagggactgatttgcttcccttcctgccatggctggagctttgggaacagtctgtccttacagagctgcaataagaaataaccaaagatgaagctggtcaaatattttcataacttgcttctgttgatttttttttttgtaaaactttcccaagacattttcagacttaaaaataaagtcagtgttacaggtgctggtcagccttcttacttgtacctcaaacactgggataaaggaggcggtccagggcaatgcagtgatgtctgtcaagacattccccctcccctaaactcagtagcagttgaggatgacatttcaggctagagagacccaaaatacctctgttccacctgagagcaaggtgggaagttgcatcagctacttgccccaagtgagcttcatcttctggattgtggggctttgggagggaacgaggaggaactgggctcttggggccactgtgaggggtacagctttgcccactcaaatataccttattgtggcattcagggagccagggtccagagctgcagggctgcggtccctggctcacttccacataggccatcacataacctgtcataaaggcatcaaaaccagcccggtgcaatccatccccaggcactgggttaggactggcttggctccctggcacttctgaggtagctctatcagctatttcaggccttgctgccttaatccccatctctaagtcatttttgttgccttgcttggagtgaggcaggttcctagtttcatcggcagccacctcctgctcggtttcttcaggcttgatgctatccccacagacctgcttcttgggaggaccatccttagcttccccagaggtctgtgtccccggtaggttcaataaagccctcttccgtttttccctacgtcgtcgccgtcgccgcttgtcctctgccgcagcctcatcagtgtcaatgataaggtcaatatcgtgagactgaggacactgtggtcccagggggcaccagccataagccgagaagttgtcacagatgctggtgggatgaggacggtgggttgctgggggcaggcagcagcggtaatcaatatggtccctcatgctggaaggatagttgcagaactccagggtaaggtgtgggctgccagctgcccgctgcttcccattttcccgttcactgcaacagcgcaagagggtaatggtccactagcatataagctccataagagcagggttttgtggtctgttttgttcactgctgaatcctcagcacctaaaacactgcctgggcacatggtaggagctcaataaat

SEQ ID NO: 61103 - DNA, 2506 bp, Homo sapiens
cctccgccgcctcctcctcctccggcagccgcggcagcaggacccaccctgccccccaccccaccctctgtcggctccggctgcggctccagcctcgactattattttatttattttgggtcgtgcacaagcctcagtgcctgcagtccgcgcctcctcggcccgcgggcgcctcctcccttggctccggagccccagaccccggccaccctcgattcgacaaccccagacccctgccagctgccgcgagtctccgctgctggaatcttgttagcggctgtctttttggagggttctggtttcccgacatttttgtttccagcccaggagaggatatcgtgattttccccccttgagcccaggctctgctctctgggggggtggggggcgctccaagccggggagccgtgccagccgagtcgtgcgggctgtggcagggaaggggccaccatgggatgtactctgagcgcagaggagagagccgccctcgagcggagcaaggcgattgagaaaaacctcaaagaggatggcatcagcgccgccaaagacgtgaaattactcctgctcggggctggagaatcaggaaaaagcaccattgtgaagcagatgaagatcatccatgaagatggcttctccggagaagacgtgaaacagtacaagcctgttgtctacagcaacactatccagtccctggcagccatcgtccgggccatggacactttgggcatcgaatatggtgataaggagagaaaggctgacgccaagatggtgtgtgatgtggtgagtcggatggaagacaccgagcccttctctgcagagctgctttctgccatgatgcggctctggggcgactcaggaatccaagagtgcttcaaccggtcccgggagtatcagctcaacgactctgccaaatactacctggacagcctggatcggattggggccgccgactaccagcccaccgagcaggacatcctccgaaccagggtcaaaaccactggcatcgtagaaacccacttcacattcaagaacctccacttcaggctgtttgacgtcggaggccagcgatctgaacgcaagaagtggatccattgcttcgaggacgtcacggccatcattttctgtgtcgcgctcagcggctatgaccaggtgctccacgaagacgaaaccacgaaccgcatgcacgagtctctcatgctcttagactccatctgtaacaacaagttgttcatcgatacctccatcattctcttcctcaacaagaaagatctctttggcgagaagatcaagaagtcacccctgaccatctgctttcctgaatacacaggccccaatacctatgaagacgcagccgcctacatccaagcacaattttgaaagcaaaaaccgctcacccaacaaagaaatatattgtcacatgacttgtgccacagacacgaataacatccaggtggtgttcgacgccgtcaccgacatcatcattgccaacaacctccggggctgcggcttgtactgacctcttgtcctgtatagcaacctatttgactgcttcacggactctttgctgttgacgttgatctcctggtagcatgaccttttggcctttgtaagacacacagcctttctgtatcaagcccctgtctaacctacgaccccagagtgactgacggctgtgtatttctgtagaatgctgtagaatccggttttagttgagtcttcacatttagaatttgaaaggaaaaacagaacatttctcatgtgctttgtagcttaaaaaaaggaaaactcaccatttcatccatatttctttttcttgcaaaacaaacatacccatctgcaccgacgcctgcccccgtcccacctcgcggcgcagcccctggagctcctgctggggggcagggcccatctgccgcctggggctccggtgcggtgcactggtccgaggagtgtgctcaggccgggctttccagaaggccacaggccactgcaaaccctgctgcctgccggccgcccagacaccacagacgccacctggcggccctaagccactcccgccacacgctcactccaggttcgtatagaaaaagcacagctctcactggccagtagctgccaaaaagaacacccatcgtataaggaaatccagccccatagaaaacaatctgcccaccgaccccctttctaaggatagcctttgtaggggttttttggttcctttttttttttttaaagttttggttttaattttggccccgccgagtactatgtattacccccccccccccccaaaaataatttttcttatttttgggaaaaggggtggggttttttttctttggccgggtggaatttcgggcccgggttaacccttcttttggggggggcccccccccccccccttgcttttgtttgggggccctgggccccttttttaatggggggaggttggggctgcaaacaaaaaaaacaaaaaaaattttttaatccccccaggagggaaaaaaaa

SEQ ID NO: 61104 - DNA, 1919 bp, Homo sapiens
gggtgagcgggatcagtgtgtgcggaacgcaagcagccgagagcggagaggcgccgctgtagttaactcctccctgcccgccgcgccgaccctccccaggaacccccagggagccagcatgaagcgagctcaccccgagtacagctcctcggacagcgagctggacgagaccatcgaggtggagaaggagagtgcggacgagaatggaaacttgagttcggctctaggttccatgtccccaactacatcttcccagattttggccagaaaaagacggagaggaataattgagaagcgccgacgagaccggatcaataacagtttgtctgagctgagaaggctggtacccagtgcttttgagaagcagggatctgctaagctagaaaaagccgagatcctgcagatgaccgtggatcacctgaaaatgctgcatacggcaggagggaaaggttactttgacgcgcacgcccttgctatggactatcggagtttgggatttcgggaatgcctggcagaagttgcgcgttatctgagcatcattgaaggactagatgcctctgacccgcttcgagttcgactggtttcgcatctcaacaactacgcttcccagcgggaagccgcgagcggcgcccacgcgggccttcggacacattccctgggggaccgtcttcggacatcacccgcacatcgcgcacccgctgttgctgccccagaacggccacgggaacgcgggcaccacggcctcacccacggaaccgcaccaccagggcaggctgggctcggcacatccggaggcgcctgctttgcgagcgccccctagcggcagcctcggaccggtgctccctgtggtcacctccgcctccaaactgtcgccgcctctgctctcctcagtggcctccctgtcggccttccccttctctttcggctccttccacttactgtctcccaatgcactgagcccttcagcacccacgcaggctgcaaaccttggcaagccctatagaccttgggggacggagatcggagctttttaaagaactgatgtagaatgagggaggggaaagtttaaaatcccagctgggctggactgttgccaacatcaccttaaagtcgtcagtaaaagtaaaaaggaaaaaggtacactttcagataattttttttttaaagactaaaggtttgttggtttacttttatcttttttaatgttttttttcatcatgtcatgtattagcagtttttaaaaactagttgttaaattttgttcaagacattaaattgaaatagtgagtataagccaacactttgtgataggtttgtactgtgcctaatttactttgtaaaccagaatgattccgtttttgcctcaaaatttggggaatcttaacatttagtatttttggtctgtttttctccttgtatagttatggtctgtttttagaattaattttccaaaccactatgcttaatgttaacatgattctgtttgttaatattttgacagattaaggtgttgtataaataatattcttttggggggaggggaactatattgaattttatatttctgagcaaagcgttgacaaatcagatgatcagctttatccaagaaagaagactagtaaattgtctgcctcctatagcagaaaggtgaatgtacaaactgttggtggccctgaatccatctgaccagctgctggtatctgccaggactggcagttctgatttagttaggagagagccgctgataggttaggtctcatttggagtgttggtggaaaggaaactgaaggtaattgaatagaatacgcctgcatttaccagccccagcaacacaaagaatttttaatcacacggatctcaaattcacaaatgttaacatggataagtgatcatggtgtgcgagtggtcaattgagtagt

SEQ ID NO: 61105 - DNA, 2162 bp, Homo sapiens
ggccggaggaaaccaaccgagtgaaagagcgccagccgattctgtattagtatgccgagaacaagaaagaagaagatgaattggatgggaaaaggagaaaagagggggtgaacctggtgatcccatttgttccttcggctgataactccaacctctctgctgacggagatgactccttcattaacgcggactcagccatgccaagccctttcagtgagatctccatcagcagtgagctgcacactggctccattcccctggacgagagcagcagtgacatgctggtcattgtggatgacccagcctcctcagcccctcagtctcgagctaccaactctcccgcatccataacaggctccgtctcagataccgtgaatggaatttccattcaggaaatgccagctgcaggacgtggtcactcagcccgaagccgaggccgccccaaaggttcaggaagcacagccaaaggagcagggaagggccggagccgaaagtccacggcaggcagtgctgctgcaatggcaggagccaaagccggggctgcagcggcctctgcagctgcctatgccgcatacgggtacaacgtgtctaaaggaatctccgccagcagtcctctgcagacatcccttgttcggcctgctggccttgctgactttggaccttcaagcgcctcttctcctttgagttcccctttgagcaagggaaataatgttcctgggaatcccaagaacctccacatgaccagcagcctagccccagactctctggtccggaaacagggcaaaggcaccaacccctctggaggacggtaaccatctgggccctccgacttccttcaaccaaaccagggctagagtcctgacctgccagtggtctttggatggcttgccccgtgcagcatcttgcatcctgagtcagaagtggaaatgtccagcaggggaaggacaggcaggtggatggtgtgagcacttttatcatctgtgtctcatcaggagcatctggggtgcctgtaggaggaaggccacagggcatggatcagccccactgcatctcaagtgaactgtatagccaagtcttaaacctctcacggggcaagcctgacacagaccccctttagatgctcaggcatactgtttccatcccgattccactcttcggctctgacacgtcccttgcaaagtctccgcaggtgctgtgaagagccttccatggtagagatttctcttaagagtgtgatttctcatagggctagtaagggagattgtatacctgttgtccacagtcttcaggcagctccccaggtctctgaaccccagagtgtcatcattggagagagcagtgactgcgagagatggtggaggccgctaagcatggtagaggctagaggaagtctatccacaggcagttgtgttcccagcaattcctcccatcctgcatggttcacaccaagagaaccttcagatcctaccagcaaccgtagcaccttccacccaggggactcccagaagccagtaaagagaccaggagccacctcaatcagcaggacagcctcactgcccctcttgcagagtcccctttgcccatcctgaatgcacagtctccctgctcatgcccttcagtcccctgcttggctgtatgcactgtctatattgcactgagagaggaagggacagcaggagtgaggtgaagagggcggagagagggggcaggctcggcaccggccctcccagcccggccagcctgagcttgctgccctccagtagagacagaggggcagtgtttgcatgggaggtgtttctgcctgtccctgcctgatgtccctggtggagcaggtacctccgggcgggcaagcctctgatttgcacacctgaaaatcgcggaattgagtttcgatagattgatttttaaaacttttttggagtagggggtataggggaatcatttaatttaaatcattaagattcccctgctcaaacccagattcctgtgtacagatgctatttagagggaatcagaaaaatgccaagccttttctctttgaatgtgctatttttataactgaacttgtacatatgtataaagagagacacatcttccttttactaactggataaaaaaattttaaataaaatggagtgagataattttaggtaaaaaaaaaa

SEQ ID NO: 61106 - DNA, 769 bp, Homo sapiens
ttttttttttttccagtcgggttggagtttatttctgccagagcctggaggctgggagggtaaaggacactcctttagtcccagagggaagctccgaaccctcagagcaaccagaagggagggcagagcatgggcagcagcaggagtgagaggggtccccttgtcctgcccctttgcaagggttcaaggctggtggaggcctggggcttctgtcgctcaggagttcaggggtggacgcagaaatgggggaaggagagtggctacgtagagagtgagagcgagattcctaaaaagatgcacagagagaccctcagagaggccaagaaagatggtgagagggtagggaaggagagggagggagagagagagagagagagagaagcagagggaatgggttgcactggctgaggatggtggaggagccgtctcactcccttcctaatgtctatagatcaataacgagggaagaaaggaggacagggagctgatggaaacacagcttgccaactgtacccagtcccccaacaagcaaggtagctccagtccttgcctccctgcctgccccgctcctctgtgtttaggggtcatcctttgatgggaggttgcaggggacccaggtgggggtgataaatgccagagggctgcaccatttccaaagggcaagaagtcagagggcggggttcctgggacaggggcccgtggggtccagggaggaagggggctgggccccatctgttagagcatctggggacagggtagggctcgtgcc

SEQ ID NO: 61107 - DNA, 2081 bp, Homo sapiens
ttttttttttttggtgaacaagtacaaatttagcaattttaatcaatattcttgcagacaagtgtggatatgtatatgcatatatacatatatatatcaaaattgagaatttacaaataagatttgatacatttattctagcagtgggtaagtccatagagtaaatttcaagtaggatatatttattttctttggtggtgtttttaataattcctttctactgcatacaaagggacctgaagcttaaattcagttagttttggagaaatccaaaatgagaaaaacagaaagcatgtagcattccatgaagcaagaacagcgtgcatatgctattcctggaaatactgaagtgtccgaatttcatgcctaaaaagtctggaaatcacactgaatcagttgctggtttctgatgtctctgggatgtgctattacaaacaaacaaaaaaaagtagagaagcaaagttaacagcaaaactgaatcctgttcattgtccaggccaagaagtgggactgagttccagactgagatgaccagaatggccagtgtccatctgtgaccttcctggcacctagggcagcggggctgagcacgctggctgtctttgctcacagcccctagtgcgacttagttggtggggctgggcagggcaagcttgcagcatgacggtcctgtgattaccactttccagggatggagaccccacactcgtaccagcccacatagtagtagggggttccgaagccgatgttcccaaacctgacaggctcctgacgatactggcgatagtagccttgaatagtagggagggcttctacataggactgaggccctgttcttccatcaaggtgtgaatccacaaattggcaatggtcttcacctcttccccagctgtctccaatgctgtagaatgtatctttcaggttgtcactgaggtagattttatacctcagtgaattacaaagaacaactcccacgaactttcgataccacgtgcgcttcacatattgccgtccatggcagtccgtgtagctgggatcatgtttgaaagcgaatgggatccagataggctcaccgcctgggggcctcacaacaagcagaggattatctgattcggtgacaaatgagaccgaagggctgataggtccgtagccatgaggattttgtgcttgcactttaaaataatacctcgtgttgggctttaggttctcaatgggcaagtgagttactgatgaagcctgagtggaccacttgttcctgatgaagtcttcataggatgcactgtaaaccaagtaacctgtgaccacatctcctggggtggctttgtccccaatcccacaatgaacaaaatgaagtggcaaaccttcccacggccaacccacggtgaatgttgcggggagcatgctggggaggcagatcactcttcttcaggtcattggggatgatttcatccaggctgtccacttggaagtgatccagtgcatcagtcagagagcacggggctgatgggtctttatttaggtacgtcacgtaaggagcaacaaatcgtttccttccagccagatcaaattcttcttcaggaaaggaactgatggcgccttcctctgggatcaccctcggtgtggtagcagtggtcgaaggctcagtggtggttggtggccttgacgtctcaaattcataatcttcatcatatataacgtaggcctcttccgtaggtactgcagtgtcagtctccaagcctgagaactcatcttcttcagcgtagcactctgggatcccattggagctcattatcaggttgccatcatcgtcgtgccgttccaaggtcccagggggacaggtggggatgggagtggtgggtttgggggtggtggtggtggttgtccgcgtagtggttcggactgtggttgttggacgcctggtggtcgtgcggcgggtggtggcagtggtgggcctcggggttgtagtggtaggcaggggcgtcgtagtagtggtgggctgcatggtagtggtagggggatgggtggtttttttgatgacctccaagcccaccagcggctttcctcgccatcataaccgaaaa

SEQ ID NO: 61108 - DNA, 1722 bp, Homo sapiens
ggtttttgttttttgagccgcaccccgcggaggcgaggaagcagcagccgcagcacagcagcagctccaatggcgttaaaatggagaatgatgaatcagcaaaagaagagaaatctgacttaaaggaaaaatctacaggaagtaagaaggccaatagatttcatccttattcaaaagacaagaattcgggcactggagaaaagaagggtccaaatcgtaacagagttttcattagcaacatcccatatgacatgaaatggcaagctattaaagatctaatgagagagaaagttggtgaggttacatacgtggagctctttaaggatgcggaaggaaaatcaaggggttgtggtgtggttgaattcaaagatgaagaatttgtaaagaaagccctagaaactatgaacaaatatgatcttagtggaagaccccttaatattaaagaggatcctgatggagaaaatgctcgtagggcattgcagcgaacaggaggatcatttccaggaggacacgtccctgatatgggatcagggttgatgaatttaccaccttccatactcaataatccaaacattcctcctgaagtcatcagtaatttgcaggccggtagacttggttccacaatttttgttgccaatcttgacttcaaagttggttggaagaagctaaaggaagtgttcagcatagctggaactgtgaagcgggcagatattaaagaagacaaagatggcaagagcagaggaatgggcactgtcacttttgagcaagcaattgaagcagttcaagcaatttctatgttcaatgggcagtttttatttgatagacctatgcatgtgaaaatggatgacaagtctgttcctcatgaagagtaccgttcacctgatggtaaaacaccacaattaccacgtggtcttggaggcattgggatgggacttggtccgggtggacagcctattagtgccagccagttgaacataggtggagtaatgggaaatttaggtccaggtggtatgggaatggatggtccaggttttggaggaatgaatagaattggaggaggaatagggtttggtggtctggaagcaatgaatagcatgggaggatttggaggagttggccgaatgggagagctgtaccgtggtgcgatgactagtagcatggagcgagattctggacatcagtgatattggattaagtcgaggctttggcgattcctttggtagacttggcagtgcaatgattggagggattacaggaagaataggatcttctaacatgggtccagtaggatctggaataagtggtggaatgggtagcatgaacagtgtgactggaggaatggggatgggactggaccggatgagttccagctttgatagaatgggaccaggtataggagctatactggaaaggagcatcgatatggatcgaggatttttatcgggtccaatgggaagcggaatgagagagagaataggctccaaaggcaaccagatatttgtcagaaatctaccttttgacttgacttggcagaaactaaaagagaaattcagtcagtgtggtcatgtaatgtttgcagaaataaaaatggagaatggaaagtcaaaaggctgtggaacagtcagatttgactccccagaatcagctgaaaaagcctgcagaataatgaatggcataaaaatcagtggcagagaaattgatgttcgcttggatcgtaatgca

SEQ ID NO: 61109 - DNA, 3547 bp, Homo sapiens
  misc_feature (1)...(3547): n = a,t,c or g
gcggccgcgtcgccgctgaggatgtcccgaaaggggccgcgagcggaggtgtgtgcggactgcagcgccccggaccctggctgggcatccatcagcaggggtgtgctggtgtgtgacgagtgctgcagcgtgcaccggagcctgggacgccacatctccattgtcaagcaccttcgccacagcgcctggcctcccacgctgctgcagatggtgcacacgcttgccagcaacggggccaactccatctgggagcactccctgctggaccccgcacaagtgcagagcgggccggcgttaaagcaaacccccaaggacaaagttccaccccatcaagtcagagttcatcagggccaagtaccagatgctggcatttgtgcacaagcttccctgccgggacgatgatggagtcaccgccaaagacctcagcaagcaactacactcgagcgtgcggacaggcaacctggagacatgtctgcgcctgctctccctgggtgcccaggccaacttcttccacccagagaagggcaccacacctctgcacgtggctgccaaggcaggacagacactgcaggccgagctgcttgtagtgtatggggctgaccctggctcccctgatgttaatggccgcacacccattgactatgccaggcaggcggggcaccatgagctggcggaaaggctggttgagtgccaatatgagctcactgaccggctggccttctacctctgtggacgcaagccggatcacaagaatgggcattacatcatcccacagatggctgacagccttgacttatccgaattggccaaagctgctaagaagaagctgcaggcgctcagcaaccggctttttgaggaactcgccatggacgtgtatgacgaggtggatcgaagagaaaatgatgcagtgtggctggctacccaaaaccacagcactctggtgacagagcgcagtgctgtgcccttcctgcctgttaacccggaatactcagccacgcggaatcaggggcgacaaaagctggcccgctttaatgcccgagagtttgccaccttgatcatcgacattctcagtgaggccaagcggagacagcagggcaagagcctgagcagccccacagacaacctcgagctgtctctgcggagccagagtgacctcgacgaccaacacgactacgacagcgtggcctctgacgaggacacagaccaggagcccctgcgcagcaccggcgccactcggagcaaccgggcccggagcatggactcctcggacttgtctgacggggctgtgacgctgcaggagtacctggagctgaagaaggccctggctacatcggaggcaaaggtgcagcagctcatgaaggtcaacagtagcctgagcgacgagctccggaggctgcagcgagagatccacaagctgcaggcggagaacctgcagctccggcagcctccagggccggtgcccacacctccactccccagtgaacgggcggaacacacacccatggcgccaggcgggagcacacaccgcagggatcgccaggccttttccatgtatgaacctggctctgccctgaagccctttgggggcccccctggggacgagctcactacgcggctgcagcctttccacagcactgagctagaggacgacgccatctattcagtgcacgtccctgctggcctttaccggatccggaaaggggtgtctgcctcagctgtgcccttcactccctcctccccgctgctgtcctgctcccaggagggaagccgccacacgagcaagctttcccgccacggcagtggagccgacagtgactatgagaacacgcaaagtggggacccactgctggggctggaagggaagaggtttctagagctgggcaaagaggaagacttccacccagagctggaaagcctggatggagacctagatcctgggcttcccagcacagaggatgtcatcttgaagacagagcaggtcaccaagaacattcaggaactgttgcgggcagcccaggagttcaagcatgacagcttcgtgccctgctcagagaagatccatttggctgtgaccgagatggcctccctcttcccaaagaggccagccctggagccagtgcggagctcactgcggctgctcaacgccagcgcctaccggctgcagagtgagtgccggaagacagtgcccccagagcccggcgccccagtggacttccagctgctgactcagcaggtgatccagtgcgcctatgacatcgccaaggctgccaagcagctggtcaccatcaccacccgagagaagaagcagtgacctctctccccacaccctcacctgcaccctaggacctcactggccataggagctgggccactccagacattaatccccaccccaacagagccactggcacaagtgcccttagtgctgccacactccctggcagccaggtgccctggtgcccacccctgtcgagcccctaaggatggggaggtgggggggcaggagcttctgtcccccacattccatgcacctcccctctgtatatagcatctcccccctcctagtgagcaggggcctgcaaggcatcactcccagcccctcgccttctagggcaccctcagcaaaggggcaggtggggacactccaagtggggcagctctccgtacatgcgccccacccccatgagccagttcagccctactgggggctgagcgggggcatcccctcctttgtacatagtctccatggatgtccctgccctgtagccaccagccccttgctgctctccctttaatgccatatggcccctgcctagggcacaggccccaacctgtgtgctggggtccccagcagcaaacactggaaagtctgttttttttttttctttcttcttccccaccccttaattttaactttgtggtaactgagtgcccccgcgtgcctgcgtgttgagtgtgtggggcggcagtgcgtttccggaggcctggtccatctggagttttgaggggtgaggggaccagagcagtgggaccagcatggggatcagcttcccttccccacctggagccagggactgtccgggtagccagttttggtcctgccagctgcctccctgatccctccccactctcgccccttctctatgaacttaaatcaaaaaccacttccctccatctcctcctgctcctgcgtggagggggaatgtgtgctggctagggtggaggactgagcacctgagcctggggctggctccccggggtccccgactcagctggtggctgtggagctgagtcccctccccgtaacctctgcaaggccagcacccaccatcactacctgcacctgctgtggtcccaccctctggaggcctgggaacctggctgcagcctgggaaggctggagaggcagacggtgggancccaccagctctctccccatcccgcttcttccctgggggccagggccctacctgtgtggtggtgggtgggctgtcaagacgtgtcatgtacatttgtatcaaaaataaagaagtggccatgaaaaaaa

SEQ ID NO: 61110 - DNA, 2326 bp, Homo sapiens
actaacctatgaggattttttaatttgagagccctcaaatgggccagtggtctagtcagcattgggaaatgaagatgatgagatcctgtaactcggaaaagatatcagaggaatgttcgtggcatcagagagaaagatgagagctcaccaggtgctcaccttcctcctgctcttcgtgatcacctcggtggcctctgaaaacgccagcacatcccgaggctgtgggcttggacctcctccactcagtacgtgtccctgtgcgacctgggacgccatctggggcattgtggtggaggcggtggccggggcgggcgccctgatcacactgctcctgatgctcatccatcactggtgcggattgaccttaatcaaggagaaggagaagaagagccctgtgggcctccactttctgttcctcctggggaccctgggcctctttgggctgacgtttgccttcatcatccaggaggacgagaccatctgctctgtccgccgcttcctctggggcgccctctttgcgctctgcttctcctgcctgctgagccaggcatggcgcgtgcggaggctggtgcggcatggcacgggccccgcgggctggcagctggtgggcctggcgctgtgcctgatgctggtgcaagtcatcatcgctgtggagtggctggtgctcaccgtgctgcgtgacacaaggccagcctgcgcctacgagcccatggactttgtgatggccctcatctacgacatggtactgcttgtggtcaccctggggctggccctcttcactctgtgcggcaagttcaagaggtggaagctgaacggggccttcctcctcatcacagccttcctctctgtgctcatctgggtggcctggatgaccatgtacctcttcggcaatgtcaagctgcagcagggggatgcctggaacgaccccaccttggccatcacgctggcggccagcggctgggtcttcgtcatcttccacgccatccctgagatccactgcacccttctgccagccctgcaggagaacacgcccaactacttcgacacgtcgcagcccaggatgcgggagacggccttcgaggaggacgtgcagctgccgcgggcctatatggagaacaaggccttctccatggatgaacacaatgcagctctccgaacagcaggatttcccaacggcagcttgggaaaaagacccagtggcagcttggggaaaagacccagcgctccgtttagaagcaacgtgtatcagccaactgagatggccgtcgtgctcaacggtgggaccatcccaactgctccgccaagtcacacaggaagacacctttggtgaaagactttaagttccagagaatcagaatttctcttaccgatttgcctccctggctgtgtctttcttgagggagaaatcggtaacagttgccgaaccaggccgcctcacagccaggaaatttggaaatcctagccaaggggatttcgtgtaaatgtgaacactgacgaactgaaaagctaacaccgactgcccgcccctcccctgccacacacacagacacgtaataccagaccaacctcaatccccgcaaactaaagcaaagctaattgcaaatagtattaggctcactggaaaatgtggctgggaagactgtttcatcctctgggggtagaacagaaccaaattcacagctggtgggccagactggtgttggttggaggtggggggctcccacttcttatcacctctccccagcaagtgctggaaccccaggtagcctcttggagatgaccgttgcgttgaggacaaatggggactttgccaccggcttgcctggtggtttgcacatttcaggggggtcaggagagttaaggaggttgtgggtgggattccaaggtgaggcccaactgaatcgtggggtgagctttatagccagtagaggtggagggaccctggcatgtgccaaagaagaggccctctgggtgatgaagtgaccatcacatttggaaagtgatcaaccactgttccttctatggggctcttgctctagtgtctatggtgagaacacaggccccgccccttcccttgtagagccatagaaatattctggcttggggcagcagtcccttcttcccttgatcatctcgccctgttcctacacttacgggtgtatctccaaatcctcttcccaaatttaattcccttattcattttcaaaagctccaatgggggtctcaagcttgaaaagccccctccgggaagggcagggttgggaaggcaggcaccacgggcaaggtttttcccgcgatgatgtcacctagcagggcttcaggggtt

SEQ ID NO: 61111 - DNA, 629 bp, Homo sapiens
cctctcaagcgtttcagggcttttgtggatcgacccagcacccctgccctgcactcctaggaaacacacgaagagcacacacaacggtattctcgtcgtgtatttgtgatctcctctaggcaggcttgacagccccacccactccccaatgtcactgctaccatccaccacggacatttgagtcctgaacttgtcatgctcagggaagtcctgtgatgtgccttgtccttctcccaggtgctcaccccctaacacaggtgcagatgttcacaaacagccacattctgccgtagctgtctccaatctgatgtcacccctgccttggcctgaagccctccagctactagtgctgcccaaagacccctcaaggggtagtttgttctcgcattccgccccatctcgctttccagcacacagtagatgttcaataaactgttgatcagattctgaggtctgtttgtgtttaatcagacaatatgcaaagtatttacaaccaattctggatacccccccaccccccgcaagtctgggccttggaatttcggagccccaggcccggcccagagccaggggtcccccaggcctctgcatagtcatctgaaatctacaaaacactgttaaaaaaaaaa

SEQ ID NO: 61112 - DNA, 3270 bp, Homo sapiens
aagaacacctttagatgaccacgccagcttggcacgaggggccccggctctggcgtccctggctgccaagcctgaggcccgcagtcctactcccgccgagacccgccgctccggtcctgccccgaactgcccacggccggcagcgcttccaggccctgaaaaaaactctcttcctgtgtctggccagaggtatagagagagacaggttcaactctaaggcctgaaaaggaacaaggcccaccggaagcaatggccactgtccctggcctccagcccctgccaaccttggagcaggacctggaacaggaagagatcctgattgtgaaggtggaggaggacttctgcttggaagaggagccctccgtggagacggaggaccccagccctgagactttccgccagctcttccggctcttctgctaccaggaggtggctgggccccgggaggccctgagccgcctctgggagctgtgctgccgctggctgcggccggagctgcgcaccaaggagcagatcctggagctgctggtgctggagcagttcctgactgtgctgccgggggagatccaggctcgggtacgcgagcagcagccggagagcggtgaggaggccgtggtcctcgtggaagggctgcagcggaagcccaggaaacacaggcagcggggctcagagctgctttctgatgacgaggtgcccctcgggatagggggacagttcttaaaacaccaggcagaggctcagccagaggatctgtccctggaggaagaggctcgattctccagccagcagcccccagcccagctgagccacaggccacagaggggcccgctgttgtggccagagagaggccctccagctccccggcatcaggagatggcgtcagcctcgcccttcctttcggcctggtcccaggtgcccgtgaacttggaggacgtggctgtatacctttctggggaggagccaagatgcatggacccagctcagcgggacgcgccgctggagaatgaaggacctggggatccagttggaggacggcggttgattggcagggaggatgccccgttgagaatggagtggtaccgagtgctctcggcacgatgccaggggcctggccacccgctcccaggtcagaggccagccccagtcaggggcttggtcaggcctgatcagccaagaggcggccccccaccaggaagacgggcttcccatggggctgacaagccgtacacctgccccgaatgtggcaaaggcttcagcaagacgtcccacttgaccaagcaccagcgcacacacacgggcgagcggccttacaagtgcctagtctgtgggaagggctttagcgaccgctccaacttcagcacgcaccagagggtgcacacaggcgagaagccctacccgtgccccgagtgtgggaagcgcttcagccagagctccagcctggtcatccaccgcaggacacacagcggggagcggccctatgcctgcacccagtgcgggaagcgcttcaacaacagctcgcacttcagcgcccaccgccggacgcacacaggtgagaagccctacacctgcccggcctgtggccggggcttccgccggggcaccgacctgcacaagcaccagcggacccacatgggggcaggctccttgccgacgctccagccggtggctcctggaggccccggtgcaaaagcctgatcaccaggcctgaaactccctttccaggactctcatccctgggcacagaattcaggaaactgctagacagcctggtccgaaagcattgccagctgcccgtttcctcccatggcccagtatgaggccagcaggggacatttgggatgcccaggccgcagaggaagctgggcactgggtgcagaacaagggcaaggacaggctctgagtgtccagtggcagccagaacaggtgacacagagcaggggcttcagccacagagacacactcaggaggccagaagccgacactcaaggtgttcgtggggctggctcctgaagggcctgggagggtccatcagctgcctccagcatccagtggctgctggcatacagcctcatccccacgtcccaacccctctcctgtgtgtctgtgaccctgtgcgctgtctctgtgtgtaccccccacctgctcccccccccttttttttttgagacggggccttgctgtgtcccccaggcgggaatacagggccatgatcatagctcactgcagccttgaatccctgggctcaagggttcctcctgcctcatcctcctgagtagctggggttacaggtgtgtgccgccatgcccagtctcttttttggtagggccaccactcactgggtttagggttccccaatacactgtgacctcatcttaactaattatatcatcaaaacccgtgtttccaaataaggtcacattctgaggtctgggtgcacatgaatttgagggacccctcgtctgctgcagggagccctgctgtaccccagccttcccaggacgtggtctccagcttcttcatcctgccagagtttccaaatggagcccggggctctgcagcattccagtcccctttgcagatccatagctgctctgcagggcggaagacacctggggcgggaaagcacccctgagttccatcttcctgacatgtcgcctgggatgtgacgggcctgacatctccccagggccggggcccagggctgtctttgctcctgggccccttagtgtctggaatgtgggcctttccacggttgccccactttgtctttctaaggtaagaagccttcaccttccagcttttgtctggcctgtgctgcgtgggagccactggtctgtgcacatccacggtgggtgagtggccaagacaagcagtgtgatagagtccttggtgggtttagtcatctcggaagtcgtagggcagctatggaaaccactgggttctggaacgttccagccaggcagtggttgttcctcataggtaggtggccttggccttcatcccagcctgggatgctccattgcatttgtcacctagtcactgtatatacgtgcacatttgaccttttggcacagcccaggttccaggtgcgtgacctgccctttttctcattcccttaactgacattatttagtgtcagaggccgagcacagtggctcccacctataatcctagcactttgggaggccaacgcgggtggattgcttgagcccaggagttcaagagcagcctgggcaatatagaaagacatcttccctaccaaaaaaaaaa

SEQ ID NO: 61113 - DNA, 4454 bp, Homo sapiens
ttttttttttttagcacaaagcattttaggtttatttaaataaaaattataatttatacaatactttttctttaaacaaacaaagttttcttaaaaaaatgttacaggagaatttttttcatcggttcttaatacagtacaatccttttgttgaacaaaagtcacactggcaatgattatttacagatccaaaatagactcaggcttcagacataaaaaatttaacattcgtctagttcagtgattagtcacagaaattaaacatctgcccagatgtacacaatttggtaaaaactacagcttctctccacggggagcccagagcccgtgccgatccgcgctccgctcccgaggacttccagggaggggcctgtgctggcagcagagccagtcggtggccctcccccgaccccccgctccccgaatgtggccctccctgggggcttcggccacacctggcacgtggtcagttttcatctccctttctccacaaaagggactcgaactaaaccacccgacgctggtaaagccccatctgccccagggacccctcccgctgtgtttggggactgaatcccagcacctaggaagaggcgctcattggccccgaggccccggacccatccttgggcactgccgggccctggggagagaggtgtggccattgtctgcgggcactgcctctgcagccgcccctgggggtgggtcagtgcccaccctgtgttgcctcaggcgccaaggtggggttcactgggatatgtccccctcccctggtgcaccaagagagccagtcccctacaggagccagacccacggctcagagcgggttctgtccccattcgggaaaggccgccgtgtggtcatcctgacgccaacgtccgcgcagtccagagccacgggggctccgctccaccgcctgggataggacatgtgctgaatctggtgatcggcgcagctccccccaaagcacccccggcaccagcgtgtgactctgcggcccctcgtgaagggggtgaaaccagcccatgccgccggatccctcacccacaccagcaaatgaggatcggagcaaagataaaaattacatctgaaaaaggatacaaaaataagaaaaccagcttgctcgctgtaaaaaatagaatcttctgtttcttcaaaaaacaacaatctcaacgacacccaagggactcaggacaagctgagggagctgcgggatccgccccagcagacacgcaggcccgcggggtggccacctccttccaggaggcccaagccgcctttccctcccttcagcccagcgcaggcggccccagcagaccaggcctgcgggcgctccctccacaaatgccaccttgttcccgggaagcccaggcttccctggggcagggcgggggctgggggggtctgtgcccggaccggcaccggctaggcacgcgggggagggaacgctgtcgcatgtcggctgcaggcagtgcaggcccaggcctctgggctcggctcacggttgctccctaaagcacaggggctgccagagcctctcggatggcccaaaggcggctgcagcctgggccaccatggtcccggaacactcctccccacttcctcccccaaccaacccaggcaaccgcagcctgggggccatgtgccagacatgccacagtgctcggagcacctccaacagccttcgcggatgttctcctgggccttccaaagagcaaagtgtgagaaagatgtgcttttacctgcaccatcctgtgcccttactggtccccagctacagacctcctggccggcgtgtcaggccgagagcagcaggcaggcccttacagacacggtgctgagcgccctggaggccagcaaggaaggtgccaccaaagacactgagggcaggtgaggggtgggcccttctcaccctctctgttcccgtggagcgagtgtggagcgcaggcagggtcactgcgcccggccccagcccggcaccaagggcaaatgccacaggagggtctcatgtaagaggaaggagggccgccaggcccgtttctcggtggttggtgaaaggcccccatgtccctccttgacgacatctttctgtccccaggaggaagggccccgcactcttcagctatggctttggtggtggacgagcttctggcctctggagagcgggacacaaggttgcgagaacctcttggggtggctggagaggtttctctgtccaggctggaacggagaagggcagggccaggggtcctgtgtgtcttctccacgggcccccgagggcctctgccccctcccccagtctgcgggtggccctcagaggcacctgacgtgccctgtgggagaggggcacccccgtccctgtgagccctggccccttcttggtcgataaaacgcagaggtcaacacaatagaaccacaggtccaggagaattattgcaaaagctcatgaggatgtccaattgtttccactaccaaatcgtaaaaaaaaaaaaagaaaaagaaaaagaaaaagaaaattccagcaacgtcctgggcaagtcaatactagctgtccccgccagacgctgccgctgaggtgatcttgatgtactggctgagaatggtctcgaaggcctcatccctgtgcaccatggcaccaaacacgagcggtttctgggtggatggcgtcgacacggcaatccccatgcctgagcctgggaggacagacaggaccttgtacttctggatgtccgtgatgtccactagcttgatgactttgttcctctttgaggacccagatttggagctttcgaagcacaagtaattctgccgtgacgtagagcaccccgttcctgatgtagtccgtgggcatcttccggtccctgttgatgaggcagcagcgccagccattctcgcacaccgccagcggacgctcgttttctgtcagattgaagatctcgtggaaattgcccttcttggtgctgtggaagcgaccggcgtcctcctctttacccaggccggccggtgcgctgggtacgtagctccgtgacgaggtcgtctgcagcctgcgtgagactgcggcgctggagcgctccttgagctgcgggtcggtggggagactcctccagatgatatagggcgtgtcgtacttggcgcgcagcctcgggcagcgtttaaagatgaaatcaatgaggaagaacttgataccagcatagagtcccacggcaagccccaccaggcggtaggggaagaagcaggaggccaggaaggcagcccagagcgccacatacagcttctgtgtgatctccggctggacccacatgaacaagttcttgatcttctccaggatgtcagccatcttcccgaaaaggttctgggctttctgggcgacgtccagcaccagctggaacttctcagacacagtcaggtcttcctttggaggttccacgggctcagacacttcgggcacgatgctccactgtatccgccaccccctggcgatgaggtaattgagggataacctcagaattgctagaaataagaacaatgggatggcccagccatgccacacggcattcatgtacacggtgaaggcaatggcagacgtgtagacggagtaccagtcggataaggcagagaggttcttcacaaagttagtgaccggcttggcaccgcgcttgagccgtctcatattttcagttaacctgcgggcgctcaggggttcctctgtctccacagtgttctcctcgggctggaaccggaagtcctccacgtactccccgaaccgctcgtagaaccacttctgcaggcgcgaggacagcccctggctccggcgctctgctccattgctggcctgggcctgcccttttgggggctgctgagccatctgctcctcggttctggccttcagcacctcctgcaccttctgctccagctccatccgccgctgccgctcgcggtccagctcctgccgcagcatctccgcgttggtttcttctcgcagcttccggagctcctcctgtaagaaatgtttttccaataaggcaatttccaggtgacctttgatctcattcagtcgatcaaactctgtccggttaaagtcctggactcctgtggccatgatgagggtccctggaccagcagggtccctcagctcctcgctgtcccggggcgaggtccgcggtaccttcagggggatttcgtcgctgcattcggtgtccgaggcatttggagactccgctagatcgaggaagtcatctctcttgtgacctctgaacctgattttgtccaacctccttagcatgttcagcactgaggtcctctgcttcaccctaacatgacgctcgggttccctccgtctgtctcagatacatccagaaacactctttcactgtggctccttcaggtcctggcccagaaccagaatgtgcttcgaggacccaccaaccatagcctccaagccaccccacaccagc

SEQ ID NO: 61114 - DNA, 1839 bp, Homo sapiens
tttcgtcgcgctccgagcggctgtcggcgtgcgctatcgccccgccctggttagtgtctagccggccggcgaggcctgcgcagttgcagcggccggggaagatggtggaggacggcgcggaggagctggaggatctggtgcacttctccgtgtctgagttgcctagtcgcggctacggcgtcatggaggagatccggcggcagggcaagctgtgcgacgtgaccctcaagattggggaccacaaattcagtgcccaccggattgtcttagcagcctcgatcccgtatttccatgctatgtttacaaatgacatgatggagtgcaagcaggatgagattgtaatgcaaggaatggacccaagtgccctggaggctctgatcaactttgcctacaacggcaaccttgccattgaccagcaaaatgtccagtcattgctgatgggggcgagcttcctgcagctgcagagcatcaaagacgcctgctgcacattccttcgagaacggcttcacccaaaaaactgcctgggtgtgcgccagtttgctgagacaatgatgtgtgctgtgctgtacgacgctgccaacagcttcatccaccagcactttgtggaggtgtccatgtcagaagagttcctggccctgcccttggaagacgtgcttgagctggtgtctcgggatgagctgaatgtcaaatctgaggagcaggtctttgaagctgcattggcctgggtcagatacgaccgggagcaaaggggtacattcctgctgtaacctccagtccaatatccgcctgctcttctgtcggccccagttcctttcagacagagtacagcaggatgacctggtgcgttgctgccacaaatgcagggacctggtagacgaagcaaaggactacctcctcatgccagagcgccggccccacctgccagctttcagaacccggccacgctgctgcacatccatcgctggacttatctacgctgtagggggcctcaactcagcaggtgattccctgaatgtggtggaagtgttcgaccccattgccaattgctgggagagatgccgtcccatgacaacagcccgcagccgcgttggcgtggctgtggtgaacgggcttctctatgccatcggaggatatgacggccagctacggctgagcactgtgcaggcctacaacacggagacagacacatggaccagagtggggagcatgaatagcaagagaagtgccatggggacagtcgtgctggatgggcagatctacgtctgtgggggctacgatggcaactcttccctcagctccgtggagacctactcacctgagacggacaaatggacagtggtgacctcgatgagctcgaatcgcagtgctgctcggggttacagtctttgagggcaggatatatgtgtcaggcggccatgatggtttgcagatcttcagcagtgtggaacactacaaccaccacacagccacctggcaccctgcagctggcatgctcaacaagcgctgccggcacggagccgcctccctggggagcaagatgtttgtctgcgggggctacgatggctctggcttcctcagcattgccgagatgtacagctctgtgggcagaccagtggtgcctgattgtccccatggcacacgcgcagggagccgggtctccctgggtgggccagctgtggggcgcctctacgctgtttggggggttacgacgggacagtcaaacctaaagctcagtgggagatgtattgaccccagagacagactgctggacattcatgggcccccatggcgtgccatgagggaggggtcggtgtgggctgcatccctctcctcaccatc

SEQ ID NO: 61115 - DNA, 2542 bp, Homo sapiens
acgcggggccgggcggctgagcgttcgcggggccgaggccatggctttctgggcggggggttcgcccagcgtcgtggactatttccctagcgaggacttctaccgctgcggctactgcaagaacgagtcgggcagccgctccaatggcatgtgggcacattccatgacagtacaggattatcaggatctcatagaccgaggatggcgaagaagtggaaaatatgtgtacaaacctgtcatgaatcaaacatgttgtcctcagtacacaataaggtgccgacctttacaatttcagccttcaaaatctcacaagaaggttttgaaaaaaatgttgaaatttctggctaaaggggaggttcccaaaggaagttgtgaaggatgagcccatggattccacaatggatgatgctgttgcgggtgactttgcattgataaataaactggatatacagtgtgatcttaaaacactcagtgatgacatcaaagagagtttagagagtgaaggaaaaaattcaaagaaagaagaacctcaggaattacttcagtcacaagatttcgtaggagagaagttgggctctggtgaaccgtcacattcagttaaagttcacacagttcctaagccaggcaaaggggctgatttgagtaagcctccatgtcgaaaagcaaaggaaatccggaaagaaaggaaaaggttaaaactaatgcagcagaacccagctggagaacttgagggtttccaggctcaaggtcacccaccatctttgtttccaccaaaggctaaatccaaccagccaaaatcactcgaagatttaatttttgagtctttaccagagaatgcatcacacaagttagaggtgagggtggtgagatcatctccaccaagttcgcagttcaaagccacacttctggagtcttaccaggtctataaacgttaccagatggttattcacaagaacccacctgatacgccaaccgaaagccagttcacaagattcctttgcagttcacccttggaggcagagactccccctaatgggccagattgtggctatggctcctttcaccagcagtactggcttgacggaaagatcattgctgtgggggtgattgacatcctcccaaactgtgtatcatctgtgtatttgtactacgatcctgattattcgtttttgtctttgggcgtctactctgcactacgagaaattgcttttactaggcagcttcatgagaaaacttctcaactcagctattattatatgggtttctacattcattcatgtcccaagatgaaatataagggtcagtatagaccttctgatttgctgtgccctgagacatatgtttgggtacccattgagcaatgcctgccttcacttgaaaactccaagtactgccgtttcaaccaggaccccgaagcagtggatgaggatcgcagtacggaacctgaccgattgcaggtgtttcacaagagagccatcatgccttacggtgtttataagaaacagcagaaagacccaagtgaggaggctgctgttctgcagtacgccagcctggtggggcagaagtgctccgagcggatgctgctgttcagaaactgacctgttcgcctctgccgggaagttcctgtgttgtgctgatgatttgtgccaggatacatattcagtacctgtggggaaataactgtcaccacccacaaattagacatttttattttgactatctatggcttttaaaaaatattttgtggcaatgtatctgtgagaatctcatagttaatataaagattttaaaactgcattatgacctagcccccataattgggatttatcattttggaggattctttctagagcaagatatgctcaaattctcctgtttgtattttgtaaaatgaagaagtgaatctaagtaacttaatcacagttgtgcattttttttggttctgttagagaaattaaaacagactgtttcctcaggcccattttaaactgaacttatgctaggaaaccttaagtatggggaaggtagaaagttcatttcatcacttagaaaatatgtcttctcaagaacaaaactgtgctgttacaactcagtgttcaatgtgaaattgctgccaaatgttatgtagtttaatagagaacttgaaaaaataaaacattaaaatggagcttgtgttagcatcaggtatccatttgttcaggacagtcctgttcatgtctgttgtcttggcataattttttcccctagaatatagtactcccttttactctaaaaaatatcccagtttggacaataaaatacataattactctagttatattatttgctttacttctaaaaatgtaagaaattgaatttttttaaagaaaaatgttggttcctgccttgatctaagtctcatccaaaggaaataaatagtcactagttttttatcttacaactcaggacatttgtctttggttattaatggaaattaatatgtgattactttcatagttatgccacaaatcacattgaagaaggaatcattccgacctctgtt

SEQ ID NO: 61116 - DNA, 3152 bp, Homo sapiens
ttttttttttttgccacacacagcactgggtggacttttattttaaagtcaaaggcacagcctggctgggctgaggcagtgaccatggatgcccagcccagacccccaaggccccacccccagccaggagtagctgtgccaaagaggaaggggtgggtgagaagatggcctcctcttttaggagccacctatctccttccttagccccaacaggggagaagcagatgacataaagtgaggcagaaatgcttcagagggtcccccagggcctctccttcagtacccccaacacgggtctttggtggacgtaattgcacagacagtccataaagtgacagttgaggggtgcccctcccaggaacggggcctcaggggagaacagggtagggggtcccagtttaggagttagcactcctaactcagtgcttagaagtgggggaggggctctttcctgttggagcagtccccctggaggggccttctgcccagaagaggaaaggacagtcccttggggatcaggtcagccgcaggcagaggcctccgggagtgagccgggctcccaggtcacagcccctatgagggaagacataaaaaattctctgcttataaaaatacttctgctctgtctgggagtggggtggggtaggagaggaaaggacagtcccttggggattctggtcagccgcaggcagaggcctccgggagtgagccgggctcccaggtcacagcccctatgagggaagggggtcacagtggtggggattaggaggggggcagggggccgttggctcggcggggggcccctttggaggcgacgggggctcggcccgggttggctggtgcaggggagccccggcgggaggcggtggcgctccgcagcttctgcttccgccgcttggccaggggtgcattctccacgctcttcaggaagaagccctcccgcttgccccggttgaatgccatgaaggtggcgttgagacccgagcgcactgcgggcccagaggactcgagcacgtcgggcgtccggagcgggggcgaggagcgcgcgctgccgtcctgcagccacgagctgccccgcagtccctcgagtttcagccgcttggcggggtccacggtcaggagccctcggaccagctccttggcttcctcggatacaccctgccaggcctccccgtcaagggagaagcgcccctcgcggattttgcacatgatctcggccgcctggctctgcccgccctggccagaggccccctggaagcggacctgccccgacagcatcatggtacagaatgacgcgcaggctccagaggtcgcaggactcgtcgtatcgctgctgcgccagcagctcgggggcagcgtactgcagcgtgaagcagggcgtctgcatgggcaccccgggactctgcggccggaaccgcggcgagacccgaagtcgatgattttcaccggggccccggctgtgtcgtcggcgtacacgatgttctccggcttgaggtcgcggtgcaccacgcccgcctcctcgtgcatgaagctcacggccgacacgaggctgcgcaggatctggcttgcttccgactcgctgaagtgccgcttcttggcgaatgtgctccagcagctccccgccccgcagcagctccaggaccaggtacgtgtgcagctggtcgtgatgcacctcgtgcagattcaccacgttggggtgtgactggcacaggcgcagggcagccacttcgcgctgcgtgttcgcctccagcctgcgactgaggatcttgactgcgaactcctggccgctctggcgctggcggcagcggcgacacacagaaaagctgccctggcccagcgcaggctcccgcaggtccagctcgtactgctggaagaagggcgagtcctgcatcatagcgctcctggccaccgctgcccgacctggccggtctccagcaccaggcgcttccagcccatcggtcatcaccgcgttgttgtggtcaaagagaatggagggtgccacaaaggagtatccctgaaagattcgggggtccccaggtgggggtctgtccagggggtgagtagacaggctccagccgagtgaattcctccgcaaagtttgcccacatccagctctgagcggatttggggccggaatggggctggaatcttcctggcagccagagccacccaatcgaggccctggaagaagggatggttccggacttcttgtgccccctggggccccgcgcccaatcgcttcttaggatccttacaaagcagccgctgcagcaggtcctgcgccacgggcccgatccgaggggggaagggaggggagcacttcaggatccgtcgagacacctcagcctgcgtgttcctctcgccctccagggtgaagggcgaggcccccgtcagcagctcgaagagcaagatgcccaggctccaccagtccacagccttgccatgccccgtcttgctacggatgatttcgggggccatgtactcgatggtgccacagaaggagaaggtccgctctttctcctccgtcaggaactccttgctcagcccgaagtccgtgaggacaatgtggccctcggagtccagcagcacattctccagtttcaggtctcggtaaatgatgccgagcttgtgcaggtgttccagggccagcacgatctctcctccatacacgcgcccctcagcctccttgaagtactggcgctggtagaggtggcccaccatctccccgccgctcacatagtccaggatgaggtgcagcttggcatccgtctggaaagcgtagtgcagcgtgaccaggaagggcgcctggcgcaccagctccagcaccgagcgctcggtgcgcgtgtgctcctgcgtcttggcgcgctgcaccagcgccgccttgcgcagcaccttcatggcgtacagcttccccgcgtcgtgcccgcccgccttccgcaccaggaacaccttgccgtaggctcccgtgcccagcaccttgagcagctcgaagttctccacgctcaccttctcctcgtgcccggtcaggttggcttctgtgatccgcagctccacggcgcagctctcatcgtcgtcctcgtcccccatggcgggcgggtcgctggggcccgcgcggctcgggctccgggcggcgccggttacatggcggctcc

SEQ ID NO: 61117 - DNA, 2272 bp, Homo sapiens
tgcagcgcgtgcgtgctgcgctactgagcagcgccatggaggactctgaagcactgggcttcgaacacatgggcctcgatccccggctccttcaggctgtcaccgatctgggctggtcgcgacctacgctgatccaggagaaggccatcccactggccctagaagggaaggacctcctggctcgggcccgcacgggctccgggaagacggccgcttatgctattccgatgctgcagctgttgctccataggaaggcgacaggtccggtggtagaacaggcagtgagaggccttgttcttgttcctaccaaggagctggcacggcaagcacagtccatgattcagcagctggctacctactgtgctcgggatgtccgagtggccaatgtctcagctgctgaagactcagtctctcagagagctgtgctgatggagaagccagatgtggtagtagggaccccatctcgcatattaagccacttgcagcaagacagcctgaaacttcgtgactccctggagcttttggtggtggacgaagctgaccttcttttttcctttggctttgaagaagagctcaagagtctcctctgtcacttgccccggatttaccaggcttttctcatgtcagctacttttaacgaggacgtacaagcactcaaggagctgatattacataacccggttacccttaagttacaggagtcccagctgcctgggccagaccagttacagcagtttcaggtggtctgtgagactgaggaagacaaattcctcctgctgtatgccctgctcaagctgtcattgattcggggcaagtctctgctctttgtcaacactctagaacggagttaccggctacgcctgttcttggaacagttcagcatccccacctgtgtgctcaatggagagcttccactgcgctccaggtgccacatcatctcacagttcaaccaaggcttctacgactgtgtcatagcaactgatgctgaagtcctgggggccccagtcaagggcaagcgtcggggccgagggcccaaaggggacaaggcctctgatccggaagcaggtgtggcccggggcatagacttccaccatgtgtctgctgtgctcaactttgatcttcccccaacccctgaggcctacatccatcgagctggcaggacagcacgcgctaacaacccaggcatagtcttaacctttgtgcttcccacggagcagttccacttaggcaagattgaggagcttctcagtggagagaacaggggccccattctgctcccctaccagttccggatggaggagatcgagggcttccgctatcgctgcagggatgccatgcgctcagtgactaagcaggccattcgggaggcaagattgaaggagatcaaggaagagcttctgcattctgagaagcttaagacatactttgaagacaaccctagggacctccagctgctgcggcatgacctacctttgcaccccgcagtggtgaagccccacctgggccatgttcctgactacctggttcctcctgctctccgtggcctggtgcgccctcacaagaagcggaagaagctgtcttcctcttgtaggaaggccaagagagcaaagtcccagaacccactgcgcagcttcaagcacaaaggaaagaaattcagacccacagccaagccctcctgaggttgttgggcctctctggagctgagcacattgtggagcacaggcttacacccttcgtggacaggcgaggctctggtgcttactgcacagcctgaacagacagttctggggccggcagtgctgggccctttagctccttggcacttccaagctggcatcttgccccttgacaacagaataaaaattttagctgccccagtttgtgcctccagcatatgaaaaggactatttgaatccccaaaacatcaggagtcgggaaacttcggaagacagctgtgcctggctctgtggctgcatgcagtgcttcacttggccagcagaggtcagctgtgccgagctgccccagccatgagaagagaagcctgcccttgctggcaggtggctatggccggcccagagccttcctgcccagctcctgcagccctgctgcctgggatcaggctgggagatgggccttcctgaccgccagccttcctctccccgagcacacgcacatgtagattcggggggaagctgcctgctcttccttagaggagccggggcagctatctgctggtccctttctgaacaactgttgatgtgtaaaaaaaaaa

SEQ ID NO: 61118 - DNA, 2726 bp, Homo sapiens
accgcgacagctaggcgcgtgagaccggccgcccgcagggctgctctggccgggacccgctggccgggagacgcgaacctgccggaccaccgcgcggggacgacggcggccatgagctcgcggaagctgagcgggccgaaaggcaggaggctcagcatacacgtcgtgacttggaacgtggcttcggcagcgccccctctagatctcagtgacctgcttcagctgaacaaccggaacctcaatcttgacatatatgttattggtttgcaggaattgaactctgggatcataagcctcctttccgatgctgcctttaatgactcgtggagcagtttcctcatggatgtgctttcccctctgagcttcatcaaggtctcccatgtccgtatgcaggggatcctcttactggtctttgccaagtatcagcatttgccctatatccagattctgtctactaaatccacccccactggcctgtttgggtactgggggaacaaaggtggagtcaacatctgcctgaagctttatggctactatgtcagcatcatcaactgccacctgcctccccacatttccaacaattaccagcggctggagcactttgaccggatcctggagatgcagaattgtgaggggcgagacatcccaaacatcctggaccacgagtgagcctggcctcattatctggtttggagacatgaactttcggatcgaggactttgggttgcactttgttcgggaatccattaaaaatcggtgctacggtggcctgtgggagaaggaccagctcagcattgccaagaaacatgacccgctgctccgggagttccaggagggccgcctactcttcccgcccacctacaagtttgataggaactccaacgactatgacaccagtgagaaaaaacgcaagcctgcatggaccgatcgcatcctgtggaggctgaagcggcagccctgtgctggccccgacactcccataccgccggcgtcacacttctccttgtctctgaggggctacagcagccacatgacgtacggcatcagcgaccacaagcctgtctccggcacgttcgacttggagctgaagccattggtgtctgctccgctgatcgtcctgatgcccgaggacctgtggaccgtggaaaatgacatgatggtcagctactcttcaacctcggacttccccagcagcccgtgggactggattggactgtacaaggtggggctgcgggacgttaatgactacgtgtcctatgcctgggtcggggacagcaaggtctcctgcagcgacaacctgaaccaggtttacatcgacatcagcaatatccctaccactgaagatgagtttctcctctgttactacagcaacagtctgcgttctgtggtggggataagcagacccttccagatcccgcctggctccttgagggaggacccactgggtgaagcacagccacagatctgagccaggatgggagtgaatcccaggcggaggccagagctggcagccagctctgcctttccactgccgggagtgctgggggcccagcctggccccctgaagagacagccaagtgtcgtccacatactcctcccagagtgagctctaaccaggctcatttgctctctccactactcatctctggaattagccgcttaaatacaggtttttgttgctgagatgtgagtgaaaccagctagtgtgtcaacagtgaagacctggggacagttctgcgtctcatttctggattcctaccccctcttctagtcttgcccaagtagtcctgccaggcacatgccccatttggcacaggcctgcattcttgtcgtgccgtcctgggcctcaggctgtctgggaggggagatgctcacatttgtacaggctacatagactggtgcaagcagtgctggattccaggagtcttggcatctcatagcttgtccccgtgaggagtgagcagagggtctgggatttctgctttcagcaaaagcagtctgactcagtgggcagaatggaggggcccctctagccaggctcttacgccatggttatgagcaggttgatgagggtccttcggccagcacaaccttcctccctactcacggcatggagtctgactgcatggaagttccagatcctgacagagagaactgggaaggatccaggttcgcttccgttggtagcttgagtcccatgcctccaccctgccatctgaggaaggggtgacaagtggtcaaggagctgtggccacagacttttccagggtggtccttggcaggtgaggtgcgtctgtgccacccttgtcaggagccattgacgacgggccccccctggaccccccgggacctcaagagtgggggcaggcagaagggagaaccagctcaagacattttggaggatctggccctggggttcttcaaagaacaccctctaggggctttggggacatggcctgtccccacatccagcacttgcctccgccatggtcactcggcagcccttttcccaggagaagacacctctgggagcctgctcagtgcttgtcctgccatcctgtgtcctgggactgagggttactccagttgctttgtgttgcatactctcccccgcaagcctgtgtatgaagaattgtcccctggcttccagcaggccatggctggctgttttgtgactgttacattgtgcaggggtaattattagcgtggcttttacaaaaaaaaaa

SEQ ID NO: 61119 - DNA, 2642 bp, Homo sapiens
  misc_feature (1)...(2642): n = a,t,c or g
gattttcacaatgcttttccatacaatgtctggaatccatagataacataaccggtttggtcaggggtcgatctttaaccaggcccagggttggcaccctggctgtctgcctgtggatttcatttctgccttttagtttttacttgtttctttggaggcagaaattgggcataaaacaatatgagaggtggtctcctcccttaacagcacaaacgcttaattaacatttctttttcttttgagacaggttctgtcgcccaggctggagtgcagtggtgcagtcatagctcagtgcagcctggaccacctgggctcaagcagtcctgacacctcagcctctcaaaatttgggattacaggcgcgcgccaccgtgcgggtcaggaggcttccctgagggccccggaggtggagctgggcttttccttccgaagcgcccctgggaatctctctctttacggccttggaacctgggaaactacattacccagaaagctttgcgtcaaatgacagcacggcagagccagtgagagttcacattgaaggcgtttccgtgtgcgcaagtaaggtagaggcgggactcccggcgccctttagtagcgaccatttccattggcgttagggagtccttggagcgctgtgttgggaccgtggtggtgactggatccaggaggtcgggagtcgttcttctctttgcacagacgtgactctgcagctctttaacggcgcccgctgctctcaacccagcttaccccacgtggtcccatggcggcggccgcgctaaggttccccgttcagggcacagtgacttttgaagacgtggctgtgaaatttacccagggaggaatggaatctccttagttgaggctcagagatgcctgttaccgtgatgttgacgctgggagaacctgggcactttatgtcctccctggggttnttggtgtggagtggaagatgaggcggcaccttctaagcagagtatttatatacaaagagagactcaggtcaggactcctatggcaggtgtgtctcccaagaaggcccacccctgtgagatgtgtggcccgatcttgggagacattttgcatgtggcagatcatcagggaacacatcacaagcagaaactgcacaggtgtgaggcctgggggaataaattgtatgacagtggaaactttcatcagcaccagaatgagcacattggagagaaaccctacagagggagtgttgaggaggcgttgtttgtgaagaggtgtaagttgcatgtgtcagggagtcatctgtcttcagtgagagtggaaggacttttgcccaggtcaggattactccagcaggaggccagtcacactggggagaagtcaaacagcaaaactgagtgtgtgtctccctttcagtgtgggggagctcactatagccatggagattccatgaaacattttagcaccaaacatatactcagtcagcaccagagacttctccctcgagaagaatgttatgtgtgctgtgaatgtgggaaatcctttagcaaatatgttagcttcagtaatcatcagagagttcacagtggaaaaagaccttatgaatgtggagaatgtgagaaatcttttagtcaaaagagcagcctcattcaacatcagcaatttcacactggaggaaaaccttatgggtgtgaagaatgtgggaaatattttagcttagaaggatatcttaggcgccatcaaaaagttcacgctggaaaagggccttatgagtgtggagaatgtgggaaatcttttagttcaaacgtgaaccttaagagtcatcagcgcattcacactggagagagaccttacaagtgtggagaatgtgagaaatcttttagtcggaagcccagccttagttaccatcagcgcattcacactgaagtaagaccttacaagtgtggagaatgtgggaaatcttatatttcaaaggggcaccttaggatccatcagcgcatgcacactggagaaagaccttacaagtgtggagactgtgggaaatcttttaatgaaaaaggacaccttaggaatcatcagcgagttcacactacagaaagaccttttaagtgtggggaatgtgggaaatgttttagtcacaagggtaacctcattctacaccagcatggccatactggagaaagaccttatgtatgcagggaatgtggaaaattatttaagaagaagtctcacctccttgtacaccagagaattcacaatggagaaaagccatatgcttgtgaagcttgtcagaaattttttagaaacaagtaccaactcattgcacatcagagagttcacactggagaaaggccttatgaatgcaatgattgtggaaaatcatttacccacagctctacattctgtgttcataagcgaattcacactggagaaaagccttatgagtgcagtgaatgtggaaaatctttcgctgaaagctccagtttcacaaaacaccagagagttcacactggagaaaggccatatgaatgcagtgattgtgggaagtcatttacccacagctgtgcattcattgttcataagagagttcacactggtcagaagccttatgagtgcagtgaatgtgggaaatcttttgctgcaagctcctatctcactagtcacagggtg

SEQ ID NO: 61120 - DNA, 2306 bp, Homo sapiens
gaacttgctaatctcttttgtcacattcggattgctcctgctgccccacacacactaacccaaccatcttggggtggactccctgccagcccaactgttgtattttcagttcttccagtgtgaatcagttaatattctcgggaacgagggagaggttgatcctatgaggaaatcaaccacagtgaaaaggcttgggccgcttttgttttcacctgcttttgttgaacaaatttgatttccggagtcagtcattttactgtcaagacatttcttcggcattctgcaacagtttccaacatggctagatccatcagaaactgaagccgtggagaacgctctcggggcctttgccacttcttggagtagaagccgacagagagctgtttggaaacttctccttcacacaccagttgaagactaggctttggaggttttcaaagcagacggtgcttggatgggcagggagaagtaacattctgcaaatcgccgtcagaggtcctgaggacacagacctacctggcttgcattccccttgctgaatggcgtgtgctgcagctgcccactgagggctcttttccctgggattctggacttcagagtaggacagcaggctgggaagatgctgagttccatcaagtgcgtgttggtgggcgactctgctgtggggaaaacctctctgttgggtgcgcttcacctccgagaccttcccggaggcctacaagcccacagtgtacgagaacacaggggtggacgtcttcatggatggcatccagatcagcctgggcctctgggacacagccggcaatgacgccttcagaagcatccggcccctgtcctaccagcaggcagacgtggtgctgatgtgctactctgtggccaaccataactcattcctgaacttgaagaacaagtggattggtgaaattaggagcaacttgccctgtacccctgtgctggtggtggccacccagactgaccagcgggagatggggccccacagggcctcctgcgtcaatgccatggaagggaagaaactggcccaggatgtcagagccaagggctacctggagtgctcagcccttagcaatcggggagtacagcaggtgtttgagtgcgccgtccgaactgccgtcaaccaggccaggagacgaaacagaaggaggctcttctccatcaatgagtgcaagatcttctaaaccccaagagacttcacacaacacttatgtatgcaccccaaagactaatggggagagggagggccgggaagccaggaaagcttggtgttttctctgggtacaccccaagcagcgtctccttttggatacagttattgatgaggcttggccactggatgttttcactaactacactctacaagtgaactccttgcccaggccagttagaaaatcccttggggaactgtgatgaatattccatctttgattaaaaaagtgaaatagtctccataattttggacgatgaagtgagtttttcaaagaattccatatttaaagacacattttatttaactaataacaaaatgtattgcttttgtatatatttagttttcacacttggaaaatcttttcctacatcctcgaaaccataaactcctctgtgagtgaaatgcttgtacgaaggctctgccatatgtttgtagtgttattattttcacctcaagtagaaaggtctgttgaaaccacttgggctgctggatttaaatgggtaatcaaatttaaaaatgaccataaatgaatctttgcaatttgttttctacttacctgttattcacagttggatataaaatacagttccataagatatcctaatactgcctaatgattttaaagttatcactatatttttctgaaatgataaaacatcattcatttatttactatattgtctttcactcaactccagttatgcactaaatattctcctctcattcaccaagattgattgaaacaccatctttcaggtagagaatcagactgctccaagcaatggcaacagaacttggaacagaagcgagagagtgtcactttcacttctggtagggtggttcccaggcgactgcaggtcttgtgaaagacaggggtctcaaagttctgttaatttcacaaatttgttataaatttgtctaaactgagctgttgtggcaacataatttatgaatcgtaaggtctagttaggcttattggggggatatctacatatatatgtgtatgtaagggaaaaaaggtagaatttacagccttcaaaaaagaaaaatcaaattccaagcacaggaataagaaagctat

SEQ ID NO: 61121 - DNA, 2327 bp, Homo sapiens
ttttttttttttcaagtttcttcagagtttttaattattattattattttaataacaactctgaatcccagaacttccagatactgtccacactccctcccctgggcagaggagaggaggcacctcaagggaacaagatgggggtgggggtgtcctgccggggagcctccgactcccccaagccgtctactgctggggggtcccagggagggagggtgggggttgtgtttcctccccaaagggtgctccctgctgacgccccgtcctgaagccctcccctcctccatcaaggctggggatgatgaggagatggggcaggggcccgggggaccaaggcccattactgagcgcttgaactcccaccccggggaacacggggacaattaaagctggcataggaagagggggccaggcggctgacgcaaggccgggcagccccaaaggcactattgtaagggaagggaggctcaaaacgaagggcccattgggcgcagggggcccaagcccgtgggaccccccgaggagggccagctgagcccagctgctccgggctgggccagggcgcgcagcagcccattctcctgctccagcgcagcgttccgctccgccaattcccggatctgctccttcagcacctccacctcctcccggaccgcaaacatgaggtgggacttcaccaagtccatggcttgctcgattttgttgtcaatgccaaccaggcttccggagccactatcatcgtcgctgtctaggtgaccactgatggccaacatggagtgggccaggctgaacttctgagctgctactgctccgaaggggtctggagatttgtgaaccaggctggcatcgtgggtgaagtagagggctggggagctggggcgagagtcaagtgggggcacctgccccatctcttctggagcacccaactccatccgcagccgcatgtctacagctttcctccgggacagtggaggggtcctggcccctgagcccccagcctccgcttccaccctcagagagggcaggggcgtggcagcccgggatgtgcccgcactctcaccggtctcaggctctggggggcgctgctggggtgaggaggccgacagtgggggtttctctgccttggctttgctgggcaccaccagctggcccagtcccccagtgaaggagcgggcctgaggtccaggagaggtggggggtggacggagccaggaggtggggccctgagacaggcctgacggtggggtgggggcgcccaggccgaggctggccagctccaacctggaatccaaagatctgcccccggcgccccctgaggcccctcgaattccctccaggagtccgccgaagctgtggggctccaggtctcgctcataaacatccacacacgtccagcgaccgcggcgataaggctctcccaggccgtggggcagcttcaccacccggaaacgggaggaaggggccccaggtggtggggagccattccggggggtgcccttgccccccggatcggggctgggctccccattgggcaggcggggcgggggcccggttgggggctgtggggtagggggatccgaagcccctgggctcccagggccctcatagtccgtggtgacgctggtgatttggaaactactcttcttcttgcccccgctcatggtccctggggctcagggctgggccaaggttgggggtgggttagtgatccttgaaggggctcaggcacccctggaacaagggggccacatggcggggacatccgagcccctggggacgtctgggtccgacatggcaggagggcctggcgggaaccgggggtgcctgctgggtgaggggagaagaggagaggggaggtggcgggaggggggagcaggggcaggtttttcctgctgctgttgctgctgaactccagagctgagtttgcaaactctggggcctcggccactgatctgagcctgagggtcccggcgcctaagaggtcgggctgtccgttccctggggcctcctggccatgggcagtggcggggcacgcaggcggcgatcagaggctgtcccgtcctctccgggggccgcggctcatcctgccaggcatctccgaggaaagtttgctctccggaaaagaaggaacccgcgcctcctccgaggagcctaggagcggcctctgaagccccaagggtctggagactgatgtgggagggggcggccgagcccccctctgctcccggtggcagccagcgagtgggtgtcccgagtctcctcccgcgtgaccctgctgggtccgtgtctccgctcctcggctcccctgggtctctgcctctacgaaa

SEQ ID NO: 61122 - DNA, 4093 bp, Homo sapiens
attctttggaatactactgctagaagtctgacttaagacccagcttatgggccacatggcacccagctgcttctgcagagaaggcaggccactgatgggtacagcaaagtgtggtgctgctggccaagccaaagacccgtgtaggatgactgggcctctgccccttgtgggtgttgccactgtgcttgagtgcctggtgaagaatgtgatgggatcactagcatgtctgcggagagcggccctgggacgagattgagaaatctgccagtaatgggggatggactagaaacttcccaaatgtctacaacacaggcccaggcccaaccccagccagccaacgcagccagcaccaaccccccgcccccagagacctccaaccctaacaagcccaagaggcagaccaaccaactgcaatacctgctcagagtggtgctcaagacactatggaaacaccagtttgcatggcctttccagcagcctgtggatgccgtcaagctgaacctccctgattactataagatcattaaaacgcctatggatatgggaacaataaagaagcgcttggaaaacaactattactggaatgctcaggaatgtatccaggacttcaacactatgtttacaaattgttacatctacaacaagcctggagatgacatagtcttaatggcagaagctctggaaaagctcttcttgcaaaaaataaatgagctacccacagaagaaaccgagatcatgatagtccaggcaaaaggaagaggacgtgggaggaaagaaacagggacagcaaaacctggcgtttccacggtaccaaacacaactcaagcatcgactcctccgcagacccagacccctcagccgaatcctcctcctgtgcaggccacgcctcaccccttccctgccgtcaccccggacctcatcgtccagacccctgtcatgacagtggtgcctccccagccactgcagacgcccccgccagtgcccccccagccacaacccccacccgctccagctccccagcccgtacagagccacccacccatcatcgcggccaccccacagcctgtgaagacaaagaagggagtgaagaggaaagcagacaccaccacccccaccaccattgaccccattcacgagccaccctcgctgcccccggagcccaagaccaccaagctgggccagcggcgggagagcagccggcctgtgaaacctccaaagaaggacgtgcccgactctcagcagcacccagcaccagagaagagcagcaaggtctcggagcagctcaagtgctgcagcggcatcctcaaggagatgtttgccaagaagcacgccgcctacgcctggcccttctacaagcctgtggacgtggaggcactgggcctacacgactactgtgacatcatcaagcaccccatggacatgagcacaatcaagtctaaactggaggcccgtgagtaccgtgatgctcaggagtttggtgctgacgtccgattgatgttctccaactgctataagtacaaccctcctgaccatgaggtggtggccatggcccgcaagctccaggatgtgttcgaaatgcgctttgccaagatgccggacgagcctgaggagccagtggtggccgtgtcctccccggcagtgcccccctcccaccaaggttgtggccccgccctcatccagcgacagcagcagcgatagctcctcggacagtgacagttcgactgatgactctgaggaggagcgagcccagcggctggctgagctccaggagcagctcaaagccgtgcacgagcagcttgcagccctctctcagccccagcagaacaaaccaaagaaaaaggagaaagacaagaaggaaaagaaaaaagaaaagcacaaaaggaaagaggaagtggaagagaataaaaaaagcaaagccaaggaacctcctcctaaaaagacgaagaaaaataatagcagcaacagcaatgtgagcaagaaggagccagcgcccatgaagagcaagccccctcccacgtatgagtcggaggaagaggacaagtgcaagcctatgtcctatgaggagaagcggcagctcagcttggacatcaacaagctccccggcgagaagctgggccgcgtggtgcacatcatccagtcacgggagccctccctgaagaattccaaccccgacgagattgaaatcgactttgagaccctgaagccgtccacactgcgtgagctggagacgctatgtcacctcctgtttgcggaagaaaaggaaacctcaaggtctgagaaagttgatgtgattgccggctcctccaagatgaagggcttctcgtcctcagagtcggagagctccagtgagtccagctcctctgacagcgaagactccgaaacaggtcctgcctaatcattggacacggactcttaataaaacggtcttcagttccagattccttcccagcaagctatagcttaagtccattttcttccgtgaaagggacaggactccatcaagttatggaattcctcagagccctgggcctgtcccccggggtggattagtcatgtccagcagcacacgcctagtcccgccttcgggaaggctgcctgcctggccagccgcccaggtctctctgtgtaaagactgcctgggctgtcctgcccagccttcctggttctctggggtcctctgggtgggtggcatctcctggagggtgatgacaatccccaacacatgcattcatgtggtgctactctgtgtgccaaagctaagaccccaagtatgttttctctctttgtcccatccctctttttctgggactttggaccctaactacttccctcctgaaccttgcagtgacatcagtccaggagagctctcgttcagtgtgcggaagaacactctgacctctagagctgtcctagataaggagtgggagctttagaggcaaggcctctagaccctggaaggctcagtgaggctcttcccacagcatgcttctcactggtgccctgtaaggctcgagccaccgctgactctgagccttttggagtctttcctccttcgtctccattgttcccgtgcatttccaaaagcttaagttgcctggtgggcatttccccagtttctttggcctccgtcttctcaagtcacatagggaaagtacctcctggaaccaggctgcagtatgcaggacctgccaggcaggcactggtgaagggccttgggcctatcatccccccaaccccacctcaccccacccgcctcctctagtggggtgagtctgggctggtggaccagagagggtgtcacagaccctcagggactgccccatggacacctctgactggtgttaacagtgtgaacattttccccgtcttcagtcccttagaatgacgacagcccctggggttggggcaggcgagtgtggccacatcatccaagccctcccagagacacaaataggcttttttgctctaaaaataaataccagcccttttttggtcacaaatccagcatctcagcagaaaactgcctgacatgaaaagtcccctgaggaactgcatctgcgtttcaggggcttttcattttttctccttttttaaagtgtagattgtgggtgcttcctagaggcctgccttcttctggaactggaagtgggctatcaccatgggcaagcccttgggtgcaggctccccacctgcctgggaactctggcagctctcctcagctccttgggcttgagcagctgcaactgccccagatttgctgtggaagcaggggctagccctggcctcaccagggcctcccggggccctgcattgatgctcaggagttcctgggctgctcttgatcctttctgggcatccagcttccagttaagctctgtttgccaaacaaactattctcagctgccctttggcctgcgcctgatgtgttcctgttgcagtcccgcctgcctgagacaggagcaggcaggagagccttcatgcccagattcccacaggacaattggggagctgctggcattgtctttctgggaagattctgctttcttggaccaaatggcagcctgattacccagtgtcgggcctgcatgctgcc

SEQ ID NO: 61123 - DNA, 701 bp, Homo sapiens
ggaggcgggaggcagtgtcatacgggttctgtggttgaactgcatcgtccgagggaacgctggtcggagcgccgggtggagcgccagggtcctctggtggtcgctggatgttggtagttgtgggtaagagctctgtgccgggagtgtctggacccccgggtcctccattctcagctgcagtggccggagcccactgctctcccccgcactgggtcgtggtaacccacaaggtgccacctgcgtcactgaccatcgtttccagaagcccctccggccacacattccatgtggtatctcccacaaggaaatgttcgtttttttccctgtgaagccagaaatttcttggtggctctttgccgagccaaacgttaaccttgagttgtctctctgggcggccccaggtggtaccagttctcacgggtgttgaaggagagtgaggatggccctgagggaagcccagttggtttggttggggaggcgttggggctatggccctgagagaggtgtgggcggtgttgggaccaggccccttctgcaccctcccctggcaccgccgttaactctccaggcctggtgtggcccaagccaccctgcctacccgtgctaccctacccacacgtgccaccctgacctgcttgtgccatcctgcccgcccgtgccacactgcccacccgtgccaccctgccccggcgcgcggccgc

SEQ ID NO: 61124 - DNA, 4690 bp, Homo sapiens
cccccagtcacacaacctttatttctctaccaaacagcaggtcagcaggtgggtacagggcccgctcctgctaagacctccccacctccccccaggaaagaagcagagaatctctgcaggcaccagactccctgcctcccccactgcgtttctctcactggccgcccagaacctgtgagagggaggaggggtgaggcgtaggggagggggctacagaacatccagcccattggtctgcaaggcaggctgaggggctttggatgtgggggactaggaaagggatgtgagtcttgatttacatataaaatcatcagtctgcacacgctctaggaggggccaagacatagggacaatccttggtgcaggtttctgctacccctcgctagtttttgccaaagtagcaaaagctgagttaagagaaaaattctgtccatcagaggccatcttcctctcatctgatatgacgtgttcctccagcagggagggagggagagcgggtgcccttggggaatcagccatccttagtgacatcctttcggctcatgggtgtcgtggggagggggcaaggagtgaggccaagagtccaggaagcccaccaggctcagaggcccccagctgtgcagacagcgcggcggccgcacactgggctgggtagaagggcgccacggtcaggaacctgaggatgtcggtggtctcaggtaccagggacgcgggtggcaagttggacctctgcgtggcagtaccgggcggcaagtgtgactctgaacatctcccgagctcaggacggggaaccctgagtccaggaggcgcgcggggctgaggcagtccagccagggctttcccgacttgtctcccgggaaaggacatcctcgctccgccctcctgccggctccttgtgtccgtctctctgacccttcacccgcccgggccctgcacatataaacagaagcagcctcgagctcttcgggagccgactttgtgggaagcagagtggagtggaggggggctgcccaccctcggctgttacacagctggggcccagatgggccctttcttgatccccccaggggcttgaccccagtcccagaccagggaacgaagagagaggtcagagccgttaaggaagggacccccagagtcctccgtcagtgcagaggcaccagtcaccaagtgaacgtccagcttccgaacaagggggagcaagctccagctgcactcgtgatttgggggtgggggggccccggatctctgggtatgctgccagctccggcttcttggctgccccctcccagcctgcagctcctgggccagagctgcagagcagggaacttcccaggagagtccaggagacaggaattacagacctcccaggccagaaggaagtggggacagagaccccaggacggggcccggggatggccattctgacctcgggcctgtcatttatccggcgggacccggtgggcaagtgggcgagtgtggtggcaagggtggggggcggaggcgaacacatgggcaccatcagtctgaggtacacaccggagactccaccctgttcccagcgctcacttctggctcatttcttcgtgcatgtggttccgggacaggtacttgagggcctcatccagcaggatgacaggcagagatatctggagcaccaccacccactggcgcccgctcagtggggtcacctggaaaatgagaggcaggggcggcacgagcaggatgaggaagtgcagggccatggacatggccacagccaccagcagccaggggttcatccagggcggcatccgcagcagcgactggttctccgagacgctgttgagggcattgcacatttcaatggtcacgagcacggacaaggccatggtggtggggaagcgtgactcgaacacctcacagtcgatgccggcaaagagcgggttgtcttcggagcacttcaggaagttcctcagctggtagaagttgatgtgaggtccctcggcgtcatacacaaaccaccaggtggcggcagccactgtggccaggcctacgtacactccgatagccaggtatcggaagaagagccagccactgatgagggcttctcgggggctccggggcagcttctctatgatgtccaggtctggcgggttgaagcccagagccgtggcaggtaggccatctgtcaccaggttcacccagagcagctgcacagggatcagggcttcgggcaggcccagaattgccgtgaggaagatgcagacgacctcgccaacattggaggagatgaggtagcggatgaattgcttcatgttgctgtagatggcccggccctcctccaccgcagccacgatggaggcaaagttgtcatctgacagcaccatctctgccgccgacttggccacggccgtgcctgagcccatggcgatgccgatctctgctttcttcagggctggtgcgtcgttcactccatcgccagtcatagcagtgatctcgttaaaggactgcaggttctccacgatgcgggacttgtgtgcgggctccacgcgggcgaagcagcgggcggtgcggcaggcctggcgctgctgctcggggctgaggtcatcaaactcgcggcccgtgtaggccttgcccgccacgtcttccgtgtccccaaagatgccaagcctgcggcagatggccacggcagtgcctttgttatcccccgtgatcatgaccacgcggatgcccgcctggtagcagcgtgtgatgcaggcagccacctcaggtcgcggcgggtccagcatgcctacgcagcccacgaaggtcaggtccgtctcgtactgcacaaacttgctgcagtcgtccagctccatgtcctccttccttgggggggcgtcccgggtggccagtgccaggcagcgcagcgtgtctgagcctgagccccaatcccggatctttgccaggatctgctccctggaggtgggggtcaggggtgctgtgcggctccccacgcggactgagctacagcgctcgatcacactctcaggagcccccttcacaaacatcttgctgccctggccagtagggtgagggcgggtgggcgtgcagtacacggacatggatttccggtctcgggagaactccagggtgaactccttccgcatcagctgcttgatgaccgtgttacaggcgccagctcgctccacccgggacagagcctgcaggtcggtgtcgaacacgttcatcttctccaccaggcaagtcagagctgtctccgtggcctctcccaccttctcatacacacccttggcctcgttgtagtccagagccgagtcgttgcacagggcgcagatggtcgccagctccaccagcccgtcgaactggccgcagcgcacaggctgatccccctgccgcacttcgccctcgggggtatacgtggtacccgagatggtgaactcgtgcaaaaggcaggagcccgcatcggcctcggctaccacgaacatccggcagacagacatctgattggtggtgagcgtgcccgtcttgtcggagcagatgactgaggtgcagcccagggtctccacggacggcaggcttcgcacgatggcgttcttgcgtgccatgcgccgcgtgcccagtgccaggcatgtagtgatgacagccgggaggccctcggggatggccgccaccgccagggccacggcgatcttgaagtagtagacagcgccacgcagccaggagccaccgtgggccgggtcggcgaagtggccgatgttgatgacccacacggccacgcagatcacagagatggcgtgggacagctgccgtccaaactcgtccagcttgcgctgcagcggcgtccgctcgggctcgactgccgccatctggctccggatcttgcccagctccgtgtgcagggccggtggccacggccacacccaccgctttgcccgatgtgatattggtgccagaaaacagcatgttcttcttgtcctggttcacagctctggggtctgggatggcctctgtgtgcttggtcacggacacagattcacccgtcaggatggactggtccactcgcagcgtggtggacttgatctcgatgaggcggaggtcagcaggcactttgtcccccactgccacttctacaatgtcccctgggacgatgtcccgggcacggatcctctgcacgcccttgcggtccgagcggatcaccttgcccatctcaggctcatactccttcagggcctcgatggcactctcggcgttgcgttcctgccacacgcccacaatggcgttggccacgaggatcagcatgatgaccaggggctccacgaaggcggtcgtggtctcctcgccctcctcgaaccaggccaggacaaaggagacaagggcagccagcagcaggatgcgcaccaggaggtcctcaaactgttccagcaccagctcccacagggacttcccttcctcactcgggagctcgttggggccgtagcgctcccgcgcgccggtcacctgcgccgggctcaggccgccctcggctgtcaccgagaagtggcgcagcacgtcggcggccgggagcagatgcgccgcctccatgccgcccgcccggccgtctgcgccgtccgcaccgtcgaggccgcctctccgccggggggctacaaagcggggcgcgggggactcgggcccgggcgggcgccgcgcgaggccatgtccgtgctgg

SEQ ID NO: 61125 - DNA, 2217 bp, Homo sapiens
ggaagccttggcactagcggcgcccgggcgcggagtgcgcagggcaaggtcctgcgctctgggccagcgctcggccatgcgatccgccgcgcggaggggacgcgccgcgcccgccgccagggactctttgccggtgctactgtttttatgcttgcttctgaagacgtgtgaacctaaaactgcaaatgcctttaaaccaaatatcctactgatcatggcggatgatctaggcactggggatctcggttgctacgggaacaatacactgagaacgccgaatattgaccagcttgcagaggaaggtgtgaggctcactcagcacctggcggccgccccgctctgcaccccaagccgagctgcattcctcacagggagacattccttcagatcaggcatggacgccagcaatggattaccgggcccttcagtggaacgcaggctcaggtggactccctgagaacgaaaccacttttgcaagaatcttgcagcagcatggctatgcaaccggcctcataggaaaatggcaccagggtgtgaattgtgcatcccgcggggatcactgccaccaccccctgaaccacggatttgactatttctacggcatgcccttcacgctcacaaacgactgttgacccaggcaggccccccgaagtggacgccgccctgagggcgcagctctggggttacacccagttcctggcgctggggattctcaccctggctgccggccagacctgcggtttcttctgtgtctccgcgagagcagtcaccggcatggccggcgtgggctgcctgtttttcatctcttggtactcctccttcgggtttgtgcgacgctggaactgtatcctgatgagaaaccatgacgtcacggagcaacccatggttctggagaaaacagcgagtcttatgctaaaggaagctgtttcctatattgaaagacacaagcatgggccatttctcctcttcctttctttgctgcatgtgcacattccccttgtgaccacgagtgcattcctggggaaaagtcagcatggcttatatggtgataatgtggaggagatgggactggctcataggtaaggttcttaatgccatcgaagacaatggtttaaagaactcaacattcacgtatttcacctctgaccatggaggacatttagaggcaagagatggacacagccagttagggggatggaacggaatttacaaaggtgggaagggcatgggaggatgggaaggtgggatccgagtgcccgggatcttccactggccgggggtgctcccggccggccgagtgattggagagcccacgagcctgatggacgtgttccctactgtggtccagctggtgggtggcgaggtgccccaggacagggtgattgatggccacagcctggtacccttgctgcagggagctgaggcacgctcggcacatgagttcctgtttcattactgtgggcagcatcttcacgcagcacgctggcaccagaaggacagtggaagcgtctggaaggttcattacacgaccccgcagttccaccccgagggagcgggggcctgctacggccgaggcgtctgcccatgctccggggagggcgtgacccatcacagaccccctttgctctttgacctctccagggacccctccgaggcacggcccctgacccccgactccgagcccctgtaccacgccgtgatagcaagggtaggtgccgcggtgtcggagcatcggcagaccctgagtcctgtgccccagcagttttccatgagcaacatcctgtggaagccgtggctgcagccgtgctgcggacatttcccgttctgttcatgccacgaggatggggatggcaccccctgaatgccaggactgtgagagaggatccaggagagcctgactgcgttgcaaacaaaattctccaagcttggttctatcttcagcttccctttttgcaaggaacatgccctggactgagagtgggtccccactttctttctttctttctttctttttttttgagacagagtgtcgctctgtccctcaggctggagtgcagtggcgcgatctctgctcactgcaacctccgcctcccgggttcaagcgattttcctgcctcagcctcctgagtacccgggattacaggcaccaggcacctgccaccatgcctagctaatttttgagttttggtggggacagggttttaccccatgcccagg

SEQ ID NO: 61126 - DNA, 3167 bp, Homo sapiens
  misc_feature (1)...(3167): n = a,t,c or g
gcggccgccgcgccggggcccagccggagccgccgccctcgcccttgcctttgcctgcgcggctcagaatcaccatccgcggcgcgggagacgagccggccagtcccgggccgagggacccgcccgccatggccaccaaggctcgggttatgtatgattttgctgctgaacctggaaataatgaactgacggttaatgaaggagaaatcatcacaatcacaaatccggatgtaggtggaggatggctggaaggaagaaacatcaaaggagaacgagggctggttcccacagactacgttgaaattttacccagtgatggaaaagatcaattttcttgtggaaattcagtggctgaccaagcctttcttgattctctctcagccagcacagctcaggcccagttcgtcggctgccagcaacaatcaccaggttggcagtggcaatgacccctggtcagcctggagtgcctccaaatctgggaactgggaaagctcaaaaggctggggggcccagccagagggggctggagcccaaagaaacacaaacactcccaacaactgggacactgccttcggccacccccaggcctaccaaggaccagcaactggtgatgatgatgactgggatgaagactgggatgggcccaaatccttcttcctactttaaggattcagagtcagctgatgcaggcggcgctcagcgaggaaacagtcgtgctagttcctcatccatgaaaattccccttaacaaatttcctggatttgcgaaacctggcacggaacagtatttgttggccaaacaactagcaaaacccaaagagaaaattcccatcattgttggagattatggcccaatgtgggtttatcctacctctacttttgactgtgtggtagcagatcccaggaaaggctccaaaatgtatggtctaaagagctacatcgaatatcagctaacacctactaacactaatcgatctgtaaaccacaggtataagcactttgactggttatatgagcgtctcctggttaagtttgggtcagccattccaatcccttctcttccagacaaacaagtcacaggccgctttgaagaggaatttatcaaaatgcgcatggagagacttcaggcctggatgaccaggatgtgtcgccatccagtaatctcagaaagtgaagttttccagcagttcctaaatttccgagatgagaaggaatggaaaactggaaagaggaaggccgagagagatgagctggcgggagtcatgatattttccaccatggaaccagaggcacctgacttggacttagtagaaatagagcagaagtgcgaggctgtggggaagttcaccaaggccatggatgacggcgtgaaggagctgctgacggtggggcaggagcactggaagcgctgcacgggcccattacccaaggaatatcagaagataggaaaggccttgcagagtttggccacagtgttcagttccagtggctatcaaggtgaaacagatctcaatgatgcaataacagaagcaggaaagacttatgaagaaattgccagtctcgtggcagaacagccaaagaaagatctccatttcctgatggaatgtaatcacgagtataaaggttttcttggctgcttccctgacatcattggcactcacaagggagcaatagaaaaagtgaaagaaagtgacaaactagttgcaacaagtaaaatcaccctacaagacaaacagaacatggtgaagagagtcagcatcatgtcttacgcgttgcaagctgagatgaatcactttcacagtaaccggatctatgattacaacagtgtcatccgcctgtacctggagcagcaagtgcaattttacgaaacgattgcagaaaagctgaggcaggccctcagccgctttccagtgatgtaggacagaacgggccttgaagagaatgccgcgtgctttctcctgacttggggcaatgcaattcaaaactttttttcccctattattcagaaaaaaaaggaaacaaaaccaaaaagaaagagttgcaaaaaactgcatttattttattagccaccctaaatgcgtcagttatttagggatggtcttttgttcatttccgcatccattatttaaaccagtggaaattgtctctatttttggaaagtacttaaaagttaccagaattttcaatggaaaatgaggggtttctccccactgatattttacatagagtcataatttatatgtcttataaattataagtcttatataatttataagtctcccacaatcttccagttcttacccagtgtcagataattaattactaattactttcttaaaaacatgaactatgccagaataaaaaatatctatgtttgtatatttttataactcctttcagtcctctggggctcctgtcattgagggaagtcgttacgcctttcactgccacagttcacagcttcaagtgcttacacttcaagaggggagggacgctggggggcccctggggctggcttagtgcccatcgtgggtgtgtgggccaggtggggccatccccatgtccctccaggggggancccacagcctggggcagatgagcagatacccctggccacccatgtcctcagcgacatttctgatgtgctgctcttatgtgaggaccagtgctttctctctttgcacttccttcctaatcttggttaaggcatgttttatgccatgaagaatacattagaagaattgagggactttgtagagaattttgtggctttggtccaacgggtgagtggctgtgcggaggcctgtgttcgggagggcctgggggaaggagggcacccagcaccccggcgtctctggccctttcttattctttggctcctcatccaccgtgatgagaagcgctgctgtggccacggcacactgcttggcttgggtggcgggttcatggccagttggtgtcatcagcaaagagaaaaagcacaggttagctccccattagatggaaaagtgtagggactgagaagggctgcagcctcagcagtgtacagagtccccggcgctctgaggttggagagaaagaacagaccagcgcccttcctgactacatccgaaacttcacacagggtgtttctgagcaccagcacttccagcgcttcacttaacggca

SEQ ID NO: 61127 - DNA, 800 bp, Homo sapiens
cagatgtcaggacaccctcactcccgacaaagatgcctttattgggcgacagacgcggggtggggcgctagcgggggtgcacggcgggccggtaggccgccaggatctcggcgctgtgcggacacgtgtatttgaactctttctcctgcagcgcgctgaaccaggtagcggagtacgccgagcagctccgtggtgatgggcgcctgtcggaagtgcgcgcacaccgtgtcgaccgatgtgcagcttgggcaggaaggctgcagtcggcccaagcgtgaagcctttcgccgtccaggaagcggcggcgggaacttcgcgcaggcttcggctccccccgccagctcgtgctcccaggggcgcgcgcaggtagctgtccaagccctggcgaagggcggcgcagcagctgctggtacagggcttcgtcctgcgcgggcaccgggttcttgatgaacgcggagaacttgtggaaaacgtcgttgccggcggtgttggactccctgtaacgaggcgccaggctggggaagtcgggcggccccagcgtctcctccagaaagtcctcgatctgcagcgtgtctgtcttggcgtcgctgtcatagagcaggatgggcagctgcgagccgggggcgaagtccttcagcacgtccggggacctgcgcgtgtccaccgtggtgagggtgaaaggtacgcccttgaggagcaggaccatgaagagccgctggcaggaggggcagtgacccacgctctccccgtcctcactcgccttgacaaacagctggagcttggtctccgccatggtggga

SEQ ID NO: 61128 - DNA, 2320 bp, Homo sapiens
ctcctagctttggctctggggacaccttggcatcctgggtgacatggtaggttacagagccgctaaaatgggcatgggcagacacactgatccaatactaagagttcagctgtagcgtccggtgtttcatgatactcacttgtcttcctcccttgcaacccagccatttcatgggaccaacgggccaccacagggcatgggatcagatctcaacacattctgcaggcccttgtcgaaattcttccctagttcactagtgggagagggattgggtgtggttgccaaagaaataaaagcgttgaaatttcaatagaaatgccataatttattccattgtataaaaaagtcatccttatgtaacaaaatgtcttcttagaagaagaaatatattatttcaggtcataaataatcagcaaacatacaactgttggcaactaaaaaaaaacccaacactggtattttccatcagtgctgaaaacaaacctgcttaagatatatttacaggatagtacagtactcaaaaacaaaaattgaggtatttggttcttctaggagtagacaatgacatttgtgaaggcagacacctacacaaaaataaataaggtatattctcatatgtatatgtgtcgtcgggaataatactggtaggtatgtcaagcatgaagagattctacaaaaaacaggggcgagcaaaaagaaaccggatcacacactgagtcctttctcttctgccccattttgtcagatggacttgatgtacccactatatattggtcccgaatgtgctgagttcagcaaatgtcttgacgctaagtcatcaccataactgcttagaaacccagaggaactcgggtgaagttaaataaataaggaccagccctctcgagcccctcccagagttattgcatttctcctctcaaggagcatggagtcccaatgggatgtgaagagcctcacctcccgtggcctttcagcagctgggagaggtcgtaatggggctctgaaggtagctcagcgcactgttcgtggagtggacagggatggagacggggaagttgaacacggtggtggtggaggtgcctcggtcgagcacagccatggcggggctcccagcctctgccgaacagtgcggagccagcacctgggactcaaactgcagcagctggcccatgaagctgaagttgggagagatgatgcttcgcctctgcttcacaaactcaaaggcctcgtccagcttgactcgattagtcctcataaggtaagcaaggcagatggtggctgaccgggaaatgcctgcctggcagtggacaaacacccttcctccagcattcttgatggagtctatgaagtcaatggcctcgttgaaccaggagctgatgtctgccttgtggttgtcctccacagggatgctcttgtactggtagtgaccctcaaaatggttgggacaattggctgagacgttgatcaaggcagttatgcccaaggcatccagcatgtccttgcgggaagcgtgatacgcactgcccaggtacagaaagggcaggatttccaccgggccaccctgatcgtagagtggggtactgcaggaactgcacccagattccgcgctgtcagggacgctagtactcaggggaaggctgagccccatgggggtcgactgtttgctgcacagctccgggcaggaagccgaaaacgcttcgtatcctcctttgaggaagaagacttgcgcggcgcgcgcctcgcggcagagcgcgccggccgccagggccagggtgccgtcgcgcttggcgccgtccagggcggcgctgcgctcgtccagcaacaccacggcgtggtaggcgccggccagcaggcggcgcgcggagctcggcgtttgggcaacgatgtgcttccaaggccccaatggcgccctttggccccggcggccgcaacgatggtgctgaagcgcacgttgacagagccggcgatgtggccggcgttgaaagcgaagaaggagcggcagtccagcagcaggcattgcgccgctcgctcccccagcagcgcccgcaggcctccagcgtccagggtgcccacttccatgaccatggccggcctcagcgcccccagcgtgatcggccctgcggtgctctttgtctgttctcggggccaagggcagggcggcgcttttcgaggaaaagctagacccccgggtctctctgcgccgaaccaaaagccgcttttggactgagagaggagcgtcacgcggggctccgggctcctcggcttcttcgcggttcccccgactgcccctccgacccgcgtcgcacacacagcccaaatg

SEQ ID NO: 61129 - DNA, 5022 bp, Homo sapiens
ccgcccttctttaaccgggtcgacgattattttggagttctgccgcgtgtgcaaggacgggttcgagctgctctgctgcgacgcctgcccctcctcctaccacctgcattgcctcaacccgccgctgcccgagatcccaaacgtgccccccactgaagggcaaagtccagcggattctacactggaggtggacggagccccctgcccccttcatggtggggctgccggggcctgacgtggagcccagcctccctccacctaagcccctggagggcatccctgagagagagttctttgtcaagtgggcagggctgtcctactggcattgctcctgggtgaaggagctacagctggagctgtaccacacggtgatgtatcgcaactaccaaagaaagaacgacatggatgagccgcccccctttgactacggctctggggatgaagacggcaagagcgagaagaggaagaacaaggaccccctctatgccaagatggaggagcgcttctaccgctatggcatcaagccagagtggatgatgattcaccgaatcctgaaccatagctttgacaagaagggggatgtgcactacctgatcaagtggaaagacctgccctacgaccagtgcacctgggagatcgatgacatcgacatcccctactacgacaacctcaagcaggcctactggggccacagggagctgatgctgggagaagacaccaggctgcccaagaggctgctcaagaagggcaagaagctgagggacgacaagcaggagaagccgccggacacgcccattgtggaccccacggtcaagttcgacaagcagccatggtacatcgactccacaggcggcacactgcacccgtaccagctggagggcctcaactggctgcgcttctcttgggcccagggcactgacaccatcctggccgatgagatgggtctgggcaagacggtgcagaccatcgtgttcctttactccctctacaaggagggccactccaaagggccctacctggttagcgcgcccctctccaccatcatcaactgggaacgcgagtttgagatgtgggcgcccgacttctacgtggtcacctacacgggggacaaggagagccgctcggtgattcgggagaacgagttttcctttgaggacaacgccattcggagtgggaagaaggtattccgtatgaagaaagaagtgcagatcaaattccacgtgctgctcacctcctatgagctcatcaccatcgaccaggccatcctgggctccatcgagtgggcctgcctggtggtagatgaggcccaccgcctcaagaacaaccagtccaagttttttagggtcttaaacagctacaagattgattacaagctgctgctgacagggaccccccttcagaacaacctggaggagctgttccatctcctcaacttcctgactccagagaggttcaacaacctggagggcttcctggaggagtttgctgacatctccaaggaagaccagatcaagaagctgcatgacctgctggggccgcacatgctcaggcggctcaaggctgacgtgttcaagaacatgccggccaagaccgagctcattgtccgggtggagctgagccagatgcagaagaagtactacaagttcatcctcacacggaactttgaggcactgaactccaaggggggcgggaaccaagtatcgctgctcaacatcatgatggacctgaaaaagtgctgcaaccacccctacctcttccctgtggctgccgtggaggcccctgtcttgcccaatggctcctacgatggaagctccctggtcaagtcttcagggaagctcatgctgctacagaagatgctgaagaaactgcgggatgaggggcaccgtgtgctcatcttctcccagatgaccaagatgctggacctcctggaggacttcctggagtacgaaggctacaagtatgagcggattgatggtggcatcaccgggggcctccggcaggaggcaatcgacagattcaatgcccccggggcccagcagttctgcttcctcctctcaacccgggcaggtggtctgggcatcaacctggccacggcggacactgtcatcatctacgactcggactggaacccgcacaatgacatccaggccttcagccgcgcccaccgcatcggccagaacaagaaggtgatgatctaccgcttcgtgactcgggcctcggtggaggagcgcatcacgcaggtggccaagcgcaagatgatgctcacccacctggtggtgcggcccggcctcggctccaagtcggggtccatgaccaagcaggagctggacgacatcctcaagttcggcacggaggaactcttcaaggacgacgtggagggcatgatgtctcagggccagaggccggtcacacccatccctgatgtccagtcctccaaaggggggaacttggccgccagtgcaaagaagaagcacggtagcaccccgccaggtgacaacaaggacgtggaggacagcagtgtgatccactatgacgatgcggccatctccaagctgctggaccggaaccaggacgctacagatgacacggagctacagaacatgaacgagtacctgagctccttcaaggtggcgcagtacgtggtgcgcgaggaggacggcgtggaggaggtggagcgggaaatcatcaagcaggaggagaacgtggaccccgactactgggagaagctgctgcggcaccactatgagcagcagcaaggaggacctggcccgcaacctgggcaagggcaagcgcatccgcaagcaggtcaactacaacgatgcctcccaggaggaccaggagtggcaggatgagctctctgataaccagtcagaatattccattggctctgaggatgaggatgaggactttgaagagaggccggaagggcagagtggacgacgacaatcccggaggcagctgaagagtgacagggacaagcccctgcccccgcttctcgcccgagttggtggcaacatcgaggtgctgggcttcaatgcccgacagcggaaggcctttctgaacgccatcatgcgctggggcatgcccccgcaggacgccttcaactcccactggctggtgcgggaccttcgagggaagagcgagaaggagtttagagcctatgtgtccctcttcatgcggcacctgtgtgagccgggggcggatggtgcagagaccttcgcagacggcgtgccccgggagggcctctccaggcagcacgtgctgacccgcatcggggtcatgtcactagttaggaagaaggttcaggagtttgagcatgtcaacgggaagtacagcaccccagacttgatccctgaggggcccgaggggaagaagccgggcgaggtgatctcctcggaccccaacacaccagtgcccgccagccctgcccacctcctgccagccccgctgggcctgccagacaaaatggaagcccagctgggctacatggatgagaaagaccccggggcacagaagccaaggcagcccctggaagtccaggcccttccagccgccttggatagagtggagagtgaggacaagcacgagagcccagccagcaaggagagagcccgagaggagcggccagaggagacggagaaggccccgccctccccggagcagctgccgagagaggaggtgcttcctgagaaggagaagatcctggacaagctggagctgagcttgatccacagcagaggggacagttccgaactcaggccagatgacaccaaggctgaggagaaggagcccattgaaacacagcaaaatggtgacaaagaggaagatgacgaggggaagaaggaggacaagaaggggaaattcaagttcatgttcaacatcgcggacgggggcttcacggagttgcacacgctgtggcagaacgaggagcgggctgctgtatcctctgggaaaatctacgacatctggcaccggcgccatgactactggctgctggcgggcatcgtgacgcacggctacgcccgctggcaggacatccagaatgacccacggtacatgatcctcaacgagcccttcaagtctgaggtccacaagggcaactacctggagatgaagaacaagttcctggcccgcaggtttaagctgctggagcaggcgttggtcattgaggagcagctccggagggccgcgtacctgaacatgacgcaggaccccaaccaccccgccatggccctcaacgcccgcctggctgaagtggagtgcctcgccgagagccaccagcacctgtccaaggagtcccttgctgggaacaagcctgccaatgccgtcctgcacaaggtcctgaaccagctggaggagctgctgagcgacatgaaggccgacgtgacccggctgccatccatgctgtcccgcatccccccggtggccgcccggctgcagatgtcggagcgcagcatcctgagccgcctgaccaaccgcgccggggaccccaccatccagcagggcgctttcggctcctcccagatgtacagcaacaactttgggcccaacttccggggccctggaccgggagggattgtcaactacaaccagatgcccctggggccctatgtgaccgatatctagccgtcctcgagacttccctgtgttgcagcgctcatttccagctgagccacgcctgccgggccacctgcccgacccacatgggagagaaaagctgccacctttttaggagccagcaccaccttgggacaaaaagggaaacctagtaatgccatcacatggaggacgaggcccagctcagctgggccagagcccagaagtgccacctcatcataattcaagtgttcttccacacagcgttgcccccacaaccacgccggacgtgccccctcgccaccttttccagacgacttcttagaagagatttcatttatttgtacatcttttgcactttcctattgaagacttgaacacgtttgtcttgataaaagttggatgacgtatggaagattcgaaaaa

SEQ ID NO: 61130 - DNA, 1108 bp, Homo sapiens
  misc_feature (1)...(1108): n = a,t,c or g
tggcgtcatctttgtcttcatgttccttcaccttcatgtcctcctgcagtttggccgactcttcctccccaatgtatctgctgaaaaccacaggatgggcctcacccatgaaatcgtgctcggcttcctctatgtccaccacatccgagtcagaatcctgcctgaggagagtccacggctctgaatcgtgggagttggggctttttgaacaactaacatataaccttccctcggtgtcttcatcggccctgcctacatgaaggaagaagccatccgtggatggtccctgggggaacggatcgaatccgccaagggccagaggcccaccacagacctctcctgcggtttccactgacagtggtcctgtctcggtggggtcgatgcccatggggaattctgagcatggaatcggggtaaaagtcctattcaagtcgcgactgccagtcattttccttcgtaccaaaggctgggggccctcgctgggcctcctagacacgatgctcctcggtctcccttccccccgttcatcctccttggtgatcacctgcttctctttcgctggcttaagaactgctggcatcaaaggctccaagaaaaaactgtcaggcttactttccgaggtgtccagctgtccttggggagaccgggcatttgctgtaaggcctaaggcccggggtgaggccctggggaactccgggtcagcctgctggggaaccacgtctgctctaacaatagccacaagctcctcttcctcatcctcaatactgacattgctcaggaggctcttcccgtggctcttcgtggccgtggggtgtggctggttctgtggggtcagattaacaatgttggatgccaaactgtctttgctgatggagcgggccaagctgatgctgtcgccagagctgggatccacttcacaactcgcagcgtgatgtagagcaaaaggtgttggctgggacgcaggcctggtttttttttctggccaggctattgctgctcctcgaggctgaccatcaactcgggtcaaagcggacgcgtgggcggacgcgtgggcggacgcgtgggtcgacgcaggtactcagngacgntcgcatcggggngtccgatt

SEQ ID NO: 61131 - DNA, 2389 bp, Homo sapiens
gggtcgacgatttcgtagcactttgtgagtatggggtgaatcggcgtcggccttccactgtggggttaaatctcatcccgcggctctcctcctgtcggtcctgcagttcttttgtccccgggtagagggatcttctgcagaaatagcgctggaagctagagtgaggcctgagtactgccttggcctaggatggctagagaattaagtgaaagcacagccctggatgcccagtctacagaagaccagatggagcttctggtcataaaggtggaggaagaagaagccggttttcccagtagcccagatctgggttctgagggctcccgcgagcgcttccgaggcttccgctacccggaggctgcaggcccccgcgaggcgctgagtcggctccgagagctctgccgacagtggctgcagcctgagatgcacagcaaggagcagatcctggagctgctggtgctggagcagttcctgaccatcctgccggggaatctgcagagctgggtgcgggagcagcatccagagagcggggaggaggtggtggtgctattggagtatttggagaggcagctggatgagccggcgccgcaggtttcaggtgttgaccaggggcaagaactgctctgttgcaagatggcactattgacaccagccccagggtcacaaagtagccaatttcagctaatgaaggctctgctcaagcatgaatctgtgggatcccagcctttacaagatagagttctccaggtccccgtgcttgcccatggaggatgctgcagagaagataaagtggtagcttctaggcttactccagagtcccaggggttgttgaaagtggaagatgtggccctgaccctcacccctgaatggacacagcaggattcatctcaggggaatctctgtagagatgaaaagcaggagaaccatggcagcctggtctccctgggtgatgaaaaacagactaagagcagggacttgcctccagctgaggagcttccagaaaaggagcatgggaagatatcgtgccacctgagagaagacattgcccagattcctacatgtgcagaagctggtgaacaggagggcaggctacaaagaaagcagaaaaatgccacaggagggaggcggcacatctgccatgaatgtggaaagagttttgctcaaagctcaggcctgagtaaacacaggagaatccacactggtgagaaaccctacgaatgtgaagagtgtggcaaagccttcattgggagctctgcccttgtcattcatcagagagtccacactggtgagaagccatatgagtgtgaagaatgtggtaaggccttcagtcatagctcagaccttatcaagcatcagagaacccacactggggagaagccctatgagtgtgatgactgtgggaagaccttcagccagagctgcagcctccttgaacatcacagaatccacactggggagaagccgtatcagtgcagtatgtgtggcaaagcctttaggcgaagttcacatctcctgagacatcagaggatccatactggggataaaaatgttcaggaacctgagcagggagaggcctggaaaagtaggatggaaagccagttggaaaatgttgaaactcccatgtccttataaatgtaatgagtgtgaaagaagtttcactcagaatacaggcctcattgaacatcaaaaaatccacactggtgagaaaccctatcagtgtaatgcgtgtggaaaaggcttcacccgaatttcataccttgttcaacatcagagaagccatgtagggaaaaacatcctatcacagtgacccatgccatacatgccagagttggtgctcatttgtcactgatctgaagccactccccctggagtctcaactatagaaattgtggggtgggctttatttaccactacacattatcaggtgttagaaaatgtagactgggttagacaaattatcttctaagttctagaaggggtttgtaatcaaaacatatttagtaggaggctacgggagagttgtctagaagaggtaagacctgaaactgtttgttctctcccactagaattaaatggatgtttagactggctacttgccctaaaccagcacttggtgatgtctactgggtggatggttgtgatttgggggctgcttctctgaccattctttttgactgtaatgaatcctccacagttggtcagattcataaagtcttatatccccctctgtgccttttctgcaggtgctaataaatgtttattgaatgtaccagtgagattaccttcatagatctgaaaatctgatgttatccaggtttctgaagaacttctcgccaaggccatttgtgcttgtgtccaattctctgacctagattgtgactcagtctag

SEQ ID NO: 61132 - DNA, 3165 bp, Homo sapiens
ttttttttttttctcaaaactcagttttattgacttccagcatttccccctggatctgagctcagcccagctggttttggttcgtctctgaggctcagtgttacagcgactggctccaccactcccctccctggccactgggctccccaggcagggaggaggagaggcagttcatctgtgatgttggaaagaatgggcagcagggtcagaggccaaagaaagccatacaagcagcggcatgcctggagctggagctgccatcacatgccaagccccaccacacacacgcccccgcgggtggccttgccctcgaagctctctgccagcccacactcctcagctttctggggccacaccctgctcaggcagacatgccactcgccctggcttgttcctgggaccccaggctgcccaagggaaaggtaccgctcccaggtgctgcgcggctctgccctgcccactctaaccctggggctagcaagacgtgtcaggggaaccaaggctcagatcattcccccttcatctacaaccctgccagccctacagggataaatcaaaagacaaaatctccccatctcacagcgagtgacaagccgacctgggctactacatgtcccaagatgcacagctccgtaaccatacaccacctcccccaagcgggatctatcagaaatgaggccgggcaccccgcactctgggatttgtagtccccaggagccagcaccaaacacccaaggaagagagtgcacaggctaagactactgccacctcccacccggcccccacccgccacccaggccccggctctacactcagcatgggtgagggggagaaatggagggtcccctcccagcgcatgggggaaggcgctgtcctgttggaactgtgcagcgattctggaacccggcatccagctcagaacacatctggggagagagcaggggcggggtgacaggagagagcgtcagcggcaagctgtggaggatggggctcagcatgcagacctgggctgccgcatggcctctccctgagccctgatttgtggtagggaagcagtatgggtgcagtcccctcctatcccacctcttcagggtgagccagcctcacctctgcctagtctgagggtgagggcagggctgaggcaacgagagggaggaggagtgggctccagttctgaatctggacagctgagaggctcccgccccacccggctagcctccccagaagatctcacagccctaccggccccagcatcttcctcgccacattgaggccttctcggggaaggaaggaagaagggagtcctagccagacggcagtgaaagcaagcgatgcggcccgcagggagttgcagagagaatgggagggaggagaagcaacaccagaagagaagcaacagagacggtcagagcgcaacatggcacagaaaaccagggttgggggtctgcagctggtcccaggagagcaggaggctccactctgcctgcactgctctccagtggagctgccggctccggctcagacaaccctaggccaagtcctccttccttgacaccatcagcaacacaggtggcagagtaccagggcacaaaaggcccagcccaaaccactaatgccccttggagctccccatccaataaatgcaacctggctcctcgggcccctccactgccctgacaccccccatcctgggcttcaccagggacctatcagccctgggctgagcacagcaaatcccaagtccacactggggtgtggggggcctggggagggaaacttgtggagggagcttggagttggaaagcagttcctacaactcaggatactcccctcttctcttcccacagtgagtcagaccccccagtcaagatctggatcagatcaggttgggcccggtgttcagaggatgaggcagcgagaggccttctcctctggggatggactgcgtttggttgcttcacccctcgcaccctcctgggtcccccccaagcctggatcttggtgctgggccttgggccgcccctgccgtcggtgctgtgcctcccgcccacctgcgggtttcttcccagctgcctccatctctgacaggctgtaggccatggccagctgcaggtcctcatcctcagagaggtcgctgtccaaggggcatgaggcaggggtctgctggacctgagtgcccccagacctggaagtgactgacggctgctgctcgcgacggctcagctccaagcccagtgccaggtcatctgggacaccattgattgtgactgacttcagctgcccatcctcctccacttccacccgctcctgcccgttctccatgattctgcgtgtggtgatgcggcgtccttggacaaaggtggtagatgtagaaacagagcgaaaagcaccagccccaggactgaaggagaaagatgaggaggagaaatcggagtgcccagggaaggaggaagagaaggtaaagaaggggcctgagtgtcgggaaccccggttctgaagctctgagaaggggcccaggtcatcaaagagctctgcaaaagggtctccactcccaaagaattcccggaagacctcctcggggctgcggaaggtgaaggtgaagccaggcccaccactgccagcttctgcccgagatgggccagttcctgtccctgtcagcccttcccggccatagcggtcgtaaatctcccgcttgtgcttgtcagacagcacttcatatgcctcggccacctccttaaatttcttctcagcaaactctttattatctgggtttttgtctgggtgccactggagagccttgcgccgatacgccttcttgatgtcatcagcggacgcacttcgcggcacgtctaggatctcgtagtaggatgccatggcaactggtcagtcgtcaggcgggcctccttggggctgcagaagagaaggagtcaggcggaaagaaccaagagccccaccctgtggctgcagcagtccccctccccgggtggcggaaggcgctcccagttggaagcggagcacagcgggctctgcttgcggccggtgactaggctccctccggcagccttatctgcccccgcaggccggggccaagagctatctcgacgcccaggaccaggagcccatatcggggccccccaactccagcagtccgatccacgaaatcgt

SEQ ID NO: 61133 - DNA, 2797 bp, Homo sapiens
tggagatggaggggaaggaggatgcccagaaggtgctgaagtgcatgtactgtggacactcctttgagtccttgcaggacctcagcgttcacatgatcaaaaccaagcattaccagaaagtgcctctgaaggagccagtgccagccatcaccaaactggtcccctccaccaaaaagcgggcgcttcaggacctggcgcccccctgctcccctgagccagcaggaatggccgcagaggtggccctgagtgagtcagccaaggatcagaaagcagcgaacccgtacgtcacgcccaataaccgctatggctaccagaatggcgccagctacacctggcagtttgaggcccgcaaggcgcagatcctcaagtgcatggagtgtggcagctcccacgacacgctgcagcagctcaccgcccacatgatggtcaccgggcacttcctgaaagtgaccacctcggcttctaagaagggcaagcagttggtgctggaccctgtggtggaagagaagatccagtccatcccactaccgcccaccacccacacgcggctgccggcctccagcatcaaaaagcagcccgactctcccgcggggtccacgacttctgaagaaaagaaagagccagagaaggagaagccgcctgtggctggcgacgcggagaagatcaaggaggagagtgaggacagcttggagaaatttgagcccagcaccctgtacccgtacctgcgtgaggaggacctggacgacagccccaagggagggctggacattctcaagtccctggagaataccgtctccacggccattagcaaagctcagaatggtgcgccctcatggggtggctaccccagcatccatgcagcctaccagctcccgggcaccgtgaagccactgccggcggccgtgcagagcgtgcaggtgcagccgtcctatgctggcggcgtgaagtcgctgtcttccgccgagcacaacgccctcctgcactccccagggagcctcacgcccccaccgcacaagagcaacgtgtctgccatggaggagctggtggagaaggtcacgggcaaggtcaacatcaagaaggaggagagaccccctgagaaggagaagagctccccggccaaggctgcgtcccccatagcaaaagagaataaagatttcccgaaaacggaggaagtcagcggcaaaccacagaagaagggccctgaggccgagactgggaaggccaaaaaggagggaccgctggacgttcacaccccaaatggcacagagcctctcaaagcaaaggtcaccaacggctgtaacaacctggggatcatcatggaccactcaccggagccttccttcatcaacccgctgagcgctttgcagtccatcatgaacacccacctgggcaaggtgtccaagcccgtgagtccctcgctggacccgctggcgatgctgtacaagatcagcaacagcatgctggacaagccggtgtaccccgccacccctgtgaagcaggccgatgccatcgaccgctactattatgaaaacagcgaccagcccattgacttaaccaagtccaagaacaagccgctggtgtccagcgtggctgattcggtggcatcacctctgcgggagagcgcactcatggacatctccgacatggtgaaaaacctcacaggccgcctgacgcccaagtcctccacgccctccacagtttcagagaagtccgatgctgatggcagcagctttgaggaggcgttggacgagctgtcaccggtccacaagaggaagggccggcagtccaactggaacccgcagcaccttctcatcctgcaggcccagttcgcctcgagcttgcgggagaccacagagggcaagtacatcatgtcggacttgggcccgcaggagagggtgcacatctcgaagtttactgggctctccatgaccaccatcagccactggctggccaatgttgaagttaccagtttgaggaggacagggggaacgaaattcctaaaagaacctgggacacaggggcatcctgttttcttttgcaacgattgtgcctctcagttcagaactgcttctacatacataagtcatttggagacacacttgggcttcagcctgaaggatctctccaagctgccactcaatcagattcaagaacagcagaatgtttcgaaagtcctcaccaacaaaactctgggcccactgggggccaccgaggaagacttgggctccacattccaatgtaagctctgcaaccggacttttgcgagcaagcacgcagtcaaactgcaccttaataagacccacggcaagtctcccgaggaccacctgatctatgtgactgagttggagaaacagtagcgtccaggtatgcaagagaccgcggaacattgcactaaacgtcgtcgagctgcactaggcctggcctgagcctctgaaatcagtctttcctttgttgctggcccgcctctctggaccttggttttcttacacatattttgtatatttatatgctctctgtccgatctgtgcatgttatttttctttttccgtgagtcaaagtctgacctttattttcaacatctgttcttggtgttaagctatcttttgtaggaaatagtggggcacactactcagagacattatttagcagtaaagaaagacacaaataacaatgataaaaagacatcctaaaatggtgaagttgccatgacaataaaggtcatagaacctggtagtgtcaaatttaaccctttgaggactgtaattgcatttctgtgcctttcacttgaaaaaaaaaa

SEQ ID NO: 61134 - DNA, 2148 bp, Homo sapiens; identical to SEQ ID NO: 60930

SEQ ID NO: 61135 - DNA, 2150 bp, Homo sapiens
cgctgctgtcgggagccaagatggcggctgcggcggcagcgacagcagcagcagcagccagtattcgggaaaggcagacagtggctttgaagcgtatgttgaatttcaatgtgcctcatattaaaaacagcacaggagaaccagtatggaaggtactcatttatgacagatttggccaagatataatctctcctctgctatctgtgagggagctaagagacatgggaatcactctgcatctgcttttacactctgatcgagatcctattccagatgttcctgcagtatactttgtaatgccaactgaagaaaatattgacagaatgtgccaggatcttcgaaatcaactatatgaatcatattatttaaattttatttctgctatttcaagaagtaaactggaagatattgcaaatgccagcgttcggggcctaagtgcaagtaacacaagtagccaaggtttggggaccaatatctcaattttattactttggaagatgatatgtttgtattatgtaatcaaaataaggagcttgtttcatatcgtgccattaacaggccagatatcacagacacggaaatggaaactgttatggacactatagttgacagcctcttctgcttttttgttactctgggtgctgttcctataatcagatgttcaagaggaacagcagcagaaatggtagcagtgaaactagacaagaaacttcgagaaaatctaagagatgcaagaaacagtctttttacaggtgatacacttggagctggccaattcagcttccagaggcccttattagtccttgttgacagaaacatagatttggcaactcctttacatcatacttggacatatcaagcattggtgcacgatgtactggatttccatttaaacagggttaatttggaagaatcttcaggagtggaaaactctccagctggtgctagaccaaagagaaaaaacaagaagtcttatgatttaactccggttgataaattttggcaaaaacataaaggaagtccattcccagaagttgcagaatcagttcagcaagaactagaatcttacagagcacaggaagatgaggtcaaacgacttaaaagcattatgggactagaaggggaagatgaaggagccataagtatgctttctgacaataccgctaagctaacatcagctgttagttctttgccagaactccttgagaaaaaaagacttattgatctccatacaaatgttgccactgctgttttagaacatataaaggcaagaaaattggatgtatattttgaatatgaagaaaaaataatgagcaaaactactctggataaatctcttctagatataatatcagaccctgatgcaggaactccagaagataaaatgaggttgtttcttatctattatataagcacacagcaagcaccttctgaggctgatttggagcaatataaaaaagctttaactgatgcaggatgcaaccttaatcctttacaatatatcaaacagtggaaggcttttaccaagatggcctcagctccggccagctatggcagcactaccactaaaccaatgggtcttttatcacgagtcatgaatacaggatcacagtttgtgatggaaggagtgaagaacctggttttgaaacagcaaaatctacctgttactcgtattttggacaatcttatggagatgaagtcaaaccccgaaactgatgactatagatattttgatcccaaaatgctgcggggcaatgacagctcagttcccagaaataaaaatccattccaagaggccattgtttttgtggtgggaggaggcaactacattgaatatcagaatcttgttgactacataaaggggaaacaaggcaaacacattttatatggctgcagtgagctttttaatgctacacagttcataaaacagttgtcacaacttggacaaaagtaacacagaagaaccttactatgataatctacttggaatgtggataaatgtaaaaagaagaaaagttagaagagcaatatgtttccttctctgtaacagtgtcctaacagtgaaaatcagagttatttgttaatttttaaggaaattatatacttaatatgtattgattaaaagaaacatttcagaaataaaaaaaaaa

SEQ ID NO: 61136 - DNA, 2372 bp, Homo sapiens
ggaaaggaagacacatttacaaatggatatttattacctgtacataggaaaatttatgccctgcatttatacaaaaaagggagggcaaagagcaaattggtttcagctcaaaacaattcttacatgaaagtggcatattttggggtagcatacactgatcctcttcaaaaggaataatttgcttttctcttatcatggttatgagagctactttgaattaatttttgctttttgaaagtacatttaattctcaaatgtttctgcttttgaatgcagtttgggagagcccatggtgactgcgtgagtggagcccagctgtgtggatgccccagcatggatgactacatggtcctgagaatgattggggagggctccttcggcagagctcttttggttcagcatgaaagcagtaatcagatgtttgccatgaaagaaataaggcttcccaagtctttctctaatacacagaattctaggaaggaggctgttcttttagccaaaatgaaacaccctaatattgttgccttcaaagaatcatttgaagctgaaggacacttgtatattgtgatggaatactgtgatggaggggatctaatgcaaaagattaaacagcagaaaggaaagttatttcctgaagacatgatacttaattggtttacccaaatgtgccttggagtaaatcacattcacaagaaacgtgtgctacacagagatatcaagtccaagaatatcttcctcactcagaatggaaaagggaaattgggagactttggatctgcccgtcttctctccaatccgatggcatttgcttgtacctatgtgggaactccttattatgtgcctccagaaatttgggaaaacctgccttataacaataaaagtgacatctggtccttgggttgcatcctgtatgaactctgtacccttaagcatccatttcaggcaaatagttggaaaaatcttatcctcaaagtatgtcaagggtgcatcagtccactgccgtctcattactcctatgaacttcagttcctagtcaagcagatgtttaaaaggaatccctcacatcgcccctcggctacaacgcttctctctcgaggcatcgtagctcggcttgtccagaagtgcttaccccccgagatcatcatggaatatggtgaggaagtattagaagaaataaaaaattcgaagcataacacaccaagaaaaaaaacaaaccccagcagaatcaggatagctttgggaaatgaagcaagcacagtgcaagaggaagaacaagatagaaagggtagccatactgatttggaaagcattaatgaaaatttagttgaaagtgcattgagaagagtaaacagagaagaaaaaggtaataagtcagtccatctgaggaaagccagttcaccaaatcttcatagacgacagtgggagaaaaatgtacccaatacagctcttacagctttggaaaatgcatccatactcacctccagtttaacagcagaggacgatagaggtggttctgtaataaagtacagcaaaaatactactcgtaagcagtggctcaaagagacccctgacactttgttgaacatccttaagaatgctgatctcagcttggcttttcaaacatacacaatatatagaccaggttcacgaagggttcttgaaaggccccctgtctgaagaaacagaagcatcggacagtgttgatggaggtcacgattctgtcattttggatccagagcgacttgagcctgggctagatgaggaggacacggactttgaggaggaagatgacaaccccgactgggtgtcagagctgaagaagcgagctggatggcaaggcctgtgcgacagataatgcctgaggaaatgttcctgagtcacgctgaggagagccttcactcaggagttcatgctgagatgatcatgagttcatgcgacgtatattttcctttggaaacagaatgaagcagaggaaactcttaatacttaaaatcgttcttgattagtatcgtgagtttgaaaagtctagaactcctgtaagtttttgaactcaagggagaaggtatagtggaatgagtgtgagcatcgggctttgcagtcccatagaacagaaatggggatgcctagccgtgcccacctaccctacttgtgtgattgtggggaaattaccttaaccctcttcaagcccccaatttccctcaacccataaaatgaagataataatgcctacctcagagggatgctgaccacagacctttatagcagcccgtatgatattattcacattatgatatgtgtttattattatgtgactcttttttacatttcctaaaggtttgagaattaaatatatttaattatgaaaaaaaaaa

SEQ ID NO: 61137 - DNA, 5427 bp, Homo sapiens
tttttttttttgagacggagtctcgctctgtcgcccaggccggactgcggactgcagtggcgcgatctcggctcactgcaagctccgcttcccgggttcacgccattctcctgcctcagcctcccgagtagctgggactacaggcgcccgccaccgcgcccggctaattttttgtatttttagtagagacggggtttcaccttgttagccaggatggtctcgatctcctgacctcatgatccacccgcctcggcctcccaaagtgctgggattacaggcgtgagccaccgcgcccggcctcttccctcctatcattttcgtgttctggagacagtagcatacttggccctgggtttgacataaaactagttctacatatagaaagctagggacaaaaatgagttctggacaaaactaaaggactgaataatcatgtgaaacagcccaactctcccctacatatgcctaagcactgatgaagtgtttcatatattcactcacctaaatttcacaacaatcctatgaaatgctaactagcatgatccccagtttaaaggtgaggaaattgagtcacaggcagaataacttgctctgggtcaccaagctaataaatagatctgggttcaaacccaggcagcctggctccggaatcaactcttaaccacttagagcatcatcactgagatcgggagagggacaggctgctgtaaagagggtgaagcgaaaatgggaggagagcagcggttaagcaatgatgtgatggggctaaataaaaatggatacaaaaacgagtaaaagaccagagtaaaaggaaaagactggagaaggggcctaacattaaaagagaatgaggagaagggagagttgacaagcaaaggtgaaagcagaaagtcagttgtccatatggcttggggagataaagaaggcccaggaaggcctccaggaaaaggctgccatgtcaggcaggacacagaggacaattgaggaaaagtgattcttacaagatggtgaaggtgccattgtgggtgttgggctctggcacaggcacttggcggagcctctgctctgggttgagatcaatacatgacaacatctcatctccgcaggtacagagctcacatatgttggtgcttgtggaggccttgtgttcctctggtgcagttaaagccttattttgggtgtaactttcagactgcaccagtgaatcctgagcaggttctagttcagtaggtggacctgtgacttcagtcaggcttcgatgcagagtctgaacccggtctggacgaggagctgtagtcttctccaggcctgtagaatgtccagtctctgtagtgggttctggaatgatggcaagtcccaggtctggaagttgagttgaggtctcctccgtggttggagacggtttaacctctgtagtaggttttgtagttatggtaagctccaggtccagaggttgaacggtggcttgagtcaggtgtgaatgctgagcctgacccttgtctgaaggtggaagtgtcacctcagggtgtcctggaggaggagctgtagtcatcagggctgtagaaggttcaacctctgtcatggattttggagtgatggtaaaccccaggtccaaaggttgaactgtggctcgagtcaggtgtgaatgctgagtctgaacctggtctggatgtggaagtgtcacctcaggatgctttggagaaactatagtcctcttcgggggtgtagaatgtccaacctccgtagtgggttctggagtgatggtaagtcccaggtccaaaagttgaactgtaacgctgggtgacactggatgctgagcttgatcctgacctggtgttggatttgttaccccttgatatactcgaagttggggtacaactttcttaggaggctgagttggggtctccttcatggttggagaaagttcaacctctgtcatggattctggagtgatggtaaaccccagatccaaaggttgaactgtggcttgagtcaggtgtgaatgctctggaggttgagctacaactacattagggaactctggagtctgagctggggcctcctgatgggttagggaagactcaccctcctcagcggtctgtggatgctcagctgcagcctcctgctgggttggagaggggttctcattattaataggttccggagatttgaaatgaagtctcctgttgaactgctaaaggtccagcttcttctgatgactctgaaagcagaggtgggcccccgtgctggatggcgggaggttctatatcattacctgaccctgagagccgagttgtagcctcctgctggactagagaagttcccacctctgcactaggctctgctgctatggtgagctgcacgtctggaggcttcacagagacactgggtgaatctaaatgatgagtttgatggtgacctggaggtgaaactgtgacttcatgatgttctggaggctgacctggggtctcctgctgggtcggagaagattcgacctccctagaagtctcagaaggctgaactggctgctgctgctcactgatggaaagttcatgctccataggaggaactggaggctcaattggggcctcctgttgggttgcagaaggttccacctcctctggaaactgaattggggtctcctgctgggtttgggaagattctgtctcattggtaggctctgaagttatggtaacctccacatctgcaggtttaactgtaatgttgggcaagtgataataagcttgatcctcacctggaggttgaactgacacctcatgattcggtagagttagactctccatagaggactctggaggcagagctggggcctcctgctgcattgaagaaggttcttcctcaaggagctgtggaagctgtgctggggcttcttgttggagtgaagaggactggatgtcttcaagggtctctggattttgagtttcgggctctagatggaattgagaaggtccaacttgctcagagggccctggaggctcatctgacttcacccggagttctggaggcaggctaccgggatacggtgtatctgtactggaatattcattctgcaaagtctgtttctgactctgaggtgtggataattggtgtataattccaataatctcagcaaggctccaacgctgagctggatctttcttcagcttcttgggcgaaacagggagcctttcctgtggactcagcttgtcctttaaatcctgctgtgaagccaagaactgctctggctccaggggcagctctccagctgaatcccaggtgtccaggaatggaaccaaattttcagtcgattcctggggtggggctggcatctctgaggaagcagagggccccaggtgatcaaagtcccacgggtctgctgggagagtaggcgcatggggagattcccgtgggaaatgggaggagtgggaagaccagggctcaggcggccccagggggttagaggtcagctggagcgggtccttgacccactccagaggctgagcctccttgactagtagccacaatagttgccacataaggaggggccatgggccccagaaacgcagcggggacatgacacacgctagtgccgggcactgagcggaagtcattctggcagctccgagacgctcgtgccccttgtaagcatgagtcccgccctgtctttatgacacctttatttatgccacagaactgctccatgtcaccagggcactcttatgtcacaatcccgcccaagcacgccttcccatcctgccctgccggagcacccctctcctccccttagtgaggaaggatttgggcctcagatcctggtggtcccaggactccagcgcctgctgtggtggggtagggtggggtagggtgggatgggggcgcggcagagcttcccaaggaagtcaccggacctcgcctcaggatattcagaagtgctagttcagttctggcagccttcctcctttaaggtgaaatccgagaacactcttccttccagggagagcaactgacctgcaaaatgggcgccaggatgtacattacagtcatttattccaaagtgttgccattttcgctaaactgtcgcatgtttgataattaattcaccaccctattaggtaggggctgccagggaataagcgaggactccaaattttctgtaggaggggtgttgggagttggcaattcggtctgggagagaaggttttaatccgagtgaagagccctttgcactagcctgggaggaggctgaactgtcatcctgccttgactcaacacagccattcccctagaagttacagcacttctagggtcacctgtgttcagagatctaccctgtgtgcacacatggagaagaggcttaggttgttaaagtcagcatgttaaatcatttcctgaaatgcgactgtaactagaacccagctgacttcccccacagccgttcttacctattttattactgtctggcataattaccagcatgtaaactccaagaaggtgcttcatcttattttagtgcctggcatagacatagggtgcatagtgatggctttaaaattgaaggggggccgggcgcagtggctcacgcctgtaatcccagcactttgggaggccgaggcgggtggatcacgaggtcaggagatcgagaccatcctggctaacaaggtgaaaccccgtctctactaaaaatacaaaaaattagccgggcgcggtggcgggcgcctgtagtcccagctactcgggaggctgaggcaggagaatggcgtgaacccgggaggcagaggttgcagtgagccgagatcacaacactgcacttcagcctgggcaacaagagagaaactccatctcaaaaaaataaaataaaataaaatggaagagattccaagattcacctcatttagggatggagctattattataatcagatttctgaaatgagtgctgacttcctctcacatttcacaggaagctagacttcttaaagcttgaagtctccttggtgggttttatttaaattgaattaaaataattattttacagggaaaaatttcaaaacactttgcaactttggggtaaaagttaaataaaacactgtagccccaagttaagttcccactgaaatgatacttttgctcctttttttaaaaaaaattccataaatagtaaataatgactgttttgagattaatttagaaacaatccctatttaagagctttcatatgcagtcatgcattgcttgccacgtgaggagcttgagaaatgggtcactaggttatttcaccattgtgctaatatcatagcgtatacttacacaaacctaggtggtgtagccaccatacctagggtacacggtatggcttaggactcctaggctacaaacctgtactgtatgttactgtactgaatactaaaggcaactgtcacagaatggc

SEQ ID NO: 61138 - DNA, 4815 bp, Homo sapiens
  misc_feature (1)...(4815): n = a,t,c or g
ttttttttttttttaaggggggcaaagtacagtttgatttttacaatgaaaagtctcatttatgcaatgctgataaagggccttccttcaactggagacaatttgggatgttgccaaaacaaggtttgggaaagcccttctatggatcggttttgtgttccaagtctgtccctgcccaaaagccatcaaaaagtctcccatcacccctggggctccagtctgtctacccccagacttgggcagctggggatctctccttcctggggttcatagttcttcattcccaccccttcaggcgatgggagttaggagttccaggggcccacgttgggtgnaacgaggattgtgagtgtcaagaggggaatacgtaggttttatgatcttgaaggacccaaggtcccaaccccagcagctgggtgccctgctttcaggggtgacgggtgagtcaagttcgcgagggagggccgacagaggggctgctggaggcgggtgggagtgaaggatgcacggccagaggccaggccccatgcccccgatgcccacctccttcccccccgccgggaaggccctgacttttccccttccagctgaggctgaagaacacggcgctcaagtccatcatcgctctcttggtgcctgcagaggcactgctgttggctgacgtgtgcggggggttgctgcccctccgggccattgagcgcataggctacaaggtgacattgctgctgagttacctcgtcctccactcctccctggtgcaggccctgcccagctcctcctcctgcaacccactgctcagtaagccctgctcccttacccagtctgccctgtttctccccggtcacccactggtgctcagctcgctgggcaccagagacacagggactggcccctgagcatctccctgtgccctgcctcccccagtttactacttcaccatcctgctgctgctgctcttcctcagcaccatagagactgtgctgctggctgggctgctggcccggggcaaccttggggccaagagcggccccagcccagccccgagaggggaacagcgagagcacggcaacccagggcctcatccctgctgaaggtgggcaggggctggggggtaaaggaaatgaggccctaggtgcaanacctagggctggggtgagggcaacggaggtcccaggtgtgggtagaggccccttgcatcccaccctgctggctctcctgtcccctggtctccaccatgtcctcctcccttagaagaaacaggtctggggcagggagcaagctgagcctccctgaagtcccaggtgacctcaatcccctgataacccatgccttgcacagcctaagagggtgtttcttcaactgaagatggcctgaaatgggccagacccaaattttcatcagctgagaatctaaagaaaggaaagcgatacaggctgatgaacccctggggttcgcctcttcccgctcatgttgaggggaccttgaaagaacaagctcctttccctgtatctctccccacagagccctccagaggagtaaaggggtcacagagaagctggcctgagactgctgaccgcatcttcttcctcgtgtatgtggttggggttgctgtgcacccaattccgtctttgcaggaatctggatgtgggcagcgtgcaagtctgacgcagcccctggagaggctgcaccccatggcaggcggcctagactgtaaagggggcagggcctggggcttgcaaccctaggatgaagtttgctttcccatggctgggggcgggcccatgacagggcctctggattaagccaccctgagctctccctccgctagcacacaagcacagagcgtgaaataaacccatctccagtgcaagtgtgcctcaagggtcagtcttcaatctcgtcctaaataggtggggccctattttttgcttccaacccccattttgctccttaacttttccccattgtccctgtctcccagcccacaggcaggcagcctaattgctccttctgcaaaccaacgaactgccctgccctgggccaagaggcactgaggctggggaccagagacaggggcctgaaggaaggctgtaagagggtggggcggaactcctcctccgaacgcctcctgcagtgtgctggaactctagggaaaaatggccagtgagcctgcctcccccagccacctaggggactccctgggagggaaaggtcccagacctcaggcctgtgggcgggcgggaatgtgttttaagagagggggtcagtcccgactgcctttcctccaggagctctggctgcttctctgagccctgccacatctctgggctgtaggggagttctctgtccccacctctgacctaggctggagggagggcccttctgccctgctgctcttggtacacatggagcagcaagtgggcaaaggcctctgtcttccttctctcttttcctgtttcagaagccatcagggtcataaaagcccaaggtgtgaagggaccccaggcttccgggagagtgctggttcggctgggaacacgggctgtggggaaaaagcaggagccaggactagggggctcagggacacagctccccggagtcgtgaaaacaggtctctgtcccagaggacttcaagctcacccagcccagaggcaagctaacactggtttatctgtccaatgacacgccagtctggtggaaccaggcagggctagcagcaggctcaggcagaggtgtcgaaaaggcgatcgatcatgtcgcccacctgctccaccccgtacttgatgtacttttccgggttcttggtgaagggcacgctgccaaacttctgtagaaaggccccgtaggtctccttgacaaatggtcttcttgggcctggcgaatcctgtccctctgctctgtgtctggaataagcccaggccttcctgatttttgcacagttcttcgaggccatcattgaagcccttaaaaacgctcccttgaataaatctgccgctccttgtcccggagcttgaactcccggctggaacacaggtagattcttctctgcgatgtaatcagtcacctttaaccagctgcgctggtaggtctggatctgctgctcaatgtgctcccggtaggagcgctcagcagtcttctgtgtcactgccaccagctggatcagttcagacttctccagggacttgaggatgtaattgtagttgttgtgcaggaagatggggcttacagctggggtctcgtacaccttggacttgctcagcaagttcaactgcaggttgcccagcactttacagatataggtgcttagcagccgcttgctgaactcagagctgtagctggtggccgaagagctggtctcttgggaggccagcatggcgcctgccgtctcctggaagtccaaaagctgctgcaggaagaggatggcattgctggtgagctcgtgtacggtgccgtccttcggcatgttgtactccttgtccgggtcattcttgatgttgtctgcgaagtcctccagcgctttggcaccgatggtctccatggatgtgatgaggccaggcagcttgttctttgtgctggcagccgtgccctggagcacctggtcaaactcaggcttggtctgcttgaggtgtcgcaggatggggaagacggtgagcaccgtggagaagtcgtgtcgcacaatggccttccgggcagcagacacgatgttctccccttcaagcatcagcccatccagggcatcctgtatcagggagtcgaaggtcttcttctggtggtgctcggggatgatgtcggccagcagctggtactcgctctgcgccagcttgacgaaggcactgacgcagtggatgtaggcatcggtctccacgtccagcatgtcatctctcccttccagaggaatgaggttagagcccccctttttcccatctagaccatgctgggaatactgtttcagaaggttctgagccttacggatcgtccctggccgcttgactggcttcttggtaggtgtgtctttcctcttgttggggatagcaggggagtagggaaccccagaggaagaactgctcttatggaaatgctccttcagtcctttgatggagcggtccagctggctggagcgtatctggtagtagacgttcatgaaatcttggttgcggccatattccaccagccagcgggagatgcgaatgacatcctggagcacgctctcgggcaggtgctccagggtcacgtcctcctgggcctccagatcatcgtcaccactgatcagatccaagatgagcacgggcgagacgaccttactgtgccgcgtcatcaggctgcgaaattcggactccagggcctccttcccgcgctcaaagagcagtttcactttgttgagttccgggctgtctgggctgttgtcctggcaatactccactgccttctgaatcttggccatgcttcccaggtactcttccagcctacctgtggggccctctctgatgatcttctcagtgtcactggccacatggtagtagctgatgacatggtccaggcaggacagcgtcttctcaacattctcctgcagccgctgcagattctccgtctgcttgtgcacagggatgatggagttctccagcttcataaggcggctctcaaaggatgataagatagacaccatgttcttagtgagctggtcgctcttctccaggctgtctcggatgaaggacagagtctcctcctcctgcttcagcttgtcctcaatctcccgccgtcgagcggatgcctcctgtgggggaatcatcgctctgaaccccgcggctcccactcccc

SEQ ID NO: 61139 - DNA, 2785 bp, Homo sapiens
tttcgtcacccacgttggcctcccaaagctctgggattacagatgtgagccactgcgccctgctggagtattttcgatccaagagaacatcgtggacattatgtagcagcttccagccttctttctcatagaaacaaaggcagagaagcagcacccagactttgggaatgttccatttggctgctgcactcccatccaccctgtgtacacatcctccagaggcgatcacctcggctgttgggctctgaggcccgagtgccttcgcatagtgtcgagagcgccatggacctctacctctgtgggttttgtggctgtgggacctcagtgccttcctgtgcgtggcctggcactcttcgcgccctgttcgcgatgactcggtagtagagaagtccctcaagtccttgaaggacaagaacaagaagctggaggaaggcggcccggtgtacagcccccccgcagaggtggtggtgaagaagtccctggggcagcgggtgctggacgagctgaagcactactaccatggcttccgcctgctatggatcgacaccaagatcgcggcacgcatgctctggcgcatcctcaacggccacagcctgacccgccgggagcgcaggcagtttctccggatctgcgctgacctcttccgcctggtgccgttccttgtgttcgtggtggtgccgttcatggagtttctgctgcctgttgctgtgaagctcttccccaacatgttgccatccacatttgagactcagtcactcaaggaggagaggctgaagaaggagcttcgggtcaagctggagctggccaagttcctccaggacaccatcgaggagatggccttgaagaacaaggcagccaagggcagcgccaccaaagacttctctgtgtttttccagaagatccgggaaacaggggagaggcccagcaatgaggaaatcatgcgtttttccaaattatttgaggatgagctgaccctggacaacctgacacggccgcagctggtggccctgtgcaagctgctggagctacagtccatcggcaccaacaacttcctgcgcttccagcttaccatgcggctgcgctccataaaggcagacgacaagctgattgctgaggaaggggtggacagcctgaatgtcaaggagctgcaggcagcgtgtcgggcacgaggcatgcgggccctgggcgtcacggaagaccgcctgaggggtcagctgaagcagtggctggacctgcacctgcatcaggagatccccacatcgctgctcatcctgtcccgggccatgtacctcccggacaccctctctccagccgaccagctcaagtccacactgcagaccctcccagagattgtggcaaaggaagcacaggtgaaagtggccgaggtggagggcgagcaggtggacaacaaggccaagctggaggccacgctgcaggaggaggcggccatccagcaggagcaccgtgagaaggagctgcagaagcgctcggaggtggcgaaggattttgagcccgaacgtgtggtagctgctccccaaaggccggggaccgagccacagccagaaatgcctgacacagtcctgcagtcagagaccttgaaggacactgccccggtgctggagggcttgaaggaggaagagatcacgaaggaggaaatcgacatcctcagcgatgcctgctctaagctgcaggagcagaagaagtcactcaccaaggagaaggaggagctggagctgctgaaggaggatgtgcaggactacagcgaggacttgcaggagatcaagaaggaactttcaaagactggtgaagaaaaatacgtggaagaatctaaagccagcaagagattgacaaaaagggtgcagcaaatgatcgggcagatcgatggcttgatctcgcagctggagatggaccagcaggctggcaagctggccccggccaacggcatgcccacgggggagaacgtcatcagtgtcgctgagctcatcaacgccatgaagcaagtcaagcacattcccgaaagcaagctcaccagcctggccgcagcactggatgaaaacaaggatggcaaggtcaacatcgacgacctcgtcaaggtgattgagctggtggacaaagaagatgttcacatctccaccagccaggtggctgagattgtagcaacactggaaaaagaggagaaggtggaggagaaggagaaggccaaagagaaggcagagaaggaggtcgcagaggtgaagagctagaaccactggcctgggcacctgtcctcctgctgtgccgtcaccctggcaagggccgtgagggcgattgctttgtggtgattctcagtggctcatctaatattttggctggaataaatcagagacttccataatcaagtaaattttaattttcatcattccatggagattcagtctgtctggaatcccggaacccctccacagaatcgtgtctggatccacactgtggtgtggctgccacggcctcctggctccagaggcagctgggccgggccaaggcaggaaggcgcccccatgtgtgtggcctcagtctcagcatctgactgtgctgccctgtccccagggaagagaatgaggaccacgtggacttgttcgcagtgggtcccggtgctggcaggagtgtgctggtgagccggctctgtctttgtaaatccttcaggggtcctacggctgactccacacggacagcccgtcctgggccgtgttaagcaccttttgtagaaatcgtatttttattaaaacatcaaatctgtgttcctgtaaaa

SEQ ID NO: 61140 - DNA, 5200 bp, Homo sapiens
gacgtgggccccgagtgcaatcgcgggaagccagggtttccagctaggacacagcaggtcgtgatccgggtcgggacactgcctggcagaggctgcgagcatggggccctggggctggaaattgcgctggaccgtcgccttgctcctcgccgcggcggggactgcagtgggcgacagatgcgaaagaaacgagttccagtgccaagacgggaaatgcatctcctacaagtgggtctgcgatggcagcgctgagtgccaggatggctctgatgagtcccaggagacgtgcttgtctgtcacctgcaaatccggggacttcagctgtgggggccgtgtcaaccgctgcattcctcagttctggaggtgcgatggccaagtggactgcgacaacggctcagacgagcaaggctgtccccccaagacgtgctcccaggacgagtttcgctgccacgatgggaagtgcatctctcggcagttcgtctgtgactcagaccgggactgcttggacggctcaaacgaggcctcctgcccggtgctcacctgtggtcccgccagcttccagtgcaacagctccacctgcatcccccagctgtgggcctgcgacaacgaccccgactgcgaagatggctcggatgagtggccgcagcgctgtaggggtctttacgtgttccaaggggacagtagcccctgctcggccttcgagttccactgcctaagtggcgagtgcatccactccagctggcgctgtgatggtggccccgactgcaaggacaaatctgacgaggaaaactgcgctgtggccacctgtcgccctgacgaattccagtgctctgatggaaactgcatccatggcagccggcagtgtgaccgggaatatgactgcaaggacatgagcgatgaagttggctgcgttaatgtgacactctgcgagggacccaacaagttcaagtgtcacagcggcgaatgcatcaccctggacaaagtctgcaacatggctagagactgccgggactggtcagatgaacccatcaaagagtgcgggaccaacgaatgcttggacaacaacggcggctgttcccacgtctgcaatgaccttaagatcggctacgagtgcctgtgccccgacggcttccagctggtggcccagcgaagatgcgaagatatcgatgagtgtcaggatcccgacacctgcagccagctctgcgtgaacctggagggtggctacaagtgccagtgtgaggaaggcttccagctggacccccacacgaaggcctgcaaggctgtgggctccatcgcctacctcttcttcaccaaccggcacgaggtcaggaagatgacgctggaccggagcgagtacaccagcctcatccccaacctgaggaacgtggtcgctctggacacggaggtggccagcaatagaatctactggtctgacctgtcccagagaatgatctgcagcacccagcttgacagagcccacggcgtctcttcctatgacaccgtcatcagcagagacatccaggcccccgacgggctggctgtggactggatccacagcaacatctactggaccgactctgtcctgggcactgtctctgttgcggataccaagggcgtgaagaggaaaacgttattcagggagaacggctccaagccaagggccatcgtggtggatcctgttcatggcttcatgtactggactgactggggaactcccgccaagatcaagaaagggggcctgaatggtgtggacatctactcgctggtgactgaaaacattcagtggcccaatggcatcaccctagatctcctcagtggccgcctctactgggttgactccaaacttcactccatctcaagcatcgatgtcaatgggggcaaccggaagaccatcttggaggatgaaaagaggctggcccaccccttctccttggccgtctttgaggacaaagtattttggacagatatcatcaacgaagccattttcagtgccaaccgcctcacaggttccgatgtcaacttgttggctgaaaacctactgtccccagaggatatggtcctcttccacaacctcacccagccaagaggagtgaactggtgtgagaggaccaccctgagcaatggcggctgccagtatctgtgcctccctgccccgcagatcaacccccactcgcccaagtttacctgcgcctgcccggacggcatgctgctggccagggacatgaggagctgcctcacagagggttgaggctgcagtggccacccaggagacatccaccgtcaggctaaaggtcagctccacagccgtaaggacacagcacacaaccacccggcctgttcccgacacctcccggctgcctggggccacccctgggctcaccacggtggagatagtgacaatgtctcaccaagctctgggcgacgttgctggcaagaggaaattgagaagaagcccagtagcgtgagggctctgtccattgtcctccccatcgttgctcctcgtcttcctttgcctgggggtcttccttctatggaagaactggcggcttaagaacatcaacagcatcaactttgacaaccccgtctatcagaagaccacagaggatgaggtgcacatttgccacaaccaggacggctacagctacccctcgagacagatggtcagtctggaggatgacgtggcgtgaacatctgcctggagtcccgtccctgcccagaacccttcctgagacctcgccggccttgttttattcaaagacagagaagaccaaagcattgcctgccagagctttgttttatatatttattcatctgggaggcagaacaggcttcggacagtgcccatgcaatggcttgggttgggattttggtttcttcctttcctcgtgaaggataagagaaacaggcccggggggaccaggatgacacctccatttctctccaggaagttttgagtttctctccaccgtgacacaatcctcaaacatggaagatgaaagggcaggggatgtcaggcccagagaagcaagtggctttcaacacacaacagcagatggcaccaacgggaccccctggccctgcctcatccaccaatctctaagccaaacccctaaactcaggagtcaacgtgtttacctcttctatgcaagccttgctagacagccaggttagcctttgccctgtcacccccgaatcatgacccacccagtgtctttcgaggtgggtttgtaccttccttaagccaggaaagggattcatggcgtcggaaatgatctggctgaatccgtggtggcaccgagaccaaactcattcaccaaatgatgccacttcccagaggcagagcctgagtcactggtcacccttaatatttattaagtgcctgagacacccggttaccttggccgtgaggacacgtggcctgcacccaggtgtggctgtcaggacaccagcctggtgcccatcctcccgacccctacccacttccattcccgtggtctccttgcactttctcagttcagagttgtacactgtgtacatttggcatttgtgttattattttgcactgttttctgtcgtgtgtgttgggatgggatcccaggccagggaaagcccgtgtcaatgaatgccggggacagagaggggcaggttgaccgggacttcaaagccgtgatcgtgaatatcgagaactgccattgtcgtctttatgtccgcccacctagtgcttccacttctatgcaaatgcctccaagccattcacttccccaatcttgtcgttgatgggtatgtgtttaaaacatgcacggtgaggccgggcgcagtggctcacgcctgtaatcccagcactttgggaggccgaggcgggtggatcatgaggtcaggagatcgagaccatcctggctaacaaggtgaaaccccgtctctactaaaaatacaaaaaattagccgggcgtggtggcgggcacctgtagtcccagctactcgggaggctgaggcaggagaatggtgtgaacccgggaagcggagcttgcagtgagccgagattgcgccactgcagtccgcagtctggcctgggcgacagagcgagactccgtctcaaaaaaaaaaaccaaaaaaaacccttgcttggggcatcagcagcccttggcctctggccaggcatggcgaggctgaggtgggaggatggtttgagctcaggcatttgaggctgtcgtgagctatgattatgccactgctttccagcctgggcaacatagtaagaccccatctcttaaaaaatgaatttggccagacacaggtgcctcacgcctgtaatcccagcactttgggaggctgagctggatcacttgagttcaggagttggagaccaggcctgagcaacaaagcgagatcccatctctacaaaaaccaaaaagttaaaaatcagctgggtacggtggcacgtgcctgtgatcccagctacttgggaggctgaggcaggaggatcgcctgagcccaggaggtggaggttgcagtgagccatgatcgagccactgcactccagcctgggcaacagatgaagaccctatttcagaaatacaactataaaaaaataaataaatcctccagtctggatcgtttgacgggacttcaggttctttctgaaatcgccgtgttactgttgcactgatgtccggagagacagtgacagcctccgtcagactcccgcgtgaagatgtcacaagggattggcaattgtccccagggacaaaacactgtgtcccccccagtgcagggaaccgtgataagcctttctggtttcggagcacgtaaatgcgtccctgtacagatagtggggattttttgttatgtttgcactttgtatattggttgaaactgttatcacttatatatatatatatatatacacacatatatataaaatctatttatttttgcaaaccctggttgctgtatttgttcagtgactattctcggggccctgtgtagggggttattgcctctgaaatgcctcttctttatgtacaaagattatttgcacgaactggactgtgtgcaacgctttttgggagaatgatgtccccgttgtatgtatgagtggcttctgggagatgggtgtcactttttaaaccactgtatagaaggtttttgtagcctgaatgtcttactgtgatcaattaaatttcttaaatgaaccaaaaaa

SEQ ID NO: 61141 - DNA, 527 bp, Homo sapiens
cttggcacgaggagctgagcctgacccagcaggtcccagcagcctggcagcccggccagcatgcagcagcagcctctgcccgggcctggcgcccccacaactgagccaaccaagcctccctacagctacatcgcccttattgctatggccatccagagctcaccggggcagcgggccaccctcagtggcatctaccgctacatcatgggccgattcgccttctaccgccacaaccggcccggctggcagaacagcatccgccacaacctgtcactcaacgagtgctttgtcaaggtgccccgcgatgaccgcaagccaggcaagggcagctactggacgctggaccctgactgccacgacatgtttgagcacgggcagcttcctacgccgccgccgccgcttcacccggcagacaggtgctgagggcacccggggccccgccaaggcacgccgtggacccctcaaggcgaccagccaggacccaggagtccccaacggcacgagcgggcagcagtgctcattcccaa

SEQ ID NO: 61142 - DNA, 4996 bp, Homo sapiens
  misc_feature (1)...(4996): n = a,t,c or g
caggagtgatcgggcagcagtcggccggccagcggacggcagagcgggcggacgggtaggcccggcctgctcttcgcgaggaggaagaaggtggccactctcccggtccccagaacctccccagcccccgcagtccgcccagaccgtaaagggggacgctgaggagccgcggacgctctccccggtgccgccgccgctgccgccgccatggctgccatgatggatcggaagtgagcattagggttaacggctgccggcgccggctcttcaagtcccggctccccggccgcctccacccggggaagcgcagcgcggcgcagctgactgctgcctctcacggccctcgcgaccacaagccctcaggtccggcgcgttccctgcaagactgagcggcggggagtggctcccggccgccggccccggctgcgagaaagatggcggacctggccgagtgcaacatcaaagtgatgtgtcgcttcagacctctcaacgagtctgaagtgaaccgcggcgacaagtacatcgccaagtttcagggagaagacacggtcgtgatcgcgtccaagccttatgcatttgatcgggtgttccagtcaagcacatctcaagagcaagtgtataatgactgtgcaaagaagattgttaaagatgtacttgaaggatataatggaacaatatttgcatatggacaaacatcctctgggaagacacacacaatggagggtaaacttcatgatccagaaggcatgggaattattccaagaatagtgcaagatatttttaattatatttactccatggatgaaaatttggaatttcatattaaggtttcatattttgaaatatatttggataagataagggacctgttagatgtttcaaagaccaacctttcagttcatgaagacaaaaaccgagttccctatgtaaaggggtgcacagagcgttttgtatgtagtccagatgaagttatggataccatagatgaaggaaaatccaacagacatgtagcagttacaaatatgaatgaacatagctctaggagtcacagtatatttcttattaatgtcaaacaagagaacacacaaacggaacaaaagctgagtggaaaactttatctggttgatttagctggtagtgaaaaggttagtaaaactggagctgaaggtgctgtgctggatgaagctaaaaacatcaacaagtcactttctgctcttggaaatgttatttctgctttggctgagggtagtacatatgttccatatcgagatagtaaaatgacaagaatccttcaagattcattaggtggcaactgtagaaccactattgtaatttgctgctctccatcatcatacaatgagtctgaaacaaaatctacactcttatttggccaaagggccaaaacaattaagaacacagtttgtgtcaatgtggagttaactgcagaacagtggaaaaagaagtatgaaaaagaaaaagaaaaaaataagatcctgcggaacactattcagtggcttgaaaatgagctcaacagatggcgtaatggggagacggtgcctattgatgaacagtttgacaaagagaaagccaacttggaagctttcacagtggataaagatattactcttaccaatgataaaccagcaaccgcaattggagttataggaaattttactgatgctgaaagaagaaagtgtgaagaagaaattgctaaattatacaaacagcttgatgacaaggatgaagaaattaaccagcaaagtcaactggtagagaaactgaagacgcaaatgttggatcaggaggagcttttggcatctaccagaagggatcaagacaatatgcaagctgagctgaatcgccttcaagcagaaaatgatgcctctaaagaagaagtgaaagaagttttacaggccctagaagaacttgctgtcaattatgatcagaagtctcaggaagttgaagacaaaactaaggaatatgaattgcttagtgatgaattgaatcagaaatcggcaactttagcgagtatagatgctgagcttcagaaacttaaggaaatgaccaaccaccagaaaaaacgagcagctgagatgatggcatctttactaaaagaccttgcagaaataggaattgctgtgggaaataatgatgtaaagcagcctgagggaactggcatgatagatgaagagttcactgttgcaagactctacattagcaaaatgaagtcagaagtaaaaaccatggtgaaacgttgcaagcagttagaaagcacacaaactgagagcaacaaaaaaatggaagaaaatgaaaaggagttagcagcatgtcagcttcgtatctctcaacatgaagccaaaatcaagtcattgactgaataccttcaaaatgtggaacaaaagaaaagacagttggaggaatctgtcgatgccctcagtgaagaactagtccagcttcgagcacaagagaaagtccatgaaatggaaaaggagcacttaaataaggttcagactgcaaatgaagttaagcaagctgttgaacagcagatccagagccatagagaaactcatcaaaaacagatcagtagtttgagagatgaagtagaagcaaaagcaaaacttattactgatcttcaagaccaaaaccagaaaatgatgttagagcaggaacgtctaagagtagaacatgagaagttgaaagccacagatcaggaaaagagcagaaaactacatgaacttacggttatgcaagatagacgagaacaagcaagacaagacttgaagggtttggaagagacagtggcaaaagaacttcagactttacacaacctgcgcaaactctttgttcaggacctggctacaagagttaaaaagagtgctgagattgattctgcatgacaccggaggcagcgctgctcagaagcaaaaaatctcctttcttgaaaataatcttgaaccagctcactaaaagtgcacaaaccagttggtaccgtgataatgcagatctccgctgtgaacttcctaagttggaaaagcgacttcgagctacagctgagagagtgaaagctttggaatcagcactgaaagaagctaaagaaaatgcatctcgtgatcgcaaacgctatcagcaagaagtagatcgcataaaggaagcagtcaggtcaaagaatatggccagaagagggcattctgcacagattgctaaacctattcgtcccgggcaacatccagcagcttctccaactcacccaagtgcaattcgtggaggaggtgcatttgttcagaacagccagccagtggcagtgcgaggtggaggaggcaaacaagtgtaatcgtttatacatacccacaggtgttaaaaagtaatcgaagtacgaagaggacatggtatcaagcagtcattcaatgactataacctctactcccttgggattgtagaattataacttttaaaaaaaatgtataaattatacctggcctgtacagctgtttcctacctactcttcttgtaaactctgctgcttcccaacacaactagagtgcaattttggcatcttaggagggaaaaaggacagtttacaactgtggccctatttattacacagtttgtctatcgtgtcttaaatttagtctttactgtgccaagctaactgtaccttataggactgtactttttgtattttttgtgtatgtttattttttaatctcagtttaaattacctagctgctactgcttcttgtttttcttttcctattaaaacgtcttcctttttttttcttaagagaaaatgggaacatttaggttaaatgtctttaaattttaccacttaacaacactacatgcccataaaatatatccagtcagtactgtattttaaaatcccttgaaatgatgatatcagggttaaaattacttgtattgtttctgaagtttgctcctgaaaactactgtttgagcactgaaacgttacaaatgcctaataggcatttgagactgagcaaggctacttgttatctcatgaaatgcctgttgccgagttattttgaatagaaatattttaaagtatcaaaagcagatcttagtttaagggagtttggaaaaggaattatatttctctttttcctgattctgtactcaacaagtcttgatggaattaaaatactctgctttattctggtgagcctgctagctaatataagtattggacaggtaataatttgtcatctttaatattagtaaaatgaattaagatattataggattaaacataattttatacggttagtactttattggccgacctaaatttatagcgtgtggaaattgagaaaaatgaagaaacaggacagatatatgatgaattaaaaatatatataggtcaattttggtctgaaatccctgaggtgtttttaacctgctacactaatttgtacactaatttatttctttagtctagaaatagtaaattgtttgcaagtcactaataatcattagataaattattttcttggccatagccgataattttgtaatcagtactaagtgtatacgtatttttgccactttttcctcagatgattaaagtaagtcaacagcttattttaggaaactgtaaaagtaatagggaaagagatttcactatttgcttcatcagtggtaggggggcggtgactgcaactgtgttagcagaaattcacagagaatggggatttaaggttagcagagaaacttggaaagttctgtgttaggatcttgctggcagaattaactttttgcaaaagttttatacacagatatttgtattaaatttggagccatagtcagaagactcagatcataattggcttatttttctatttcccgtaactattgtaatttccacttttgtaataattttgatttaaaatatgaaatttatttatttatttttttaatagtcaaaaatctttgctgttgtagtctgcaacctctaaaaatggttgtgttgcntttaggg

SEQ ID NO: 61143 - DNA, 2639 bp, Homo sapiens
tataaaagctgggccggcgcgggccgggccattcgcgacccggaggtgcgcgggcgcgggcgagcagggtctccgggtgggcggcgcgacgccccgcgcaggctggaggccgccgaggctcgccatgccgggagaactctaactcccccatggagtcggccgacttctacgaggcggagccgcggcccccgatgagcagccacctgcagagccccccgcacgcgcccagcagcgccgccttcggctttccccggggcgcgggccccgcgcagcctcccgccccacctgccgccccggagccgctgggcggcatctgcgagcacgagacgtccatcgacatcagcgcctacatcgacccggccgccttcaacgacgagttcctggccgacctgttccagcacagccggcagcaggagaaggccaaggcggccgtgggccccacgggcggcggcggcggcggcgactttgactacccgggcgcgcccgcgggccccggcggcgccgtcatgcccgggggagagcacgggcccccgcccggctacggctgcgcggccgccggctacctggacggcaggctggagcccctgtacgagcgcgtcggggcgccggcgctgcggccgctggtgatcaagcaggagccccgcgaggaggatgaagccaagcagctggcgctggccggcctcttcccttaccagccgccgccgccgccgccgccctcgcacccgcacccgcacccgccgcccgcgcacctggccgccccgcacctgcagttccagatcgcgcactgcggccagaccaccatgcacctgcagcccggtcaccccacgccgccgcccacgcccgtgcccagcccgcaccccgcgcccgcgctcggtgccgccggcctgccgggccctggcgagcgcgctcaaggggctgggcgccgcgcaccccgacctccgcgcgagtggcggcagcggcgcgggcaaggccaagaagtcggtggacaagaacagcaacgagtaccgggtgcggcgcgagcgcaacaacatcgcggtgcgcaagagccgcgacaaggccaagcagcgcaacgtggagacgcagcagaaggtgctggagctgaccagtgacaatgaccgcctgcgcaagcgggtggaacagctgagccgcgaactggacacgctgcggggcatcttccgccagctgccagagagctccttggtcaaggccatgggcaactgcgcgtgaggcgcgcggctgtgggaccgccctgggccagcctccggcggggacccagggagtggtttggggtcgccggatctcgaggcttgcccgagccgtgcgagccaggactaggagattccggtgcctcctgaaagcctggcctgctccgcgtgtcccctcccttcctctgcgccggacttggtgcgtctaagatgagggggccaggcggtggcttctccctgcgaggaggggagaattcttggggctgagctgggagcccggcaactctagtatttaggataaccttgtgccttggaaatgcaaactcaccgctccaatgcctactgagtagggggagcaaatcgtgccttgtcattttatttggaggtttcctgcctccttcccgaggctacagcagacccccatgagagaaggaggggagcaggcccgtggcaggaggagggctcagggagctgagatcccgacaagcccgccagccccagccgctcctccacgcctgtccttagaaaggggtggaaacatagggacttggggcttggaacctaaggttgttcccctagttctacatgaaggtggagggtctctagttccacgcctctcccacctccctccgcacacaccccaccccagcctgctataggctgggcttccccttggggcggaactcactgcgatgggggtcaccaggtgaccagtgggagcccccaccccgagtcacaccagaaagctaggtcgtgggtcagctctgaggatgtatacccctggtgggagagggagacctagagatctggctgtggggcgggcatggggggtgaagggccactgggaccctcagccttgtttgtactgtatgccttcagcattgcctaggaacacgaagcacgatcagtccatcccagagggaccggagttatgacaagctttccaaatattttgctttatcagccgatatcaacacttgtatctggcctctgtgccccagcagtgccttgtgcaatgtgaatgtgcgcgtctctgctaaaccaccattttatttggtttttgttttgttttggttttgctcggatacttgccaaaatgagactctccgtcggcagctgggggaagggtctgagactccctttccttttggttttgggattacttttgatcctgggggaccaatgaggtgaggggggttctcctttgccctcagctttccccagcccctccggcctgggctgcccacaaggcttgtcccccagaggccctggctcctggtcgggaagggaggtggcctcccgccaacgcatcactggggctgggagcagggaaggacggcttggttctcttcttttggggagaacgtagagtctcactctagatgttttatgtattatatctataatataaacatatcaaagtcaaaaaaaaaa

SEQ ID NO: 61144 - DNA, 990 bp, Homo sapiens
gagacagggtccaggctggagtccagtcgcgtgatcacagctcactgcagcctttacctcctgggccaaagtgaatcttcccttctcagcctcccaagtagctggactatggcacacaccacaacacctggctaattttttgaaattttttgtagagatggggatattgctgtattgcccaggctggtctcgaactcctgggctcaagcaatcctcctgccttggctcctcaaagtgctgggattataggtataagccacctctcccagccaaaaccccctcttttatagatgagatatttgctccaagttgcacagctggtttggctcttgactgtagattccagaggcattggtggaacacttgatcatgctggcttcagcatctgcatgttgacctgcaggcatgcaagcttctttggcctctgtgaagcacagactttctgcggtctgagtgcatctaagtctcctgctcttctccacagatactatggagggactgagtttattgatgaactggagaccctctgtcagaagcgagccctgcaggcctataagctggacccacagtgctggggggtcaacgtccagccctactcaggtgcttgtctcatccatatggcctggtgcagcctcttcatgtgcatcccccagggccgacatgcaccaagaagagtcctaagatggactgccatggactgccataggccgggcccagtggctcacgcctgtaatcccagcactttgggaggcggaggcaggcagaccacctgaggccggcagttcaagaccagcctgaccaacatggagaaacccggtctccactaaaaatacaaaaattagctgggtgtagtggcacatgcctgtaatcccagctactcggagcctgaggcaggagaattgcttgaacctgggaggcggaggttgcagtgagctgccgagatggcgccattgcattccagcctgggcaacaagagcgaaactccatctc

SEQ ID NO: 61145 - DNA, 1887 bp, Homo sapiens
gtggcgtgtgcttgtaatctcagctacttgggaggctgagacaggagaattgcttgaacccgggaggtggaggttgcagtgagccaagatcatgccactgcactccagcctgggtgacggagcaatactccatctggaggaaaagaaaaagcaagcaagccaggtgtgatggcaggcacctgtggtctcagctactcgggaggctgagacaggagaatcacttgaacccggggggtggagactgcagtgagccgagatcgcaccattgcactctggcctgggctggcctggatgatgagcaaaactctcccccccaaaaaaaaatcccagtccgttacacggtagctttggggaattatttttaaaatttttaattgttcttgctgtctccctttgaagtgactagtactctggtgagttaatctgctacatctcagctaaaccagtcaaagttcagaaaatctaggcaggagccacctgtagttatctcaccattgtttctccaggtgcagttagagcggatccggcaagctgactccttggagagaatccgggcaattctgaatgatactaaactgacagacattaaccagcttcctgagacatgacaccctcatggcaggattctagcctgcactttgggtttttaactcatctttagagcaacagtaattattatttaactcttaactgaagaaagagaagtcacaacaaaaggaagactggagaaatgcttacttctagagggagaagactgtgcggcacaggaaacagcaaacagtggggtgatctgcagcccagagaccttcaaatgcgaacactataaactccaggcttgattccaacaggcgtgggatcagatttggtgatggaaaaagcgctgtttccttgcctgctttctccaagacagattttcggaacacatttccctaccctaaagcgacatcccagtagtgtttggaattttctgttcatagatattggaagagagaatttgctttatctgttgtctagagctcatcagtaacagtattcagttagcagacagaagtgtagtatgctgtatgaatattttatattaaaatatgaaggtttgagagcaggccattggctactgactgtatttcccttgctcagtacatttttgttttccttttaccattttatcttatcttgctttggaggaccttaaatgctactgaaacttacctgagaaccataggactgtggcaaacaaaaccaattcatgaagtgaattaatgatgaggatctgaaaacttggctggggctatatatactggaagttgaaggttaaaggaaaagcacaagaaactttggaagcactttttctgcatacttagatgatcttcatgggcccacagggtaccaggataaagccgaactggtaccatctactcttttgaagtgttttagtctagttattggatcagtgaaaaacattagtatacgtttttaaataggctaatttttcaacttggatcattaggcttacgtactacttgtttcaaatgtgtcaaatacaaaaatggtaactaggttgacagatactttgtatttttcttttgaattcagacctggaatgtaagtaagtgacaatgcttatggaaagccagttagttagaattggaaatctgtcttgtcattttacaagcattagattcctttcctgtgtgaagaaagcctcagtgaaacaggtctttgccataactttatgaagtgctacagaaagcacaaagaattgattcatgttcatcaatacctgctgagagtactgtcccaggaatatccagtggatggattcatcatccagggaggttcaaaagtaagatggttttcaaatcatttttgagactggttgcataacac

SEQ ID NO: 61146 - DNA, 821 bp, Homo sapiens
cagaggtcttccaaaggctattcagaagcagaaattgaatactggcagctcactgacagtattttgaaaatgttttacaattaagtctcctaaatttaacaaagagatttcacactaaaacctagatttctagcatggcttgggaaattgtaagatttgggtccatgttcccgcatagcaacaattggctgaagctgagtggatgcaacttctgcaagacggcatgtgttctcctgtgtgctttctctagtttgctccaatccccacatccccttgtcttctataccagttcgtcttggtcttgaaggtgtctagtttgctggcatggcctaaagctttcattagtggcagggggactgggttctgggaggggtgccatgcccgaggagggtggcagtgagcccaaaagggaagagcattcataacttggtgagtgacgatgatgctgagtgcctggcctgagaggagcagctggctcaagggaagacgtgctgagcacagtcagcccgggtacgttcttggtatgggtggagcaggtggatctgcctgtcctgtgggcggtggaaattccagtctggaacttgtcggggagatgggtctggagaatagagatttgcttccaaggaggtaataggcccatggcatccagggagagggccctggatgacagggatgctgaggggctgaggggttcaaaatatggagatgacaggcaaggaaggaagggaaggaggatgagggcagagcacaggagtaaagctatgggggccaagggaagcaagaccttgaggggccagtggttaactggtagaatcagttca

SEQ ID NO: 61147 - DNA, 4541 bp, Homo sapiens
gtcggattcgctcgaggatcacctccaggagcactgatgccccttcacaaagcactggagatcgaaagactgggagtgttggatcttggggtgcagctagggggccttctggaactgacacagtctctggacaaagcaattctggaaacaatgggaacaatggaaaagagagagaggactcctggaaaggagcttctgttcagaaatcaactgggtcaaaaaatgactcttgggacaacaataacaggtctacgggtgggtcctggaactttggcccccaggactctaatgacaacaaatggggtgaagggaacaaaatgacatctggggtctctcagggagaatggaaacagccgactgggtctgatgagttgaaaattggagaatggagtggtccaaaccaaccaaattctagcactggagcatgggacaatcaaaagggccaccccctccttgaaaaccaaggcaatgcccaggctccctgttggggaagatcttccagctccacaggaagtgaagttgaaggtcaaagcactggaagcaaccacaaagcaggaagtagtgacagtcataactctggccgtcggtcgtacaggcccacacatcctgattgtcaggctgtcttgcagactcttttgagccgaactgatttggaccccagggtgctctcaaacactggctggggccaaactcaaattaagcaggacacagtgtgggacattgaagaggtgccaaggcctgaggggaaatctgacaaaggaactgaggggtgggagagcgctgccacacagaccaagaactcagggggctggggagatgcacccagccaaagcaatcaaatgaagtctggatggggggagctctcagcctctacagagtggaaagaccccaagaacacaggaggctggaatgactacaagaacaacaactcttccaactggggaggaggacgacctgatgaaaagacaccttcctcttggaatgagaatcccagcaaggatcaggggtggggaggtggacgccagcccaatcaaggatggtcttctggaaagaatggttggggggaggaagtcgatcagacaaaaaacagcaattgggaaagttctgcaagtaaacctgtgtctgggtggggtgaaggagggcagaatgaaatcgggacttggggtaatggtggcaatgcaagcctagcttcaaaaggtgggtgggaggattgcaaaagatccccagcatggaatgagacgggccgacagcccaattcctggaataaacaacaccaacagcagcagcccccacagcagccgccgccaccacaaccagaggcttctggttcgtggggaggcccacccccaccacctccaggcaacgttcgaccttccaattccagctggagcagcgggccacagcctgcaacacctaaggatgaggaacccagtggttgggaagagccatccccacagtcaattagtcggaaaatggacattgatgatggcacttcagcatggggagaccctaacagttataactacaagaatgtgaatctgtgggataagaattcccaagggggcccagcacctcgagaaccaaacctgcccaccccaatgaccagtaaatcggcatcagattccaaatctatgcaagacggctggggggagagtgacgggccagtcacaggagctcgccatcccagctgggaagaggaggaggatggaggagtctggaacaccactggctctcagggcagtgcttcctcccacaactcagcaagctggggacaaggaggaaagaaacaaatgaagtgctcactcaaaggaggaaacaatgattcatggatgaatcctcttgccaaacagttttcaaatatgggattgctgagtcagactgaagataatccaagcagcaaaatggatttgtctgtaggaagcctttcagataaaaaatttgatgtggacaagcgagcgatgaatctcggggattttaatgatatcatgaggaaggatcgatctgggttccgtccacctaattccaaagacatgggaaccacagatagtgggccttattttgagaagggcggtagtcatggtttgtttggaaacagcacagcacaatcgagaggtctgcacacacccgtgcagccactaaattcttctcccagtctccgggcgcaagtgcctccccagtttatttccccccaggtttctgcctcaatgctcaagcagtttcccaacagtggcctgagtccaggtcttttcaatgtggggccccagttatctcctcaacaaattgccatgctgagccagcttccacaaattccccagtttcagttggcatgtcagcttctcttgcagcagcagcaacagcagcagttgttacagaaccagagaaagatttctcaagctgtacgccaacagcaagagcagcagctggctcgaatggtgagtgcactgcagcagcagcagcagcagcagcagaggcagccaggcatgaagcactcgccctctcatcctgttgggcccaagccgcatctggacaacatggtacccaacgcattgaatgtggggctcccagaccttcaaaccaaagggccaatacctggatatggttctggtttcagctctggcggcatggactatggcatggttggtgggaaggaggctggaaccgagtctcgctttaaacagtggacctccatgatggaggggctgccctctgtagccacacaggaagccaatatgcacaaaaatggcgctatagtggcccctggtaaaacccggggagggtcaccgtacaaccagtttgatatcatccctggtgacacactgggtggccatacgggtcctgctggtgatagctggttacctgccaaatctccaccaacaaataaaatcggaagtaaatccagcaatgccagttggcctccagaattccaaccaggagtgccatggaaaggtatccaaaacattgaccctgaatctgacccctatgtcaccccaggaagtgtgctggggggtacagccacatctcccattgtagatactgaccaccaactgctgcgggataacaccacagggtctaattcttccctcaacacctcgctgccttcacctggtgcctggccctacagtgcctctgacaactcctttaccaacgttcatagcacttcagcaaagttccctgattacaaatcaacatggtccccagatcccataggacacaaccccactcatctctccaacaagatgtggaaaaaccatatttcctccaggaacactacaccgctgccccgcccacctcctggtctgaccaaccccaaaccatcatctccctggagcagcacagcaccccgatcagtcagggggtgggggacacaggactcacggctcgcctcggcctctacctggagtgatggtggctcagttcgtcctagttactggctggttcttcacaatctcaccccacagattgatgggtcaaccttgagaacgatctgcatgcagcatgggcccactggctgacattccatctggaatctaacccagggcactgccctgatccgatacagcaccaaacaggaggcggccaaggcccaaactgcactgcacatgtgtgtgttgggaaacactaccatccttgctgagtttgccactgatgatgaagtcagccgctttctggcacaagctcagccccctacacctgcagcaaccccaagtgcgccagctgcggggtggcagtcgctggagaccggccagaaccagtcagatcccgtgggacctgctctgaatctttttggtgggtccactgggctcgggcagtggagcagcagcgctggtggcagcagcggggccgatcttgctggcgcttcattgtgggggcccccaaactattcttctagcttatggggagtcccaacggtggaagatccccataggatgggcagccctgctcctttactacctggtgaccttctgggaggagggtcggattcaatctgaacttagaactttcaactctgacctcgtgaccttttttggaacagcagcagcactaacttgaccttttcgttttttttttcaacttgcaataaatacatttttaaaaggaaaaaagaaaacggagagaaaaaaaggggggtcattgacagactgtctgagcacatagttgcctcccttataacttcagttttttcgtttggaatatgaatccaaaaagagaacatatcactcttgaaatacttgaatcatgaacgccacccttggaaaggccaatgtgaagcaagtacacatacccatttaaatttaaacacaaaaaaattaaaaaaaattagtttctagtttttcacttttttcatgttatatggaagttgttgctaagaaacatatatactgaaaaaaaatagctttttaactttgtttgcactggggtgtgtttccgtccttaggtctaccatgtttgggagggagggaaattcaaaagaattgttgggggaggggggagggaagacttgacggagcctcactttaaaaacaaaaacacaaaaaacctaa

SEQ ID NO: 61148 - DNA, 2569 bp, Homo sapiens
tttttgcacctagaaattttaggcaagtgatagctgcgtaatcatactgcggcaccgtttttttcttgcagcagtagctgcttgcggaggaggtctgcccactgcagctctctgcagtctccggctctctcctgcaggatcggtcaacgcagccgtcgccgccctctgcacccagcccaggtcgccactgcttcagtccggttctcaaagcctcagcaccatcttttatccccgagcagcctggatcgtcgttccctcagtccggacgccactgctaggtccgaccaccgccgcttctgatatttcggtgagtcttttcctgtggaggtttggtctcccgatctctgtggtagccaccttaggcgtgtacggtcctttgaaaaatggccgagtcagagaaccgcccaagagctgtcagaatcccagtcaagaagaggctggtaatcagataatggtggaagggctcggggaacatctggagcgcggtgaagatgccgctgctgggcttggagacgatgggaagtgcggtgaagaagctgccgctgggcttggggaagaaggggaaaacggtgaagatactgctgctgggtccggggaagatgggaaaaaaggtggcgatactgatgaggactcagaggcagaccgtccaaaaggacttatcggttatgttttagatacagactttgttgaaagtctacctgtgaaagttaagtaccgtgtgttagcccttaaaaagcttcaaactagagcggccaatttagaatccaaattcctgagggaatttcatgacattgaaagaaagtttgctgaaatgtaccaacccttactggaaaaaagacgtcagatcatcaatgcaatctatgaacctacagaagaggaatgtgaatataaatcagactctgaggactgtgatgatgaggaaatgtgtcatgaagagatgtatggtaatgaggagggtatggtacatgaatatgtggatgaggacgatggttatgaggactattattatgattatgctgtggaagaggaggaggaggaggaggaggaggacgacattgaggctactggagaagagaataaagaagaggaggatcctaagggaattcctgatttttggctaactgttttaaaaaacgttgatacactcactcctttgattaaaaaatatgatgagcctattctgaagctcctgacagatattaaagttaagctttcagatcctggcgagcccctcagtttcacactagaatttcacttcaaacccaatgaatatttcaaaaatgagttgttgacaaagacctatgtgctgaagtcaaagctagcatattatgatccccatccctataggggaactgcgattgagtattccacaggctgtgagatagattggaatgaaggaaagaatgtcactttgaaaaccatcaagaacaaacagaaacatcggatctggggaacaatccgaactgtaactgaagattttcccaaggattcatttttcaattttttctctcctcatggaatcacctcaaatggaagggatggaaatgatgattttttacttggtcacaatttacgtacttacataattccaagatcagtattatttttctcaggtgatgcactggaatctcagcaggagggggtagttagagaagttaatgatgcaatttatgacaaaattatttatgataattggatggctgcaattgaggaagttaaagcttgttgcaaaaaccttgaggcattagtagaagacattgatcgttagagcagagtatacatggccctgaaattaactgccctagatatagttactcaaggtataagaagccttgtgttctgtatttttcttgtagtgttagttaaaacatatgtttcaaaaatataagaaaagttcaaaaactaattaatttgaccttgagttttagtagtagaatgttttcaagaaatgtacactgtggtaaatgatttaaaacactagtatagtgttgtgtagcttaatccttctgaagtctttttgtcatgtagctattaatctgtggctatgaaatgatcagaaatgctaagtgagatcaatatttgtttggaaaaaaaatcttgggaaacaacccaagggttttcgctgttgttgtttttctttttctatttttgtttacttagtcctttagctagtggatttaattttgttgtgcctgcttcattttgcaataacaatgcagtagaatttaaaacttggatgcttaagaggcctgcatatagataagaatttcaggcaaaactacatttattgttaataacagcttgttcataggctcttgtattttatgtaactgtgataaataatgaaacttagttatattgaggttattgtttgtcggtgaagtgttagtcacagtattttcaaaagtttgcacatattgttctgtgtaattgtgtaagccataattacagtgtttaattctcttttcctattacatcattcattgaaagtgatcactttaccattttgaaaagatatttcgtgttctttcactgcaaaataaaaagaataaaaatttcaaaaaaaaaa

SEQ ID NO: 61149 - DNA, 1566 bp, Homo sapiens
ggcacgagggaggcttcaccctcatgacctcatccaaccctaattacctcgtaaagaccccacctccacacaccatcacattgaagattagggcttcaacatgtatgtttggtgtgggggcggggggcaagatacagacatttagtccatagcactgtatgtcttaaaattattgtttaaggcaccgttcacctctggaaaaggattcttcacctggaagttcatcaacaagcttgttgataaaaaagcaaagagagacttcagacacgccgatcatgagagctttaaaagaacttgatgagggaaaaatatttaaaaattgggggacacagacagagaaagaggacacctcaaatataaatcctcggcaaactgaaacttcagttaatgcaagtcgttctccagaaaagtgtgcccaacagagacaaaagagacttaattcggcctcacagagatcatcatctttaccaccttcaaatcgtaaatcaagtactccaacaaaaagagagattatgctaacaccagtgactgtggcttatagtccaaagcgatcccctaaagaaaacttgtccccaggatttagtcatctgcttagcaaaaatgagagcagtccaattcgatttgatatacttttggatgatttagatactgttcctgtgtctacattacaacgtaccaatccaagaaagcaacttccagtttcttcctctagatgactcggaagaaaaaaacttattctgagaaagccacccgataacattgttaatcatagctcttgccctgaaccggtgccaaatggagtgaagaaagtatctgtgagaacagcctgggagaagaataaatcagttagctacgaacagtgtaagccggtttcagtcactccacaggggaatgattttgaatatacagcaaaaattcggaccctagctgaaacagaacgattttttgatgaacttacaaaagaaaaggaccagattgaggcagcactaagcaggatgccttctcctggaggacgaatcactttacagacaagattaaatcaggaagccttggaagatcgtttggaaaggattaatcgagaactgggttcagttcgcatgacgctaaagaaattccatgttttgcgcacctctgcaaatctttgagatttgtagccattaaattttgagacatttttgtttgcactaatgtataattatgcagtcagaaaaggcaaactattttgtactgtttataagccttcaaacagtagttttacaatcatgctattcttacacttgctattttatacttcaaatagccacatattttcaagatatttttgttatgctcaggaatctcttgtatattttactatttaaaaagcattatttttaaatagtatctgtctccaatttatatcaagaataaggaaatataaacagaggaagcagcttgtttctaaacaaatagtgttatccttttacaattaactgcacatcaattttatagacttgttctacattgtaaatacaattcagtttttaaaaaataaagcttactagcttcacataaatgaaaaaaaaa

SEQ ID NO: 61150 - DNA, 987 bp, Homo sapiens
tttcgtggaggtaagtggctatagaagtcgggcggacccggaacccagaggacgcgacaccatgacttatgcttatctcttcaagtatatcatcatcggagacacaggtgtggggaagtcatgtctcctcctgcagtttacagataagcggttccagcctgtccacgacctcacaataggtgtggagtttggagctcgtatggtcaacattgatggaaaacaaatcaaactgcaaatctgggatacggctgggcaagaatccttccgttctatcacccgttcctactacaggggagcagctggagcactgctggtgtacgacattacaaggcgtgaaaccttcaaccacctgacctcatggttagaggatgcccggcagcactctagttccaacatggttatcatgctcattgggaataagagtgacctagagtcccgcagggatgtgaagagagaagaaggagaggcctttgctagggagccatggacttatattcatggaaacttcagccaaaacagcctgcaatgttgaagaggccttcattaacacagccaaagaaatatataggaagatccagcagggtttatttgatgtccacaatgaggcaaatggcatcaagattgggccccaacagtcaatttcaacatcagtgggacccagtgcctcccagcggaactctcgtgacatagggtccaactctggctgctgctgaacatctggcttgaactttttttgtccttcctggaatagcttcagatcaataggcttaatgaaagaggtctttcttgctttggctgagagcagcctctttttaaagtgtgatgttttgcctttccacctaaagaccaggagagaatttgggcccttactgacctgtcctccttcagggacatgagcattccctatagattagggttcttcttatcctcctatacaaatttcttaaattgttaggatcaaagttgattatcacagtagttaaaaaa

SEQ ID NO: 61151 - DNA, 1493 bp, Homo sapiens
tttcgtggcacgtgaggaggaggtggcttgaggcaaccatggcgggaggaatgaaagtggcggtctcgccggcagttggtcccgggccctggggctcgggagtcgggggcggtgggacagtgcggctactcttgatcctctccggctgcttggtctacggcacagctgaaactgatgtaaatgtggtcatgcttcaggaatcccaagtttgtgaaaagcgtgccagccaacaattctgttacacaaatgtgcttatcccacaatggcatgatatatggacacggatacagatccgagtaaatagttccagattggttcgagtcacccaggtggagaatgaggagaaactgaaggagctagagcagtttagtatctggaactttttttcctcctttttaaaagagaaattgaatgacacctatgttaacgtgggtctatacagcacaaaaacctgcctcaaagttgagattatagagaaggacaccaagtacagtgtcattgtgatccggagatttgatcccaaactctttcttgttttccttcttggacttatgctatttttttgtggagacttgctgagcagaagtcaaattttctactactctactgggatgactgtgggaattgtggcctctctggctaatcatcatttttatactatctaagtttatgcctaagaaaagtcccatttacgtcatcctggtgggaggctggtctttttctctgtacctcattcaactagtttttaaaaatttacaagagatctggaggtgttactggcagtatcttttaagttatgtcctcacagttggattcatgagttttgcagtatgttacaagtatgggcccttggagaatgaacgaagtatcaacctgctgacctggaccttgcagctgatgggcctgtgtttcatgtattctggcatccagataccacatattgcccttgccattatcatcattgctctttgtactaagaacctggaacaccctattcagtggctgtacatcacctgcagaaaggtgtgtaagggagcagaaaagcctgttccccctcgtctcctgacagaagaagaatatcggatacaaggagaggtagaaacccgaaaggctttagaggagctccgagaattttgtaacagtccagactgctctgcttggaagactgtttctcgaatccagtctccaaaaagatttgctgactttgtggaaggctcttcccacctcacgccaaatgaagtttctgtccatgagcaggagtatggattagggagcattattgcccaggatgaaatctatgaggaagcatcctctgaggaggaggactcatattctcggtgtcctgctatcacacagaacaactttctaacctaggtagtggtcagttatctttacgtggactggcttggtgccttggtccatgttgcatgtgttgtgcaattgctttcaaccctttgaaacagagtgagatagacagggtattgaagctcatg

SEQ ID NO: 61152 - DNA, 2316 bp, Homo sapiens
accgtcttgaccatctttgagcacatcttggcacgaggcggaagtgcgcgtggcggcggtggcggctgcggcaacagcggggccgatgtgtagttggtgactgcctctccagatgctgaggtgcctgtatcattggcacaggccagtgctgaaccgtaggtggagtaggctgtgccttctgaagcagtatctattcacaatgaagttgcagtctcccgaattccagtcacttttcacagaaggactgaagagtctgacagaattatttgtcaaagagaatcacgaattaagaatagcaggaggagcagtgagggatttattaaatggagtaaagcctcaggatatagattttgccaccactgctacccctactcaaatgaaggagatgtttcagtcggctgggattcggatgataaacaacagaggagaaaagcacggaacaattactgccaggcttcatgaagaaaattttgagattactacactacggattgatgtcaccactgatggaagacatgctgaggtagaatttacaactgactggcagaaagatgcggaacgcagaggatctcactataaattctatgtttttaggttttgatggcactttatttgactactttaatgggttatgaagatttaaaaaataagaaagttagatttgttggacatgctaaacagagaatacaagaggattatcttagaattttaagatacttcaggttttatgggagaattgtagacaaacctggtgaccatgatcctgagactttggaagcaattgcagaaaatgcaaaaggcttggctggaatatcaggagaaaggatttgggtggaactgaaaaaaattcttgttggtaaccatgtaaatcatttgattcaccttatctatgatcttgatgtggctccttatataggtttacctgctaatgcaagtttagaagaatttgacaaagtcagtaaaaatgttgatggtttttcaccaaagccagtgactcttttggcctcattattcaaagtacaagatgatgtcacaaaattggatttgaggttgaagatcgcgaaagaggagaaaaaccttggcttatttatagttaaaaataggaaagatttaattaaagcaacagatagttcagacccattgaaaccctatcaagacttcattatagattctagggaacctgatgcaactactcgtgtatgtgaactactgaagtaccaaggagagcactgtctcctaaaggaaatgcagcagtggtccattcctccatttcctgtaagtggccatgacatcagaaaagtgggcatttcttcaggaaaagaaattggggctctattacaacagttgcgagaacagtggaaaaaaagtggttaccaaatggaaaaagatgaacttctgagttacataaagaagacctaaaactgatggctactaaaaagcagagcatttctggtaagactaaattttctcccctccctcttaatgaggttttagagactacaccagaataaaagacagtttaggggacctctgtagaacaacaagggtcttattttgtgaattatatatttcaagaactaaacagagatccacctttctggatctgatttatatcactgaaatgtacagttcttttggaatagtttcacctgagaaaacatagttggctattatctatcttaacctgttcaggcttttaaaaaaaactgtttttgcatagggtagtactaagatcttaaaaagtggtaactgtcttgaagaaaaaacgtttattgtttgtttgcaattgaaataacagggttaccttaacaatgactgtctatgatgtgtcagttcttatctgaattccaaaataaacctgtgcttaaaaaagaaataattgaccaagtaagtttgcataaaatgtgaatactaaatgtgtccccagttgctggcattcatatgtacaggatttgttctagcaagctatgcttcagtatgtggttgatatttttctgtcacaatgatttctttatgcatgcagagcctgggaaagtcatgggattaacttgagggtcactattgagcctattaattaattaattattgttttaataaaacaaacattggtattggaagataaatatgtttatgtggtatctgacaatgtgtattaggtgtcatatacaatggtaatatgcctgtctttaaagtgttattttattaattaaaaggatatcggctattattatatattctctaaagaaagatttattctctaaagatttgagtcctaaatgctttcatcaggtaaataaaatgtataatacaaaaaaa

SEQ ID NO: 61153 - DNA, 4211 bp, Homo sapiens
tttcgtggaggcgacagatggaggctgaggaagcagagtgatccccggccccttcctgtccctgaacactgtctgcctggatgagggctgtctgccctgccctgccgtaggagatgggctgggagcctcccacgctctccagctcactcggcaggcagcggggaccagggctggcaggttaagcctctgggggtggatcctgaaaggtggtccagccgcctggccctgcgtgggaccctccacctggcagcaggtacccaaacaagggctggacagcagggtctcgctctgtcacacaggctggagtgcagtggtgtgatcttggctcatcgtaacctccacctcccgggttcaagtgattctcatgcctcagcctcccgagtagctgggattacaggtggtgacttccaagagtgactccgtcggaggaaaatgactccccagtcgctgctgcagacgacactgttcctgctgagtctgctcttcctggtccaaggtgcccacggcaggggccacagggaagactttcgcttctgcagccagcggaaccagacacacaggagcagcctccactacaaacccacaccagacctgcgcatctccatcgagaactccgaagaggccctcacagtccatgcccctttccctgcagcccaccctgcttcccgatccttccctgaccccaggggcctctaccacttctgcctctactggaaccgacatgctgggagattacatcttctctatggcaagcgtgacttcttgctgagtgacaaagcctctagcctcctctgcttccagcaccaggaggagagcctggctcagggccccccgctgttagccacttctgtcacctcctggtggagccctcagaacatcagcctgcccagtgccgccagcttcaccttctccttccacagtcctccccacacgggcgctcacaatgcctcggtggacatgtgcgagctcaaaagggacctccagctgctcagccagttcctgaagcatccccagaaggcctcaaggaggccctcggctgcccccgccagccagcagttgcagagcctggagtcgaaactgacctctgtgagattcatgggggacatggggtccttcgaggaggaccggatcaacgccacggtgtggaagctccagcccacagccggcctccaggacctgcacatccactcccggcaggaggaggagcagagcgagatcatggagtactcggtgctgctgcctcgaacactcttccagaggacgaaaggccggagcggggaggctgagaagagactcctcctggtggacttcagcagccaagccctgttccaggacaagaattccagccaagtcctgggtgagaaggtcttggggattgtggtacagaacaccaaagtagccaacctcacggagcccgtggtgctcaccttccagcaccagctacagccgaagaatgtgactctgcaatgtgtgttctgggttgaagaccccacattgagcagcccggggcattggagcagtgctgggtgtgagaccgtcaggagagaaacccaaacatcctgcttctgcaaccacttgacctactttgcagtgctgatggtctcctcggtggaggtggacgccgtgcacaagcactacctgagcctcctctcctacgtgggctgtgtcgtctctgccctggcctgccttgtcaccattgccgcctacctctgctccagggtgcccctgccgtgcaggaggaaacctcgggactacaccatcaaggtgcacatgaacctgctgctggccgtcttcctgctggacacgagcttcctgctcagcgagccggtggccctgacaggctctgaggctggctgccgagccagtgccatcttcctgcacttctccctgctcacctgcctttcctggatgggcctcgaggggtacaacctctaccgactcgtggtggaggtctttggcacctatgtccctggctacctactcaagctgagcgccatgggctggggcttccccatctttctggtgacgctggtggccctggtggatgtggacaactatggccccatcatcttggctgtgcataggactccagagggcgtcatctacccttccatgtgctggatccgggactccctggtcagctacatcaccaacctgggcctcttcagcctggtgtttctgttcaacatggccatgctagccaccatggtggtgcagatcctgcggctgcgcccccacacccaaaagtggtcacatgtgctgacactgctgtgcctcagcctggtccttggccctgccctgggccttgatcttcttctcctttgcttctggcaccttccagcttgtcgtcctctaccttttcagcatcatcacctccttccaaggcttcctcatcttcatctggtactggtccatgcggctgcaggcccggggtggcccctcccctctgaagagcaactcagacagcgccaggctccccatcagctcgggcagcacctcgtccagccgcatctaggcctccagcccacctgcccatgtgatgaagcagagatgcggcctcgtcgcacactgcctgtggcccccgagcccggcccagccccaggccagtcagccgcagactttggaaagcccaacgaccatggagagatgggccgttgccatggtggacggactcccgggctgggcttttgaattggccttggggactactcggctctcactcagctcccacgggactcagaagtgcgccgccatgctgcctagggtactgtccccacatctgtcccaacccagctggaggcctggtctctccttacaacccctgggcccagccctcattgctgggggccaggccttggatcttgagggtctggcacatccttaatcctgtgcccctgcctgggacagaaatgtggctccagttgctctgtctctcgtggtcaccctgagggcactctgcatcctctgtcattttaacctcaggtggcacccagggcgaatggggcccagggcagaccttcagggccagagccctggcggaggagaggccctttgccaggagcacagcagcagctcgcctacctctgagcccaggccccctccctccctcagccccccagtcctccctccatcttccctggggttctcctcctctcccagggcctccttgctccttcgttcacagctgggggtccccgattccaatgctgttttttggggagtggtttccaggagctgcctggtgtctgctgtaaatgtttgtctactgcacaagcctcggcctgcccctgagccaggctcggtaccgatgcgtgggctgggctaggtccctctgtccatctgggcctttgtatgagctgcattgcccttgctcaccctgaccaagcacacgcctcagaggggccctcagcctctcctgaagccctcttgtggcaagaactgtggaccatgccagtcccgtctggtttccatcccaccactccaaggactgagactgacctcctctggtgacactggcctagagcctgacactctcctaagaggttctctccaagcccccaaatagctccaggcgccctcggccgcccatcatggttaattctgtccaacaaacacacacgggtagattgctggcctgttgtaggtggtagggacacagatgaccgacctggtcactcctcctgccaacattcagtctggtatgtgaggcgtgcgtgaagcaagaactcctggagctacagggacagggagccatcattcctgcctgggaatcctggaagacttcctgcaggagtcagcgttcaatcttgaccttgaagatgggaaggatgttctttttacgtaccaattcttttgtcttttgatattaaaaagaagtacatgttcattgtagagaatttggaaactgtagaagagaatcaagaagaaaaataaaaatcagctgttgtaatcacctagcaaaaaaaaaaaaagggggggcccttttaaaagaacccttggggggcccaattttaacgggggagggcaaggaaaaatttttttctttatggggggcggaataaaaaccactttgggaattttggaaaggaaccttttttttgggggggggccatatgggcccaccccccccacggattttaagggctttagggaaaaaaaaaatttttaaggggaaaaggggggaaaacaaccccaaaagccttgctgttgaa

SEQ ID NO: 61154 - DNA, 821 bp, Homo sapiens
gtaatataagtatgctaaatgccacggaaaccagatacatttattaaatctactcttagccaagcaataaagatgtctacagagttcacaacctgcaacacttcaccagggaatgctaggtaaaggcaacttcagtttaactgagtactccatttcaagtgggtaatgtctgctggttggcagctatccagtttggaaaactgtgggaagatgctgttgctacccagattgttctgttcaacaagtggggcctgaagcctgagcagtgtagccagctgtgtggggagcagaggttcactccattgcttctgcagcctccatcacctgactcctcctcctcctctagtaagcagcttcttgtcacagacttctgggatagcttcccgctctccttcatcagtgcagttctgcaacaagatcaacagctgtctcctgttgtactgaattaggaacttctgacatgttcttattgtacctcccacatgtaatgtgttgaaaaagcatgggtaacggtgtcctttgttctccaagtatgtgatgaagggaagagctgaccacacaagctgatagaattcttttctgcatcgaagtagcactattccagtataggcattgagatatcgaaccgcgaagccgatggagcaggcggctgcgccgaaagttccgtgcaccctggcgatcgtgtcccgtacgaggctgctcagaactcggtcatcgaggcttaggcggcagcgggggtcgtcagacaccagttcgcagagcaggtacctgtgcttgaaccgcaccatggctgcctccgcgctctccagtccgctcgtgcc

SEQ ID NO: 61155 - DNA, 2904 bp, Homo sapiens
  misc_feature (1)...(2904): n = a,t,c or g
tttcgtgtcgctgtggcactcagtcctacggcctccgaggctgggtagtgagtgtgtcgctggccttagcagactccacaggccacgctggctgcgaatggagccgaggactcgcgcggaggcgagatgctaccagccggcgagatcggcgcctctcctgcagccccgtgctgctctgaaagtggtgacgaaaggaagaacctcgaggagaaaagtgacataaatgttacagttcttattggaagtaaacaagtcagtgaaggtacagataatggtgatctcccttcttatgtgtctgcattcatagaaaaggaagttggaaatgaccttaaatctttaaagaaacttgataaactcatagaacagaggacagtaagtaaaatgcagttagaagaacaggtacttacaatttcatcagaaattcctaaaagaattcgaagtgccttaaaaaatgcagaagaatcaaagcaatttcttaatcagtttctggagcaggaaactcatctcttcagcgccattaacagccatttgctgactgcgcaaccttggatggacgatcttggaaccatgattagccagattgaagagatcgaacgtcatcttgcttaccttaaatggatttcacaaattgaagaactaagtgataacattcagcaatatctgatgaccaataatgtaccggaggcagcctccactctagtgtctatggcagaacttgacattaaacttcaggaatcatcttgtactcatcttcttggtttcatgagagccacagttaaattctggcataaaattctcaaggacaagcttacaagtgattttgaggaaattttagcacagcttcattggccattcatcgcaccccctcaatcacaaactgttggcttaagtcgacctgccagtgccccggagatatacagttacctggagacactgttttgtcagcttttgaaactacaaacctcacatgaattacttactgagccaaagcaactcccagaaaaatactctcttcctgcctccccttctgtcatcctgcccatccaggttatgctgactcctcttcagaagaggttcaggtatcacttcagagggaaccggcagactaatgtgttaagcaagccagaatggtacttggctcaagtacttatgtggattggaaaccatactgaatttctggatgagaagattcagccaatattagacaaagtaggctctttggtaaacgcaaggcttgaattttctcggggccttatgatgctggttcttgagaagttagccactgatattccttgtctgctatatgatgacaatctcttctgtcatttggtggatgaagtactcttgtttgaaagggagctacacagtgttcatggctatcctggcacttttgctagttgtatgcatattctatcagaggaaacctgttttcagagatggttgacggtggagagaaaatttgctcttcaaaaaatggactcaatgctttcctcagaagctgcctgggtatcgcaatataaggatatcactgacgtggatgaaatgaaagttccagattgtgcagaaacttttatgactctactcttggttataactgacaggtataaaaatcttcccacagcttcccgaaagcttcagttcctggagttacagaaggacttagtagatgattttaggatacgattaacacaagtgatgaaagaagagactagagcttcccttggctttcgatactgtgcaattcttaatgctgtgaactacatctcaacagtactagcagattgggctgacaatgttttctttctacaacttcaacaggctgcactggaggtgtttgcagagaataatactctgagtaaattgcagctaggacagctagcctctatggagagctctgtctttgatgacatgattaacctcttagaacgtttaaagcatgatatgttgacccgtcaagtagaccacgtttttagagaagttaaagatgctgcaaaattgtataaaaaagaaagatggttgtccttgccatctcagtcagagcaggcagtgatgtccctgtccagttcggcttgcccgttgctgctgacgttacgagaccatttacttcagttggagcagcagctttgtttctccttatttaaaattttctggcaaatgcttgtagagaagctggatgtatacatctaccaagaaataattcttgctaatcacttcaatgaaggaggagcagcccagctgcagtttgatatgactcggaatcttttccctttgttttctcactattgcaagagaccagaaaattattttaaacatataaaagaagcctgtattgttttgaatttgaacgtcggttctgcacttactgctggaaaggatgtactgccagtccagcttcagggcagcttccctgccaccngccggccattaaatgaagttggaattttaccaaactggcctccaaccaggatgttgagattctacttaatttgaggaccaaattggcctaatactggaaaataatgtctttcagaaaaaggtttctttggtttttgtttctaagaaagaggaagccaattggatttcaagttatatgatgaaattctgaattaatgaaactggaaaaactttatagaattacttattatcttggatttatggtgttattaaaatgctgaccatatttccttcatcctcttgttcctaaggaaacaaaaacagaaaacgaaacgaatgaaaactcgaattctatttacaagtataaatgctgagtattgtctgttgaagacaagagcagagactcttacaattctaaccaactttcaatttcctgtgctaattaagggaaattctgttgtggataatcaaacatagccaataaatttttttaaaactcccaaaaaaaaa

SEQ ID NO: 61156 - DNA, 3854 bp, Homo sapiens
gagagcggcgcctcactactgactatgctgcgaaaacactacataaggggggggcggggtggcgccacccctgattgcggtgccacggactgctcctgctgggcggagaggacagattttgcaaagcggaggctgcgacgggtcctgcagggggacagtgaggaaagggccgcctcgtctccgctcctgggggaccgcagaaataagaatcaaactccacaatgacaacctatttggaattcattcaacaaaatgaagaacgagatggagtccgatttagttggaatgtttggccatcaagtcgactggaagctacaagaatggttgttcctgtggcagccctgtttacaccactgaaagagagacctgacttaccacctattcaatatgaacctgttctgtgtagtaggaccacttgccgtgcagttttgaatcctttatgtcaagtggattatcgagcaaaactttgggcttgcaacttttgttaccaaaggaatcagtttccacctagttatgctggtatatctgaactgaatcagcctgctgaacttttacctcagttttctagcattgaatatgtagttctgcgtggtcctcagatgcctttgatattcctctatgtggttgatacttgcatggaagatgaagatttacaagccctgaaagaatccatgcagatgtcattaagtcttttaccacctacagctttggttggacttattacttttgggagaatggttcaggttcatgaacttggatgtgaaggcatttcaaaaagctatgtcttcagaggaacaaaagatttgtctgccaaacaactgcaggaaatgctggggctctctaaagtaccagttactcaagcaacacgtggtcctcaggtacagcagccacctccttccaacagattcttacaaccagtacagaaaatagacatgaatctcacagatcttctgggagaactccagcgagacccttggcctgtaccacagggaaagagacctttgcgttcctctggggtggcactttccatagctgtaggactgctggagtgtacttttcccaacactggtgctcgtatcatgatgttcattggtggtcctgctactcaggggcctggaatggtggttggagatgagttgaagacacctataagatcgtggcatgacattgacaaagacaatgccaaatatgttaaaaagggaactaagcattttgaagcattggctaatcgagctgctacaactggccatgttattgatatctatgcgtgtgcattagatcagacaggtctcctggagatgaaatgctgtcccaaccttactggaggatacatggtaatgggtgattctttcaatacttccttattcaaacaaacttttcaaagagtctttaccaaagacatgcatggacagtttaaaatgggctttggtggtacgctagaaataaagaccccaaggggaaataaagatttcaggagctattggaccctgtgtgtcactcaattctaaaggaccctgtgtgtctgaaaatgagataggaacaggtggcacatgtcagtggaagatatgtggacttagtcccactacaaccttagccatatattttgaggttgtcaatcagcataatgctccaattcctcaaggagggccgtggtgcaaatccagtttgtgactcagtatcgagcattcaagtgggcagagacgcatccgagtgaccaccattgctaggaacttgggcagatgctcaaactcaaatccaaaacattgctgcatcttttgaccaggaggcagctgccattcttatggcccggctagcaatatatagagcagaaacagaagaaggtccagatgtgcttaggtggctggacagacagctcattcgactgtgtcagaaatttggagaatatcataaagatgacccaagttccttcagattttcagaaactttctccctttatccacagtttatgtttcatttaagaagatcttctttcctgcaagtttttaacaatagtcctgatgagagttcatattatcgtcaccattttatgcgtcaagatctgacccagtctctaattatgattcagcctatcctgtatgcgtattcttttagtggaccaccagagccggttcttcttgatagcagtagcattcttgcagatcgtattcttctcatggacacattcttccagattttgatttatcatggtgagaccatagcacagtggcggaagtcaggataccaggatatgcctgagtatgaaaatttccgccaccttctgcaagccccagtggatgatgcacaggaaattcttcactccagatttccaatgccaagatacattgacactgaacatggaggcagccaggcccgtttcctcctttcaaaagtcaacccttcacagactcataataatatgtatgcctgggggcaggagtctggagcacctattcttacagatgatgttagtttacaagtgtttatggatcacttgaagaaacttgctgtgtccagtgctgcttgaagtgctaataatgttaaagacacttaagaagatgaaataatattcaaatttcattttttcctttttccatttatctgtggaaaccaacagatattgctctatattttttgtattagtatggtttgagacaacatatggaaaatgttcacatttgtagattaagctggaattataatgagagcaataagaacaaatttattttgcttaccacagtgttatagctggttctagaaatttgaagtctttataacttaattatgtttaataaaaaatagagtctgcctcgtactacagatgtaactcatttgtatattgcagacagacccaaagtggcactgaattttcttgctcaccttttaaaaacttgttccttaattttagccagaaagcaaaaaaacaatagtaatgataaatgtgaacatttttgcttattcattgaatatttttctgtaattttcagcacttatgtatacactttttctgtacttactaggttaaggcagacttatttttatgatttgtttaggaattatttgattgtataatggtaattttcatgatgataatgtttttggttatttggaaagatagtttagagatgaaaggtttttttgggtaacaatcccgcagctgacaaaaaatgtgaaatttccacaaaatatccaacttatgtgactaaacgcagtagtttttttaaaaggggagatagaaaataaatggttttgttggagtgcattttagtaagcctttgcagtaaaatgacggttgtaactactaaaccaaatttagttttcacagcatggttttgttgttttccccttgtttttcagaggtaaattttgcattatatccttcagtattttaacactattttggcagtttacacattactttttgtttttccttcctttttgtgaaatgtattaagttgtggttcttattgaaacagtattatataatgtttgcttaattatatcatgtgatgctcagttctattttgatttattcattagtattcacttttacctttaaagtttacttgtagcaaatatgtttacattgataaagccagatatgttttgacaatgaaatttacatatcaagtactgcaaataaaaggtggtgctatgatatatgcttaggaggacagttttaatgattgtacttgcatgaacacaatcatatgatggtaaagcagaaacttaagaaaaaattgtttatgtgttatattcaattagcttaaataagttgctttgttatattttatttgaattgaactacgctaggcctaaatgccaataaaatatacttttcactgttaaaaaaaaaa

SEQ ID NO: 61157 - DNA, 1023 bp, Homo sapiens
tgctcaaatgttttctaaagtgtagaacattatccattagtgggatataaagtaaatacattcaaatattgattttaaagaatgtcttgaccaaattttttaaagaaaaaatatataaaataaaaagtatcagagtacattatactcagtaaggataaaatattatttcatgcgctggccatgctggtcttggtggtttcgccgtggtctgcggcccggggagtgcttcgaaactactgggagcgactgctacggaagcttccgcagagccggccgggctttcccagtcctccgtggggaccagcattagcagtacagggcccagccatgtttacagagccagcaaatgataccagtggaagtaaagagaattccagccttttggacagtatcttttggatggcagctcccaaaaatagacgcaccattgaagttaaccggtgtaggagaagaaatccgcagaagcttattaaagttaagaacaacatagacgtttgtcctgaatgtggtcacctgaaacagaaacatgtcctttgtgcctactgctatgaaaaggtgtgcaaggagactgcagaaatcagacgacagatagggaagcaagaagggggcccttttaaggctcccaccatagagactgtggtgctgtacacgggagagacaccgtctgaacaagatcagggcaagaggatcattgaacgagacagaaagcgaccatcctggttcacccagaattgacacccaaagatgttaaaaggataacttcacagtaaatcatttctcctgaaatagaggaagattctttacgttgttgtgcttgtttttaaatcatcagtatagtttaacacattctttctaagcagttttgtgtgggataatttgaagaatatattatgagtaaactccgaaaattttgtttatccaaaggcttcaatggattatgtttctattatatacaaggttttaagtaaacataaaatttccagaacaaaaataaaaaatttaaaattcataacaaaaaaaaaa

SEQ ID NO: 61158 - DNA, 1157 bp, Homo sapiens
ctccacttcatggagcctgcacctcgctcgtgctccaacgcttctgccaccgccgaccacggccctgcgccccagccaggcctgaggacatgaggcggccggcggcggtgccgctcctgctgctgctgtgttttgggtctcagagggccaaggcagcaacagcctgtggtcgccccaggatgctgaaccgaatggtgggcgggcaggacacgcaggagggcgagtggccctggcaagtcagcatccagcgcaacggaagccacttctgcgggggcagcctcatcgcggagcagtgggtcctgacggctgcgcactgcttccgcaacacctctgagacgtccctgtaccaggtcctgctgggggcaaggcagctagtgcagccgggaccacacgctatgtatgcccgggtgaggcaggtggagagcaaccccctgtaccagggcacggcctccagcgctgacgtggccctggtggagctggaggcaccagtgcccttcaccaattacatcctccccgtgtgcctgcctgacccctcggtgatctttgagacgggcatgaactgctgggtcactggctggggcagccccagtgaggaagacctcctgcccgaaccgcggatcctgcagaaactcgctgtgcccatcatcgacacactcaaggtgcaacctgctctacagcaaagacaccgagtttggctaccaacccaaaaccatcaagaatgacatgctgtgcgccggcttcgaggagggcaagaaggatgcctgcaagggcgactcggccggccccctggtgtgcctcgtgggtcagtcgtggctgcaggcgggggtgatcagctggggtgagggctgtgcccgccagaaccgcccaggtgtctacatccgtgtcaccgcccaccacaactggatccatcggatcatccccaaactgcaagtccaacccagcgaggttgggcggccagaagtgacacccccggggccaggagccccttgagcagagctctgcacccagcctggccgcccacaccatcctgctggtcctcccagcgctgctgttgcacctgtgagccccaccagactcatttgtaaatagcgctccttcctcccctctcaaatacccttattttatttatgtttctcccaataaaaacccagcctgtg

SEQ ID NO: 61159 - DNA, 4249 bp, Homo sapiens
  misc_feature (1)...(4249): n = a,t,c or g
ttttttttttttttacaaatattaaaaatgtgatttttaataatataagtacaaaattttatttctttatacaactgtaatgggatttggatcaaaccactagaatttatttaaaaaaacaaaataaaacaatgatataaaaactgcaagaaggtctgaatccaaagtttttcctctaatagtaccaaataccacaagggtccagattattatacaaatgtgtacaaattttaaatacaaatacaatagggctgggtttcaaaggaaaacaaacaaaaagcaggtccctccatccaggatttcattaatggtatatgattggacaatgctaggggtttaatgtcttcctatactaaccatgtcttccccgcccctcctagataccctgtgtcaaacagggaaacttcccacagatacagaagaggcatggtacaatgttctaacacatgaaatcaagttaagatttctgttcctcttgattttggttctcaaacaatcctgtttctctgtattcccaattaaatcttaaaactgctctgagctgagaaagggattcagcagccagactacctttaagcaacatagccctgtgacaacactggtggggagaagggaagaaattaaataggatgcagatgggctacactgtccccaaagatttactttgatgctgtagtgctctgtcagggccaggagaagaaagcacagttaactcagagcttggtgttggcagagaatctcataccaaatttaaaaaccatcctgaagtgctcaactgtcttctttccaactgggaaacaaacgtctggttctctggaaataagggcagctggggatggtaacattcctctttattttactttctagacattattgaagcccatgaagttctttataaagaattagaatcctaacacaatgattcatttttgaggtaaaataccttaaactgtagatgattcagagtttttggaacagaccaggaggaaggaaggaaagagggaaggaaacagggaaggaaggaaggaaagaagggagggcggaagggagaaatgacaaatctgtatcttccacatgctgttgctggtggaggcttctgttattaaattatatatacagaaatttacaggataaaattaaaatctaagagattttaaagagttaaatacacataattaaaatacacattcacacacacataaataaacctacaagagagtgagttttgttttgtttttgcaattcacttacatgtggaatgcagaacactgtgtatctgcccaccaggggaaccgataagatgaacccaaaaatcatgctgggcaaagtttatccataaccaccgagcaactaagcagcacggcttgtgaggacttggtggctaacttcatgctgccagtgaaagacaccagcacttaattaagaagactaaagattctgggttagctcagaatgtatggaggtccaactggtggcattgacagcttcaccccccaaggtgttttttgctgcccagggctcacagaactcccttggcctctgttgaggcccacnaatggtacccaatgattacaataaattttgagacacagacacctatacagtaggaattggaatgaaccctctactcaattcacctaagccacttccataactataaagggaacaaattttatcacctcccacctaggtcacttcaaattgaaaggctttgaattttcagtcaactggcatcttcccgttatctttcctattacatttcagactaagacaggtaaggcaaatggtcagtgatgggtctggaggtccaactgagcttggaaaataatcacattttagctgtccataaagagatgcgcttggcacccagaacaagcccccagcccccaagttacattgatttttaaggcagatttatccaccacaggagaaaaaagaatcccaagcctgtattcatgccaaaatttcctcttggctaaacctttgccatttcataaaattattaaaagcaaagtagttacagtctatgtatatattgtacattatatatatatgtatatatgtatgtatagatataaaaatttaaaacctacagccagaggccactgaaggaatctgcaacagtcatatatacacaaaccagcaatggtgtaggataaggtttctgtcccaggattctttgctgtcacagtcccggcgtggtgtaagcaatgttgtctaatgtgtttgacaagacctgtttgggacagccattcaattcaggtagttgtgtggtgagacatgccaaggggccaagggcacagataatggaatccagaagcactgacaaactgccagacacagccaccataccctcagtttcctgcagacggtgtccaatgaggcttagggactctcccaacagctgaagatgagcagcaacatcaatgggctctgtctcaggggctttggctggtgaggctggtaacagcatggtggtgggtggggacttcttctggggtgacagtactcctacagaagaggctttgactttcatggaaccttctgagctggatgctttccttttcacagttgtggcttctgctttgttctgtttgtgctgcagatactgagctttttgcttccaaatcagtttgtctttttctggtaattgcttccacacctcagccagttttttactaagttccccaaaatctatacctggatggtcagccacaatggtcacgcgatactctttacagaacacctggtaggccgacatgttcttcttttttggcttttctcctctctctctctctttgtccttctcttcttttttcttttttttttcactatgcccatctgtgtggaggccaggaagtggcaggggaggtgctgctgctccagcgtatgggatgctgggaggagggccagatgtcactgtgacctctcccactggcacggcagaaagtcctaaacttctcttggacttggagtgtcgcttctctttatgcttctccttgtctttcttctttttgctcttctttgacttctttttcttcttgatttctcggggaagaatcatctatcactaactccccagcctctagttccccaccagaggatgagtctgattctaccagaatagggttcaagccctgaaagatcaagggttagcactgtggggactcttgcgaaactgggaaggcgtcaagacccaacaagcctttcaagggcccaggaagatgaatgtgcgtctgaggatgacttgtgctttttccgggctgttttcagaaagctctgtaactcatgtcctaggagtaaagcaccctgctcatcccgagctgatttctttgaggattttttcacagtcgcttgttgggaagggatattgaaaagactcctcatcaacagagctgcttcccttctcctttggtgacagaataagtttcatttttaaaccatcaggctcccgaagggtcagtgtctcctgtgttcacatagagaggtttcatttttttcgatttgtgggagacaccatcctctaggggtagttccccactgcttccactgactttcttcctgtggtgctccctttttaactctcccgaaatggctttgaaagagccagaggatttctcccccagtctttttggagggcttggagcctgctgccagtggggaagtgatagctttcaacaggtccatagctgtatcagtagactgtgggctggactttttctttttcttctgtgacgattccaaagacgaaatatctggtgtatcacaaatgcagactgttcttctatgctgaatcctccaaaataccagccctccacctctctcctccttcacactggtttatcggcactcagaacaagaaccactgtcctccatagtagtaatcatcagaggagtgcttcctcttcttcttgtgtgtgtccgtccccaagaagtaaagttcactatccttcaacttcttcttggaagaattcctgacctgagcagcaatttcttcctcttcccttaaaaaatctttgtaagaacgttttttctctcgttggcttcggccagctgcaagtcctatgtcctcaaaggtatgatcaccatcaaaacaatcttctttcttcacggagtcatcataagccatggtggtcctgcagggcctttgagaatgtgtcactgtgtccaggctccttcccgtctacaggaccaggtcttcactcggctcgcccggatcccgcctcaacgccgccgatcgccgacgaaa

SEQ ID NO: 61160 - DNA, 564 bp, Homo sapiens
ttttgcctttcacaggaatgttttattgtctctgcctggacttctaacatagcatatgaggtgaaaacactgctttagtaaaaatggaatactcttggttacatgaaatcccatccctcgtccttcaggtccactggaggagaagtccctcattccttgggattggtgacgacagccgtggtggaataggagtaggggctcagcagggcggcaatggtgtggtggcagcaggcgcagcccagcctcgaaatgcagaacgacgccggcgagttcgtggacctgtacgtgccgcggaaatgctccgctagcaatcgcatcatcggtgccaaggaccacgcatccatccagatgaacgtggccgaggttgacaaggtcacaggcaggtttaatggccagtttaaaacttatgctatctgcggggccattcgtaggatgggtgagtcagatgattccattctccgattggccaaggccgatggcatcgtctcaaagaacttttgactggagagaatcacagatgtggaatatttgtcataaataaataatgaaaacctaaaaaaaaaa

SEQ ID NO: 61161 - DNA, 1352 bp, Homo sapiens
gcggccgccctcccacagccccacacactgggagaccgcccaccgcaaaccgcggagacccccgtctagatttaaagcgcggctgcgcccggcttctgacgtccattgaatcgcgcgggcggccggcggcgagcgcggggctgcgccgggatcgctgcgccctccgccgctggcctctgcgacgcgcgccgctcgcccgagccacccgccgccgcgccggctccccgcgccgctgcgctcctcgcccacgcgcctgcccccaaggatggtcccgcgcgaggcaccagccgggtgggctttgccttctgctgctgctgctctgccagttcatggaggaccgcagtgcccaggctgggaactgctggctccgtcaagcgaagaacggccgctgccaggtcctgtacaagaccgaactgagcaaggaggagtgctgcagcaccggccggctgagcacctcgtggaccgaggaggacgtgaatgacaacacactcttcaagtggatgattttcaacgggggcgcccccaactgcatcccctgtaaagaaacgtgtgagaacgtggactgtggacctgggaaaaaatgccgaatgaacaagaagaacaaaccccgctgcgtctgcgccccggattgttccaacatcacctggaagggtccagtctgcgggctggatgggaaaacctaccgcaatgaatgtgcactcctaaaggcaagatgtaaagagcagccagaactggaagtccagtaccaaggcagatgtaaaaagacttgtcgggatgttttctgtccaggcagctccacatgtgtgggtggaccagaccaataatgcctactgtgtgacctgtaatcggatttgcccagagcctgcttcctctgagcaatatctctgtgggaatgatggagtcacctactccaggtgcctgccacctgagaaaggctacctgcctgctgggcagatctattggattagcctatgagggaaagtgtatcaaagcaaagtcctgtgaagatatccagtgcactggtgggaaaaaatgtttatgggatttcaaggttgggagaggccggtgttccctctgtgatgagctgtgccctgacagtaagtcggatgagcctgtctgtgccagtgacaatgccacttatgccagcgagtgtgccatgaaggaagctgcctgctcctcaggtgtgctactggaagtaaagcactccggatcttgcaactccatttcggaagacaccgaggaagaggaggaagatgaagaccaggactacagctttcctatatcttctattctagagtggtaaactctctataagtgttcaggggtgacatagcctttgtgcaaaaaaaaaa

SEQ ID NO: 61162 - DNA, 2637 bp, Homo sapiens
tgtgtgtgtgtatgagagacgtgcacctatgttagcctgaggagtgtatgtctgtcaggacagcaggggcctcaagactcaggacttttattaggcctccagttatggccttccaggaagcccggcgcggagaagcagcagaatcatagagattaataaagaatgacgtttggaaatggagtgatccaaaagtgatcgccaccattcctcccgcaatgacccaccgccctgaccagaggagatcagcccttaaaagttaacttctacagcaaaaccctcttagtaaagggcaacaaagactacatcctgacacctccaaggggcacacggtttttacagcacgttttattattcataaaaaaataaatttatttacatatgttatttcctgtggtagtgcagcctcggggcaagggcgcgttccctatcgcaggatcacttgctatggtaagccgcccaccctcgcgcgctcctccgcgcggggagagaacctgcgcggcaggaccgtgggtgttggagttggggctcccggagcgtcggagtggggagacctgatgcagagagtctggagtcggagctgggggtgctgcaggtaggacgcaggagcggaggcggaagaagggaaggcccgaaagaaagacccccacacaggtttggcgcacggggggctttggggaaggcttcagcccaggaaagttggaaaagggtttgacaagacgccttgccttgatttaagaaaaaagcccggggaactttggggaaggagaccggatttgaagaaagccacccggcaggaaaggcccgaaacgccaaggagctctcccgggtaaaacccgcctgcggtgattcttgggaaatgtgtctccacctagccctgcgagcagcggcctttcttcccgcccgttagaagggcgctgtgctggagtacgaacccggcccagagaagccactcgcccttctttgtcacttaaaaccctgtcccgaacgcggaatctcacgtctagacctctgtctttaaagcggatgtagagcgcgttctaaccgttccctaacccattgtgtcaccgcgaaaggccggggctgtgtggaaccgtccccccacgtgtgcgatgaatcttggtccgcttgagaacggatccgtgggcttgtctggcgcgggctggggcagcagccgagagttagtctacagagctagggcccgagggtggacctgcgtccgcgtctcgtcacgaaaggaagctctttttggagaggcaaaacgtggtcgcccagatccggcgcagctgtagccgtgggcgctgtgcagtgacagccacacccgccacctgtcacgatcacagttccagggaaaggggaagggtcaaggagaatccagcggaaacttcttcccatctcacgagctctcccttctctccgtggcccccaaacactcgcatttaacgaataatcccatcaagtgagttccagtccgatttaagcggtggttccacatagtctgttggctgcggaaacttctttggtgtcagagtccggtcttcccgagaccacgaatggccatgtcaggttcactgggtgcacgtagccgttctcatagcggtcctcctgcaacagctgccgcaggtgagcgatgtaactggaagccagccggagcgtgtccagcttggagagcttagtgtcggggggcacccagggcaggctggtcttgagcctggagaaggctttgctcagcacgcgcatccgggcacgctcacgggcgttggccgcgttccgctgcgactgcttgcactctgcggctgagcccttggccgggaggggcttcttgccaccaccgcccgcgctaccacctgcgccgccgcccccagccacacggggccgcttcctcttgcagccttccgcgctgccggctgtgcccagagcgcagcgctcctcctcgccgtcggggtcctcctcctctgccgacgagttgtcactgggcgaggcgtagctgcgctctacgccgcggaggggcggcctcttggaggcggggaccgggtactcccgctgcagcccccgaagctccatctcctccggatcactcaccgagcccgtggacatcccgttgtcccccttgcccacacgcgtcctctttcctcccccctggccagtctcgctgtctccgccttccgctccctggcggaggcggaggccagagagcgctccaaggaagactaaaaacccaggccgggaagcgcggggtgagaaagcgaggtgggtggcgagagcgtgagcgcccctctgctgaccccggggagcgtggactacgagttggcgcccaagtccagaatccgcgcgcaccgcggaaaatatttgcaatacctgccacgtccaaggttcagctgaggccaatgtaaagccagtattataggacacttctcagactgagagcccaatgtcgttggaaaccactgggccacaggaaaggcaggctctctcagtcctgctcctgccatggaagaagcctgctcccaccatgccttctgccacgagtaaaagttccctgaggcctccccagaagcagatgctgtcgtgcttcctgtatagctgcagaactacttcaaatcatcccaacaccagagaacactaaatgacagtggacag

SEQ ID NO: 61163 - DNA, 3028 bp, Homo sapiens
ttttttttttttgccttttttatttttgatgatcctcaaggaaatacaacctagggtgccttaaaaataacaacaacaaaaaacctgtgtgcatctggctgacacttccctgcttctggttttcgaagactatttagtggaaccttgtagaggagcagggtcttcctgcagtgcctggaaaacaggcgctgtttttttgggaccttgcgtgaagagcagtgagcagggttcctgtggtttccctggtccctctgagatggggacagactgaagacagaggtcgtttgatttcaaagcaagtcaacctgcttttttctgtttttacagtggaatctaggaggccacttagtcgtctttttttcctcttagaagaaaagcctgaaactgagttgaatagagaagtgtgaccctgtgacaaaatgatactgtgagaaatggggcattttaatctaagtggttataacagtggattctgacggggaaggtgtagctctgttctcttcggaagacctcgttttctaaaggctggactaaatggctgcagaactccctttggcaaaaggcatgcgctcactgcttgcttgtcagaaacactgaagccatttgccccagtgtggtcaagcagccatgctttctgggcattttcgtcctcccataatttcatatttccgtacccctgaggaaacaaaaaggaaatgaggagagaaagttactgttaagggtggttaacattttttttgttttgttttgttttggtttttttttttttgaaacaaagtttggttttttcccccaggctggagtgcaggggcccaatttcggctcatagcaagctccgcctcctgggttcatgccattctcctgcctcagcctccaaagtagctgggactacaggggcccgccaccacacccggctaattttttgtgtttttacaaaatacaaaaaagtagagacaggatttcactgtgttagccaggatggtcttgatctcccgacctcgtgatctgcccacctcagcctcccaaaatgctgggattacaggcgtgagccaccgagcctggccggttaacatcttttaattgtttccaggattgagcaggttctcagctgggctctgatatcccgtgcggagttggacaagtgggcagcataaagtcactcatttcttaccattttattcccctcaattctcaatatattcagtaatgaagaatggtgccaccactcaagcaacaagcctcaaactcacccatgtcatctttttcttggatgattgcagttatttcaaaaatttgcatgcaaaatatacactcatcctacttcaagatggtggtggcaatagtcaggagaaggtagcattggagtcctggtttgattcgaaggatgaagacgaagaagcaagggaggaacaaatgaagaaccatctttggtcatgaataggaatattcaagattataaaggtatcaggtctcctaaaattgatctatggatttaataccattttcaatggaaattccaacagattttattgaatgaaacaagcaggtgtttatatggagtagcaaaggacttaaaattaccaaatgcttctaaatatgaaggagaggttggggacacgcaccctatgtgataccaagttttattgtcaagacagtgtcatggtgcagaggtaggcattctgagcaggggaacaaaataagggcctagaaactcacccgtgcatatgttgacctttgcaaaatgacctggtgacatggcaagtcagtggggacaggaaggaccactccctaagtaatcccagaacaatggctattcatgtgggaaaaaaagaaattttactttctctcaccttacctggtgataagttccaaatatgttaagggctttaatacaaaaagcaaaaattgtcagtgtttggatgaaaaaagccttagggcaggaaagaatctcttgagacataaagtagtaatcataaaggacaagatggttaagtcaattctgttaaaactcaaggcttatattaagcaaacacttgaagtgagaagatgatccacaacttgagaagacatttataatacaaataactgatgaaggattcataatcacaaatatagagaattcctatttaaaaaaatagaaaaatagtgaagactacacaagaggaaatagggcttttaaataaatagatgttctgtagcattggtcagggaaatatgaattaggaccacaatgagattccattttatatccataagatttgcaaaggttgggtctgacagtaccagttgttagatctgtagggacttgtacaacattgtggatgtgtaaacaggcaccactgctttaaaaaacaattatcccttacagacttgaacatttgcagacgttatgatcttgcttccaactcccacctgtatgtccagcaaactcttgcatgtggccactaggaggaatgtgtaagaatgttcatagttacatatttataatagttaataactggaaaaagtgaaatgtatgtctgtctacaggaaaataggtgaataattagatatatgtattcattctacgggatattattcagtagtggaaatgagtgaactacagctatacctcacaataagaatgaatctcagaaaatattaaggaaaaaagcaagtttgaagagaccacatggggcgtactatttttattgagcccaaaaacaagcaaaaccaaagaatatgtagtctaagcatacgtatacaataaaactatgctattaaaaaaaaaaggtaactgataaaccaaaattgagcatagtaattacccacagaaggaggaagtggaagggacaggagcacataggtagatgccaagttatgcagctgttctggttcctcctggtaggcttacaagtgtttactatatgctattaatacattatactttataactaatagataacagttttttacatattaaatatgttctacttaaatatattataaaaaataaaggcaaagtggaatgataacctaaaaaaaaaaa

SEQ ID NO: 61164 - DNA, 706 bp, Homo sapiens
tttttaaaaatttttaaatgtttaatcacaagtcagtagcatgacatcattagtagagtagagtctgctgacattacaatctattgatctccccagagttaccaaaagtagttcacaatagttaggcttccttctgtccatagttcagggcatattcaaagtctctaaaagctgacgtgaccatctggaatctcgatctaacttccctgaatacctcaagaacagtcctttccggtaatttgggagccacctgcctaaatgcttttttgaaatcttccaaagttaaaaatccacgatagtaggtgtcaaaggctgtgaagatgtgtcttacttcgttccgatatcgttgagcttccttctttttcctgacaatatttaaaaacccctcgagtaatataccagaagtatttggatttattgaagacatcacagaatccacttctatcttggagggcttgtacccaaacagcattacaacagcagttttaaagtcctctctgctgagatatcctttgtgatcttcatcacatgctttaaatacttccacccacttcctgtgttccgagggactggcttcccacgtccgcgacctggctctggcctcggagaagaacatcgcgactacaacaaccgagccccagcaacccaaccagctaccaccgctttcccagcctggctggcagcctaccgcggcccgacagcaacg

SEQ ID NO: 61165 - DNA, 1790 bp, Homo sapiens
  misc_feature (1)...(1790): n = a,t,c or g
tcacggccggcgcctcctcctggattcattcactcgctcttttcattcacgaaggtagtgaggcctagtggaaagccatggagagcgctctccccgccgccggcttcctgtactgggtcggcgcgggcaccgtggcctacctagccctgcgtatttcgtactcgctcttcacggccctccgggtctggggagtggggaatgaggcgggggtcggcccggggctcggagaatgggcagttgtcacaggtagtactgatggaattggaaaatcatatgcagaagagttagcaaagcatggaatgaaggttgtccttatcagcagatcaaaggataaacttgaccaggtttccagtgaaataaaagaaaaattcaaagtggagacaagaaccattgctgttgactttgcatcagaagatatttatgataaaattaaaacaggcttggctggtcttgaaatcggcatcttagtgaacaacgtgggaatgtcgtatgagtatcctgaatactttttggatgttcctgacttggacaatgtgatcaagaaaaatgataaatattaatattctttctgtttgtaagatgacacaattggtactgcctggcatggtggaaagatccaaaggggctattctgaacatttcatctggcagtggcatgctccctgtcccactcttgaccatctattctgcaaccaagacttttgtagatttcttctctcagtgcctccatgaggagtataggagcaagggcgtctttgtgcagagtgtcctgccatacttcgtagctacaaaactggctaaaatccggaagccaactttggataagccctctccggagacgtttgtgaagtctgcaattaaaacagtcggcctgcaatcccgaaccaatggatacctgatccatgctcttatgggcttgataatctcaaacctgccttcttggatttatttgaaaatagtcatgaatatgaacaagtctacacgggctcactatctgaagaaaaccaagaagaactaagcattgataactgcattgtaacttggccagatgctccagcatatgcacgttcactgcaaagcaccctactggttttgaaaatctgaccttgtcatttcaatagttattaacatgactaaatattatcttaattaagaggaaaatagaagttgcttttaggggtttctgacatatattctggatactatccgaggtaattttgaagtttaatataaatgctcatatcaaatgaatatagaactaatattgtcgggaacacctaatagaaaggaatactattatagcaaatcacagaatgatagactcaagcataaaacttggcagttttatctgcttcaaaatgccattgatcattattcctgtattttctctgaaactgattataaaaaccaatgtccagctactcttttgtttttgacacttgaagaaatggagatcgatttgatttgtttataagcagacacactgcaatttacaaagatctctttacggttttataaaattatcttccagtttgtacatttatatggaattgttctttatcaagggtagctaatgacatgaaaataattgtgaaatatggaattatttctgacacatgaagcccactaaactatgctttcttataatgcatatttcttctcagtttaaatgtatgtaaatatcgaagctaatatggtatgatttataaaggataaatgggcccaaagtgtacattggagactgggcagcccatctatggtaccactggaaccctgncccaggaaagtggt

SEQ ID NO: 61166 - DNA, 6616 bp, Homo sapiens
gcggccgcgggcggggctgagggcggcgggggcgggccgcccgagctgggagggcggcggcgccgaggggaggagagcggcccatggacccgcggggcccggcgccccagactctgcgccgtcgggacggagcccaagatgtcggcctaggccggggcgcgacgacgcggacggggcggcgaggaggcgccgctgctgccggggctcgcagccgccgagcccccgagggcgcgccctgacggactggccgagccggcggtgagaggccggcgcgtcgggagcgggccgcgcggcaccatgtcggccaaggtgcggctcaagaagctggagcagctgctcctggacgggccctggcgcaacgagagcgccctgagcgtggaaacgctgctcgacgtgctcgtctgcctgtacaccgagtgcagccactcggccctgcgccgcgacaagtacgtggccgagttcctcgagtgggctaaaccatttacacagctggtgaaagaaatgcagcttcatcgagaagactttgaaataattaaagtaattggaagaggtgcttttggtgaggttgctgttgtcaaaatgaagaatactgaacgaatttatgcaatgaaaatcctcaacaagtgggagatgctgaaaagagcagagaccgcgtgcttccgagaggagcgcgatgtgctggtgaacggcgactgccagtggatcaccgcgctgcactacgcctttcaggacgagaaccacctgtacttagtcatggattactatgtgggtggtgatttactgaccctgctcagcaaatttgaagacaagcttccggaagatatggcgaggttctacattggtgaaatggtgctggccattgactccatccatcagcttcattacgtgcacagagacattaaacctgacaatgtccttttggacgtgaatggtcatatccgcctggctgactttggatcatgtttggagatgaatgatgatggcactgtgcagtcctccgtggccgtgggcacacctgactacatctcgccggagatcctgcaggcgatggaggacggcatgggcaaatacgggcctgagtgtgactggtggtctctgggtgtctgcatgtatgagatgctctatggagaaacgccgttttatgcggagtcactcgtggagacctatgggaagatcatgaaccatgaagagcgattccagttcccatcccatgtcacggatgtatctgaagaagcgaaggacctcatccagagactgatctgcagtagagaacgccggctggggcagaatggaatagaggatttcaaaaagcatgcgttttttgaaggtctaaattgggaaaatatacgaaacctagaagcaccttatattcctgatgtgagcagtccctctgacacatccaacttcgacgtggatgacgacgtgctgagaaacacggaaatattacctcctggttctcacacaggcttttctggattacatttgccattcattggttttacattcacaacggaaagctgtttttctgatcgaggctctctgaagagcataatgcagtccaacacattaaccaaagatgaggatgtgcagcgggacctggagcacagcctgcagatggaagcttacgagaggaggattcggaggctggaacaggagaagctggagctgagcaggaagctgcaagagtccacccagaccgtgcagtccctccacggctcatctcgggccctcagcaattcaaaccgagataaagaaatcaaaaagctaaatgaagaaatcgaacgcttgaagaataaaatagcagattcaaacaggctggagcgacagcttgaggacacagtggcgcttcgccaagagcgtgaggactccacgcagcggctgcgggggctggagaagcagcaccgcgtggtccggcaggagaaggaggagctgcacaagcaactggttgaagcctcagagcggttgaaatcccaggccaaggaactcaaagatgcccatcagcagcgaaagctggccctgcaggagttctcggagctgaacgagcgcatggcagagctccgtgcccagaagcagaaggtgtcccggcagctgcgagacaaggaggaggagatggaggtggccacgcagaaggtggacgccatgcggcaggaaatgcggagagctgagaagctcaggaaagagctggaagctcagcttgatgatgctgttgctgaggcctccaaggagcgcaagcttcgtgagcacagcgagaacttctgcaagcaaatggaaagcgagctggaggccctcaaggtgaagcaaggaggccggggagcgggtgccaccttagagcaccagcaagagatttccaaaatcaaatccgagctggagaagaaagtcttattttatgaagaggaattggtcagacgtgaggcctcccatgtgctagaagtgaaaaatgtgaagaaggaggtgcatgattcagaaagccaccagctggccctgcagaaagaaatcttgatgttaaaagataagttagaaaagtcaaagcgagaacggcataacgagatggaggaggcagtaggtacaataaaagataaatacgaacgagaaagagcgatgctgtttgatgaaaacaagaagctaactgctgaaaatgaaaagctctgttcctttgtggataaactcacagctcaaaatagacagctggaggatgagctgcaggatctggcagccaagaaggagtcagtggcccactgggaagctcagattgcggaaatcattcagtgggtcagtgacgagaaagatgcccggggttaccttcaagctcttgcttccaagatgaccgaagagctcgaggctttgaggagttctagtctggggtcaagaacactggacccgctgtggaaggtgcgccgcagccagaagctggacatgtccgcgcggctggagctgcagtcggccctggaggcggagatccgggccaagcagcttgtccaggaggagctcaggaaggtcaaggacgccaacctcaccttggaaagcaaactaaaggattccgaagccaaaaacagagaattattagaagaaatggaaattttgaagaaaaagatggaagaaaaattcagagcagatactgggctcaaacttccagattttcaggattccatttttgagtatttcaacactgctcctcttgcacatgacctgacatttagaaccagctcagctagtgagcaagaaacacaagctccgaagccagaagcgtccccgtcgatgtctgtggctgcatcagagcagcaggaggacatggctcggcccccgcagaggccatccgctgtgccgttgcccaccacgcaggccctggctctggctggaccgaagccaaaagctcaccagttcagcatcaagtccttctccagccctactcagtgcagccactgcacctccctgatggttgggctgatccggcagggctacgcctgcgaggtgtgttcctttgcttgccacgtgtcctgcaaagacggtgccccccaggtgtgcccaatacctcccgagcagtccaagaggcctctgggcgtggacgtgcagcgaggcatcggaacagcctacaaaggccatgtcaaggtcccaaagcccacgggggtgaagaagggatggcagcgcgcatatgcagtcgtctgtgactgcaagctcttcctgtatgatctgcctgaaggaaaatccacccagcctggtgtcattgcgagccaagtcttggatctcagagatgacgagttttccgtgagctcagtcctggcctcagatgtcattcatgctacacgccgagatattccatgtatattcagggtgacggcctctctcttaggtgcaccttctaagaccagctcgctgctcattctgacagaaaatgagaatgaaaagaggaagtgggttgggattctagaaggactccagtccatccttcataaaaaccggctgaggaatcaggtcgtgcatgttcccttggaagcctacgacagctcgctgcctctcatcaaggccatcctgacagctgccatcgtggatgcagacaggattgcagtcggcctagaagaagggctctatgtcatagaggtcacccgagatgtgatcgtccgtgccgctgactgtaagaaggtacaccagatcgagcttgctcccagggagaagatcgtaatcctcctctgtggccggaaccaccatgtgcacctctatccgtgggtcgtcccttgatggagcggaaggcagctttgacatcaagcttccggaaaccaaaggctgccagctcatggccacggccacactcaagaggaactctggcacctgcctgtttgtggccgtgaaacgagaaatcctttgctatgagatccagagaacgaagccattccacagaaagttcaatgagattgtggctcccggcagcgtgcagtgcctggcggtgctcagggacaggctctgtgtgggctacccttctgggttctgcctgctgagcatccagggggacgggcagcctctaaacctggtaaatcccaatgacccctcgcttgcgttcctctcacaacagtcttttgatgccctttgtgctgtggagctcgaaagcgaggagtacctgctttgcttcagccacatgggactgtacgtggacccgcaaggccggagggcacgcgcgcaggagctcatgtggcctgcggctcctgtcgcctgtagttgcagccccacccacgtcacggtgtacagcgagtatggcgtggacgtctttgatgtgcgcaccatggagtgggtgcagaccatcggcctgcggaggataaggcccctgaactctgaaggcaccctcaacctcctcaactgcgagcctccacgcttgatctacttcaagagcaagttctcgggagcggttctcaacgtgccggacacctccgacaacagcaagaagcagatgctgcgcaccaggagcaaaaggcggttcgtcttcaaggtcccagaggaagagagactgcagcagaggcgagagatgcttagagacccagaattgagatccaaaatgatatccaacccaaccaacttcaaccacgtggcccacatgggcccaggcgacggcatgcaggtgctcatggacctgcctctgagtgctgtgcccccctcccaggagaaaaggccgggccccgctcccaccaacctggctcgccagcctccatccaggaacaagccctacatctcgtggccctcatcaggtggatcggagcctagcgtgcactgtgcctctgagaagtatgtctgatccagaccaggactttgacaaagagcctgattcggactccaccaaacactcaactccatcgaatagctccaaccccagcggcccaccgagccccaactccccccacaggagccagctccccctcgaaggcctgggatcagccggcctgtgacacctgaagccgccagctcgccacaggggccaggggagcttggagatggcctccagcgttcagtgccaagactgagcgggccctccaatgttgtccaaggaaatgtagaatcactttgtagatatgggagatgaagaagacaaatctttattataatattgatcagttttatgccgcattgttcgtggcagtagaccacatctgttcgtctgcacagctgtgaggcgatgctgttccatctgcacatgaaggacccccatacagcctgtctcccacccctgacaacccgagagggcatatggggccctgccaacaccacttcctcagcagaaacccgtcatgacgcggctgcttcggaagcagacatctggggacacagcctcagtacccagtcttttccctagttcctgaaactttcctaggaccttaagagaatagtaggaggtcctatagcattcccagtgtcactagaattttgaagacaggaaagtggaggttagtctgtggcctttttttcatttagccattgcacagtcagctgcagaagtcctgctgaccacctagtcatggacaaaggcccaggaccagtgacaccctgcgtccctgtgtgcgttaagttcattctgggtcgcagccatgaagtgtcaccagtatctactactgtgaagtcagctgtgctgttttccattcgcttccacggcttctgcctcctgccataaaaccaacgagtgtcgtggtgcaggcagcccctgtggcctgctgggctgagggaagtcagagccccagggcgcccacgaagcagccactgggataccccaccccgccccgccctgcccgccccccccccccaccagtcctgcccccgcatgggagcccccgtgattagtagcccgtatgatcacgtagacccacccaacacactcctgcacactgggccccggcccacggcacagcaatcccctgcgcgtggatttcaccttcaccctttgtaccagatgtttgagtgaccagctctgtggccctgtgtcgtcagcctcagtacccagtcttttccctagttcctgaaactttcctacggaccttaagagaatagtaggaggtcctatagcattcccagtgtcactagaattttgaagacaggaaagtggaggttagtctgtggccttaagaggcttgtgattaacttg

SEQ ID NO: 61167 - DNA, 2143 bp, Homo sapiens
ggggcggttccttgcgcttcagtcccccccgggtcccctcctgctcccgggttttctgccccgttcccccgggtggctgtgggctcccgagccccatgtcggccagccggccccagagccccacgaccccatggtgtctcccaagaaggtacatgaagcacaagcgcgacgatgggcccgagaagcaggaggacgaggcggtggacgtgacgccggtgatgacctgcgtgtttgtggtgatgtgctgctccatgctggtgctgctctactacttctacgacctcctcgtgtacgtggtcatcgggatcttctgcctggcctccgccaccggcctctacagctgcctggcgccctgtgtgcggcggctgcccttcggcaagtgcaggtgagtctgccctgctggccccgacgatccccaacaacagcctgccctacttccacaagcgcccgcaggcccgtatgctgctcctggcgctcttctgcgtggccgtcagcgtggtgtggggcgtcttccgcaacgaggaccagtgggcctgggtcctccaggatgccctgggcatcgccttctgcctctacatgctgaagaccatccgtctgcccaccttcaaggcctgcacgctgctgctgctggtgctgttcctctacgacatcttcttcgtgttcatcacgcccttcctgaccaagagtgggagcagcatcatggtggaggtggccactgggccctcggactcagccacccgtgagaagctgcccatggtcctgaaggtgcccaggctgaactcctcacctctggccctgtgtgaccggcccttctccctcctgggtttcggagacattttggtgccagggctgctggtggcctactgccacaggtttgacatccaggtacagtcctccagggtatacttcgtggcctgcaccatcgcctatggcgttggcctccttgtgacattcgtggcactggccctgatgcagcgtggccagcccgctctcctctacctggtgccctgcacgctggtgacgagctgcgctgtggcgctctggcgccgggagctgggcgtgttctggacgggcagcggctttgcgaaagtcctacctccatctccgtgggccccagcaccagccgacggcccgcagcctcccaaagactctgccacgccactctccccgcagccgcccagcgaagaaccagccacatccccctggcctgctgagcagtccccaaaatcacgcacgtccgaggagatgggggctggagcccccatgcgggagcctgggagcccagctgaatccgagggccgggaccaggcccagccgtccccggtaacccagcctggcgcctcggcctaggggaggggtgagacgctcgctgccgtgcccgccacaccaagatgttggggctgcctggcgcccactggagacagacagacagacgcctgtcccccgggaccgaggcctgtgccgtccccacccgccccaacatggtgctcatccttgccgagacccctgcagtccgtgcccgcgcccagcccagctgccccggctgcacgcctgctgctcccagctcgcccggctgccacaagctctctgcgggtccatcctccccaccggggtccgtcctcgcaggccctgcccggcctctctgcagaccctcaagcgtcgtctgcatgagtgagcaggcgtgggtggactctggccgcggccacacttggtgctcaccagctgcttcggccttcaggtgacctccctccccacggcatcctgctctccgggtggaagagcagctttctgtctcccagaaggcatcgcttttccctcttgagcagatcggagcccctgggaggtttggaagctgcctccaagcctaggacacggaccggtggccggggcggcctctggcccctgacgctggctgagacaggcccgtggggcggggttttggggcgtgaacaaggctggcagtaagtggacaagctgctcccctggctaaggccctgccctgccctcaggggtccctggagccctgggagggagggactgggtcgtgggaggtcctggtagctcccggcacccaacctcgcttcccgtgtgggccccgtgttgcttttctgctgagaggggcttgggcctcggttctccctgg

SEQ ID NO: 61168 - DNA, 1069 bp, Homo sapiens
  misc_feature (1)...(1069): n = a,t,c or g
ttttttttttttgcaagctctcttagcttgtgcattcagaccagacatcacatgtaaatatttatacacagggaggtgggaggggagggccacacgatgcgttgctgcgccccccgccttcctctcactcctcttataagaagcgcggagtgttctgccttttcacctacgcagccccagcccggcccccctggggaccctagagagggtgtcctttctgtttatccttctctttgctccagatggctgcgctctctaggggcgcgatgtgtgtgtggtggagccgggtcccctccagcaaggagggcggcccactgctctgctggtgctggaaggaggaccccgggtagtggccgatgacctcgctgtaggtggggcggcggcccctccatgcgcccgccgctgccgtagcacgtggcgctgatgcccgagttactgctgggggggcaggggccgcccagcctggcactatccatcaggtcactgtcgaagatggttctgtttgggggtgcgcgcaccgactcccggttcagttccagctgctgctcggggtcccgaagctggagggtgcaggggccctggtagggtgggggctcctccccgtctgacagcgagatggtgggtggcaggtcgatctcgtgctgcaggtacggataggtgggctggaagcggtggaagcgctcccgctgggcgaagggcggcacggccaggcggtcggtgggccgaggcggggcgtagacctgcggctctgggattccgttgcctgacactgtgctctccgagggccacaggcatccttctgaggacagggcatcttctctcctccgcccctggctgtgccggctgatgaaggaccgtgcagacagcttgtagtggctcagcaggcacgtgatcaccaccaccatcaccatcatcaccaccacggatgatgatgatctgaacaanatcttcagtccgctggtttcgcaggagactgtccgccttcagttctccagcagctcggggatcatggcccactgaacccccaagcgctttcacccgaacccaaggaggacgaccaggaaagacg

SEQ ID NO: 61169 - DNA, 1856 bp, Homo sapiens
tgccggagtcgagcgggtgctgctagcggaggcgccatattggaggggacaaaactccggcgacagcgagttgacacaaataaacccctggacccccttgttccctcagctctaagggccgcgatgttgtacctagaagactatctggaaatgattgagcagcttcctatggatctgcgggaccgcttcacggaaatgcgcgagatggacctgcaggtgcagaatgcaatggatcaactagaacaaagagtcagtgaattctttatgaatgcaaagaaaaataaacctgagtggagggaagagcaaatggcatccatcaaaaaagactactataaagctttggaagatgcagatgagaaggttcagttggcaaaccagatatatgacttggtagatcgacacttgagaaagctggatcaggaactggctaagtttaaaatggagctggaagctgataatgctggaattacagaaatattagagaggcgatctttggaattagacactccttcacagccagtgaacaatcaccatgctcattcacatactccagtggaaaaaaggaaatataatccaacttctcaccatacgacaacagatcatattcctgaaaagaaatttaaatctgaagctcttctatccacccttacgtcagatgcctctaaggaaaatacactaggttgtcgaaataataattccacagcctcttctaacaatgcctacaatgtgaattcctcccaacctctgggatcctataacattggctcgttatcttcaggaactggtgcagggggcatttaccatggcagctgctcaagcagttcaggctacagctcagatgaaggagggacgaagaacatcaagtttaaaagccagttatgaagcatttaagaataatgactttcagttgggaaaagaattttcaatggccagggaaacagttggctattcatcatcttcggcacttatgacaacattaacacagaatgccagttcatcagcagccgactcacggagtggtcgaaagagcaaaaacaacaacaagtcttcaagccagcagtcatcatcttcctcctcctcttcttccttatcatcgtgttcttcatcatcaactgttgtacaagaaatctctcaacaaacaactgtagtgccagaatctgattcaaatagtcaggttgattggacttacgatccaaatgaacctcgatactgcatttgtaatcaggtatcttatggtgagatggtgggatgtgataaccaagattgccctatagaatggttccattatggctgcgttggattgacagaggcaccaaaaggcaaatggtactgtccacagtgcactggctgcaatgaagagaagaggcagcagacacaaataaaaggtggtccttttggtttgaaggaagaaataaacttcagcctgaaggttttaatatggggaccttaaaaagaagagaagagaaagaagaaacaatgccattcccccggcaaccccacctaaaggatttacccatagacaatcccctataagatcttgaaccttgaattttaatggggttgtattttaaataatgtaaagtaaattatttaatgcacccccccggtgtgcctatgaatattattcccagttagcccttggattatttccagtggcccaacatatgcagacatttgtactcctcaacccattttctcaaagtaatgggcattctatgatttagacttcaaggaattccaatgatgaagattttaaggaaagtattttatattcaacaggtatattctgctgcatgtactgtactccagagctgttatgtaacactgtatataaatggttgcaaaaaaaaaaaaaa

SEQ ID NO: 61170 - DNA, 3071 bp, Homo sapiens
ttttttttttttgaaatgtaagtatacagattttaatttatttttaagaataattgtatattttaaaaacaggacaacgtactgtatgagtaaacagcgtggctaacaccaagtccacactggtaagcttttgagaaccatttacactatgttgacagtagtactgctgcaggcagacagcggaagaataaataatagtgcttcaagaagagtagtgattgagaggataggtaaagagggcgcctcatcgtggaagctagagcaggaacacctccccagtagtgacatgtgcaaagttccagatctccacgacaaagacagctcaacccactgggaacaaacagactcccaatgtggctggcaactgcgggggtagaagaactcaggcaaagtaggcacaggaatgggggagatgagagccaagggacaaacgccgagaaagcgttccgacaagcatgtgtgttcatacatgcatacccccaacaaagggcaatgcactgtgtaacagaactgaacacaatttaacaaagctgctcccagccttcctgtcacctctttggcagtagggcaggccatctcaacttcggacacacaaagacattctcttcaggaggaaggctgtcctgtgtggtggggacaaggcttcaggtaagagcaaagctatgatagctacagcattaattgaacatgcctaaacaaaaaagatgttaattactagttacaggtatacatgccaaaattacccccagggatgggcatagtcaatcattttcctacagtggtgaaataaaacaagctttgatcatgcttcagcaagtagaattatgtggtagagaagtcaggccccatatgctaaaatttgcacttcttgccataaacttttcatgtatataagtcaaaaccaagtctcctaggaccactaaacctatgatgggctttcaactgtaacactcattcacatctttaagttaggcccatggtcatggaacctggccaaggtttcaagcacgcctaagctgaagaaaaactaaagtcacccccatataattaggtccagtctaggcacaggaagccacagctggttgactgatcagggcttctcaggactggatgttggttgaattgaggattccagaagtagcatcagatttggaagcctttgaaagttctcgctgaagcccaacagtggaactgtcagagagggacggatccgcaaactcagaataggtgctggcaacagaattaatgctgaagttgcgctggaggggggccgagccagggtacccaccactcaggatgctgccgttgagctccaggttctccttgttggctccatgcctgccagtacggggtgttttcttccctgaacaggtggaagcagcgactggcttgctgccagaaggaggaagtcgagacacgggggagtggtagactgtccctccaaagataggccgaatgctactattggccgtagcattggacatggtggtagtgttcagcttacgtgctttgcccggtgtattgggagccagtcctcgccgcttgctaggtgttcgaggagcgctgccatacagcatctctgtctctgtctgttttttgttcttcagttgtctttcctgcttggctctctctttctccaatcgatgcatctcccattgttctgccacatactccatgaatttctgcccattcaccataaatgcctttgaatgttcctgttcccacaattcaattcgtgccttcaactcttcttccagcttgggcagcattttctggagcttggctcgttgtttttcttcttttagaagatttcctcctcggtttgtaaatcgatttggatctgaagcttttctctcaaactctaagaaaagcctccaggtttcttcccacttctggacaccttcaaagagttccttgtgaacttcatagtagttttttaaccgcacaatctcagcatcgtggagctggagcagactttctgtgtagtcctcagcacagaaaggggcaaaagcttgtctctgctcctggctataaaagcactggtcccagtactgaaccagctccactcgaattgcctcaatcactttcttcatggttttgcatttttcaagttcttccaaccgatccacttctaaattgcagcgcttttccggaccttggcctttgacccagacataatggtggccacagcttctctttcttcttcaggtatttgcaacctgtcccagagctctcgggatttgagtacgcaggcccctcacacactgcttcattttgtgatttctgcatttccaggctgccgtagcaacttttgtaggtgttgcaatattctccaaagacaaacaaaaggcatcttcgtcttcacacaccacatctctttcaaagcttgtgtctggggtgtggtctaattcttccatacacagtatgatctgtctctttatacttgacaaaactcctcacgcctagaagcctttgtttccctcaaagttgtcacatgttgcctgaactggttcagctcttctaagctgggcactgaggcactgtcaatatcatagtggggcatacaaagaatttcggcacagttcttgatcttgctcttgaagtagcttcaggttcctgttttctctcctttttctgttttcgcatcaattccacttgggtgcgcaaatctttttctagttgcaagatggtcgtctctccttcttcctgaaatggctcaacatgtaactcgctgcacagagtgttcagctctttctgacagacggatatgcttttgatgagtctttccttcaggctttcctcttcagcaatcatcatatccaggagttccttgatatgcttctttaccacctcagttctttgtaaccgctggtcctctggaatcccaattagctcccatatttcccgaaggtgatttagggctttctgcagacatactatggactcctccgccagcacctcacttctcctcatggcggacgctccaagcagccgtgagtccaggtccagacctactccacacggccccgagagcaacaaccacccgcaaaccccggcgatgtcactccgcg

SEQ ID NO: 61171 - DNA, 2214 bp, Homo sapiens
cgttgctgtcggcctctgagtagggcgggcgaggaggcagccaaggcggagctgatggctgcgccgagggcggggcggggtgcaggctggagccttcgggcatggcgggctttggggggcattcgctgggggaggagaccccgtttgacccctgacctccgggccctgctgacgtcaggaacttctgacccccgggcccgagtgacttatgggacccccagtctctgggcccggttgtctgttggggtcactgaaccccgagcatgcctgacgtctgggaccccgggtccccgggcacaactgactgcggtgaccccagataccaggacccgggaggcctcagagaactctggaacccgttcgcgcgcgtggctggcggtggcgctgggcgctgggggggcagtgctgttgttgttgtggggcgggggtcggggtcctccggccgtcctcggccgccgtccctagcccgccgcccgcttctccccggagtcagtacaacttcatcgcagatgtggtggagaagacagcacctgccgtggtctatatcgagatcctggaccggcaccctttcttgggccgcgaggtccctatctcgaacggctcaggattcgtggtggctgccgatgggctcattgtcaccaacgcccatgtggtggctgatcggcgcagagtccgtgtgagactgctaagcggcgacacgtatgaggccgtggtcacagctgtggatcccgtggcagacatcgcaacgctgaggattcagactaaggagcctctccccacgctgcctctgggacgctcagctgatgtccggcaaggggagtttgttgttgccatgggaagtccctttgcactgcagaacacgatcacatccggcattgttagctctgctcagcgtccagccagagacctgggactcccccaaaccaatgtggaatacattcaaactgatgcagctattgattttggaaactctggaggtcccctggttaacctggatggggaggtgattggagtgaacaccatgaaggtcacagctggaatctcctttgccatcccttctgatcgtcttcgagagtttctgcatcgtggggaaaagaagaattcctcctccggaatcagtgggtcccagcggcgctacattggggtgatgatgctgaccctgagtcccagcatccttgctgaactacagcttcgagaaccaagctttcccgatgttcagcatggtgtactcatccataaagtcatcctgggctcccctgcacaccgggctggtctgcggcctggtgatgtgattttggccattggggagcagatggtacaaaatgctgaagatgtttatgaagctgttcgaacccaatcccagttggcagtgcagatccggcggggacgagaaacactgaccttatatgtgacccctgaggtcacagaatgaatagatcaccaagagtatgaggctcctgctctgatttcctccttgcctttctggctgaggttctgagggcaccgagacagagggttaaatgaaccagtgggggcaggtccctccaaccaccagcacttgactcctgggggctctgaaagaaatcacagaaacactttttatataaaataaaattatacctagcaacatattatagtaaaaaatgaggtgggagggctggatcttttcccccaccaaaaggctagaggtaaagctgtatccccctaaacttaggggagatactggagctgaccatcctgacctcctattaaagaaaatgagctgctgccatcttttgtgggcagttagtcaggtgctgctctttgtggtgtggtgggctctggtctgttctgctcggtgctgggcctgggagcaaagattcccatgcttggctacagatactgacagctggcctctgaaggagggtgaaaacttctgcttgacagttccacatccatagtgcatggtctgatgagtgcggttgctgacatgggtttcttggtaagctcctgaggtaatggcagcctcagacccctgccattaggggccagtggtggtttgcagagggcagtggcacttagataatctggttgctggtctggccagggtagcgttcaaacctcctgttggcctcttcactgaaggcatcacctgcagagtggacaggcaatttgggaggcgccctgcacagagggagggagatagatgcactgtggagaagggtgggtagaagt

SEQ ID NO: 61172 - DNA, 827 bp, Homo sapiens; identical to SEQ ID NO: 60912
  misc_feature (1)...(827): n = a,t,c or g

SEQ ID NO: 61173 - DNA, 3092 bp, Homo sapiens
gtccgggttcgcttgcctcgtcagcgtccgcgtttttcccggccccccccaacccccccggacaggacccccttgagcttgtccctcagctgccaccatgagcgaccaagatcactccatggatgaaatgacagctgtggtgaaaattgaaaaaggagttggtggcaataatgggggcaatggtaatggtggtggtgccttttcacaggctcgaagtagcagcacaggcagtagcagcagcactggaggaggagggcaggagtcccagccatcccctttggctctgctggcagcaacttgcagcagaattgagtcacccaatgagaacagcaacaactcccagggcccgagtcagtcagggggaacaggtgagcttgacctcacagccacacaactttcacagggtgccaatggctggcagatcatctcttcctcctctggggctacccctacctcaaaggaacagagtggcagcagtaccaatggcagcaatggcagtgagtcttccaagaatcgcacagtctctggtgggcagtatgttgtggctgccgctcccaacttacagaaccagcaagttctgacaggactacctggagtgatgcctaatattcagtatcaagtaatcccacagttccagaccgttgatgggcaacagctgcagtttgctgccactggggcccaagtgcagcaggatggttctggtcaaatacagatcataccaggtgcaaaccaacagattatcacaaatcgaggaagtggaggcaacatcattgctgctatgccaaacctactccagcaggctgtccccctccaaggcctggctaataatgtactctcaggacagactcagtatgtgaccaatgtaccagtggccctgaatgggaacatcaccttgctacctgtcaacagcgtttctgcagctaccttgactcccagctctcaggcagtcacgatcagcagctctgggtcccaggagagtggctcacagcctgtcacctcagggactaccatcagttctgccagcttggtatcatcacaagccagttccagctcctttttcaccaatgccaatagctactcaactactactaccaccagcaacatgggaattatgaactttactaccagtggatcatcagggaccaactctcaaggccagacaccccagagggtcagtgggctacaggggtctgatgctctgaacatccagcaaaaccagacatctggaggctcattgcaagcaggccagcaaaaagaaggagagcaaaaaccagcagacccaagcagcaccaaaatctttatcccggcctcagctagttcaaggggggacaggccctccaaggctttccaagcagcaccattgtcagggcagacctttacaactcaagccatctcccaggaaaccctccagaacctccagcttcaggctgttccaaactctggtcccatcatcatccggacaccaacagtggggcccaatggacaggtcagttggcagactctacagctgcagaacctccaagttcagaacccacaagcccaaacaatcaccttagccccaatgcagggtgtttccttggggcagaccagcagcagcaacaccactctcacacccattgcctcagctgcttccattcctgctggcacagtcactgtgaatgctgctcaactctcctccatgccaggcctccagaccattaacctcagtgcattgggtacttcaggaatccaggtgcacccaattcaaggcctgccgttggctatagcaaatgccccaggtgatcatggagctcagcttggtctccatggggctggtggtgatggaatacatgatgacacagcaggtggagaggaaggagaaaacagcccagatgcccaaccccaagccggtcggaggacccggcgggaagcatgcacctgcccctactgtaaagacagtgaaggaaggggctcgggggatcctggcaaaaagaaacagcatatttgccacatccaaggctgtgggaaagtgtatggcaagacctctcacctgcgggcacacttgcgctggcatacaggcgagaggccatttatgtgtacctggtcatactgtgggaaacgcttcacacgttcggatgagctacagaggcacaaacgtacacacacaggtgagaagaaatttgcctgccctgagtgtcctaagcgcttcatgaggagtgaccacctgtcaaaacatatcaagacccaccagaataagaagggaggcccaggtgtagctctgagtgtgggcactttgcccctggacagtggggcaggttcagaaggcagtggcactgccactccttcagcccttattaccaccaatatggtagccatggaggccatctgtccagagggcattgcccgtcttgccaacagtggcatcaacgttaaagaaggtggccagttctgcagccccataaataccagtgccaatggcttctgaggtcaagccaccggggccaagagacatagtggccaatcccccttacccccgggatgcaaggtagcatgggtccaagagacatggaagagagagccatgaagcattaaaatgcatggtgttgagaagaatcaggagagggatacaagagaggagatggggtcccggcacccatctgtatcatcagagcctctttgaaggtgggaaacattagtgaaaattctgttggtgccacgctttgatgagcatttgtttgaccccagtttcttcttacacttcttaccccagcctacccttcctgcatttctcttctcagctcttccatgatggattcccccccctttcctaaagccatcatgccttgataaatatatatgatcattgaaatactttttaacaaaaaacagattctatattattatatatatatatatatatatataaagatatatagagatgcattcacaggggttggctgggaggaggaagaccattctgtgaccaaaataccttggtcattttttttatattgccttatttccctatggctgagccttgttgtgacacatcaagcttttctgtagatgttgtcttggcttcccaccagcttaagcgttcatatgctctgctt

SEQ ID NO: 61174 - DNA, 3092 bp, Homo sapiens
cgacgatttcgtgggagttctgagtgcgacggcgcaggtctgcaccatggcggcccggcttgtcagccgatgcggggctgtgcgtgcagctccccacagcggcccgctggtgtcctggcgcaggtggtccggcgcctcaacagacaccgtgtatgacgtggtggtgtcgggtggaggcctggtgggcgctgccatggcctgtgccttgggatatgatattcactttcatgacaagaaaatcctgttgctcgaagcaggtccaaagaaagtactggagaaattgtcagaaacttacagcaacagggtcagctccatttcccctggctctgcaacgcttctcagtagttttggtgcctgggaccatatctgcaacatgagatacagagcctttcggcgaatgcaggtgtgggacgcctgctcagaggccctgataatgtttgataaggataatttagatgacatgggctatatccttggagaatgatgttcatcatgcatgctttcactaagcagttggaggctgtgtctgaccgagtgacggttctctacaggagcaaagccattcgctatacctggccttgtccatttcctatggccgactccagcccttgggttcatattaccctaggtgatggcagcaccttccagaccaaattgttgataggtgcagatggtcacaactccggagtacggcaggctgttggaatccagaatgtgagctggaactatgaccagtctgctgttgtggctactctgcatttatcagaggccacagaaaacaacgtagcctggcagagatttcttccctctgggcctattgctctgctcccgctctcagacaccttgagttccttggtttggtccacgtcccatgaacatgcagcagagctagttagcatggatgaggaaaaatttgtggatgccgttaactctgccttttggagtgatgctgaccacacggacttcatcgacacagctggtgccatgctgcagtatgctgtcagccttctgaagcccactaaggtctcggctcgccagctgcccccaagcgtagccagggtggatgccaaaagccgagttctgtttcctcttgggttgggacatgctgctgagtacgtcaggcctcgggtggcgctcattggggatgcagcccacagagtccatccgcttgcaggacagggtgtcaacatgggctttggggatatctccagcttggcccatcacctcagtacggcagccttcaatgggaaggacttaggttccatgagccacctcacaggttatgaaacagaaagacagcgtcacaacactgctcttctggctgctacagacttactaaaaaggctctattctaccagtgcctccccgcttgtgttgctcaggacgtggggcttgcaggccacaaatgcagtgtctccactcaaagaacagattatggcctttgcaagcaaatgagtactcctctcctaaagaaagattacgttgatgaaaaagaacatcctgcccaggacccatcatacatattttcaagatcttatttaatttaataaacttactttacattaaaattctctttttcttctttgcttaatgggcctgtggcacccaaataatgaatgataatttgctgtgaggagcgtatattagccagaccaaaggaaaaaacttcgaaggaagacttacaatttggttgaaaagagctttttattactaaaaaacccacaaggtgctgtctcactcatttccagttaatcatttctaaagagaaaatttacattttgtttttgttttaatgttggtcataaatttatacagttgttttttgatagaggtaagaattagactcgatgcatttttgttagaattgctgtttaaatgttaacatcagaatgcaaattaaatataaattgctttaacctttgttacaggtatactggactttctgaaaggaaaaccaggtctcattaatgctaggttattactttatcacagcaccagatttccattttatttatggttcctctctgggacaccactgtcggtttaataaaacaataaataattcattgcacagatccgaagacctcaggaaccagatcacaagggaaaccgattagcagcagaatttgttcatgtttggtggcagactggtggccaactggagggaggggagttttactgtgggtttttgaagaggtctcgtcacaagaccagagatgcctcttgaagagatttttaggttgtaggtttgcttactctaaagaacatcttgcccagaagtctgatttgagatgaaatgaagagaaacagtctgcttttgaaccaagtaaggtattcttgggaataatttttagagccatgagaaatctattcttacaggggtgcttttcaggcaaatgcagaaaatttaaaagagtctagaacaaaaaagtgacaatgtcacaaccttgctggaatctcaggaaaaagaattaaagatggcagctgctgtgaaaagctgtgtgactcctggcggagactgcagggacaaggtcatctttcacaaaaaatggaaaggtggcctagatgaggaggacacagactctccagaagttatgcaaacaaaatcaggcaagatgaagaattttaaggcacacctccattggcccacagagagtgttcttcatatgacaatgatgttaaacaccatctgtcacgtaccaggccatgtcctaagtattttaaatatgttaacacatctacaaagaggaaactattagaatctgtaggacctcttaagcccaaagggtctactgcaggcaggatgggcgttacagaaaaaaataaaaactctcattccaaattgctcctaagatggacaaattggttacttctccagaaggtctaatcaaggttaacaaaataggtaagttcgtggagttagaatgcatcttccctggagttcagaggtatttgggatgaccaaaggagtctgctggacagtatgtgtgttttacaaaatggcccccacagtgattaaagaccagagacttatatctctgcatttgtcaagctggaacagtctttagtgaacacagcgaattccaccgcac

SEQ ID NO: 61175 - DNA, 5732 bp, Homo sapiens
tttgccgataccttaggatacaacatagaacctattatgctctatcaggatatgacagcgcgtgattcgctacagcagagatacacccttccaaatggagacactgcctggcggtcctcaccccttgtgaatgctgctctggaaggcaagctggtcctgctggatggcattcaccgggtgaatgcgggcacgcttgctgtattgcaaaggttaatccatgatcgagagctaagcctctatgatggttctaggctgctgagagaagacaggtatatgcgtttaaaggaggagctgcaactgtctgatgaacagctacagaagagatccatttttcctatccatccctccttcagaatcattgccttggcagaaccccctgttattggaagcacagcacaccagtggctgggaccagaattcttaaccatgttctttttccattacatgaaaccacttgtgaaaagtgaagaaatccaagtgattaaggaaaaggtcccaaatgtacctcaggaagctctggataagttattatcatttacacacaaactcagagaaacacaggatccaacggcacaatcattagcggcatcactttctaccagacaactgttgcgaatttctcgtcggctgtcacagtatcctaatgaaaatcttcacagtgctgttactaaagcctgcctttccaggtttttacccagtcttgctaggtcagcattagaaaaaaatctggcagatgctacaatagaaataaatactgatgacaatttggagccagaactgaaggattacaaatgtgaagtaacatctggaactctgaggattggtgctgttagtgcaccgatctataatgcacatgagaaaatgaaagtgcctgatgttcttttctatgacaacattcagcatgtgatagtgatggaagatatgctgaaagactttctccttggagaacacttattattggttggcaaccagggtgtaggaaaaaacaagattgttgacagattccttcacctgctcaacaggaccccgagaatatattcagctacacaggggattaccacagttacaaactcttacgcttcagccttcggttaaagacggacttattgtatatgaagactcacctttggttaaagcagtaaagttgggtcatattctggtagtagatgaggctgacaaagctccaacaaatgtcacgtgtattttaaaaactctagtagaaaatggagaaatgattctagcagatggaagacgcattgttgcaaattctgctaatgtgaatggaagagaaaatgttgtagtgattcatcctgattttaggatgattgttctggcaaatagacctggatttcctttcctaggcaatgatttcttcggtaccttaggtgatatttttagctgccatgcagttgataaccccaaaccccactcggagctcgagatgctcagacagtatggaccaaatgtgcctgagcccatccttcagaagcttgtggctgcctttggagagctgaggagtttggctgaccaagggattattaactatccttattctaccagagaagttgtcaacatagtcaaacatttacagaaatttccgactgaaggtctctccagtgtagttcgaaatgtgtttgactttgattcctacaacaatgacatgagggagatattgattaacactttacacaaatacgggatacctatcggagcaaagcctaccagtgtgcagctggcaaaggagttgactctgccagaacaaacgttcatgggctactggacaattggtcaggcaagaagtgggatgcaaaaactcttgtgtccagtggaaactcatcatatagacataaagggtccagcacttataaatatacaggagtatccaatagaaagacatgaagaaagatccctaaactttactgaagaatgtgcctcatggagaataccattggatgaaattaatataatctgtgacattgctacatcacatgaaaatgagcaaaatactctctatgtagttacatgcaatcccgcttccctgtactttatgaatatgactgggaaaagtggcttctttgtggacttttttgatatcttcccaagaacagccaatggcgtttggcacccttttgtgacagtggcaccgctgggaagtcctctcaaaggtcaagtggttctccatgagcagcagagtaatgttatcctgttgttagatactactggccgggcccttcatcgtctcatcctcccttccgagaagtttacatctaagaaacctttctggtggaacaaagaagaagctgaaacttataaaatgtgtaaagaattttcacacaaaaactggctggtgttctacaaagaaaaagggaacagcctgactgtgctggatgttctagaagggcgaactcacaccatctcacttcccatcaacctcaagacagttttccttgtagcagaggacaaatggcttctggtggagagcaaaacaaatcagaaatatcttttaactaagcctgcacacatcgaatctgagggtagtggggtttgccagttgtatgtgctgaaagaggagccgcccagcacagggtttggagttacacaagaaacagagttcagcatacctcataaaatttccagtgatcaactatcatctgaacatctaagttcagctgtggaacaaaagattgcctctcccaacagaattctctcagatgagaaaaattatgctacaatagttgttggttttccagatctcatgtcacccagtgaagtttattcttggaagagaccatcatctttgcataaacgaagtggcactgatacatcattctatagaggaaagaagaaaagggggacttccaaaacaaagcaattgtgtgactcttttagatacgaatcaggtagtgaggattttacccccagggagaagtccctctaaaagatatctacccaaaagatgttactcctccacaaacatctggttatatagaagtcactgatcttcaatcaaaggaaactccgatatatccctattcccagatcagaatctctctcgccgtataccacatggctgtcgaccatttcagacacagatgcactgctggctgagtgggacaaaagcggtgttgttactgttgatatgggaggtcacatcaggctttgggaaactggacttgaacgtctgcagcgatcactcatggaatggagaaacatgattggacaagatgacagaaatatgcagataacaatcaacagagacagtggtgaagatgtaagctcccccaaacacgggaaggaggacccagacaacatgcctcacgtgggcggcaacacttgggctggcggaacagggggaagagacacggcaggcctgggtggcaaaggaggcccttaccggctggatgcaggccatacggtgtaccaggtctctcaggctgagaaagatgcagttcccgaagaggtcaagagagctgctagagagatgggccagagagcattccagcagaggctaaaggagatccaaatgagtgaatacgatgctgcaacctatgaaaggttttcaggtgctgttcggcgacaggtgcactccctccgaatcatcctggataatttacaggctaaaggtaaagaaagacaatggctaagacatcaagctactggagaattagatgatgccaagatcattgatgggctgactggagaaaaagccatctacaaacgtcggggtgagctggagccacaacttggcagcccacaacagaaacccaagcgtctgcgcctggtggtagatgtgtctggtagcatgtaccgtttcaacaggatggatggccggcttgagcgcacaatggaggctgtgtgtatggtcatggaagccttcgagaactatgaggagaagttccagtatgacatcgttggacactctggagatggctacaacattggtctggttccaatgaacaaaatccccaaggacaataagcaaagactagaaattctgaagacaatgcatgcccactctcagttctgcatgagtggggaccacacgttagaagggacagaacatgccatcaaggaaattgtcaaagaagaagctgatgagtactttgtcatagtcttgagtgatgcaaatctgtcacgatatggaatacatcctgctaagtttgctcaaatcctcacaagagaccctcaagtaaatgcttttgccatttttattggctctttaggtgatcaagcaaccaggcttcagagaactttaccagctggtcggtctttcgttgccatggataccaaggatatccctcagattttacaacagatcttcacctccaccatgttgtcgagtgtctaagaagtgcccttcatcaccctgatgacaccaggatttgaaataagacaggaataaagagtattctgaaaaaaagaagatatggatgaagtgaacccatgcagtgactggatgattccggcattcctgggtcttcctacacttgctccgtaatgagaattcagagaagcagccagaaggagacttaaacatggaaagatactccactgatgagtttagaagtgattagggcaagctagttgacctgcactttatcaaaggttggggttaaaggaaggtggttttgagaactatgtgtttggtctatttccaaaaacctgagggggagaaaatactttgcttttgccttaacacatcatctggtcacgttagaaaagtgaccccatcaaactgagcctttgatgtcacattctgacacaagatgcaagtctgtgcaaaacccaccaaaatgctcctatccaacaattatttttattttctccctgctctgtattgaccagaaaacaatgattttataatatttaacccaccaaaaagtccctccaacagcaatatcttatgaaaggctggctgttctcaataatttcattttcttggccaaagccaaaaggaatcaaaaaatccttggagtgcttgcctttccacgtgacttttaaaaggctcttaaagagcaaatgtcctcttctccttgctgctagagtgggaggagaaagatgtcttgccttaaaagtttactgtttcttctgttcttctagcatctctcaaaaaattcacagtactccattttggggtccaaactgtaatgctcaaaataataaatgcttacacgaaaattatttattgagaatattcatataaaaattacctaaagcaaagtaaaaaaagtaaaatcaaggtggtatatttgaagtgaatggtgattggaaatttttagctgtaacaaaaagaaagaaaacaactttttttaaagcctcattctcttttcttttcaaaatgtaccttattccccacacactcttgggctggacctttattttatcaataagctcaatattactttgtttaaaataagatgcttcagccaaaagtcattctcctctttaacccatataatttaaaaactcctcttcacgattgatagcaaaatcagaaacggttagggcaccagtgagttgaaaaaactggtcttaagttggaaaaactattattaataatattatcctatccatccatatctattgaaattgtacaggtccataatttcattttaattaattataggaaagaagaaaagataatacccatttgttctatcacccctctccctatcattaactatcaaataaataaataaaagcaatttgatttccaacgtggtaaaaaaaaa

SEQ ID NO: 61176 - DNA, 6087 bp, Homo sapiens
agttgcttgccatagattgttattgtggatttccataatactccccatcctaaagagcagctgtcaatgccatttacaacatgtatttctctaaactggctgtgggatgcatattcctgaagccagcgccaaggtcattccgtttcccaagagcaagcatctactctccagaggagaaagacatcctctggaaagaaggtaggttgtctgtgcaaggatcatctggaagctgggaatctggaactctcagatacgcaggtaaatatgcgtctagtccttgtacttggtgctcgcaaccattaccttaattcagggagcagtgtcaccttccaaaggagattcttttcctatgcgttgttccaagaacagaggaggtggcatcaggctgggcagggttgggacggctgtcaccttcggtccgaaatcactggctgaagcccccaccacccctttgtctccccatttaacagggcatagagattcttctgacgtccactcatgcagcagctcaggtgttctaagggaagtggacctctcctcccagctccagctgggagtcccagtcagcacgttcccctccatttgccagtgaatggttctgaggatgttgtgcaagctatgcagggtgaggctgaggaaaccaggactctgtttggaatgtggagagaggggccctctgtgtcttctgaatagtgatgcatggataagtcctgggggtgactccagccaagcatccccgtgaacagaggcagactcaggacaaagctgtccctgaaagctgggagaaaagcccaggtccgagttgctgagtccaggcaccctctcttgggacctacactgagcctgtgcctgtttttctgcttgactggaatgaggtgcaatttctgtgacttgcgatggcccacactcatggctcattgcagaatgagccatgctttcctgatacgccatgctgaggaatttccttgtcctcagatcctatgccctctctgcattgctgtcctcgaagacagcatccaaagaggccctaggtccctcccacacagcagggagtacacccttcacagccccggtgccgagcagagccagcaactaagaactgtttgacaaagtagaaagaagggctcagaagatgacatgccatatcattgccttgggttgttatcatttcctgcccttccttttctagttttagagggacagaactaatggctcattacaaaaatgcctgaagaccgctgagctccttggcacgtggtgctgatggcctggtgcagggtgccatggtggccggctgtgcagcagctttggtatgtgccatgcagctgttttcttcatagcctctaaaaggacttgccttacggaagtgccctcagatcatactctgtgaggtcaggtattaatcatttcatacaccagtggtaactggacacactgtctttgcaaagtgaaagttgtttattgcttgttacgatttaacaggcaaaatacgacaccagggatgtaatacctacaaggcggtcttcctgaaatgcctgcccggaacagaatgctgggatgcactcaactgtgaatttttcttgaggtcttcctttccttcatctggatgaagtggagcccagccctcctgtgtcagtgagactggaagcctctgggggccatgtgctctgccctctgccatctctgctcattgttcccccatgttcacacctgcctgcattaaccatgagcagtcacacatttgtactcagtgcgcagtcacacatgttgaagaaaacaaatcgtactgcttgttcttaaaaatgagatgaaaaaataaatctaaacacacttttcaagtgttactcttctttaaacttttatatatgttaaggctcttctttttcttttcaatatactctacttagaattttaaaaaataaactttcttttttggtacctcttgtttcctgtattagcctgggaaacatttagaaatacatctccctagaactcttctgtgcaaataataaacataaataatattaacatttatttatatatattaaaaaaggccatttcaaggttttcactgtgaccgccttgaagatgctcctataagtagtctgtggtctggcccttgaagtcctgatcggcctgagtggggctggacaggaagtccacgtcccgcttgtccatctgcaagctgctccgtccgggagaactgtaagacactccccagcctgctgaccagcgaccaggaggaaatccagttgagtaagctgaaggtaggcaggctgaagagggaagacaggggggtcaccctgccggtgctggcagctctcaccttggactcctcaggacaccctcctggactcctcaggacagcctcccctggcgcagaggacattggggcccggtgcgctcagccccttagcagggggtgtgcttcctcactggcatgctcatgtccactgtgctgggctccccgctggcctccagggagcagaccggctgctgtgtgtgccaagaaggctgggacaggggcacagaggtcttgactgtcctccctgatgagtgcctcggttcccgagtccttcgggagggcgtccctgagcaaaggtctctttgggagcactgcatctcctgggggacttcctggtcaactgacgtgccagctgaagttgtgtggggaaaaccctcccctggagggatctgaaaaacaatctgggcagcagtgcagcgacaggcgtcatcaggcaagtcaagtaaaacactgggtcacccagtaaggcttgcatagtccagtaagggttggacggaggatagcacgtggcacaagacgcattgtaaatcaaagccacggtgaaaaacaaaaggacactgaagccacacgttatccagttgagccaggtccaggttttggtttcaatgcccaggtggagcaggaaagtgagcagcgcgattgtcacaataggggtcccccaggtaaacaggtccacgttcgagtcatagtaggccaggtaaggaatggaaaagcaaaccaggctctggaaggcggcgtcggccatgttaaaccagaacgttcgtggccggtattcctccatgttctggccactcttgtagagctgcgggttggtcagcagcacattggctggcacatccctgtccagcaccccagtcacgagcgggggaagtgacgagaagagcagattaaagaagattagataccactggtcaatcatggtagatgcagagaagccacagaaaaactggaaccaaaacaggaggcccacgaacattgtgtttttgtagaagaagtacagcaccatgttggcaagtcgggagtagcaccaatgcccgtgaagaatcaagagcctctccaggtatcggaatttcggcactgcaaagtcgctggccatcactgcctgcataccctcctggccggagattcccacacccacatctgccacctggatcatgctgacatcattggctccatcacctatggccagggtcatggccttgagcttgctccgcaccagcttcaccaccatgctcttctgcagaggcgtcgaccgacagcagaggacggagcggcactgcttggcaaggaagaggaatttgtcctccaggtttttctcgagagcgtaggccatgcttctcccatcgatcacgaggctgggtctgcggccagaggcagtggacgtggagggtgggcagagagaggagaacctcatgctcactttgcccttggtcttctcaggggctctctgggggcctctggactgcacgtagcataggcactggtctagcagggctgcacacgcctcctgggaggtggcattcagggtgatgacctcctcgtcgtggtccagcagtttgcaggcatatgcaatgttgacagctgtttcttgtttgtcaccagtgagaacccaaatctgcaggcccgcttgacgcaatttagaaatagtttcagggactccgtcctgcaggcggtcttcaatcccagtggcacctaacaagtgcaggttggtctccaggcgaatggcagactggaagaggagctcctcgctgttttccagggaggattcggcttctaggtggctttgcaaccagcaggcatactcttctttactcagaactctcttggcgatgcacaaggtgcgcaggccttccgccgcatacacgttgaggtaattctgagttttgctccgaatctttttttgatgcctccctctggcgtcaactgaagagcagggctgcaggagatccatgaccactgagtcggcccccttggtgtagacgttgatctcatcggtaagcgggtgccggatcaccactgacatcctcttgcggacggaatcgaaacccagtgtgtgcaggagctcgaaggtgagcctgcccaggtggggcagctccactgacacttggtcgtgcagccgctccacaagcacgcagttgtaggctctggccgcatacaccagtgcggcctcatccgggctctccgcctcgtaccgcagctcgcgctctgactcctgctcctgagcaagctccgaggcccagttgtccgcctggctgctgtagccgttgctggcgatggccgaggtgggctggcccagcctctcctccagcctgagaagcatgccgtcgctggacggggtggacgggaagctggagcccaacttgtggctggacttgttggcggccaggctcccgatgctgctgcagcctgaggtcaggcagctgggtgtgaacctccgcaggaagtcttctatcgtcttcaccggggacttcagctcaaacctcaccctcacctttgttcgtggctgatccggggacgtgacgacgactgtgttgcagatggtgagtgcgatcaagaaatcaaagacgtcagacagctcgggcgagaggtgggccagcaggtgctcctgatgcctcgccacggctaggctcttgtcacactcactcaccttctccagcagctttgggtcgggcgtgatatccttctccatggggctgctgaaggccgtgtgcttggacagcatgctggccctcttggcctcggcccggctgcccgtgcgccggtgggacttggtgctctgggttctgtgcaccacccggacactctggtggctgccgatgctgccgcgctgggacaccgagccccctctgggcaccacctcctcctcctccgagtctgcctcttggtacctggccagacgctgcgcatttgcatcatgagaatattctacaccagacacagtgcatcttcggaaaaccatcttattctctgtcaaagtgccagttttatctgagaaaatgtactgtatctgtcctaagtcttccgtgatgttcagagctcggcactgcagctgcgagtctgtttcttcgtcatacaactgcatgtcctggttaatgaagtacacttggcatgctttaacaatttcaatggaaacgtataaggaaattgggatcaaaacctgcagaactattatcattgttaaaaatgagtaaactgcagctgtgactggggataaggagcttccatcagacttggggacataaaataatgacttcttctcttgataccgccatatccacagtccatgtccgactgctgaaaacagagacatgcaaacaaggagcaggacacaccagagcacgtcgcagttcatctgcctctccagcttgctgcgcttgtagcggggcccactgttgttcagcagagccttggtttcatgtcctgtcggggaggacaaagagacatggcaagtcagagactggagctaagggaccagctgcatggatggcgtggagggaattccatgctgccattcagtggtgcttaggtgagaagcttggtcaaaaaagcagggtttaaaattaatcttacttcctgttgaacaggtctgaaaataaataaaataaaatgaaattaatcttatacatatataatgactgtggagaacgaaatggaaagaaatacactaccgtgccaagaaagaaggctttgggttgaggtactattcaaagaatttttgcttttgctcctttccattttcctagtttccaaatgttacaatggggatatgttatgcttttttt

SEQ ID NO: 61177 - DNA, 3766 bp, Homo sapiens
aaatgtgaattttatgaactaaataaatatttggaaaattagcgtgctttaaaagggcaattttggtttcattaatactgtatacttttactgctttaagatgttaagagagtaatcctgggaaaataaaacacatacaactttcaaaaaagacaggtggtgtatgccctaatatttaaattgctcattaaaggaagtggatacaagcattaagatgaatcatagcttcagtcaagaggctccacatatataggctgccccggctccctctcctaaatcatagacatcgtatgtagtaccaccttctaccaatttgattttagaattagtaactgacacaaagcattctaggacagacgccatactattatctcccacattgacatttattaataacatttctggcaaaaacaagtaacaagttcaataactgaattcacatcaacaggtttcattttgatccattagccaatttggaaaaaagccatattgatcaaagggattaaaattaaaaagcaccttttccttgctacatatagattctttaaactaaaactccaagcagggatcagatacaaaacccaactgcaggattgtttttattgactatgacatggacttgttgcttacatttttttaaagtcatcatttatacagttatttaaactctattgggcagaaaactgaaaatacaattgtgagaattatactccatagtaaatacctatgtacttaatactgaattcttgtgtcactgagaaccttaaccctactctaagacatcttgcgataacctgcaactatcaattttttggagacatttttggtatttcggtcaagtgctgaaggggttttactccaaaatctagggctagaattcagcttccaacactctcatacccaggtaacacaattatgaatattcagaaatcaatacctcttagatcatcaatgtttcagagctatgcctgataaatgacatttgaaaaataataatatagaaataattagctgaatttatactcctgaagccacttcatctttaggctttatatttacagtgttgtccaggaggaactaaagaaaaaagttacactaattatttgtcaagctctattccagatgtctgcttaagacttgcagtttacgcagaggtgaaccattatcctctaaaattacaccacactacttcttgtagaactaatagtaaaatacatcaacccaaatcttatgaaggcagcacatctttaggagtaactagtatataaaaagtatcaacatcagtggtttgaatataaaaatttatttttaagtcaaagtatgcaacaaataaacctacagaaaacattttcccatcacaatctgttgctttaccaaataatattttgaaaacacattccttcagtcattataaagttcttaaaatacaaaagaaattaaatctgtaagaaagtctagtagaccagatgctgttgtcaagacttgtatgttggtgtttttgctttcagtacatcccacgccatccacctccactcatgccgccttgcccatagtaacctccactgcctccaccaccacggccataaccacccaaaccatcaggagtaccatatcctccactgtaattgttccccattcccattcttccaactgatccatagcctccctgattatccattccatctcttccgtagcctcccattccagaacctcccatgccagagccgcctccaggagtagaattcaagaagagttcaatatatcgatgttgcatgttatttttatctttagacatggcagctactgcatcttcatgtgtcacaaactctacatctggcttctcctgtggctctgccatcagctccaatatcaatatgaactcgtattggatttagtggtgagaagagagtagcaatgtcattttcagttgcacgaaaaggcaaccctctcatatgtacgaaatgaccaccatgaaaacctgaacttgcatcaccagctccaccatagccatgtcctcccatacctcttccatctctcattctgtcatcaaagccatcattccccatagccgtaattattatagccaccatagtcatcaaaacctccataaccaccatcatatccatcacctcctcgtcgcattctgtcatacatacttccacgcccagctccataataaccccctcttcctcctattggtctatcatatggtcccggttcgtgtcccagcaatcttcttggtggatcataaaatcctttgatttcactcctgctacttctgaagatctcaatatacctatttaaaaatgttttaaggtacaggtttcagcataaatgtattagtgtaaattagatactgggcaaaatgcagtaagtttttctatatctagatacataacccaatttaaattgcctaaatacaccgtaagttaacagtttaaacctacaaacttaattaaatatttaagttttacaaagaaattagtcacggaaaacaattcataaagtatatttttactttgtctcttttagtacataataggtgttttaaaggaaataggtgattatacaaaagcatttatcaacaacatcctacagagaaatggaaacaatctaattttaatttaactattagcattaattccccacccaaatctgtagtttccaagttaaatttagataattatcaattcttttaaactaccccagaaaaatgttatggctacccccccatttaagcaatagtgacccacaacccccaaaaataaaaatttaacaccatcccaaactctccatccccacctgtgccctattctttccttgtgtttccccagagcattttctgctatctcctttgaagcaaactgcacgaaggcctcccctgtgcttctcccctggtagtccatcgtcaatgttatcccatttggcacgatttccaaccctttaacccaaggacaaataaccccatcaaggggaacagtgttaaaggctgaaacattcccatctgaatcaaatatttaaaacaagtctaaacaaaacaaaacaaaacaaaacaaaaaagcttagtttcccatcaccccataatacaaatgaaagattttttcaaatattactggattaaataaattttttgcgaccagtgtaaaaacactgtgtaattacacactctaaaagcccacctatattacatgaaaaaaggctacaaaatcaaatatatgctccatatactaattcacggttcatttcatcacaattctcaaatatgttactgcacattaattaggttttacatattctacacattctgtattgaatattaactggagcatattattttaatacattaaccaagactatcatagttaaacttaaaagttccaaaatcaaatgggttttacaaattaaaaacagtaaaacaatacaaatataaaattacaatactactaaactttgactaatactagaggtaccttgaaagaactgaactatttcctctttgctgcaaccaaatggtagtccacgaagtcgtactgtcccatcactagcgtcatttggaccattatgtttcataacccaatccatctcaataccgtttgatttaaatgccccttttacttcagataccctgtcaggcgatagttacgccgactctggtgctcgcggggtccagttcaaagaagggagaagtcgtttgcctcgtgtagcgctcgccacaacggttctcccaaccgtctccagcggtgacaaccgcttagggagcacgaaa

SEQ ID NO: 61178 - DNA, 3821 bp, Homo sapiens
ccatggtaggagcgctcgcctcgctgcggtgcccgctgaggccatgccggggccccggcgccccgctggctcccgcctgcgcctgctcctgctcctgctgctgccgccgctgctgctgctgctccggggcaagccacgcgggcaacctgacggtagccgtggtactgccgctggccaatacctcgtacccctggtcgtgggccgcgcgtgggacccgccgtggagctggccctggcccaggtgaaggcgcgccccgacttgctgccgggctggacggtccgcacggtgctgggcagcagcgaaaacgcgctgggcgtctgctccgacaccgcagcgcccctggccgcggtggacctcaagtgggagcacaaccccgctgtgttcctgggccccggctgcgtgtacgccgccgccccagtggggcgcttcaccgcgcactggcgggtcccgctgctgaccgccggcgccccggcgctgggcttcggtgtcaaggacgagtatgcgctgaccacccgcgcggggcccagctacgccaagctgggggacttcgtggcggcgctgcaccgacggctgggctgggagcgccaagcgctcatgctctacgcctaccggccgggtgacgaagagcactgcttcttcctcgtggaggggctgttcatgcgggtccgcgaccgcctcaatattacggtggaccacctggagttcgccgaggacgacctcagccactacaccaggctgctgcggaccatgccgcgcaaaggccgagttatctacatctgcagctcccctgatgccttcagaaccctcatgctcctggccctggaagctggcttgtgtggggaggactacgttttcttccacctggatatctttgggcaaagcctgcaaggtggacagggccctgctccccgcaggccctgggagagaggggatgggcaggatgtcagtgcccgccaggcctttcaggctgccaaaatcattacatataaagacccagataatcccgagtacttggaattcctgaagcagttaaaacacctggcctatgagcagttcaacttcaccatggaggatggcctggtgaacaccatcccagcatccttccacgacgggctcctgctctatatccaggcagtgacggagactctggcacatgggggaactgttactgatggggagaacatcactcagcggatgtggaaccgaagctttcaaggtgtgacaggatacctgaaaattgatagcagtggcgatcgggaaacagacttctccctctgggatatggatcccgagaatggtgccttcagggttgtactgaactacaatgggacttcccaagagctggtggctgtgtcggggcgcaaactgaactggcccctggggtaccctcctcctgacatccccaaatgtggctttgacaacgaagacccagcatgcaaccaagatcacctttccaccctggaggtgctggctttggtgggcagcctctccttgctcggcattctgattgtctccttcttcatatacaggaagatgcagctggagaaggaactggcctcggagctgtggcgggtgcgctgggaggacgttgagcccagtagccttgagaggcacctgcggagtgcaggcagccggctgaccctgagcgggagaggctccaattacggctccctgctaaccacagagggccagttccaagtctttgccaagacagcatattataagggcaacctcgtggctgtgaaacgtgtgaaccgtaaacgcattgagctgacacgaaaagtcctgtttgaactgaagcatatgcgggatgtgcagaatgaacacctgaccaggtttgtgggagcctgcaccgacccccccaatatctgcatcctcacagagtactgtccccgtgggagcctgcaggacattctggagaatgagagcatcaccctggactggatgttccggtactcactcaccaatgacatcgtcaagggcatgctgtttctacacaatggggctatctgttcccatgggaacctcaagtcatccaactgcgtggtagatgggcgctttgtgctcaagatcaccgactatgggctggagagcttcagggacctggacccagagcaaggacacaccgtttatgccaaaaagctgtggacggcccctgagctcctgcgaatggcttcaccccctgtgcggggctcccaggctggtgacgtatacagctttgggatcatccttcaggagattgccctgaggagtggggtcttccacgtggaaggtttggacctgagccccaaagagatcatcgagcgggtgactcggggtgagcagccccccttccggccctccctggccctgcagagtcacctggaggagttggggctgctcatgcagcggtgctgggctgaggacccacaggagaggccaccattccagcagatccgcctgacgttgcgcaaatttaacagggagaacagcagcaacatcctggacaacctgctgtcccgcatggagcagtacgcgaacaatctggaggaactggtggaggagcggacccaggcatacctggaggagaagcgcaaggctgaggccctgctctaccagatcctgcctcactcagtggctgagcagctgaagcgtggggagacggtgcaggccgaagcctttgacagtgttaccatctacttcagtgacattgtgggtttcacagcgctgtcggcggagagcacacccatgcaggtggtgaccctgctcaatgacctgtacacttgctttgatgctgtcatagacaactttgatgtgtacaaggtggagacaattggcgatgcctacatggtggtgtcagggctccctgtgcggaacgggcggctacacgcctgcgaggtagcccgcatggccctggcactgctggatgctgtgcgctccttccgaatccgccaccggccccaggagcagctgcgcttgcgcattggcatccacacaggacctgtgtgtgctggagtggtgggactgaagatgccccgttactgtctctttggggatacagtcaacacagcctcaagaatggagtctaatggggaagccctggaagatccacttgtcttcttgagaccaaggctgtcctgggaggagtttggtggtttcgagctggagcttcgaggggatgtagaaatgaagggcaaaggcaaggttcggacctactggctccttggggagagggggagtagcacccgaggctgacctgcctcctctcctatccctccacacctccctaccctgtgccagaagcaacagaggtgccaggcctcagcctcacccacagcagccccatcgccaaaggatggaagtaatttgaatagctcaggtgtgctgaccccagtgaagacaccagataggacctctgagaggggactggcatggggggatctcagagcttacaggctgagccaagcccacggccatgcacagggacactcacacaggcacacgcacctgctctccacctggactcaggccgggctgggctgtggattcctgatcccctcccctccccatgctctcctccctcagccttgctaccctgtgacttactgggaggagaaagagtcacctgaaggggaacatgaaaagagactaggtgaagagagggcaggggagcccacatctggggctggcccacaatacctgctcccccgaccccctccacccagcagtagacacagtgcacaggggagaagaggggtggcgcagaagggttgggggcctgtatgccttgcttctaccatgagcagagacaattaaaatctttattccagtgaaaaaaaaaa

SEQ ID NO: 61179 - DNA, 446 bp, Homo sapiens
ggggcctcactattttatatttttgtctcaaaaaacaactctctcttgtggtgtgtgcttgattctgcttcttgtcatgtcttctcacaagtcttttaagagtaagcgattcctggccaagaaacaaaagccaaatcgtcccattctccagtggatctggttgaaaactggtaataaaatcaggcacaactggaaaggagacattgcagaacagccaagctgggtctataaggaactgcacgtgagctggcacacatattcacgctgtatcaaggtcacggccatcttactatagcaagctgaaaacgtcaccactgtctgaacagttggacgtgttttattgggaatatattttttctctttgcttatatgccctgcgatagtaggctgggttcagtaataaatatgtgagaccttttgtttcaggaaaaaaagaaccaatataa

SEQ ID NO: 61180 - DNA, 4182 bp, Homo sapiens
attgtttcgacccacgcgtccgccctccagcagccctagtgtgcagagccttttactcttttttaactggcttttctcccttcttaccaggtacctgcacatgttgttctttgtcagtgctgtcaagtgtgtgccagggtgatccatggtcactttccgggatggcagcaaggtgacttcggctgaggatgaccctgactgaaaggctgcgtgagaagatatctcgggccttctacaaccatgggctcctctgtgcatcctatcccatccccatcatcctcttcacagggttctgcatcttagcctgctgctacccactgctgaaactccccttgccaggaacaggacctgtggaattcaccacccctgtgaaggattactcgcccccacctgtggactctgaccgcaaacaaggagagcctactgagcagcctgagtggtatgtgggtgccccggtggcttatgtccagcagatatttgtgaagtcctcagtgtttccctggcacaagaacctcctggcagtagatgtatttcgttcacctttgtcccgggcattccaactggtggaggagatccggaaccacgtgctgagagacagctctgggatcaggagcttggaggagttgtgtctgcaagtgaccgacctgctgccaggccttaggaagctcaggaacctactccctgagcatggatgcctgctgctgtcccctgggaacttctggcagaatgactgggaacgcttccatgctgatcctgacatcattgggaccatccaccagcacgagcctaaaaccctgcagacttcagccacactcaaagacttgttatttggtgttcctgggaagtacagcggggtgagcctctacaccaggaagaggatggtctcctacaccatcaccctggtcttccagcactaccatgccaagttcctgggcagcctgcgtgcccgcctgatgcttctgcaccccagccccaactgcagccttcgggcggagagcctggtccacgtgcacttcaaggaggagattggtgtcgctgagctcatcccccttgtgaccacctacatcatcttgtttgcctacatctacttctccacgcggaagatcgacatggtcaagtccaagtgggggctggccctggctgccgtggtcacagtgctcagctcgctgctcatgtctgtgggactctgcacactcttcggcctgacgcccaccctcaatggcggcgagattttcccctaccttgtggtggttattgggttagagaatgtgttggtgctcaccaagtctgtggtctcaaccccggtagacctggaggtgaagctgcggatcgcccaaggcctaagcagcgagagctggtccatcatgaagaacatggccacggagctgggcatcatcctcatcggctacttcaccctagtgcccgccatccaggagttctgtctctttgctgtcgtggggctggtgtctgacttcttccttcagatgctgtttttcaccactgtcctgtccattgacattcgccggatggagctagcagacctgaacaagcgactgccccctgaggcctgcctgccctcagccaagccagtggggcagccaacgcgctacgagcggcagctggctgtgaggccgtccacaccccacaccatcacgttgcagccgtcttccttccgaaacctgcggctccccaagaggctgcgtgttgtctacttcctggcccgcacccgcctggcacagcgcctcatcatggctggcaccgttgtctggattggcatcctggtatacacagacccagcagggctgcgcaactacctcgctgcccaggtgacggaacagagcccattgggtgagggagccctggctcccatgcccgtgcctagtggcatgctgccccccagccacccggaccctgccttctccatcttcccacctgatgcccctaagctaccttgagaaccagacgtcgccaggcgagtcacctgagcgtggaggtccagcagaggttgtccatgacagcccagtcccagaggtaacctgggggcctgaggatgaggaactttggaggaaattgtccttccgccactggccgacgctcttcagctattacaacatcacactggccaagaggtacatcagcctgctgcccgtcatcccagtcacgctccgcctgaacccgagggaggctctggagggccggcaccctcaggacggccgcagtgcctggcccccaccggggcccatacctgctgggcactgggaagcaggacccaagggcccaggtggggtgcaggcccatggagacgtcacgctgtacaaggtggcggcgctgggcctggccaccggcatcgtcttggtgctgctgctgctctgcctctaccgcgtgctatgcccgcgcaactacgggcagctgggtggtgggcccgggcggcggaggcgcggggagctgccctgcgacgactacggctatgcgccacccgagacggagatcgtgccgcttgtgctgcgcggccacctcatggacatcgagtgcctggccagcgacggcatgctgctggtgagctgctgcctggcaggccacgtctgcgtgtgggacgcgcagaccggggattgcctaacgcgcattccgcgcccaggcaggcagcgccgggacagtggcgtgggcagcgggcttgaggctcaggagagctgggaacgactttcagatggtgggaaggctggtccagaggagcctggggacagccctcccctgagacaccgcccccggggccctccgccgccttccctcttcggggaccagcctgacctcacctgcttaattgacaccaacttttcagcgcagcctcggtcctcacagcccactcagcccgagccccggcaccgggcggtctgtggccgctctcgggactccccaggctatgacttcagctgcctggtgcagcgggtgtaccaggaggaggggctggcggccgtctgcacaccagccctgcgcccaccctcgcctgggccggtgctgtcccaggcccctgaggacgagggtggctcccccgagaaaggctccccttccctcgcctgggcccccagtgccgagggttccatctggagcttggagctgcagggcaacctcatcgtggtggggcggagcagcggccggctggaggtgtgggacgccattgaaggggtgctgtgctgcagcagcgaggaggtctcctcaggcattaccgctctggtgttcttggacaaaaggattgtggctgcacggctcaacggttcccttgatttcttctccttggagacccacactgccctcagccccctgcagtttagagggaccccagggcggggcagttcccctgcctctccagtgtacagcagcagcgacacagtggcctgtcacctgacccacacagtgccctgtgcacaccaaaaacccatcacagccctgaaagccgctgctgggcgcttggtgactgggagccaagaccacacactgagagtgttccgtctggaggactcgtgctgcctcttcacccttcagggccactcaggggccatcacgaccgtgtacattgaccagaccatggtgctggccagtggaggacaagatggggccatctgcctgtgggatgtactgactggcagccgggtcagccatgtgtttgctcaccgtggggatgtcacctcccttacctgtaccacctcctgtgtcatcagcagtggcctggatgacctcatcagcatctgggaccgcagcacaggcatcaagttctactccattcagcaggacctgggctgtggtgcaagcttgggtgtcatctcagacaacctgctggtgactggcggccagggctgtgtctccttttgggacctaaactacggggacctgttacagacagtctacctggggaagaacagtgaggcccagcctgcccgccagatcctggtgctggacaacgctgccattgtctgcaactttggcagtgagctcagcctggtgtatgtgccctctgtgctggagaagctggactgagcgcagggcctccttgcccaggcaggaggctggggtgctgtgtgggggccaatgcactgaacctggacttgggggaaagagccgagtatcttccagccgctgcctcctgactgtaataatattaaacttttttaaaaaaccataaaaaaaaaa

SEQ ID NO: 61181 - DNA, 7268 bp, Homo sapiens
ttttttttttttaaagtttttcaagactttaatttcacaagcgattgacacagaaacatactagagtttagttaacacggcacccaaccccgaccgccggcccgcttcatcgggtcctgctcctaggaggactgggctggggctgggggtggggatgggatgggggtggggaagggacgggacgttgcagtttaaggcatttctggcttcggagccatccctgccacctctgcacctgccccttgaccttggtcagacactggctggcccctggtcattctgagacaaggacgactttcactgacgctgtggggaggatttgcagtgaggcagccctcagccgctctcaggcgagatgggaaagatgagacccaccactccaggggtcaaataaaatcaacacatgaagaacacagccatggccaggcccagatacccaggcaggcggcagaggtcaaccccatcccacagtgagctcctctcgatagcccctcgcagggcctggggtgtggcagagggatacggtcatgtccagggtggctgggcagggccagctgagggtcaggacacccagatcggccctggtctggcctctgctcctcagcagcctggggctggcgcaggcagcacgggagcaacgcagagctgtgcccagcagtaacattgtttggaagtcacagtattggcgcaggaggccgaggcagggtccagagcacacacaggaaggagcagctcaaataggggcttggaaaggcccctgtggggtcacccggaggaagggccccatcagacctcagcagccccttcctctcttgggacacgagtcccgcctgacggagcgagggtgattcaggagccggggctgcttcccggcggggacaccgtggggcaggcgcagtgcaaggcgggggctcagcaccttgaggcaggggtgtgtgtcctgaggctgccatccacgccgagccctccacgctgccccctcgcctgtccatccctcagcactaggtctgtctgcagcacggctgcctggacggaagggaggccgggccagcagtccctccggccaacactcaggcaagaaaatcatatcaaaaagcaacaagtttacaaaaatagaaaataattacagcgggcgcggggctctggtgccagctcatggggtggggcagggccgcagctctggcttggtgacggcgtcctccagcaggtgcagcgggtgccggcccaccaccacatcccgcaagcagcccacaaagcctgtgccgtaggccttgggcagtgctgggcccacgggcagctccggcaggcccccaagccacagggctccatcagtgtccagctgcgtggcgcccagcggggaggagccggtcacaggggcctcattgcccacctgcagggaaccttccctctgctccctatgtgccacgacccgcaaccagcggttggtgttgacgggcacggtggaacgcagcaccacgggctgggagcccaggttgtagctcagttgcaggtgcccgtccccaatggccagtgccacatagtctgcccgctccgtggccttgccactccagagccccagcccctgcgtggcctcagtgcgcaggctcagttcaaagtggttgctctgcagtgccttctcgctctcggtcacagcgttgaggtactcgacaaaggtccgcccgtcaaaggccaaggtatccacgtcccccgctgacttctccaccagccccttctcgcagtgcggtcctgagaatcccccgggacacaggcacacataggcagcctccctcgggacgcaggaggccccattgaggcaggggtggcctgaggcccgggtgcaggggtgacctgcaaaggacgtgacgtccacctgccgcagcacgtgctccggggtcagcagctggcggcctccgagggagaccagctggatggcaccgtcgaagccagaggacacggcagcagcacgggccagcttgctgaagtcgggagcgccccctacgtagagcggctccttcaggttgaggacggtgtgcggaaccttgcgggatttcggggactcccccaacacacgggggccgtcgcccacacgcagggcacccttgcggccgtttcgctccagtgagaccctggtccaggctcccagggtgactggctccctgctcctgatgaccgctgcccccttgcccaggtcgtagcggaactccaggcggcggtcccgcagtgccagcgacacgaagtcccccttgccgtccgtcttctgcccgttgtagagcaggaggccgctggggcctcgtgccaggaacacgaacctccagcgccatcttctcccccaggtcccgtgcaaaggtgtgcaggcctctcagctccaggtgggagaagccgttgaagtcagccaggaagggcccagagccgtcctgccccgaggctgtctggcagaaggtgccctcacgccccagggggcactcgcactgagcaccaccctcgggcagcacacggcagggcgccgccccatggcaggggttgggctggcaggggctcttctcatcggcacaggttggtccgacgcggccgggcgggcactggcaatggaaccttccagcctccaggttctggcatggggccccgccatggcaggggttgggcaggcaggggtggtccccgcactcgcccacgccagagcctcgggtggcagcccccggcccaatgccaagctccaggcgctggttgttgacgtccagcaaacggatgcaccccctcaggccggcgcccacgaaggtccgctccagcgccacggcagcctggtcctcgggtacgccgcccacaaagaggtctgtgtccaggttgaggccgtcggtgccactgggactctcgcccagaacaggggtctcaccatccaccgagagggtgccccggcgccagtgccgggacagctccaggcggtgccactggccccggctctaccggcacggcactggtcagcaccgccggccccgaacctgtgtcaaacctgagctgcacgcggccatctagcagcgccaatgccaggaagtccttgccccgggcgttgccattgtacagcagcagcccctgaggctccagcgcccggaattccagtgccaggcgcagcgtgtggtaggcgcggagggtggggaaggccaggaaggagcggccctcgaaggccggcacaggggcgccaagcaccttctcacagacggcgcctcccctgcctgccgggcagctgcaggtgaagcccccgcccaatgcccagtcctggcaggtccccccgtggaagcagggctgtgagtcacagggctttggaggctgctggggggccgggggccgacgtccgggcacacggctgggggcagtggtggggggccgacgtgtggtgggggctgccgtggtcttggcaacgggctggcttgtgtgactggggtgcggggcccgaggggtcacagcagaggacggcaggcgcgatgcagtggtggctctggccgtggctcccgcagcaatggctcctgacgtggcccccgtgataaacgcaggaaaccagtcaaagtccataaatcgcacgtgctcctgcagcggccgcctcacccccaaggaccggcgcctggacacctgggatctgccggagcagggcccgggccacgtcgggtgccctgaaggctgtggtggggtcaaagtgcacatccacaatggcgcggacggatttgccgggccccaggtcccgcaagcggacactccggaaatccttcttgacgtctgaattccggaagaggtcgtccagggtgctctcaatgctcctggctgtctccccgaacagttctgacttggggtcagccatctcgggcgtgtagaacagctcctggccctcgacgccctccagctccaggacgccctggaacaccttggtggcggggcagttggagccctctgcgtccagcgagggcgtcttcccatcagagcagcagcccaacgcggagttgtagcaggaagccctctcgacaggtggcccaggggtggccacgctgctgccctccaaggggtttgacccccccagagccacccccactggcctcctggtccccgctcagttcctcatcgctgcttccatcagtgctgccagattcaccaaaggcggacgccaccaggctgggtgcaggggagggtgccgtggggggcaccgtcagcacgggccacacggtggtcctggggacgctggcagtggtccgaggtcgcgatgagggcggaggggtggtctggctgtgtgcggtactgctgggagccagggggagggcgccggggggggccggcagtgcctggctcaggaggagccctggggtggtcacagtcacggaggcagatgtcgggtgagtgctgggagcaacagcctcctggcacgggcccaggctctggatagagatttgcaggccctggcggcaggcgatggtcttcagctgacactcgttgccgtatgtgactccatctgacccacagaccttggtagcgttggcctctggacaggtgagcatcgggcagacacagtgggctgagccagactcctccacgcaccgcgcaccgaactcacagcgcatctccgcacaggtcgcaggcgcagaagcgtcagcttcacagcccgcggggcccagggcacggccgtctggacactgcccacacttgggtccagccaccccgggcttacacgagcacagccccgtcatctgctcacagtcatcccgcacggcgccttggggatcacagctgcagggtgtacagccactccggccatcggtgacgatgcctcgaaagttccagaagccaggctcacagcggtcacacctgaggccccccacacctgggcggcaggagcactggcctgtggctgggtcacaggtgccgccgtaagagccatgggggttgcactggcaggcactggggcagccagccaggcccacgccccgggctgcggtgatattgtcctggcagcagccgtagggcgtctgggcacagtgtaagggggccacaggcggcagcggggcgaaggtggggcctcggcaggctccctgggccgctacgtagagccctcgctgtgactcacacctggccttcttcagctcacactcggtgctgtaggtgaccccatctgagccgcacaccgggctgcctgggacactctggcagctgaagtcacagacacacggcccgtcctccgagtcctcgtcccagatgccaccgcgctgccggcacagctcctgctcacagtcaccgtcctccccagagccagagcctccggaaccgcactcggcctgctcgcacggccctgcccgggcctcctcgatctgtgtctgctggaggcaggcggcttcccgtagctcgcaggcactgccgtaggtgacaccgtcgctgccacacacggggccgggcggggggtgctcacaccggggacacacacactgccctgcggagcacacagccccaaaagcacacacggcatctccacaggtctcgcagggtccagctgaggccacgtgcaggctgatctggtgtgtgcaggcgtgcacgtgcagcatgcactcgctggggtacgtgtgcccgtcggagccacacacgggctgggccaaagccacgcattcagaggggcacacgcagcgcccggtctcggcctcgcacagggctccaaagcggcactgcccgcagcggtcacagggtcctttgcgcgccccctggatctcccgcccgagggtacaggccgtggcctccagctcgcacgcgctgccgtatgtgacgccgtcgctgccgcacacaggatcgtagaggctcgagcacgcctgcaggcattcacacgctgcctgcccgttcttcacagcacacgtcgccccaaatgcacactgcaccccgaggcatggggacggggcctggtcacacgggccctggtgcttgctggggatggcacgctgctgccggcactcagcctgctgccgccagcaatcactgtcatacgtgcgcccgtcctgggcacacacgggcctgtaggccccgtcacaggtgacgcggtcgcaggagcagcggggacggccacggcgggacaggcacacggcattgaaccggcagggctccgggcactggtctcgaccctggcactggccggagcgcactttctgcaggaggagaccccgggcggcccccgatcggcccatgacacagtcgttttcgtaggtgactccgtcgtccccacacactggcgcctgccgggcagggcagctctcgggccgtaggcgcatctcagggcgccgcgtgcgcgggttcacacggcagctgcggctcgggtcagggagggcgccctgacaggggtcacaagggccgtcgaacttcttgaagacattctcctggcgggcgcaggcgcggcgcaggagctggcactcgccggggtagtcggcgccgtcgctgccgcagacggtcccctcgggggcgccacggcaggtcgcggggcacaggcacgaggccgtcagcccgtcggccgagcgcgcacaggtgctgccgaagctgcaggtcacgttggagcaggggtcccgcgagccgcacggcccgcggctgagcaggcggatgcggcgctgctggctgcactgcgcccgctgcagctcgcattcgttgctgtaggtggaggcgtccgacccacacacaggcgccaccacgctggggcacgggctcttcttgcagacgcaggacgcccggcccggcccctccgcgttgggctcgcacacggcgccgaagccgcacagcattccccggcacgcatcaggaggcgtcggaggcactggagtgaagtgggtcccgggtttatcttccacacagaactccacctcctccaggttccgcagggtgatccgcatgaggctggagttgagcatcagctcgttcttgtgggctggccacaggtatgggggtgcagggttcacaaagaagatcctggtgtccccagtggacacctggttgtcacagatgagggggtctccaaagccgctgatcaccaccttgttgccgccgtccagcaggctctcccgggccaccaggtctttgcccttcaagtaccgccagacccgaaccttgcaggagtacgtgtgctgcaccgggtccacgttgaggatctcctccaccgtcccggtgagcaccacgttcgcctcctcctcgcgccgctccagcgcgcgctccgggcatgtcccgccggctccgggcaggacgcacgcggccaccacaaggagaggcag

SEQ ID NO: 61182 - DNA, 1778 bp, Homo sapiens
ttttttttgcaaccacccatcaataaactttcttttttattattaagtgggggcagggtttctgttcttgcaactgagtcctaacagaaaacaatggtttcgctgaccacacggagagctgaggacaggacaaaaaggcatgagacagctggacacctggagagaggtgacacaggacagagtcctcacccggctgccctgggcctcggggagctcaggctgcagtccctgggcctggtggcacccacagcacggcagtctctggctgggcttcggggagcccacatgtctgatcggcagggcttggctggccaggcggtgggcaccaacgtggtgggtgggcagtcctgggcttccaggaggcctcctggggactcaggctcttcagtggggtgtgcctgtcagggtgcaggtgggttctgtggctacactcccatcctgtcttccctctgtgttcccaaacctgctctggtccctagatgtctggagacctggggtcgtccagctcaggaggccatctggagctgccgctgcagcctgcagagtgtaaggtggcgtttgttaccaagacctgtgggtgttctggggcttcctgaagggaaaggcattacctgcagtgaagccataaggacacagtgtccagcaaaaaggcactgggagtccagaaagagccactccccaccgctgcacctgccaccatgggatggggtcccggagccctgggcagcttctggagctgccctcttgggggcctgggcagtggagctggcttggggacagatgttctgcaggccgggggtcagctgtggaaggcagaccaggccacccccgaggcgtagaactccacgctgctgggccagtcgccgtccctgctgccctccttgtcctcgtcggagtcatcgtcatctccactggacgtccgcagatgggccgggccaggtggctggctgccctggggaccccagcgccctgctcctccgcctcctccttgcgctgctgagcggccagttcgcggtagcagaggctgcagacgcgcacgggcttgggggacaggcgcgggagcaggaagcgctggcgcgagcactcagcgcagaccacgacacggcacttgcggcagtggtggcgcctcgtgagggcagagaagcgcgtctgcgtgcagcgcatgcagatgtccgtggccttgtcggggatccagggtgccgcgtgctccgtgctgggcggggcggcccgtggccctcagttgccgccgcacgcactcctcgatgtggctaatccattcctggcgctccgtagcggaggcggccgacaccacaaaggacttcttggccgtcttgatcatccagcggttcttggcctgcagcgtctccggcaacagctccagtgtgacctcctccagggggatgatgtgctggctgcggtacttgcgcttgttgagcacgatgctgccatacaccaggatgtcgttaaagaggaagaagatgcgcggcttggccttcttgcggcactctttggtcagcacgccctcgcccagcagcactcggcctggcagcgccagcggctgccccgaggccccgaagcagctctccactgccgcgatgcgctggctgttgatctccgtgttggccaagtggtccaccatcgtctccagctggcggctccaccagcttacatctgcgcgtttccccggggattccgcctcggacgctctgacccctgaccgctctccccaggctccctgcaggttcaccccgcaagccgcccaggagcgcccttcccaa

SEQ ID NO: 61183 - DNA, 826 bp, Homo sapiens
taccccttaaaaatttttattttccctaaaggccttaaattttggagggagggtgtgcccataaggccccccccccaaaaaaaggttcttttccaaaaatcccaaatagggtttaatatcgccccccataaagaaaaaaatattaccttgccagcccccggaaaaattgggccccccaagggttctttaaaaagggccccccctttttttttttttgaggactgaaataagagcatgatatttcacaatgaaaataaaaccaggccacgcaagaaccactgcggcctgcccgtgacttggcttcccctgcccagcatcctgtcctccctggtccatctctggtgaggacggctgggagtgggctctgtggctgctagcagggggcagggaggagctgggactgtgggtcgtcctggcccgtgggggctggcggggggtgttcgggccgggcgaggccccgcaggacccgcagggtggccagggccaggcccacgagcaggcgcagcaacaggaaggcgcagggcacggcgatctgcatgaggtggaagatgcccacactgaacctgctcagcaggcaggtggaggcgaaggccagcaggctggcacaggggtacagcgccagcttggcgaacatgagcacatgctcccggccgccaaaccacaccgagggctgcagcgtctccgcctggtgcagcagcgccgtggtccacatggccagctggaagatgctggccaggaagatgatggtgcagctgacacgcacgcgctccagctcatcgcggggctgccgggcgaaggccgaggtctgctggtaggctagtgggag

SEQ ID NO: 61184 - DNA, 3428 bp, Homo sapiens
ggagaaacggagcccttggaagttgtacccttaggttcccctgcggttctgggcccaggtctgcagcctccactctgggcttgccggctgtgaggtgcgctggttataggactgtgtgggggctgcatatcaggtgatctcagctatcaccttctcccagcacctggcttccagctcatggggtgggactatcccactcacccctctgctataggcactgcccatcttatgctgctggccctggcctcacctggtcacttccaccaacaggagctcccagataacagtgggttgctggacagatcaggctgggactcttaaggggtgggggacgtggggccttcagtgctttatcccctaggaaagggtgcacgttatcccaagggagcccccaggaagtggggagggaggggggaggagcatgtctaggtgctgaccacctggagcacttggccagcaagtgggccgcatgctttgggagcaatgggtgacccagcaggaagcacaaaagaccggccagtgtgccatcatcaagggctgctgagcagcttgaagagccactgggtggggagggcacacggggaggtctcagctggggctgcccctggaggacagggcagggaacttgagggctgaggacagaaatctcacatgactccaggaaatagaggaagaggaggatgctgagcgagggattgtgagggagtgggggtaggtcagagggggctgaactgcaggaagccagggggagtcgtggaccactggagctggccagccccagggcattggggacaaggccaggtcagagggagacagtgtgggcctggtgggtggaccctggcagaggccctcttgtcccccacaaggccaggccacactgtgattctgcctgtacctgagcatctgtcctgtgctcctaggccggagaccactgtgtgtcaggtggggcggttggctgagtcccagagaaaaacactcctcactgggcactcttgatgcttgcacacaccctgtggtttatttggtggtcagtaaggaacgtctttgctgctaagtggaagaaagctaatggaacgtaatcaaaatagtggtttaattgacgaattttacttgcacctgtgccttcttcagatcctacctgcctacttagtttacgtgaaggccgactgcaccatgccccccaaccccgacccccaccacacacaacggggccattgtcatgctaggtgcttgctttccccacctcagctccggagatgtgatggtctttggctctggaggtctcggccagcctgtcctccatcctgttctcgttctcgggcaccaccagcagccggtgctgggttttggctccaagcttgtggtcgggccggtggtcgggcctcaagcctgtcttggtgtccagtttgcactcagcgcggtacttgccctccccctccctcttgaaggaggcagaagacgtggcttttgggcttggggggctgcagccacgagtggcttaggatctcatcgatgtggagccgcttggctgacgtcgggcctgcagcatgcggtagatgaggtccttgcactcgcaggtcaggttcttggagcgcgggaagtccacacggtgctccttctggatacgcagcatcttcctgatgtcggagtcgtcatagggcatggagccgcagaccatgatgtacaggatcacgcccaggctccagatgtcatacaccttgggctggtaggggatgctctgcagcacctcgggggctgcatatgctgccgacccgcagaaggtcttgctgaggatgatgcgcccattgctgtcccgcaggcagcgcttggagaagccaaagtcagacagcttgatgttgaagtccttgtcgaggagaaggttctcgcacttgaggtcccggtggacgatgtccaggtcgtggcagtacttgacggcggaggagagctgtcggaacatcttgcgtgccacgtcctcatgcagggctccctggcacttgatgaactcgaggaggtcgccctggacgccaagctccatgatgatgtagatccgtccgtcagaggtctcaaagatctcgtaagtcttgatgatggagccgtggttgacagttgccaggatgtccatctcccgaggaaggaatctctccacaaagtcagtaggggttttcttgcgggcgatgatcttgacagccacattgaacttgaggcgctcagagtaggcagatttgacttttgcgtaggaacccttgccaagattgatgcctacgatgtaacccttcttccttaggactgtggcatcgtccatggtgccaggagcgactggcgccgctgccgtctacatccccccgtcatgtgggccagcaggcattgtcctcatttacactaccggaggcgtctggctgggctgccctgggctgggcttcgactcaggggtggaacactcagcattgtctccgggtgacttcagccaatgaactcataaagccaaggagtgggggcggggactgggctgagggagaacagggtctctggaaccgtggaagccaggctggtctggcaggagcacccactccccgcccgctggaaggaagcctgtccccaggacaggactctggtggccctgctgctgctgcattggtttccctgtcacaagtcaagctggaggggaggcggcccacgtccagcctgtttgcatcacctggctgtggggactgaccctgcattggtctttgtcccactagggtgggtttcctgcagcttctttggctatgaagaaaagcacccccagggctgtgtccttggtgtggtaggacagttgtccctgacagtcacccagacaggcctgcatagcaccccagttacacagacagatttccacagcactgccttaccattgagcacatagttaaatctagggaaatcagtgcccagacatcaaagctagaaatgaaacatggtcagcaggagccttgcatgggcttctcttttgctggagcaagccaaaataataggaacggttttacattcctagtgccaggacccatctcgggtcgacaaaatctgaagacaagttaagggaacaggcagctgtttgaatagatcaattggatagtctaaggcagctctctggaccaagctgtaaaggagatacaatcgaaataatcactccggtaccacagtagacaggccttgaaggcactgggccccttttaatcggacttagcaagcattttttttgcctctgaccttctccttggaacaaaattagttaccgagtagacttaggtgattgctgtactgcatgtaggcacataaccccaacctatataaacagtaagaaaattgtagcactttgagttggtctgctggaattatctccagccttctccctgtatccagttacactgactaaactcccttctctcctacac

SEQ ID NO: 61185 - DNA, 4360 bp, Homo sapiens
gaccgttttaaattcgcgggtcgacgatttcgtgtggaggccatggggcgcgtcgtcgcggagctcgtctcctcgctgctggggttgtggctgttgctgtgcagctgcggatgccccgagggcgccgagctgcgtgctccgccagataaaatcgcgattattggagccggaattggtggcacttcagcagcctattacctgcggcagaaatttgggaaagatgtgaagatagacctgtttgaaagagaagaggtcgggggccgcctggctaccatgatggtgcaggggcaagaatacgaggcaggaggttctgtcatccatcctttaaatctgcacatgaaacgttttgtcaaagacctgggtctctctgctgttcaggcctctggtggcctactggggatatataatggagagactctggtatttgaggagagcaactggttcataattaacgtgattaaattagtttggcgctatggatttcaatccctccgtatgcacatgtgggtagaggacgtgttagacaagttcatgaggatctaccgctaccagtctcatgactatgccttcagtagtgtcgaaaaattacttcatgctctaggaggagatgacttccttggaatgcttaatcgaacacttcttgaaaccttgcaaaaggccggcttttctgagaagttcctcaatgaaatgattgctcctgttatgagggtcaattatggccaaagcacggacatcaatgcctttgtgggggcggtgtcactgtcctgttctgattctggcctttgggcagtagaaggtggcaataaacttgtttgctcagggcttctgcaggcatccaaaagcaatcttatatctggctcagtaatgtacatcgaggagaaaacaaagaccaagtacacaggaaatccaacaaagatgtatgaagtggtctaccaaattggaactgagactcgttcagacttctatgacatcgtcttggtggccactccgttgaatcgaaaaatgtcgaatattacttttctcaactttgatcctccaattgaggaattccatcaatattatcaacatatagtgacaactttagttaagggggaattgaatacatctatctttagctctagacccatagataaatttggccttaatacagttttaaccactgataattcagatttgttcattaacagtattgggattgtgccctctgtgagagaaaaggaagatcctgagccatcaacagatggaacatatgtttggaagatcttttcccaagaaactcttactaaagcacaaattttaaagctctttctgtcctatgattatgctgtgaagaagccatggcttgcatatcctcactataagcccccggagaaatgcccctctatcattctccatgatcgactttattacctcaatggcatagagtgtgcagcaagtgcccatggagatgagtgccattgcagccccacaacgctgcactccttgcctatcaccgctggaacgggcacacagacatgattgatcaggatggcttatatgagaaacttaaaactgaactatgaagtgacacactcctttttcccctcctagttccaaatgactatcagtggcaaaaaagaacaaaatctgagcagagatgattttgaaccagatattttgccattatcattgtttaataaaagtaatccctgctggtcataggaaaacacacggttctaattaagtgtgaaggtatagctattgcacttatgccatctccaaaatttcttaagtattctttcactatccattaggagtttttcttaaacttgtctgataataagaatcacctggagttaggaggtggtggttgcagtgagccaatctcaccattgcacttcagcctgagcaacacgagcaaaactccgtctcaaaagtaaataaaaataatcacctggagtttgttaaaccatatggattctcaagctcctctcttgaagattctgattcagtaggtctgggagtggcgccctggattttgatcaaaattgtagagcattttaaggtgagtacctgagggagaacttaaagacatcttagttggggagtagtccttttgaattttacagctagatataatcttcagtcagataaaatttatgggagctggtgtcttatgcctgactcttagtaatttcataccggtttgaagtacgtgtgcccatgcctaaagccttgactttcagaatgttgtcttttgattcttctgtcttgatttgattaggggtgaaatttagaagtcttagtaatgtaacttgaagatgttaaacaaaaatctcaagtaaaatgaaaagcaaatatgggctactgaattaagaaactggcattctagtattaaatcctcacttcaggagcttttaaaaatactgagacccccccataaccagagattcagattcaaagactgaggataggaccttagcattgtagctatttaaagtttctaatgtgcacccagggttgggaatcaccaatgtgggtgtgaaaatgcctacaaagggttttagtgccttagaagtcctaagaagcccaatctgtatcaaagcagatccattttgcaaggatctttcttttagaactttctcagttctcttagtaagaactttagaagtaatcttgataataagcacagacagcctaacagcagaggcaacttaaataactcctgagcagttggcactagaacagaatacttggaatgacaccaaagttaaccaagtccagcatatgtccaaagagttaagtgtttcatttactgtagcattctgggtgagaaattggttgctgaaatcttaagacagtggtctcaaccttggctgcacattggaatcacctgtagggttttaaagcatccaaatggtaattaacaggcagcaaaacttcagaactagttctgcatctactgtgcaaagatcatgattaactgtcaagacactggtagaacagaacaagcaaaagattaagagttcaaaagtaaatgcaaccaatttaacatgtagtgttattaaaaaattacaaaggcctagaccagcctgggcaacatggtgaaaccccatctctacaaaaaatttttaaaaagttggccaggcatggtaatgcgcgcctgtggtcccagctgctcgggaggctgaggtgggaggatcacttgagccttggaggtcaaggctgcagtgaatcatgatcatgccactgtactccagcctgggcaacagagaccatcttaaaaaaaaaaaatccttccattgaatagaaacttcaaagtccttcatcagatcatggcattagctactttagcaaaatagtgtaaactttggttctgagtaaaaatgacttcttccctaccacagttgtgaatgttaatatgctgataaaactgccaagatatatttgataggtaggggattaaactcatggtttgtcaaaagagtgtttttttctagttttattcttaacagatatgttgaggtattcatatttgtttccttttgtggttttaatgaagacaatttgtaaagtaatactgttatgtatatgctaaatgttggtaaatactaattaatttccatcatttgtagacttgttttgcaatgggatatatttttacttataataccaatttaggctgggcgcagtggctcacgcctgtaatcccagcactttgggaggccaaggcaaacggatcacgaggtcaggagatcaagaccatcctggccaacatggtgaaaccccatctctactgaatacacaaaaattggctggacatggtggcgcatgtctgtaatcccagctactgtaatctcagctactcgggaggctgaggcaggagaattgcctcaaccgggaggcggaggttgcagtgagccaagatcgcaccactgcactccagcctggcaacagagcgagactctgtctcagaaaaaaaaaaacaaaaaccagtttaggctgggtatggtggctcaccagcactttgggaggctgaggcaggtggatctcttgaggtcgggagtttgagaccagcctggccaacatggtgaaaccctgtctttactaaaaatacaaaaattagccaggcatggtggcgtgtgccagtaatcccagctacttgggaggctgaggcgcgagaatcgcttgaaccctggagatggaggttgcagtgagcagagatcgcaccactgcactccagcctgggcaagagtgagactgtgtctcaaaaggaaaaaaaaaaaattaaaaatgttgctggtattacatcaaacctactctggataaattttccagtagggcatctgaaattgctttggcaaaagcaaaacaggttatc

SEQ ID NO: 61186 - DNA, 3050 bp, Homo sapiens
cggcacgagcgcccgcaaccggggcgaatcatggcggccgccaaggtggctttaaccaagagagcagatccagctgagcttagaacaatatttttgaagtatgcaagcattgagaaaaacggtgaatttttcatgtcccccaatgactttgtcactcgatacttgaacatttttggagaaagccagcctaatccaaagactgtggaacttttaagtggagtggtggatcagaccaaagatggattaatatcttttcaagaatttgttgcctttgaatctgtcctgtgtgcccctgatgctttgtttatggtagcctttcagctgtttgacaaagctggcaaaggagaagtaacttttgaggatgttaagcaagtttttgggacagaccacaattcatcaacatattccatttaaactgggattcagaatttggtgcaactacattttggaaaagaaagaaaaagacacctgacatatgcggaatttactcagtttttattggaaatacaactggagcacgcaaagcaagcctttgtgcaacgggacaatgctaggactgggagagtcacagccatcgacttccgagacatcatggtcaccatccgcccccatgtcttgactccttttgtagaagaatgtctagtagctgctgctggaggtaccacatcccatcaagttagtttctcctattttaatggatttaattcgctccttaacaacatggaactcattagaaagatctatagcactctggctggcaccaggaaagatgttgaagtgactaaggaggagtttgttctggcagctcagaaatttggtcaggttacacccatggaagttgacatcttgtttcagttagcagatttatatgagccaaggggacgtatgaccttagcagacattgaacggattgctcctctggaagagggaactctgccctttaacttggctgaggcccagaggcagaaggcctcaggtgattcagctcgaccagttcttctacaagttgcagagtcggcctacaggtttggtctgggttctgttgctggagctgttggagccactgctgtgtatcctatcgatcttgtaaaaactcgaatgcagaaccaacgatcaactggctcttttgtgggagaactcatgtataaaaacagctttgactgttttaagaaagtgctacgctatgaaggcttctttggactgtatagaggtctgttgccacagttattgggagttgccccagagaaggccataaaacttacagtgaacgattttgtgagggataaatttatgcacaaagatggttcggtcccacttgcagcagaaattcttgctggaggctgcgctggaggctcccaggtgattttcacaaatcctttagaaatcgtcaagatccgtttgcaagtggcaggagaaatcaccactggtcctcgagtcagtgctctgtctgtcgtgcgggacctggggttttttgggatctacaagggtgccaaagcatgctttctgcgggacattcctttctcggccatctactttccgtgctatgctcatgtgaaggcttcctttgcaaatgaagatgggcaggttagcccaggaagcctgctcttagctggtgccatagctggtatgcctgcagcatctttagtgacccctgctgatgttatcaagacgagattacaggtggctgcccgggctggccaaaccacttacagcggagtgatagactgctttagaaagatactgcgtgaagaaggaccaaaagctctgtggaagggagctggtgctcgtgtatttcgatcctcaccccagtttggtgtaactttgctgacttacgaattgctacagcgatggttctacattgattttggaggagtaaaacccatgggatcagagccagttcctaaatccaggatcaacctgcctgccccgaatcctgatcacgttgggggctacaaactggcagttgctacatttgcagggattgaaaacaaatttggactttacctacctctcttcaagccatcagtatctacctcaaaggctattggtggaggcccataggaagatcagccctgggatagtgctgtctttttgtgggtactgcagtaaagaacatccctcctgggaatgaagcaatgcttcatcccttttacgtccatctcttgtttaaattcaagtccaggcttttttatcatgtgaaatcattcattttctgggtgttttcttaaccagatcattgtgaaattattcataattattatttggccctctgcccagaaacctttgtttgcatctgaaaattgatgggatttggtcaacactaacatgatttggggaaaggagcaagtcagaatagaaattagtactcccctccttgaactaggattgtagtcccaaagaggctactgtaaggcaatcatggtgctcagagcagtgtttcgtgtgtgttttaaactggtaggaaactaggtgcatatttataaaaataaaaaacactgggagaaatgaaaaaatatatatcaaatatattcagcctggcttcaaattgtaagcatgcacaaattctgtctctggattatattatgaagcttttatgtgaaacatgtttctttgtaatgaaaaccacattggagatgtttagtaatcatattgttactggtacccaagactacctagggaaatgccctttgtacctttagggaagtacttttggcattttactgtacagacagaaaaaactgagatgtagcccctctccctggaagtgcctaattttgaaaaactgcctcatatgatgtacatgtactgattactgcctattttaataaacactcttgaaaaatgcatgttgccctgttgctgcctgccctattctcctcaatctccccatcattggtacccaacttgcttttaaaatccactttatcttgaataatgtaagacaaatatgttctgacataagtatttaattcatgttgccttgcataatggtcagaggcgcatgaatttgtgaaggtggaaataaactatttgtaaagtgaaaaaaaaaa

SEQ ID NO: 61187 - DNA, 1569 bp, Homo sapiens
cttcctttccccctttgctttcttccccctccgctgttggcgagggcaaagtggccgtggcggcgccatgcccgggccggagtgagtgcgcgcgggcgaaaatggcgtacatccagttggaaccattaaacgagggttttctttctagaatctctggtctgctgctgtgcagatggacctgccggcactgctgtcagaagtgctacgagtccagctgttgccagtcaagtgaggatgaagttgaaattctgggacctttccctgctcagacccctccctggctgatggccagccggagcagtgacaaggatggtgactctgtccacacggccagcgaagtcccgctgaccccacggaccaattccccggatggaagacgctcgtcctcagacacatccaagtctacatacagcctgacgcggaggatttcgagtcttgagtcaagacgtcccagctctccactcatcgatattaaacccatcgagtttggcgttctcagcgccaagaaggagcccatccaaccttcggtgctcagacggacctataaccccgacgactatttcaggaagttcgaaccccacctgtactccctcgactccaacagcgacgatgtggactctctgacagacgaggagatcctgtccaagtaccagctgggcatgctgcacttcagcactcagtacgacctgctgcacaaccacctcaccgtgcgcgtgatcgaggccagggacctgccacctcccatctcccacgatggctcgcgccaggacatggcgcactccaacccctacgtcaagatctgtctcctgccagaccagaagaactcaaagcagaccggggtcaaacgcaagacccagaagcccgtgtttgaggagcgctacaccttcgagatccccttcctggaggcccagaggaggaccctgctcctgaccgtggtggattttgataagttctcccgccactgtgtcattgggaaagtttctgtgcctttgtgtgaagttgacctggtcaagggcgggcactggtggaaggcgctgattcccagttctcagaatgaagtggagctgggggagctgcttctgtcactgaattatctcccaagtgctggcagactgaatgttgatgtcattcgagccaagcaacttcttcagacagatgtgagccaaggttcagacccctttgtgaaaatccagctggtgcatggactcaaacttgtgaaaaccaagaagacgtccttcttaaggggcacaattgatcctttctacaatgaatccttcagcttcaaagttccccaagaagaactggaaaatgccagcctagtgtttacagttttcggccacaacatgaagagcagcaatgacttcatcgggaggatcgtcattggcccagtactcttcaggccccctctgagcccaaccactggaggcgcatgctcaacacgcaccgcacagccgtggagcagtggcatagcctgaggtcccgagctgagtgtgaccgcgtgtctcctgcctccctggaggtgacctgagggctgcagggaaggcagctttcatttgtttaaaaaaaaaa

SEQ ID NO: 61188 - DNA, 620 bp, Homo sapiens
tttcgtcaggtgttacattctctgaacctgttagacccaagagagccttccagtgattaaaaaaccctcatctcaaaggtgtcagagtccctctgagaacatctgctctgtgttccttgtgcacagctgtgtgtggatgagtgtgcgagggcgtgtgcgaggctgtgagcatgaccatgcatgtgtataagtgcgagtgtgcaagggcgtgcgaggctgtgagcacaactgtgcatgtgtatgaattgcatgcgtgtgcacatatgtgcatgtgaatgtgagtgtacaagtgtggatgtgcacacacccgcccacagacgtctcagtgttctaccctgattttggtacctagtccagccccacagctcagcatgtgagcacattcgctgcccatcatctgtccaggcctgaatggaggggcttccattttcagcgctaacaagggcacggctccccagatgcctcgctggcgctgggcccggcctctgccctgctctcacttggctcttgctgaagcctccccaggctccgtgggagtggccagttgagactcgccacactcagtgcctgagattccactaccagcatcagcttcggggctttctgcactttccagtcat

SEQ ID NO: 61189 - DNA, 2108 bp, Homo sapiens
  misc_feature (1)...(2108): n = a,t,c or g
gactaccatgataaaagaattttcaaggaactgaaatccagtgacaaaaatgaaatcgatcaaggctgtagttgcacacctgagacattcctcgagaaggcagaggagaaaggtgtgaaaaacagtgaaccagagaaggatggccagggacaacaaagattggagctcggaagttgaatgacagatattctggagaaacacaccagagatgacaaaagggtttgtcaaacacagcccaactcaactggagtcctgagaaggtgaccagaccaggatggaggcccagggaactcaccagaagtccccatgcatcagaacaaggtcgaagcatcctgacggagtctcgctctttcgcaaggctggagtgcaatggcatgatctcggctcactgcagcctccgcctcctgggttcaagtgattcttctgcctcagcctcccgagtagctgggactacagaaatgctggtaatttcagtcacttgctgatgacttctgatgtcccagcaaatgttggcattgttgactgctgagaagatacttctgaggacccacgtctaaggtggacttggttcgcactcttctggttagtccctgaacaggagtgatgcctccaggcaggtggcatgctgcctatccagctcaggcccagtcttcgagggagcgagggcggcttcagacagtaaagaaggaagaagaggatgaaagctatactccagtgcaggctgccaggccacagactctcaaccgccctggccaggagctgttccgccagctcttcagacagcttcgctaccatgagtcttcagggcccctagaaactctgagccggctccgggaactctgtcgctggtggctgaggcctgacgttctctccaaggcacagatcctagagctgctggtgctggaacagttcctgagcatcctgcctggggagctccgggtttgggtgcagcttcataaccctgagagtggcgaggaggctgtggccttgctggaggagctgcagagggaccttgatgggacatcctggagggacccgggccctgcccagagcccagatgtgcattggatgggtacaggagccctgcgatctgcacagatatggtcccttgcttcacctctcaggagcagctctgctctgggggaccacctggagcctccctatgaaatagaagcacgtgacttcctggctgggcaatccgatactcctgctgcccagatgcctgcccttttcccgagagaggggtgcccgggagaccaggtaacaccaaccaggtccctgacagcccagctccaggagaccatgactttcaaggatgtggaggtgaccttctcccaggacgagtgggggtggctggactctgctcagaggaacctgtacagggatgtgatgctggagaattataggaacatggcttccctgggtaagtaatcgatatcctcatgcttctatccatctttatttctgccttcttgggttgttctgtgctgcatagaaaggtacctgacctggttttagatcctggctctgtaactgctgaccagatcacttaatctagcaccttggtagcctcttttgaaaaatggggagaataatgcctgccattctggattattgtaaagattaaaggtggcggggcgtggtggctcacgcctgtaatcccagcactttgggaggccgaggcaggtggatcatgaggtcaggagttcgagaccagcctggccaacatggtgaaaccccatctctactaaaaatacaaaaattagccgggtgtggtggcgggtgcctgtagtcccagctactcgggaggctgaggcagaagaatcacttgaacctgggaggcggaggttgcagtgagctgagatcatgccattgcactccagcctggcgacagagcgagactcattcttcttttatacttttgaggttatgtacgtctttcattctctttcgccttactccgggcacggcctcccggcctcggcctcactcagctcaggcaccgcaggcaccgtttggccgcgggctccgtaaagctggaacccttcagagccggagcgccgccacgaaatcgtcgacccaggatgtnnnaancggtaccgcaggtg

SEQ ID NO: 61190 - DNA, 681 bp, Homo sapiens
tttcgtggtgacatcacggacagggcgacttctatgtatatgaggcagcgcagaggctgctgcttcgccacttgctgcttcgccacgaaggagttcccgtgccctgggagcgggttcaggaccgcggatcggaagtgagaatcccagctgtgtgtcagggctggaaagggctcgggagtgcgcggggcaagtgaccgtgtgtgtaaagagtgaggcgtatgaggctgtgtcggggcagagcccgaagatctcatacttacctggcaggggagataccatgatcacgaaggtggttttcccagggcgaggcttatccattgcactccggatgtgctgacccctgcgatttccccaaatgtgggaaactcgactgcataatttgtggtagtgggggactgcgttcgcgctttcccctgccttactggaagttgaaaggtagttgttattatgatcggtgctgggtctggtacgtgtggtgtttaaaacacgggctgctgggcagttcgctttcgttttcacgtttttgtgggggtagggcgattgcagctttttttctcaccccgcgggggatcctttagtaacgcgccaattatactgtgggtttatgttctccagggtattgtcgtgaaaacgtcacgatctcgtgctttctccaggccaaagccgcgtttttcctgcaag

SEQ ID NO: 61191 - DNA, 1886 bp, Homo sapiens
cgatctgctccaagtaggggctccagcgcgggtcggagtctgggggttcgcgcccgccgacccgcgccctgctccctctcagcacctgggcggacgaaatgaccattaagaagtagatgcccagatgcaaaagtgatgaaacagtccatttgtcataaagtaagatgcagctgtggcatgtcaaccagcttggaacaaaattgtatctgtttttctcagaagagaattccacaaggttaaatcagcaaacaaagaaaacatggtattttgaaatatgattaaactcctgatgctgcagcagaggctaagaatattaatggccagatctagtgcacacatggtcttctgaagaagccatgggtagctgttgtagctgtccagataaagacactgtcccagataaccatcggaacaagtttaaggtcattaatgtggatgatgatgggaatgagttaggttctggcataatggaacttacagacacagaactgattttatacacccgcaaacgtgactcagtaaaatggcactacctctgcctgcgacgctatggctatgactcgaatctcttttcttttgaaagtggtcgaaggtgtcaaactggacaaggaatctttgcctttaagtgtgcccgtgcagaagaattatttaacatgttgcaagagattatgcaaaataatagtataaatgtggtggaagagccagttgtagaaagaaataatcatcagacagaattggaagtccctagaacacctcgaacacctacaactccaggatttgctgctcagaacttacctaatggatatccccgatatccctcatttggagatgcttcatcccatccgtcaagcagacatccttctgtgggaagtgctcgcctgccttcagtaggggaagaatctacacatcctttgcttgtggctgaggaacaagtacatacctatgtcaacactacaggtgtgcaagaagagcggaaaaaccgcacaagtgtgcatgttccattggaggcaagggtttctaacgctgaaagcagcacaccaaaagaagaaccaagtagtattgaggacagggatcctcagattcttcttgaacctgaaggagtcaaatttgttttagggccaacccctgttcaaaagcagttaatggaaaaagagaaactggagcaacttggaagagatcaagttagtggaagtggagcaaataacacagaatgggacactggctatgacagtgatgaacgaagagatgcaccctctgttaacaaactggtgtatgaaaatataaatgggctatctatccctagtgcctcaggggtcaggagaggtcgtctgacatccaccagtacctcagatacccagaatatcaacaactcagctcagagaagaactgcattattaaactatgaaaatctaccatctttgcctcctgtttgggaagcccgcaagctaagtagggatgaagatgacaatttaggaccaaagaccccatctctaaatggctaccataataatctagatccaatgcataactatgtaaatacagagaatgtaacagtgccagcaagtgctcacaaaatagaatattcaaggcgtcgggactgtacaccaacagtctttaactttgatatcagacgcccaagtttagaacacaggcagcttaattacatacaggttgacttggaaggtggcagtgactctgacaaccctcagactccaaaaacgcctacaactccccttccacaaacccctaccaggcgcacagagctgtatgccgtgatagacatcgagagaactgctgctatgtcaaatttgcagaaagcactgccacgagatgatggtacatctagggaaaactagacacaatagtacttgatctgcccctgtgag

SEQ ID NO: 61192 - DNA, 1061 bp, Homo sapiens
  misc_feature (1)...(1061): n = a,t,c or g
ttttttttttttaggaaatggcttaatttttatttgaggtggaaacctttggcttcaagcctgccattcaacactgatgacatctcagtcgtgagccgcacagtgggctgagtcctggtcactgcacatctgcagccagctgtgcaatcaagtctttggcatcttgcatggtggagggtatctctgagccattcttagtcaggtaagggttccaaaccaagaacatcttcctgtcatttcccacttcagataatggccaaagcttcatggatatctgtaatgtgataggctgcttcaagatcctgtttgtttgcaaacacaaccagaggaagtactgggtttgctgcaattagctgatgaaggtatttcttggctttccaggtaatcggctgtgaatcctgcttgaatccaaccnagaaagatctagccagcgaatcccgttggataggtacatttcccagtaggaccgaaaaggtttactgccaccaatctccaggaactccatctggctgtcttcagtgttgatgcaaactgcatggaaaccttgggtgggtgccacactgtgctggactctgtttgaagctagagagtgcaggacactggtttttcctgctccatccaggcccagcactaggatttgcttgtttttctccagcggctcgagcggggtccttgtcaaggtgctgtccttgttctcccctttctcttcttgtcccttaaattgttccttctctttgtttgtctccttcccttgctttgtcctcttttcctctttctcttttccctttctcctctcctgcttctcttgcttttcttgtttaattttctgctccacctcctttcttttcactttctcttccctacccttttctccgattttctccttctgcgtctccttttccttctctttcttcttcactttccccctctccatccccagcgccgcggtttccttccctcccgccgcgtgcccgcgtgctgagcggtggctctgggccccaggtgtggctcccgaggtgcacgcccgacacgaaatcgtcgatnnngaattcagaaccggt

SEQ ID NO: 61193 - DNA, 1480 bp, Homo sapiens
  misc_feature (1)...(1480): n = a,t,c or g
ctcaagaggctgaggcaggagaatcacttgaacccggaaggcagaggttgagttgagctgagatcgtggcattgcactccagcctaggcaacgagagcgaaactctgtctcagaaagtatactctgggtctaataatctgcctccttcaggaatattcattcctcttgttgcccgctggatcccggcgctgttcatcggcttcagccagttctcggactcgttcctcctggaccagcccaacttctggtgccgcggggccggcaaaggcaccgagctggcaggggtcaccaccacaggccggggcggggacatgggcaactggaccagcctccccaccacccccttcgccactgccccctgggaggctgcgggcaaccggagcaacagcagcggcgcggacggaggcgacacaccacccctgccatcccctccggacaagggggacaacgcctccaactgtgactgccgcgcatgggactacggcatccgcgccggcctcgtccagaacgtggtcagcaagtgggatcttgtgtgtgataatgcctggaaggtccatatcgctaagttctccttactggttggattaatctttggctacctaataactggatgcattgctgactgggtcggccggcggcctgtgctgctgttttccatcatcttcattctgatctttggactgactgtggcactgtcagtgaatgtgacaatgttcagcacactcaggttctttgaaggattttgcctggctggaatcattctcaccttgtatgctttacgaatagagctgtgcccccctggaaaacggttcatgattacgatggtggcgagcttcgtggccatggcgggccagttcctcatgcctgggctagccgccctgtgccgggattggcaggtgctgcaggccctcatcatctgccccttcctgctcatgctgctctactggtcgtgagtacactctgcacagcgccctgggctggtgcgactgcacatgcttcctgaaggcccggccccgggcaggacacacaatccccacactttccactagttgcagcttgtggttctgtctgagaaggttttcctctctttttaaaaaattttattgtttaaactttctgtcttggaaaactgttcaaatatacacaaaaatagaagagtggaatgagcccatcacccagctccaaaaatctgcaaatgcactggccagtctggctcaccccttcttgctacccaccccacggggttattctgacatgaatttttatgaatggattgcagggaggtggagttcttgtgttaggaggggggatttggagatattaaaggagtgatttacaaaagtccccctatctcttctaggcgaggggtgggcaaccttcagcctgtgggccacatcaggcccactgtctgtttttgtaaataaagttttattggaacacnnnnnnnnnnnnnannnnnnnnnnnannanaaaaaaaaaa

SEQ ID NO: 61194 - DNA, 1690 bp, Homo sapiens
tttctgatactcagaagactcagagactgtcagtttaaaaaatgaaagtaatatagaaggggcaaagtggcatttatcattctatctctccaggctcctgtctctttaatcagctagcctgatttgcccagtaaatgattcctgagagtgtgtgtgcgtgtgtgtgtgtgtgtgtgcccgcgcgcgtgtgttgtagctctgtcaatccttggattagaaccaatgattgcagcttgtaggagggctgtccagggccagattgtacaatgtgtctcagtgccagagtatgagtggagataattacggagaagtcatactctctcacaccctcggctttcttgttgtgtccttcagcaaaacagtggatttaaatctccttgcacaagcttgagagcaacacaatctatcaggaaagaaagaaagaaaaaaaccgaacctgacaaaaaagaagaaaaagaagaagaaaaaaaatcatgaaaaccatccagccaaaaatgcacaattctatctcttgggcaatcttcacggggctggctgctctgtgtctcttccaaggagtgcccgtgcgcagcggagatgccaccttccccaaagctatggacaacgtgacggtccggcagggggagagcgccaccctcaggtgcactattgacaaccgggtcacccgggtggcctggctaaaccgcagcaccatcctctatgctgggaatgacaagtggtgcctggatcctcgcgtggtccttctgagcaacacccaaacgcagtacagcatcgagatccagaacgtggatgtgtatgacgagggcccttacacctgctcggtgcagacagacaaccacccaaagacctctagggtccacctcattgtgcaagtatctcccaaaattgtagagatttcttcagatatctccattaatgaagggaacaatattagcctcacctgcatagcaactggtagaccagagcctacggttacttggagacacatctctcccaaagcggttggctttgtgagtgaagacgaatacttggaaattcagggcatcacccgggagcagtcaggggactacgagtgcagtgcctccaatgacgtgggccgcgcccgtgggtacggagagtaaaggtcaccgtgaactatccaccatacatttcagaagccaagggtacaggtgtccccgtgggacaaaaggggacactgcagtgtgaagcctcagcagtcccctcagcagaattccagtggtacaaggatgacaaaagactgattaaggaaagaaaggggtgaaagtggaaaacagacctttcctctcaaaactcatcttcttcaatgtctctgaacatgactatgggaactacacttgcgtggcctccaacaagctgggccacaccaatgccagcatcatgctatttggtccaggcgccgtcagcgaggtgagcaacggcacgtcgaggagggcaggctgcgtctggctgctgcctcttctggtcttgcacctgcttctcaaattttgatgtgagtgccacttccccacccgggaaaggctgccgccaccaccaccaccaacacaacagcaatggcaacaccgacagcaaccaatcagatatatacaaatgaaattagaagaaacacagcctcatgggacagaaatttgagggaggggaacaaagaatactttggggggaaaagagtttt

SEQ ID NO: 61195 - DNA, 2649 bp, Homo sapiens
ttttttttttttaaatatttgatatttttattggaaatgtttttgttagtttgaggggaagggtatgaagacagatctcaaggtaaagtcagagagggctgtcatcagtatgctggggagtttagggacaggaggcattggtaggggattagatgtagcagcagtcaggctgggatcaagatgcctggggggacatcttgatcttggcctttcagggcaagtgggaggctagaaaggtggcctaggaaaagaaacaacaatccttcaggtaaagggtaatagacttgggatgtgaaggcgttatgctgaaaggttctgtcacgaggggatcagaggacagtggggaaattgggtgggttatctagcctgtactgtctgcaggtcctgaaatttgatgctgtcatagtctttgcagtgggtcggttggaatgattctgggggcagaagctcagagccccttagtaggaatggaggcggcccttctgctgccactgctcagccccctccactgcatgacgaagggtggaggaaattcccagcaacatatggcccaggccttgcagcagtgtggaggtccaacgaaggagctccctgagtactttctttgggccaaagtccttgaaagtcacaactcatagagtagagcccgtagaatgtggctttgacattcaggctgccaaagaggtctcgagggttttgcttgtacacgtcaaaggtgaatcgggcgatgtccttgctgtgcttgggcctctcccgtcccaggccatatgacagcactccactccttgtagggctccagctctgaccagactgcaacaccatcaggcacgtgtcatcctccagcagctggaagaagtcctcactgtccactgcagttccatcctcctctagcaccagggttagcactccattcagcagtagggtctccaatgctttggctagcagctcctggcgggtggcagctgtcaggcctttccggatggtccgcttgtgatcacagacacggaaaggtcgctggggtggtggagctgaggtccagaccctccgtccaaactccgagcttatattagatactgacctgagtaagtcactggggttcagagctgagaggtactccatggtggaccggagagttccttccctggaacttctgggctgggtggttctctcctgtgctggggctttagtggtgttttctgttacaaacctgggatctcagcccaggacaaggtgggaatgagtcaagcctggactctggcccccctgcctggccagtaagaagggcaaagtccaaggggagggatgagggaggggccagatggggtcctggaggaagaattgcctggcaaaagccattggagcttgtatgtgtgtctttggtgatgacatgtgttgtgagggtagatgggaaccatgtaaaaggatgaaatgtgacttctggtgtttttttatttctatggagggaatttctggggacggtttctggctctcaggctctgagaagctgcagtttatgagtggctctgtgtgtgctgccacctactggagaagccataagctgcagctttaggaaaagggaacccggggcagagtgtggggaagtgggatggcagcatggcagggctttggaaaatgagaggtgagagtgtgtccaggaagggtgtaaggagaggatggatcctgatacatggattcaggatcattagggtcctgtctgggacactggccttcctgcttacctgctctttccttcctccttggtcggaggaggggctggctcactgctctggcttcattttccagagctgcctgctgcagtcacacttaggtcatcttctctcacttttctccttttgccgattagtggacgtgacagagatgtgaatggggcagggatgtcctttgatggcatcaagactttagcttctggtgcgctgtgtcccagctctgatttcagttgcagccgtgatggacagttgcatggaagctgagactctcactgacagtgaaaccctcaaatgaacacaatccctgctttcctgccaaggatccttgtagggtcccccagcttccccactttttttctgtgtcctgacaaagaaacacagagtaacttgattgccctgtgacctggccagttgcatttcccctgcaggcttgagcccaagccagagccttgaaaaggtattcaggttgttgcccaaaacactgaaaaaaactggccctggccctgaaccaaataccttgaaccctcgtaaactccataccctgacccccttgttttggatatacccaggtagaacaactctctctcactgtctgttgtgaggatacgctgtagcccacgtcattaagtacattctcctaataaatgctttggactgatcaccctgccagtcttttgtcttgggcaatctatactttttctcagaggttcccaaggcctactgaagggacttaacatactcttaatggctttcctctctgcttgttttaccttatgccctcacttcctgagttaacctcccaaatacagggttcacctgtacccaagcccttagctcaagaatacaggatcacctgtacccaagcccttaggctcaagctctgctttggaagaacccaaactaagacagtgctcccggaatt

SEQ ID NO: 61196 - DNA, 718 bp, Homo sapiens
cgatggtgaactgctaactaccgcatcccgatggtgaactgccgaactctaccgcatccctatggtgaactgctaactctgccgcatcccgatggtgaactgcctaactctacctcgtcccgatggtgaactgcctaactctaccacatcccgatggtgaactgctaactctgccacatcccgatggtgaactgctaactctgccgcatcccgatggggaactgccaaactttacctcgtcccgatggtgaactgcctaaacctcttcccgatggtgaactgcctaactctaccgcatcccgatggtgaactgcctaactctaccacatcccgatggtgaactgctaactcagccgcatcccgatggtgaactgccaaactttacctcgtcccgatagtgaactgcctaactctaccgcatcctgatgaactgcttaatggcgttgtccctgggtacacattgggtgcagctcctgcagtcatgggctgctcacagccgtggcccttttggcacaaccattgttccttcttgtcttggaaacgaggacccgagggagaccatccgtccatcctaaaattgggacgtttggttttctgttgttgagttggagttatttgtagagtctagagatcagtctctaggagacgtgtgatctgcagacatttccctccatctctgggttgcatttttctgtccattgatggtgtccttcgatgg

SEQ ID NO: 61197 - DNA, 6531 bp, Homo sapiens
tcacagctgtacaaacttttttaaaaacaaggttttgttacaaaaaacagttctgaacagttaacattgtaaaaaggtataaaaatacagggactctgagcactctgaggaatttcccgacacatgctcttaactaaggcggagagatctctgggaagccgaagtcagggcctgggcctctgacccctgccctgggcctggtctccctcctctttcccacgatcccatgctccagggctgaccagagacaagggctctccccaatcctggctacggctcagcctctcaaggaggaactttaatgatctacagtggctcatcctagaagaggggggctggactgcaggtgttgctgggaagcctctccaggcctggagctggagtacccgtcctcagcactgccagcagagcgcctcctcatcccaccccagcttgaggcccccaagggaccgggctctgggggggggggctgtccaaaagaagggtcctcccctgtcccaggcacaggggtgttctccagatgccagcaggagctcatttctctggggggccggagggtggggagaagggtgctgagctccttcgaagctcctgctgcagctggcccttcagtgtggacaccctctggcggtgggcccgctcccgagcctccagggtgcgctcagtctgcgcctgggcgctgcgcagccgctccacctcctgctgcagctccagctgctgctgctgcgcatccacctccagctgggccgggctgtggctctgctccagcaccaccacctgcgcctccagctgctggatctgcctctgcgcctctgccagctccagctcagcccccgtgagggtgcggtccaggcggcccttctctgcgctcagccgcactgtgtcctcatggctacgaagcttctcccgctccaccttgtccagcgtcctcctgagggctacacggtccttctccagccgcagggctgagcgctccacctcccgcttctcagcttccagctgagccagggcgcgctgcaggcttcccaggcgctcctgcagcagccgccgctcgtcttgcagcttctggacggtgttcagggctgcagcctcaccctcctgccgctgccgcagcacctcccgtagctgttgtagctggccctcggcctccacccgctgcagttccaggtcagccacctcgcctcgcaacgtctgcacctgctcgcccagggagctgctctgcttccgtgcctcagataatgcctgccgggcggcatccagccgttcctggagtacttggcggtcatgttcacaggcggtcagagccttctgcagatgcaggttcttgtcccgggtgctgttgaggctggcactgctctgggccagggcctctgtcaggccccgcaccttgtcccgcagggccccctcgctttcctccaccttggccagggccccattcagccgctccacggtcagctgcagggtccctgccttcacctcgctgtcggccacctgtctctgcagggaatccacccgatcctggagggcctgggcttgggcctcgcggtcactgaggcccaggcggctgcgctgcagctccccctcaagcgagcgccgctgcagctccagcttgacagtgcggctctcggaggcgtccagaacctccttcaggcgccgcttgtcgccctccagctttgtctcattggccttcatcttgctgatcttctcctggctggcccggagctcgctctcggtggcctgcaggctcctctccagtgtggccacctggtccagcgtggcccggcgctcccgctcactgcgccgcacactctcctcctgcagcgccagctccgcctggaccccgctcagccgcccatccacactgcgccgggcttcctcactctcagccaccgccttctgcagctgcctggccctcgaggttgcgctgtccctctcagcctccatctcggccagctggcgattcagggcactggtctgggtccgaagttcgtcccgttctctctgggcactccgcagctcttgcaggaattcccggagggccccgcgcactgcctccgggtccaggtctggagaggctggggaggtggcaggtcctggagatggtggctgggacccagggctgcattctaaggtgctggggctgttgagcccttccccgcttccttctgcgggtgcgtcccgggcaggggaaccgggcactggccgcggggctgggctgggcgcgcgaccgaggccgaggccccggcgcagagccgagcgcaggccacccagctgggcctccgccgcgcgccgctgcacctccacgcgggccagctcggcctccaggccttgtgcccggccctcggctgcgctcagccgcaggcccagctctgcggcctcggcccgcgccgcctccagcttcagctccaggccgcgggcgtggtccagctgctgcttttcagtgccacgcgcctcctccagggagcccagcaggcgtcgctcgcgggtccggaactcgccttcttgttcctgcagcttccgctgggctacctggagctcctgccgcatcacctccaggctggcctcgcccttcagcagcctctgccggaggcccagggtctcccgcctgctctccttctctgcccgctcgcccagcgccaggcggccctgcagctccgccagctcccggcccagtctggtgttctcactgtccagcatcttcatctgacgccggagctcctgcagctcccgccgagcctccagccgtgagcgctccacctcctgcagcccagttcgcagctccccggcctccttgcccacagctgtccgtgcctcctctaggagtgccagcttctgctccttgtcctcattggcaagcttcaggctgatgcgctcgctctctgccttcttcacagcagaccgaagctcctcattggaacgccgcagggcctcgcgctccttggcaccctcgcccaggctgcgtcgcagctcgcctgcctcctggcgctgcacctcccggccctcctggctctcacgcagcttgcgctgggcctccagcagctcccgccgcagcccgtcacgggcatcctccagcagacgcagctgggtccgaagctcttctgcctcgcgaagacaggagtcccgctgcttgcccaggtctcgggcctgctcttgcagcctcctcacctcctgggcgtgggccgcagcagcctcctcccgctgggcccgtaggtcccgcagctcagacgtcagagcgttcacggtgctccggtcctgctcctgccggctctgggcatctggtttctgccgctccatctccagggagatggtggccaggctgtgccgtgtacccatcaacttctctgacagcgccatcttctcagactccttcagagacaaggcctgctgcttctcgctctcggccaggaggaggccctcgtcatgctcctgctgcagggcagcaatctcctcactcagctgttccttctcagccttccgccgggccagcagctcctcctgctcacgctgcagctgactctgcagctgggcccgctcggcctccagctcccgccatgctgcctccttttcacgctggagtcgctgtaagtcctcctcgtgagctgcccgctgctcccgcagagaggcctgggcctcccgctcagcctgcaccagcttctgggccatcagctccttgtctagactggctttctcctgtgtagctattatttgctgccgcaggcccgccaactccccagtcagggtctccttggccagcagcagggcctgcccctcggcttccagctgctcccggcgggcctcaagctgggccagctgccgttgcacctcaaacaggctgccctccagggcttccttctccaagcgcaggcgtgtggcctcctctgacagggtcctgccttcacgctccgcagccaccagctgcacagccaggccagcgtgctccttggctagcgcctccttctcacgggccgctcgctccagcgcctccacttgccgctgggcctcccgccgggcctgctccagctcctgctcccgcccgctcagctgccgggagagctgcgctagctgctcctgcagctggctgcgctcatggcgcagcgtggggagctgttgttccagcgcctcctggggcctcgtccgccactcatacgggagccctccaggccctgccgtgccacctcctgctccaaccacagctcctccagccactcctgctctgccggcgccactgtggcctcctgctccgcctgccgctgccggccctgcagcatggccttttcttcctccagctgggtgacaaggcagttcagatccaacttgtcctgagcaaggctctcgttgagggcgctcagcttggacagggagtcctgcagggaggcctcctctgccctcagcttggtcacggagagctcgagctccatgcggccagcctcagccttggtcagcgcctcggccacctcggtcttctcggcctgcagcatgtcccgttgcagcgtggcgcggctcagcgcctccctcacctccaccagctccttggccaggactgagcgcttcccttccagctgctctggttgtctatggctgtgggacaaagggtgggtgggtggcccatgtcactttcctgccccgaacctcctgtagccagcgagatgctgggctggggaccaggcctgaggcaggagtttggagagaaacagcctgagccacagggcaaccaagcccactaccgcttagctccatgaccctgggcctccgttttcacatctgcaaaatgaggtaacacttacctcgtgacattgtttgattttttgagacagagtcttgctcttgtcgcccaggttggagtgcagtggtgcgatctgagctcactgcaacttctgcctcttgggttcaagcgattctcctgcctcagcctcccaagtagctaggactacatacgtccgccaccatgcccagctaattgttgtatttttagtagagacagggtttcaccgtgttggccaggctggtcttgaactccttacctaaggtgatccacctgccccagcttcccaaagtgctgggattacaggagtgagccatggcacctggcctagggttgttatatgtttgacatccgtcccatttgggaggccttctcatcagtcattttatgcctttaatgccattctaggtaggcaggaaaggggtcagggccagtgggcccatgtagcagatagggaaactgaggcccagagaggacaagccacttcttcaagaggacccaaactggatgccaggcaggccctctgcctctgggattttgcccatatggctcaactggcctaagtctgctggcccaaggaaaaatttcaacccaaccctgccctttcccccattcctctcgtgcaggggagttggcgggcctgcggcagcaaataatagctacgcaggagaaagccagtctagacaaggagctgatggcccagaagctggtgcaggctgagcgggaggcccaggcctctctgcgggagcagtgggcagcccaggaggaggacttgcagtgactccagcgtgaaaaggttcaggcagctggggaggggtgggcagaagtctgagccagtgtttcatcatcgttcttgctctgcctcggtctgtacatctgtgaaatgggactccctctctgttgtggaggccctggggacagctgggaggactggaggggtggtggggaggttgtggtccttattagacattcagatacccaggtcccaaatctggtccagccctggtaatcctgatgcagagggtccacaaccacatttgggaaatgctgacctaatgtacagcaggaaagcactttcatttgctaagaagtttccatatgaagggccacgcagacctgagcatgtagaaaggcaaggggccagggaagttactagaacactgactctggggttatattgcctgggtttgaatctaatcttggtcgcttactggtgatgctacccaaggtgtctgtgccttcatttccccacctgtagaaatagggataggatagtggaaggtattgaggatgagctgagaccatctgcatagagggcttaacatagtgactggtacttagcaaatgctccatgagttatgattgctggcactggcatgctctccagagtggccctcaggacaggggccctcagccaccaaatcctagacaggacttcctctgacagaggtgcaggctatgactacatggctccagggcatgccactcaccctgcagtccccgtggccttgggtggtggttatcacgcttctccatcagggggcggtaaagctctttccgaaagtgctgggattccaggcgtgagctatggtgaagctcttaaagaaggggtggcttggccaggcgtgctgactcatgcctgtaatcccagcactttgggaggctgaggtgggcggatcacgaggtcaggagatcgagaccatcctggctaacacagtgaaaccctatctctcctaaaatcacaaaaaattagctgggcatggtggcac

SEQ ID NO: 61198 - DNA, 827 bp, Homo sapiens; identical to SEQ ID NO: 60912
  misc_feature (1)...(827): n = a,t,c or g

SEQ ID NO: 61199 - DNA, 2346 bp, Homo sapiens
  misc_feature (1)...(2346): n = a,t,c or g
gcggccgcctgaggcgggcggtcggtatagagcgggcggcaggaggcaagcagcgaaaccttcccggccgccgctcccgtcccgacggcggcttccccaaggcggcaggactcggcgcgccatggacaggccggcggcggcggcggcggcgggctgcgagggcggcgggggcccgaacccggggccggcgggcggcaggaggcctcctcgggccgcggggggcgccaccgccggctcccggcagcccagcgtggagaccctggacagtcccacaggatcacatgttgaatggtgtaaacagcttatagctgctacaatttctagtcagatttcaggttcagtgacatcagaaaatgtgtccagagattacaaggctctaagggatggaaataagctggcacagatggaagaggctccacttttcccaggagaatcaattaaagccattgtgaaagatgtcatgtatatctgcccatttatgggagcagtgagtggaaccctgacagtgacggactttaagctgtacttcaaaaatgtcgagagggacccgcattttatccttgatgttccccttggagtgatcagcagagtggagaagattggagcacagagccatggagacaattcctgtggtatagagatagtgtgcaaggatatgaggaacttgcggcttgcttataaaacaggaagaacagagtaaactagggatatttgaaaacctcaacaaacatgcatttcctctttctaacggacaggcactatttgcattcagctataaagaaaaatttccaattaatggctggaaagtttatgatccagtatctgaatataagagacagggcttgccaaatgagagttggaaaatatccaaaataaacagtaattatgagttctgtgacacctaccctgccatcattgttgtgccaactagtgtaaaagatgatgacctttcaaaagtggcagtttttttagcaaaaggcagagtccctgtgttgtcatggattcatccggaaagtcaagcaacgattacccgttgcagccagccacttgtgggtcccaatgataagcgctgcaaagaggatgaaaaatacttgcaaacaataatggatgctaacgcacagtcacacaagcttatcatctttgatgctcgacaaaacagtgtcgctgataccaacaagacaaagggtggaggatatgaaagtgaaagtgcttacccaaatgcagaacttgtgttcttggagatccacaacattcatgtcatgcgagagtcactacgcaaattaaaagagattgtgtacccttcgatcgatgaggcgcggtggctctccaatgtggatgggacgcattggctggaatatataaggatgctgcttgctggggcagtaagaattgctgataaaatagaatctgggaaaacatctgtggtggtgcattgcagcgacggttgggaccgaacagcccagctcacatctctggctatgctaatgttggacagttactacaggaccattaaaggatttgaaactctcgtagaaaaggagtggataagctttggacacaggtttgcactgcgagtgggccatggtaatgacaaccatgcggatgctgaccgatctcccatatttctgcagtttgttgattgtgtttggcaaatgacaaggcagtttccttcagcattcgagtttaatgagctattcttgattacaattttggatcacctttatagctgtctttttgggacctttttgtgcaactgtgaacagcagcgattcaaagaggatgtatatacaaagacgatatctttatggtcgtatatcaatagccagctagacgagttttctaatcccttctttgtgaattatgaaaaccacgtgttatatcctgttgctagtctgagtcatttggaattgtgggtaaattattatgtacgatggaatccacggatgagacctcagatgcccattcaccagaatctcaaggagctgctggccgtcagggcggagctgcagaagcgtgtggagggtctacagcgggaggtggccacgcgcgccgtctcatcctcatctgagcggggctcctcgccctcccactccgccacctccgtccacacctcggtctgatgggcgaggtcagcctgctgctccactgtctcccggtggctcaagaaagggacctggcgatcactgttatggctgtagcttgtgatcttgtcttttaggattaggcccagggaccatttgtgtggctaggtgacagctcccactgttggcaaccgttaccctcctgtcagcggtttcacaggggagccgtctgtnacggccaccctgtgaagcaacttctggcatt

SEQ ID NO: 61200 - DNA, 1312 bp, Homo sapiens
cctcagaagtaagcaaggtttcctgccgggagaaaaggatttgaagcattccagccaaaatgacggacagaagccccttcgaaaccgacatgctcaccctgacccgctacgttatggaaaaggggcgtcaggccaaagggactggggagctcacccagctgctgaactcaatgctgacggccatcaaagccatctcctcggctgtgcgcaaggccggtctggcccacctgtatggaatcgcaggaagcgttaacgtgacgggagatgaggtgaagaaactggatgtgctatccaattccctggtgatcaacatgctccaatcctcctatagtacctgcgtcctggtctcagaagagaataaggacgccatcatcaccgccaaggagaagcgggggaaatacgtggtctgcttttgacccactggatggatcttccaatattgacttgcctggccttccatcggaaccatcttttgccatctatagaaaagacctcagaggatgagccttctgaaaaggatgccctgcagtgtggccgcaatattgtggccgcaggttatgcgctgtacggtagtgcaaccctggtggctctctccacagggcaaggcgtggacctcttcatgcttgacccggctcttggtgaatttgtcctggtggaaaaagatgtcaagattaagaagaaaggaaagatttacagcctgaatgagggctatgccaagtattttgatgcggccaccactgaatatgtgcagaaaaagaaattccctgaggatggcagtgctccctatggggccaggtatgtgggctccatggtggctgacgtgcaccgcaccctggtctatggaggaatcttcctgtacccagccaaccagaagagccctaagggcaagctccggctcctgtatgaatgcaatcccgtggcctacatcattgagcaggcaggaggcttggcgaccacggggacccagcctgtactggacgtgaagcccgaggcaattcaccagcgagtccccctcattctggggtcaccagaggatgtgcaggaatatctcacctgtgtgcagaaaaatcaggcaggcagctagcgagtttgaccccacatgccctcttctgtttgtcttgcaccttgtctaaggaccctaaatgaacgataaacagagatggtagctatgagtatacaaaaggtaaatccacttaatcacatacagaagagcaacaacaaactgcttacgacaggtttggaagccacaggcgattctatggtcaatgtgaaggactagaaataaaaacccacatgtggaaaaaaaaaaaaa

SEQ ID NO: 61201 - DNA, 1923 bp, Homo sapiens
  misc_feature (1)...(1923): n = a,t,c or g
agcttttgcgccgccgcgatgtttccccgcgagaagacgtgtgaatcatctcgttcgcgggccttgcggcttgggtgggcgtctacttacgtcggcgtggccctcctgcctccgcgagcacgcgccccttcctggtggccaacgccacgcacatctacggcgcctcggccgggggcnttcacggccacggacgctggtcaccggggtctagcctgggtgaggctggtgccaaagttcattgaggtatcttaaagaggcccggaaagcggttcctggtgtcccctgcacccctccttcaacctggtaaaagatcatgccgcagtttcctgctgaaggtcctgcctgctgatagccatgagcatgccagtgggcgcctgggcatctccctgacccgcgtgtcagacggcgagaatgtcattatatcccacttcaactccaaggacgagctcatccaggccaatgtctgcagcggtttcatccccgtgtactgtgggctcatccctccctccctccagggggtgcgctacgtggatggtggcatttcagacaacctgccactctatgagcttaagaacaccatcacagtgtcccccttctcgggcgagagtgacatctgtccgcaggacagctccaccaacatccacgagctgcgggtcaccaacaccagcatccagttcaacctgcgcaacctctaccgcctctccaaggccctcttcccgccggagcccctggtgctgcgagagatgtgcaagcagggataccgggatggcctgcgctttctgcagcggaacggcctcctgaaccggcccaaccccttgctggcgttgccccccgcccgcccccacggcccagaggacaaggaccaggcagtggagagcgcccaagcggaggattactcgcagctgccgggagaagatcacatcctggagcacctgcccgcccggctcaatgaggccctgctggaggcctgcgtggagcccacggatcctgctgaccaccctctccaacatgctgcctgtgcgtctggccacggccatggatggtgccctacacgctgccgctggagagcgctctgtccttcaccatccgcttgctgggagtgggctgcccgacgttcccgagggacatccggtgggatgaaaggagcagacggggcagcatctgccaggtacctgggtgatgcgcgccaagaggaagctgggcagggcacctgccctccaggctgccggagcaggtggagctgcgccgcgtccagtcgctgccgtccgtgccgctgtcctgcgccgcctacagagaggcactgcccggctggatgcgcaacaacctctcgctgggggacgcgctggccaagtgggaggagtgccagcgccagctgctgctcggcctcttctgcaccaacgtggccttcccgcccgaagctctgcgcatgcgcgcacccgccgacccggctcccgcccccgcggacccagcatccccgcagcaccagctggccgggcctgcccccttgctgagcacccctgctcccgaggcccggcccgtgatcggggccctggggctgtgagaccccgaccctctcgaggaaccctgcctgagacgcctccattaccactgcgcagtgagatgaggggactcacagttgccaagaggggtctttgccgtgggccccctcgccagccactcaccagctgcactgagaggggaggtttccacacccctcccctgggccgctgaggccccgcgcacctgtgccttaatcttccctcccctgtgctgcccgagcacctcccccgcccctttactcctgggaactttgcagctgcccttccctccccgtttttcatggcctgctgaaatatgtgtgtgaagaattatttattttcgccaaagcacatgtaataaatgctgcagcccagaaaaaaaaaa

SEQ ID NO: 61202 - DNA, 1282 bp, Homo sapiens
cggcaccgggctcctcctgctgctgggacagtgctctagtacaacagacagacctactgacacaggggaggtgagaagggaggtgaccaccaggactggctctgtgagtactacacagtggggagggggtgggggccaccatgtcatcatatcagaaggaactggagaaatacagagacatagatgaagatgagatcctaaggaccttgagccccgaggagctagagcagctggactgcgaactacaggagatggatcctgagaacatgctcctgccagctggactaagacaacgtgaccagacaaagaagagcccaacggggccactggaccgagaggcccttttgcagtacttggagcaacaggcactagaagtcaaagagcgtgatgacttggtgcccttcacaggcgagaagaaggggaaaccctatattcagcccaagagggaaatcccagcagaggagcagatcaccctggagcctgagctggaggaggcactggcacatgccacagatgctgaaatgtgtgacattgcagcaattctggacatgtacacactgatgagtaacaagcaatactatgatgccctctgcagtggagaaatctgcaacactgaaggcattagcagtgtggtacagcctgacaagtataagccagtgccggatgaacccccaaatcccacaaacatttgaggagatactaaagagggtccgaagcaatgacaaggagctggaggaggtgaacttgaataatatacaggacatcccaatacccatgctaagtgagctgtgtgaggcaatgaaggcaaatacctatgtgcggagcttcagtctggtagccacgaggagtggtgaccccattgccaatgcagtggctgacatgttgcgtgagaatcgtagcctccagagcctaaacatcgaatccaacttcattagcagcacaggactcatggctgtgctgaaggcagttcgggaaaatgccacactcactgagctccgtgtagacaatcagcgccagtggcctggtgatgcagtggagatggagatggccaccgtgctagagcagtgtccctctattgtccgctttggctaccactttacacagcaggggccacgagctcgggcagcccaggccatgacccgaaacaatgaactacgtcgccagcaaaagaagagataacactgcatttccctttaccaactagcgctgggagcactggacacttaaatcctcatctgtcctcctttcctgtaaataaaagcccttctatccaaaaaaaaaa

SEQ ID NO: 61203 - DNA, 2122 bp, Homo sapiens
ggtgtgtgtgcactgtctggtcaagagcagtgtccatttgcttttctgtggcaacagtgcacgtggggtgggtggggggtgcgtacggtggggcttgtaggttaagatgtctctgcggtggtgttgtggggctggaggccgagccaggcacggcagctggccctctccaggcgcatggaggaattctccctttgccgttccaaggatgccgccgcctcctaccggggctcccgggggggtcagccaacactacaaagggcagcgagtcctcagggcgcccgggagccaccagtctgctctcgggctctactcagactagcgccaacagtctccgcggacagactcgcatcagccgccctggggctcggcctcctcccataggctcctcttcctctctttcattcaagtcttcaaactttgaaaaaaatatgagcttttgccaaataagacgggatagtttatggagttttctgaggcgcattgaactctggtcagcccctcgagcgtgggctcggccatcagcaggcccggtgggttggccgggctggccctcccaggctgcctttctctctggtcgcggcctggcccgccccggcctccaccgccgcaattcatgctggtgccgcgcccgcagccccactcctggtatgcctgagattctccaggggccaagccggtcctccttcccggcccactcttccagggccaggacgctcccgcggagccagcccatcgtggctgggggtcccaggggctggaggcctgcctggttagcctctgtttcccagacattgactcgaggcgcctccagtcctctcaaccccctgactttcaagtcctttcaagtccttgtgccctgaccaagttatgaggaaaagagggctgagggcctggaggtgggctcgcaccccctcgaacccacctagatgtctcctcctccccagcctatgagttcagacttggggggctccatctgtccctccctgaggtccctcatcttgtccctgctctgattctgtcagcagatcctgaacactccttggtggggacccatgcctccaaggctgcccccaatgccagctgtcctggggaaactccccagaactctcggggaaaggcccgagaaccttcggaggaagcctccgggactcctcgccacctgctctgtttctctcccggccccactgccttcaggtatcaggaagagggcaggcccctgtgccccctctccccttcccagggcggccaacaatactccaccatggggcgcttcctttcttctctggaaactaagacattggactgaaggaactggcctgaggggggctgaccgggggcccgtgctgctgggagctctacgcacaagaggccgccggggtcacggacaggaacctcagcccagggtgctggcctttctccttcgcaggagtcccccaaaatccacacagcgactcgagcagccttccactcagccagaggagggtcgggctcccccgcctgctctcggtggtggcgtctggcccttcctgccgtttccaaggcctccggaagcaccaacccagttctcagttacctcctctggccggaaggcctcacgttgtcctccagagctgctctgggcccagggctggctccgtgaccacctgatggacgtgctgggcagcatgggctcccaaggcagcatccccagctgctctcccaccccaccccagctgcccggcggctgggcccacgagggctctggggacacttccataggaaaggggcctggcactttgtgattgccacgtgtttcctgttaagccgcctgcccccagtgcaaatctctgtgttttgctctctcctgaacaaaaatgtaaaccgacgccggaaagcaaatggtatcgaatacctttcttgcccataagggtttttacaaagaacgtgtctcactaggaactaggacactcatcggcccgagaccaactcctggataaaaggaataaggagaatcgtgtttgtaacgagttacaggattgtttctttcctggattttaaacttttgttaaattgtgaaattatggaggagttttatagaaaaaaaaagtgaaataaagtcagatgggaaagcagaaaaaaaaaa

SEQ ID NO: 61204 - DNA, 1541 bp, Homo sapiens
  misc_feature (1)...(1541): n = a,t,c or g
gtttttttttaagattccacttctcagtttatttctggggactaaatttgggtcagagcttgcagagaagggattgggccctgagcttgaggatgaaagtgccccagggagattgagacgcaacccccgccctggacagttttggaaattgttcccagggttcaactagagagacacggtcagcccaatgtgggggaagcagaccctgagtccaggagacatggggtcaggggctggagagatgaacattctcaacatctctgggaaggaatgagggtcctgaaaggagtgtcagggctgtccctgcaagcaggtggggatgccggtgtgctgagtcctggggatgactcaggaattggcctggatggtttcctggatccactttggtgaacttgcagaagttcgtgtagacaccccggtcttgtttgggcccgggcacaagggtaatctccccaggacacgagtccctgcagggagccattgcagaccacaggccccccagaatcaccctggcaagagtctctacctgctttgtcaccggcgcagaacatggtgtcatctatctgtctcgggtaagcatcctcgcaccttttctgacttagcacgctgatattcaagcactggaggaccttagggaagtgcacttgggggctcttggttgtcccccagccagacaccaagcactttgtcccagcagagggacaatgagaggagacgttgatgggtctgacatctttagtgggacgaattcttctgttcagtttgatgagcatgaggtcgttagagtggccagggtgggagtagccagggtgggggatggatttgaccccctggaacatctgctgcccagattcataaactggtgacagggagtagtggccgagacggactctgaaaactttcttcctgcagtgggcggccgtgagcagccactgtggatgcaccaacaccgccccgcagtagagctggttgggccttagcaacagcgcggcctgccacggctgggtgtgcatatcgcagtcggatccattgatgatgcggctgctgctgtcatccgaccgggcgtcttccccggccccagctcccaggtcctggttgctcccagagggcacggtgttagaggggtggtcacaggaaacatcattgttggcgagaacatgctctgtgacccccagaagcaaggctgtgatcagagcacagagcacccacatccaggggggtcttgctgtagccatggccgctgcacctggatggggaatgtcagagggttgggaggcccaggcgatccggggagcccttaacccacttcccctccctcccctaccttatttccccaggtagagaggaaccacaaggacgggccaccatcggcactgcgctgagacccaggcactatagaattcagaagataggagtctagcagcctccagacagggcaaggaggggagnagaaagatgtgggtgcaggacgcacagacacctctccttccctgcctgntgaggaattcctccgctctgggctagtggtcatcgatttccat

SEQ ID NO: 61205 - DNA, 1437 bp, Homo sapiens
gccccataaaaaaaatttttccttgccagcccgggtcgtaaaatttgttccttttaaacggcccccccttttttttttttttctggctgcaaatcgtttttatgggaacctgcagggtgacccggcaccttgctaactgggcttagagtctaagggcttgggggctgcatctgatacaggttggagtttggggtgggagagtcctaggaagggggccccaagtagaaatgagagaaatcaggaagggatatcgggggcgtccacgggggtgctccgactggccttgcacccgtaccccagctctgcaccccccgtcacgagcagttcaatgcccgtgcagaagttggcttcggaggccaggaacactgccgcagccccgacctcagcgggctggcccatgcggcccagtggctggatctgaaccccacttctacctgggccagcatgccctctcggattgtggccctagggtctggcattaaggctgccagctcctcccacagcggggtccagatgtttcctggggagatacagttgactcggacaccatatggactttcatccagggccaaagctttggtcatggctgttactgcccccttggtggccacatagggaactgcctgggcctggccgattgcccccaccaggctggagatgttgatgacattcccttgactcttccgcaggtaggggagggcgagcttggtcaaggtgtacgtccccagtaggttcagctccagcagctggcggaatccctgggcagaggtctcctcaggcctctgtgggggtgggtggtggccagcgttgttgacaacacaatccaggcggccaaatcggcggatggtctcagaaaccagggtcttcacatcatcttcctgagtcacatcacagaggataaagacagctccagggagctcctgctccagggcccggcccccagactcatccttgtcgcagataaccactcgggccccgctgttcacgaaggcgcgcacgatcccagctccgatgccgcgcccgcccccggtcacgaccaccaccttcccggcatagcgcgttcccgtagccatcccgtgtacgtcggtctctctctctctctactctgggcctctttcacctccaaagccccgtgaggccgtcgcatcaaatcctcaatagaggctggatcctggaagtccggcctcggggggcgttgccaggaaggctagagacctggaagtttgtccccagcccctcctccctcagacactcctctcttcccacagacccaggaatccaggagccccagtccctcctcccacagacccaggaatccagaagcctcagtccctcctccctcagactcgggagtccaggcccccagcccctcctccttcagattcgggagtccagcaacccagcccatacatccctcagacccgggagtccagcctc

SEQ ID NO: 61206 - DNA, 1013 bp, Homo sapiens
gctcgactttttttttttttttttttttttttttgcaggaacactatatttattaggtcaataattcatttttagcaatacaagtacagaatatatcacaatgctggttacaaacatacttagtatggtttaatagttacaaataacggtgggcactacaagttggtgagaatgatgaaaggtcatcctgacacaatgaagaaccgtcttcaaaaatctatttaatgaccttagatatttctatagaaattattgtggcactattagtggggattttcacgtaaagattgttagtgttttgtttttaactgttccattaagaactttttattttgagcctattaaactaaaatcccctgttgcttaataaagtataaaaatagtactgacctggtaatatttaataaaacgtagcattcattcacatcataaaagtagaactgaaaagttttagttaccatggcaaaatatcttcccataaaaggaatatacagaaatgagtaatgttacacaaacggtacctgcaatggttatttagtgatccaacacttaactgtgcaccacaaaccaagttttctagatatctatatataggatatatttttaatcttaaattttactcttgaaaaacatgtgcacttcaacaaactcactaaggccactcatgctatagatacctaggattgcaattaaagaatagtattatgcaataaatcctaaagcacactccttctgattatcaacagggtaaaaccagttttctgcctaaaacattcctgagatttatggacaaaagaagtactgttgaagctggagattaatccaaatgtcatattaacaacaaaaaatttcctagccaggcgtggtggcaggagcctgtaatcccagctactcggaaggctgaggcaggagaatcgctggaacccgggaggcggaggttgcaattaaccaaaacggtgcccttgccctcccagcctgggcaacaaaaaagaaactccgttttaaaaaaaaaa

SEQ ID NO: 61207 - DNA, 1478 bp, Homo sapiens
ttttttttttttacgattttcaccaactttattggctcccgccgggaccctcgccgcccacctccccgctagatgtcaccggccctccatgacatccagcacattcaaaagcattgcggcgacgaccatgaaaaagggcctttgctgggcggagccagctccctgagggcgggcgtcaggggtcatttgctccttcgtccttctgactctccgtcttcttgggcagcagcacggcctggatgttgggcaggacgcccgccctgagcgatggtcactttgcccagcagcttgtttaactcctcgtcgttgcggatggcgagctgcaggtggcggggaattatcctggtcttcttgttgtcacgcgcggcgttgccagccagctccaggatctccgccgtaaggtactccaacaccgccgccaggtacaccggcgccccggcgcccactcgctccgcgtagttccctttgcgcagcagtctgtgcactcggcccaccgggaactgcaggcccgcgcgggaggagcgggatttggcctttgctcgcactttgccgccctgtttcccgcgaccggacatgatcacctctcgcctacaactccagagacggagacaaaccgctctcggcgtccggtaccggaatgcaacgtaccgcacccgaactgcctctacaaactctttacggccgcgcggcagcccctttccattggctctggcgaccaatgacaggcaagctccgctcccaactagcgctctggaagagagaccgcctcctccagctctctccaatcaatagagcaatctccgaatcctcatttacatagccgctcacataaataacgaggccagccggctcagtctttggggacccagatgaatttagcgggtacgggtttttcacgaccacgctcgcttccaagcacataaactcgtaggaaataagaaaacatggtttgaaacagaaaacaatccagaagaagagctacaggggttgtccgtagacgttgctatgctaagtggatgttctcatataatacaccgtactactcaggtaggtttctgtctccgcagcccgtgctgcttatgcgaaacaacagcctgtccgcggaattctgcctgcccaggacagggtccgtggactgtttcttatacaagcgccttgcctccagctagctacccaacagtgtagagaccaccctggtctccccgcagggtcctgcggctcacagccagccaatcgttcacttttgagtctgaagctagagtgatgaccagacgtgaatgcttcctgtgctgacgggaggaacaagctcgcctagccaaaatatcttttgtctttgaggctatgggcctgcaaagagccactaggttttattggagaggccaaagtcttggccttggcttgctccccgcaagccagggcgccacagatcagcggatcgggtcctctgggaagacgtggaggtcccccgggtctctttg

SEQ ID NO: 61208 - DNA, 3380 bp, Homo sapiens; identical to SEQ ID NO: 60922

SEQ ID NO: 61209 - DNA, 1610 bp, Homo sapiens
tttcgtcagggcgcaggcgcgcgggtcccggcagcccgtgagacgcccgctgctgggcgcgggtagccgtctgaggtgccggagctgcgggaggatggagccgctgaaggtggaaaagttcgcaaccgccaacaggggaaacgggctgcgcgccgtgaccccgctgcgccccggagagctactcttccgctcggatcccttggcgtacacggtgtgcaaggggagtcgtggcgtcgtctgcgaccgctgccttctcgggaaggaaaagctgatgcgatgctctcagtgccgcgtcgccaaatactgtagtgctaagtgtcagaaaaaagcttggccagaccacaagcgggaatgcaaatgccttaaaagctgcaaacccagatatcctccagactccgttcgacttcttggcagagttgtcttcaaacttatggatggagcaccttcagaatcagagaagctttactcattttatgatctggagtcaaatattaacaaactgactgaagataagaaagagggcctcaggcaactcgtaatgacatttcaacatttcatgagagaagaaatacaggatgcctctcagctgccacctgcctttgacctttttgaagcctttgcaaaagtgatctgcaactctttcaccatctgtaatgcggagatgcaggaagttggtgttggcctatatcccagtatctctttgctcaatcacagctgtgaccccaactgttcgattgtgttcaatgggccccacctcttactgcgagcagtccgagacatcgaggtgggagaggagctcaccatctgctacctggatatgctgatgaccagtgaggagcgccggaagcagctgagggaccagtactgctttgaatgtgactggtttccgttgccaaacccaggacaaggatgctgatatgctaactggtgatgagcaagtatggaaggaagttcaagaatccctgaaaaaaattgaagaactgaaggcacactggaagtgggagcaggttctggccatgtgccaggcgatcataagcagcaattctgaacggcttcccgatatcaacatctaccagctgaaggtgctcgactgcgccatggatgcctgcatcaacctcggcctgttggaggaagccttgttctatggtactcggaccatggagccatacaggatttttttcccaggaagccatcccgtcagaggggttcaagtgatgaaagttggcaaactgcagctacatcaaggcatgtttccccaagcaatgaagaatctgagactggcttttgatattatgagagtgacacatggcagagaacacagcctgattgaagatttgattctacttttagaagaatgcgacgccaacatcagagcatcctaagggaacgcagtcagagggaaatacggcgtgtgtctttgttgaatgccttattgaggtcacacactctatgctttgttagctgtgtgaacctctcctattggaaattctgttccgtgtttgtgtaggtaaataaaggcagacagtggtttgcaaaccgacaagaatcattagttgtagagaagcactgattataataaattcaaaatatttggttgaaaaaaaaaaaaa

SEQ ID NO: 61210 - DNA, 3401 bp, Homo sapiens
ttttttttttttaaatggaatctcactctgtcacccaggcgggagtggtgcaatggcttgatcttccgctcactgcaacctctgcttcccgggttcaaactattctcccgcctcaacctcccaagtagttgggattgcaggcacgcgccaccacgcccggctaatgtttgtatttttagtagagacggggttttgccatgtttcccaggctggtcttaagctcaagcgatccgcccgcctcggcctcccaaagtgctgggattacaggcgtgagccgatcggctcctggcctcctgcttctttcttccccgcgcccaatcatttgttcccactcagacgtgcttgattggcggtagcagctcttttcgtcatgaattggagtgtctgagacacaggcagattattcctcgatgctgtttctgttggtgctagctactggggctcgttccccacctggccttgctggcaggttctgcctcctctctgattctcacttgtgccacgacaggtgggctttaagctcagccgtgagcctggtagccgtgaccttgactcatttctccttcgccagctctttcctctcaggatcctgctctttccctgaaagagaatctcgaggatatatcgggttggggtcttcccgaagccaggtccaaggaatcggtgagtttcaaggatgtggctgtggacttcacccaggaggagtggggtcaactagactcccctcagagggccttgtaccgggatgtgatgttggagaactaccagaaccttcttgccctaggacctccactgcacaagccagatgtgatctctcatctggaacgaggcgaggagccatggagcatgcagagggaagtccccagagggccctgtccagaatgggagctgaaggcggtgccctctcaacagcagggcatttgcaaagaagaaccggcccaggagcccatcatggagcggcccctcggcggggcgcaggcgtgggggcgccaggcaggtgctctgcagaggagtcaggctgcgccctgggcgcccgcacctgccatggtctgggacgtccctgtagaggaattccccctcaggtgtcccctcttcgcccagcaacgcgttcccgaggggggacccttgctggacacacgcaagaacgtccaggccactgagggcagaaccaaggcccccgcgagactgtgtgcaggggaaaacgcctccacgccaagtgagccagaaaagttcccccaggtgcgccggcagcgcggggcgggcgccggggagggcgagttcgtgtgcggcgagtgcgggaaggcgttccgccagagctcctccctcacgctgcaccggcgctggcacagccgggagaaggcttacaagtgcgatgaatgcggcaaggccttcacctggagcaccaaccttctggagcaccggcgcatccacaccggcgagaagcccttcttctgcggcgagtgcgggaaggccttcagctgccactcgtccctcaacgtgcaccagcgcatccacacgggcgagcggccctacaagtgcagcgcctgcgagaaggccttcagctgcagctcgctgctcagcatgcacctgcgggtgcacaccggcgagaagccctaccggtgcggcgagtgcggcaaggccttcaaccagcgtacacacctcacacgccaccaccgcatccacacgggcgagaagccctaccagtgcggctcctgcggcaaggccttcacctgccactcatccctcaccgtgcatgagaagatccacagcggggacaagccgttcaagtgcagcgactgcgagaaggccttcaacagccgctcgcgcctcaccctccaccagaggacgcacacgggcgagaagcccttcaagtgcgccgactgcgggaagggcttcagctgccacgcgtacctgctcgtgcaccggcgcatccacagcggcgagaagcccttcaagtgcaacgagtgcggcaaagccttcagctcccacgcctacctcatcgtgcaccggcgcatccacacaggcgagaagcccttcgactgcagccagtgttggaaggccttcagctgccactcgtccctcatcgtgcaccagcgcatccacaccggtgagaagccctacaagtgcagcgagtgcggcagagccttcagccagaaccactgtctcattaaacatcagaaaatccactccggggagaagtcgtttaagtgtgagaaatgtggggagatgttcaactggagctcgcacctcactgagcaccagaggctgcacagcgaggggaagcccttggccatccagttcaacaaacacctgctcagcacatactacgtgcctggcagcctgctgggtgcaggggatgctggactgagggacgtggatcccatcgacgcgctggatgtggcaaagctcttgtgcgtggttccccccagagctggcaggaatttctccctggggagcaaacctcgaaactaacatgatgtgctttggtgtcagtagctgctttctgagctactcaacaaggaaagcaccctggtcctccctggctcctagatccagaccaccttcctccaggtgtgggagccttgccttatcaccccaatcaggtctgcatgccagggtgcctcctctagttaaagtcagtcacctccccagaagggccacactccaggaggagtgttgagagtcatttgaggtagtcttgccacctgttttccttgatgggcctggaagttgttgacaaggggaaagatctttcttgccaataaaaagaagggatatcgttgggtgccatggctcacacctgtaatcttaacactgtgggaggccaaggcaaggggatcacttgagcccaggagtctaggaccagcctggacaacatggtgagacctcgtctctacaaaaaatgcaaaaattagccagatgtggcggcatgtccctgtggtcccagctactcaggaggctgaggtgggaggatcatttgagcctaggaggtcaaggctgcagtgagccatgattcacagcactgcactgcagcctgggtgacaaagcaagaccctgtgtgaaattaaaaggaggtatatcaactgttgtatcctcggacgggctcctgacatggctttaatcaggagtttcctccataaactattattttcagaataataataaaacaagaattatgactagcatcactttccagtgaacattattatattgctagagaggagaataatcttgggtggtgggcatttggaaaaagtgaatttcctgaacttaactcatgtaaatagctctactgcagagctgtgtgtttagtgacagtgcagtcaggggcattcccacagctgtcacagcacggcccagcatcattgtagccagatcctaacatgccaacatcacctctt

SEQ ID NO: 61211 - DNA, 2622 bp, Homo sapiens
acgatttcgtaaaatggcggacggaggagcagcgagtcaagatgagagttcagccgcggcggcagcagcagcagactcaagaatgaacaatccgtcagaaaccagtaaaccatctatggagagtggagatggcaacacaggcacacaaaccaatggtctggactttcagaagcagcctgtgcctgtaggaggagcaatctcaacagcccaggcgcaggctttccttggacatctccatcaggtccaactcgctggaacaagtttacaggctgctgctcagtctttaaatgtacagtctaaatctaatgaagaatcgggggattcgcagcagccaagccagccttcccagcagccttcagtgcaggcagccattccccagacccagcttatgctagctggaggacagataactgggcttactttgacgcctgcccagcaacagttactactccagcaggcacaggcacaggcacagctgctggctgctgcagtgcagcagcactccgccagccagcagcacagtgctgctggagccaccatctccgcctctgctgccacgcccatgacgcagatccccctgtctcagcccatacagatcgcacaggatcttcaacaactgcaacagcttcaacagcagaatctcaacctgcaacagtttgtgttggtgcatccaaccaccaatttgcagccagcgccagtttatcatctcacagacgccccagggccagcagggtctcctgcaagcgccaaaatcttctaacgcaactacctcggcaaagccaagccaacctcctacagtcgcagccaaggattaaccctcacttcccagccagcaaccccaacatgcacaatagcagcaacccccattcagacacttccacagagccagtcaacaccaaagcgaattgatactcccagcttggaggagccccagtgaccttgaggagcttgagcagtttgccaagaccttcaaacaaagacgaatcaaacttggattcacctcagggggatgctgggctcgctatggtgaaactatatggaaatgacttcagcccaactaccatctttcgatttgaagccttgaacctcagctttaagaacatgtgcaagttgaagccacttttagagaagtggctaaatgatgcagagaacctctcatctgattcgtccctctccagcccaagtgccctgaattctccaggaattgagggcttgagccgtaggaggaagaaacgcaccagcatagaagcccaacatccgtgtggccttagagaagagtttcttggagaatccaaaagcctacctcggaagagatcactatgattgccgatcagctcaatatggaaaaaggggtgattcgtgtttggttctgtaaccgccgccagaaagaaaaaagaatcaacccaccaagcagtggtggggaccagcagctcacctattaaagcaattttccccagcccaacttcactggtggcgaccacaccaagccttgtgactagcagtgcagcaactaccctcacagtcagccctgtcctccctctgaccagtgctgctgtgacgaatctttcagttacaggcacttcagacaccacctccaacaacacagcaaccgtgatttccacagcgcctccagcttcctcagcagtcacgtccccctctctgagtccctccccttctgcctcagcctccacctccgaggcatccagtgccagtgagaccagcacaacacagaccacctccactcctttgtcctcccctcttgggaccagccaggtgatggtgacagcatcaggtttgcaaacagcaggcagctgctgcctttcaagggagctgcacagttgccagcaaatgccagtcttgctgccatggcagctgctgcaggactaaacccaagcctgatggcaccctcacagtttgcggctggaggtgccttactcagtctgaatccagggaccctgagcggtgctctcagcccagctctaatgagcaacagtacactggcaactattcaagctcttgcttctggtggctctcttccaataacatcacttgatgcaactgggaacctggtatttgccaatgcgggaggagcccccaacatcgtgactgcccctctgttcctgaaccctcagaacctctctctgctcaccagcaaccctgttagcttggtctctgccgccgcagcatctgcagggaactctgcacctgtagccagccttcacgccacctccacctctgctgagtccatccagaactctctcttcacagtggcctctgccagcggggctgcgtccaccaccaccaccgcctccaaggcacagtgagctgggcagagctgggctgccagaagcctttttcactctgcagtgtgattggactgccagccaggttaataaactgaaaaatgtgattggcttcctctcgccgtgttgtgagggcaaaggagagaagggagaaaaaaaaaaaaaacccccccccccccttccccccttcccaaaaaaaaaaaaaagggggggggccggacctttggcctatttttgtaataaaacactgtcttttcaggattgcttcatggattggagaactttctaaccaaaaattaaaaaaaaaaaaagggggggg

SEQ ID NO: 61212 - DNA, 2131 bp, Homo sapiens
cgagccacgcgtgcgcgggagtgccagtctcttccacagaaggagtacgcattgccacccagctctccaccaatgcctggcattgaggatgtcttcagcctggccccctaccgtgactatctggatgtgccggcacccgaggccacaactgagcctgactctgccacagctgagtctgactcagccccagccaccagtgaaggtcaggacaaaggctgcagggggaccctgcctgcccaggagggcccctcagggagtaaacccctaaggggctcacttaaggaggaggtagccctggatttgagtgtgaggaagcccacagcagaggcctcccctgtcaaggcttcccgttctgtggagcatgccaagcctactgcagccatggatgtgccagatgtgggcaacatggtgtcagatctgccaggcctgaaaaagatagacacagaagcaccaggcttgcctggggtgccagtgaccacagatgccatgccaaggaccaacttccacagctctgtggccttcatgttccgaaagttcaagatcctccgtccggcacctttgcctgcagccgtggtcccgtccacgcccacctcagctcctgctcccacacagcctgcacccacccccacatctgggcccattggactgcggattctcgctcaacagcccttgtctgtgacctgcttcagcctggcactgcccagccctccagccgtagctgtggcctcccctgcccctgctccagctccatcccctgctccggctcgagctcaggctccagcttcagcccgggatccagctccagctccagctccagttgcaggccctgctccagcatctacttcagccccaggggactccctggagcagcattttacaggactacatgcgtccctgtgtgatgctatttctggctccgtcgcccactctcctccagagaagcttcgcgagtggctagagacggctgggccctggggccaggctgcgtggcaggactgccagggtgtgcaggggctgctggccaagctgctgtctcagctgcagcgcttcgatcgcacccaccggtgccccttcccccatgtggtgcgagctggcgccatcttcgtgcccattcacctggtgaaggagcggctcttccctcggctgccacccgcttctgtggaccatgtgctgcaggagcatcgtgtggagctgcggcccaccacgctgtcggaggagcgggcactgcgggagctcgccctgccaggctgcacctcacgcatgctgaagttactggcgctgcgccagctgccggacatttaccccgaccttctcggcctgcagtggcgcgactgtgtacgccgccagctgggtgagcatggggcagccccagtggccaccggagctgtgtgagcaagtgacaggtgtgtgtgctgtgtgagtgcgtcacagctggggctgagtgattccaaggactcctgcccgggtagggggctttaggatgagctctaggtacccccaccccttgaccctccagacaatcagtgagcaccttcatagcctcttttgtaggcttctgaacatgccagctgctctgtccccatggaaactcctcggcctcccctggtgctgcaccttcttggattccctcctcctctgcctgtgccttctccatctttggtgcagtgtttccggcactctggttaggccctgttttctagctgagataatttccctgatctccagcctagcatcccctttgtgagctctagccctaaataacccactgcatgctgggcctcagccccctgggtcctctctccccacactgaaactcatccccaaatcaacactccccgagccttccccctcagctcacttccccacaaccagttcttttcccatgtcagtgaagggcaccccctttcacaaagctcctcatgctctagacctggtgagggccacagctgcctttttgaacgtgtagttttgcagtcctccccggcccttgcatacacagaagtgtgcgcataagtcgcattgttttgtggtttgcttttcctctactaaatgatgtgcctgctgttctccagcttgttttcttttaatgtcctggaggaccacacaactgccgaagtgttgtgtggcgtgt

SEQ ID NO: 61213 - DNA, 2185 bp, Homo sapiens
gctccctccttccccgccttccatacctccccggctccgctcggttcctggccaccccgcagcccctgcccaggtgccatggccgcattgtaccgccctggcctgcggcttaactggcatgggctgagccccttgggctggccatcatgccgtagcatccagaccctgcgagtgcttagtggagatctgggccagcttcccactggcattcgagattttgtagagcacagtgcccgcctgtgccaaccagagggcatccacatctgtgatggaactgaggctgagaatactgccacactgaccctgctggagcagcagggcctcatccgaaagctccccaagtacaataactgctggctggcccgcacagaccccaaggatgtggcacgagtagagagcaagacggtgattgtaactccttctcagcgggacacggtaccactcccgcctgggtggggcccgtgggcagctgggcaactggatgtccccagctgatttccagcgagctgtggatgagaggtttccaggctgcatgcagggccgcaccatgtatgtgcttccattcagcatgggtcctgtgggctccccgctgtcccgcatcggggtgcagctcactgactcagcctatgtggtggcaagcatgcgtattatgacccgactggggacacctgtgcttcaggccctgggagatggtgactttgtcaagtgtctgcactccgtgggccagcccctgacaggacaaggggagccagtgagccagtggccgtgcaacccagagaaaaccctgattggccacgtgcccgaccagcgggagatcatctccttcggcagcggctatggtggcaactccctgctgggcaagaagtgctttgccctacgcatcgcctctcggctggcccgggatgagggctggctggcagagcacatgctggtgagggcctgatcctgggcatcaccagccctgcagggaagaagcgctatgtggcagccgccttccctagtgcctgtggcaagaccaacctggctatgatgcggcctgcactgccaggctggaaagtggagtgtgtgggggatgatattgcttggatgaggtttgacagtgaaggtcgactccgggccatcaaccctgagaacggcttctttggggttgcccctggtacctctgccaccaccaatcccaacgccatggctacaatccagagtaacactatttttaccaatgtggctgagaccagtgatggtggcgtgtactgggagggcattgaccagcctcttccacctggtgttactgtgacctcctggctgggcaaaccctggaaacctggtgacaaggagccctgtgcacatcccaactctcgattttgtgccccggctcgccagtgccccatcatggacccagcctgggaggccccagagggtgtccccattgacgccatcatctttggtggccgcagacccaaaggggtacccctggtatacgaggccttcaactggcgtcatggggtgtttgtgggcagcgccatgcgctctgagtccactgctgcagcagaacacaaagggaagatcatcatgcacgacccatttgccatgcggcccttttttggctacaacttcgggcactacctggaacactggctgagcatggaagggcgcaagggggcccagctgccccgtatcttccatgtcaactggttccggcgtgacgaggcagggcacttcctgtggccaggctttggggagaatgctcgggtgctagactggatctgccggcggttagagggggaggacagtgcccgagagacacccattgggctggtgccaaaggaaggagccttggatctcagcggcctcagagctatagacaccactcagctgttctccctccccaaggacttctgggaacaggaggttcgtgacattcggagctacctgacagagcaggtcaaccaggatctgcccaaagaggtgttggctgagcttgaggccctggagagacgtgtgcacaaaatgtgacctgaggccctagtctagcaagaggacatagcaccctcatctgggaatagggaaggcaccttgcagaaaatatgagcaatttgatattaactaacatcttcaatgtgccatagaccttcccacaaagactgtccaataataagagatgcttatctattttaaaaaaaaaaaa

SEQ ID NO: 61214 - DNA, 4034 bp, Homo sapiens
aagctggggagcatggaccagaccccgcagcgctggcaccatgacgctcgcccgcttcgtgctagccctgatgttaggggcgctccccgaagtggtcggctttgattctgtcctcaatgattccctccaccacagccaccgccattcgccccctgcgggtccgcactacccctattaccttcccacccagcagcggcccccgacgacgcgtccgccgccgcctctcccgcgcttcccgcgccccccgcgggcgctccctgcccagcgcccgcacgccctccaggccgggcacacgccccggccgcacccctggggctgccccgccggcgagccatgggtcagcgtgacggacttcggcgccccgtgtctgcggtgggcggaggtgccacccttcctggagcggtcgcccccagcgagctgggctcagctgcgaggacagcgccacaacttttgtcggagccccgacggcgcgggcagaccctggtgtttctacggagacgcccgtggcaaggtggactggggctactgcgactgcagacacggatcagtacgacttcgtggcggcaaaaatgagtttgaaggcacagtggaagtatatgcaagtggagtttggggcactgtctgtagcagccactgggatgattctgatgcatcagtcatttgtcaccagctgcagctgggaggaaaaggaatagcaaaacaaaccccgttttctggactgggccttattcccatttattggagcaatgtccgttgccgaggagatgaagaaaatatactgctttgtgaaaaagacatctggcagggtggggtgtgtcctcagaagatggcagctgctgtcacgtgtagcttttcccatggcccaacgttccccatcattcgccttgctggaggcagcagtgtgcatgaaggccgggtggagctctaccatgctggccagtggggaaccgtttgtgatgaccaatgggatgatgccgatgcagaagtgatctgcaggcagctgggcctcagtggcattgccaaagcatggcatcaggcatattttggggaagggtctggcccagttatgttggatgaagtacgctgcactgggaatgagctttcaattgagcagtgtccaaagagctcctggggagagcataactgtggccataaagaagatgctggagtgtcctgtacccctctaacagatggggtcatcagacttgcaggtgggaaaggcagccatgagggtcgcttggaggtatattacagaggccagtggggaactgtctgtgatgatggctggactgagctgaatacatacgtggtttgtcgacaattgggatttaaatatggtaaacaagcatctgccaaccattttgaagaaagcacagggcccatatggttggatgacgtcagctgctcaggaaaggaaaccagatttcttcagtgttccaggcgacagtggggaaggcatgactgcagccaccgcgaagatgttagcattgcctgctaccctggcggcgagggacacaggctctctctgggttttcctgtcagactgatggatggagaaaataagaaagaaggacgagtggaggtttttatcaatggccagtggggaacaatctgtgatgatggatggactgataaggatgcagctgtgatctgtcgtcagcttggctacaagggtcctgccagagcaagaaccatggcttactttggagaaggaaaaggacccatccatgtggataatgtgaagtgcacaggaaatgagaggtccttggctgactgtatcaagcaagatattggaagacacaactgccgccacagtgaagatgcaggagttatttgtgattattttggcaagaaggcctcaggtaacagtaataaagagtccctctcatctgtttgtggcttgagattactgcaccgtcggcagaagcggatcattggtgggaaaaattctttaaggggtggttggccttggcaggtttccctccggctgaagtcatcccatggagatggcaggctcctctgcggggctacgctcctgagtagctgctgggtcctcacagcagcacactgtttcaagaggtatggcaacagcactaggagctatgctgttagggttggagattatcatactctggtaccagaggagtttgaggaagaaattggagttcaacagattgtgattcatcgggagtatcgaaccgaccggcagtgattatgacatagccttggttagattacaaggaccagaagagcaatgtgccagattcagcagccaatgttttgccagcctgtttaccactctggagagagaggccacagaaaacagcatccaactgttacataacaggatggggtgacacaggacgagcctattcaagaacactacaacaagcagccattcccttacttcctaaaaggttttgtgaagaacgttataagggtcggtttacagggagaatgctttgtgctggaaacctccatgaacacaaacgcgtggacagctgccagggagacagcggaggaccactcatgtgtgaacggcccggagagagctgggtggtgtatggggtgacctcctgggggtatggctgtggagtcaaggattctcctggtgtttataccaaagtctcagcctttgtaccttggataaaaagtgtcaccaaactgtaattcttcatggaaacttcaaagcagcatttaaacaaatggaaaactttgaacccccactattagcactcagcagagatgacaacaaatggcaagatctgtttttgctttgtgttgtggtaaaaaattgtgtaccccctgctgcttttgagaaatttgtgaacattttcagaggcctcagtgtagtggaagtgataatccttaaatgaacattttctaccctaatttcactggagtgacttattctaagcctcatctatcccctacctatttctcaaaatcattctatgctgattttacaaaagatcatttttacatttgaactgagaaccccttttaattgaatcagtggtgtctgaaatcatattaaatacccacatttgacataaatgcggtaccctttactacactcatgagtggcatatttatgcttaggtcttttcaaaagacttgacaagaaatcttcatattctctgtagcctttgtcaagtgaggaaatcagtggttaaagaattccactataaacttttaggcctgaataggagtagtaaagcctcaaggacatctgcctgtcacaatatattctcaaagtgatctgatatttggaaacaagtatccttgttgagtaccaagtgctacagaaaccataagataaaaatactttctacctacagcgtataaactagcaaaatttgaaaggatttctggtaactaaatgccagctggacatacaacctattttatccaacacattaacatatctactatatttgcttttaacaagcacctcatcatagtccacgttccccgaccatgatgtaagagtgccacccactgacacttccctgtaactgacttatacctgcaggttttcccaagcccaacctgatacaatccaatcttaaaatatactagtcaaaatgctttcctggcctacacattgaaaagttctaatacatacagcagttataacatatgccaggcactgcattaggcagctttgcacatcactgacaatttgcaaaaggccagtaaatcttatggtagtagcccttgttttcaaatgggggaaaacaggcttgcctcaaagtgagaccagttggtgaaactgattccaaactccagaaaaaatgctgatttttttccccatggttctcctacctaaatgattggtttccctatggctatttctccaagagttaagggatagctgcttaactatgcacctttacagaacattcttagcagtaatgctcaaatttaaaaggcacactcaagatacttccatgtcatggatccttccccaggtcccagtagtataaatatagggaagaggttagcatgaacttacaaattgttttaagtaa

SEQ ID NO: 61215 - DNA, 3576 bp, Homo sapiens
ttttttttttatattacttttgtttaaaattggttttgattcatattttattatatacacaatttattagcttcataatttaccatgcaagattttagactgattaggaaattcactaggaagagtagcaggtataatgtttgtatcatattaattttattattgtcttttatttttattaaaaattttatttcagtagtctttttttattttattaaagtatatactggtttttggttacatggatgaattgtctaatggtgaagtctgagattttagtgtacccatcacctgagtagtgtacattgtacccaaacttgtaggctttttatcccttaccctaccttccaccctccccattttgagtctgcatagtccattatatcactctgtatgcctttgcatacccatagcttaactcccacttataagtgaaaacacggtatttggttttccattcctgagttacttcacttaggaataatagcctccagctccatccaagttgctgcaaaagacattatttcatttttttatggctgaataggtattccctggtgaatatataccatattttctttatccactcattggttgatgggcacttaggttggttccatatctttgaaattgtgaattgtgctgtaataaatataggcatgcaggtgtccttttgatgtaaggacttcttttcctttgggtagatagtagtgggattgctggatcaaatggtagatccacttttagttctttagagaatctccatctgtatttcatagaggttgtactaatttaccttcacaccagcagtgtataggcgtttcttttcaccacacccatgtcaacatctattgtttttcgtcttttatttctatcaagtattttacatatgatacttggtttagttcgaaattggcctcatccaaaccaaagattatggtgcacttgaaaaatacaaactgaatgttgtctatactcatgagagtttcctgccatggcctaagtgaaatcttgataacactgaacaaaggcttcacttgtcctcatcttttaattctgtattctgataggagacaagatccaaactgagatggagactgtttcagaagcaggaacacatcaagagtggtccttccagcaaatctgggaaaaaaattgccagtggatttaaccaggtctcaagacttggtgataaatagctctcagttctccaaagaaggtgatttcccctgccagactgaggcaggactatctgtaattcacacaagacagaaatcttcccagggcaatggatataaaccatccttcagtgatgtctccctctttgattttcatcaacaattacactcaggagagaaatctcatacgtgtgatgagtgtggaaagaacttttgttacatctcagcccttcgtattcatcagagagtccacatgggagagaaatgctataagtgtgacgtgtgtggtaaggaattcagtcagagttcacatctgcaaactcatcagagagtccacactggagagaaaccgttcaaatgtgtggaatgtgggaaaggcttcagtcgtagatcagcacttaatgttcatcacaaattacacacaggagagaaaccttataattgtgaggaatgcgggaaggccttcattcacgattcccagcttcaagaacatcagagaatccatacgggggagaagccattcaaatgtgatatatgtggtaagagcttctgtggtagatcaagacttaataggcattccatggttcacacggcagagaaaccattccgatgtgatacgtgtgataagagctttcgtcagagatcagcacttaatagtcatcgcatgatccacacaggagagaaaccatacaaatgtgaggagtgtggaaaaggctttatttgtaggcgagatctttatacgcatcatatggtccacacgggagagaagccatataattgtaaagagtgtgggaagagcttcagatgggcctcgtgtcttttgaaacatcagcgagtccacagtggagaaaaaccattcaaatgtgaagaatgtgggaaaggattttacacaaattcacaatgctattcccaccagagatcccatagtggagaaaaaccatacaaatgtgtggagtgtgggaagggctacaaaaggaggttggatcttgactttcaccagcgcgtccatacaggagagaaactgtataattgtaaggaatgtgggaagagctttagtcgggccccatgtcttttgaaacatgagagactccacagtggagaaaaaccattccaatgtgaagagtgtgggaagagatttactcaaaattcacatcttcattcccatcagagaggttcacactggagaaaagccatacaaatgtgagaagtgtggaaagggctacaatagtaagtttattctttatatgcaccaggagggtccacacaggagagagaccatacaattgtaaggaatgtgggaagagttttggctgggcctcgtgtcttttgaaacatcagagactgcacagtggggaaaaccctttcaaatgtgaagagtgtgggaaaagatttactcagaattcacagcttcattctcatcaaagagtgcacactggagaaaagccatacaaatgtgatgagtgtgggaagggcttcagctggtcctcaactcgtctgacccatcagagacgccacagcagagaaacacctctcaaatgtgagcagcatgggaagaacattgtacagaattcattctctaaagtgcaagaaaaagttcacagtgtagaaaagccatacaaatgtgaggactgtgggaagggctacaacaggcgcttgaatcttgatatgcatcagagggtccacatgggagagaaaacatggaagtgtagggagtgtgatatgtgctttagtcaggcctcaagccttcgacttcatcagaatgttcatgttggagaaaaaccttagtgatgtgatggtgcaataaagtcttcactcagtcttcatgaatgcagtctcatctgaaagttcacaaaggagagacacattaaaatatgaggcacatagtaagcacttccctttgagtattttatctctgaatccatgctggtgataaatttcacccattcttggaagagggaaaacatttgtttaagataacatcagtgcttcagccatagctcagcatgccccagtagtctcaggaccaccataatggagaatccttgtaaatggtgcaataaagcttcattcagaagtttgataattacagctatcattcaggagacaggccttagaaagagtaagagttcatgaatttaccagactaatggtggacatgtccaaattgatgtccactagaatgtaaactacatgtgtctttgctgctaagtcgtcacagccttaacattgattagcactttgtatgtgttcagtacttgtttgttaaatcaatgaaaggataaaacatatgtatggatttggatacaattttgtgtatccaaaaagggaagcctgcaaaaaataattctgggaaacatgagttgaaatgcagagtaaactcagtactgcaatccataaa

SEQ ID NO: 61216 - DNA, 1313 bp, Homo sapiens; identical to SEQ ID NO: 60901

SEQ ID NO: 61217 - DNA, 2142 bp, Homo sapiens
gtcgcaggccttggcccttgccagacattagcaccatgagctgtggtggcatacgaggagctgatcaaggagggtgacacggccatcctgtcactgggccatggtgcaatggaggcagtgcgtgtgcagcgtggggcacagacccagacccggcatggtgtcctgcggcactcagttgaccttatcggccgccccttcggctccaaggtgacgtgcggccgaggtggctgggtgtatgtgctgcaccccacgcccgagctctggacgctgaacctgccgcaccgcacgcagatcctctactccacagacatcgccctcatcaccatgatgttggaagcttcggcccggctctgtggtctgtgagtctggcaccggcagtggctctgtgtcccacgccatcatccgcaccattgcacccacgggtcacctgcacacggtggagttccaccagcagcgggcagagaaggcccgggaggagttccaggagcaccgtgtgggccgctgggtgactgtgcgcacccaggacgtgtgccgcagtggctttggcgtgagccacgtggccgacgccgtcttcctggacatcccatcaccctgggaggccgtgggccacgcctgggacgccctcaaggtcgaaggcgggcgcttctgctccttctcaccgtgcatcgagcaggtgcaacgcacatgccaggcgctggcagcgcgcggcttctcagagctgagcaccctggaggtgctgccacaggtctacaacgtgcgcactgtcagcctgccaccgcccgacctgggcacaggcacagatggccctgccggctccgacaccagccccttccgcagcggcacgcccatgaaggaggccgtgggccacaccggctacctgaccttcgccaccaagaccccaggctagggggccgcctcccagggcaccagggagctgggagcactgaagggctgggcagggaggccagaggcaccttatatggtcagcgatgcctgccagacacagacggtggggtggggcttgggggcctcctgggtggccagagtgggacagcaggaagggcggctgtgatggaggagcagtgctggggctgggcctcagccattcctgtccagccctgtggcccatcccagctgctgtttgttgccaatatgaagtatccactgccacaggctcccctgggtgttgaagccaaagggtgcaggtgggggagtctgaccccctcccaggtgggcctaagcaggaagggggtggaggagggaggggggcattgaccctgagaccacgctgcgtctgacccctgggcccccacggccctggctgccccacggggcctgagaccatctcgtgcttctccagtccccgggccgaggctccagccttggccagaagctggggtgagctgacccagaatccctgccctgctctccccagcgctaggagaccaggccagcccaggaaccagggaggtgaccctgctctctggcctcctggctgatgtcacagcactgagctcagcccaggccttcgtccactcatgtccaagaggcggggcatcccccacccagccagagcccctgacatgggctgcactcgctgaggccaggcagcgctgcggagaggagcggcagagtgggttgtctgccgcaggcaaccaggcaagtgtgtcggggctggggtgtgaatgccagcctgtgagtcccggaactatgtgggtacccctacccctcacagaagccaagggcatggaggaggtccctccacagtgacaacggtgtggggttaggggaggtccattcaggacaccacccagggacagtgcctatgtgatcacctcttaaaggctaagcttaggggcatttcccaaagtggggacagagggcaggacgcccaggctgggggctctcctcgcccgccctggtgtctgacagcctcaaggaaggagcagtgcctgtgtcagccatggggcccttggagctgccgctggtgcctagggggcctgggtttctgcccaggcagccagtggctgttgggagcctctgtttcccctgtgctgggggccttgagtgctatgctagcaggggcctggccccaagtgtgagtgatgagcaataaacgtaccgtccccctcaaaaaaaaaa

SEQ ID NO: 61218 - DNA, 2162 bp, Homo sapiens
gctagagttagccggcccttgactgctgacaccgtgcgacggccggattcctggtcgacccagcgtcggggcggaaagtggtagcgattttcagcagagacgtagaaggcgccgggacccggaggaaccggaaaaaacagaactcagcgaaagagagctggcagtagcagtggcggtgtcccaggagaacgatgaggagaacgaagagcgctgggttggacctttacctgtggaggcaacactggccaagaagaggaaagtcttagagtttgaaagagtctatcttgataatctccccagtgcatccatgtatgagcgcagttacatgcatagagatgttatcacccatgtggtatgcaccaaaacagattttattattactgccagtcatgatggacatgtcaagttctggaaaaaaatagaagagggaattgaatttgttaaacattttcgtagtcacctgggagttattgagagtattgcagttagctctgagggagcattgttctgttctgtgggtgatgataaagcaatgaaggtgtttgatgtagtgaactttgacatgatcaacatgctgaaacttggctattttcctggacagtgtgagtggatctattgcccaggggatgcaatttcttcagttgctgcttccgaaaagagtacaggaaaaattttcatttatgatggccgaggagataaccagccacttcatatttttgacaaactccatacatcacctcttactcagatacggctaaacccagtttacaaagcagtagtgtcttctgacaaatctgggatgattgaatactggactgggcctcctcatgaatataaattccccaaaaatgtgaactgggaatataaaactgacactgatttatatgaatttgccaagtgtaaggcttatccaaccagcgtatgtttttcaccagatgggaagaaaatagctactattggttctgatagaaaagttagaattttcagatttgtaactggaaaactcatgagagtctttgatgaatcactaagcatgtttactgaactgcaacagatgaggcaacagttaccagacatggaatttggccgacgaatggctgtagaacgtgagttggagaaggttgatgctgtaagattaattaatatagtttttgatgaaactggacacttcgtgctgtatggaacaatgctgggcattaaagttataaatgtagagacaaaccggtgtgtgcggattttaggcaaacaagaaaatattagagtgatgcaattggctttgttccaggggatagccaaaaagcatcgtgctgcaactactatagaaatgaaagcttctgaaaatcctgttcttcagaatattcaagctgacccaacaatagtctgtacatcattcaaaaagaatagattttatatgtttaccaaacgagaaccagaagatacgaaaagtgcagattctgatcgagatgtttttaatgagaaaccttctaaagaagaagtcatggcagctactcaagctgaaggacctaaacgagtttcggacagtgccattatccacaccagcatgggagacattcacaccaaactttttcctgttgagtgccctaagacagtggaaaacttctgtgttcacagcagaaatggttattataatgggcatacatttcaccgtataattaagggctttatgattcagactggagatccaacaggtactggtatgggaggagaaagcatatggggaggagaatttgaagatgaatttcattcaacattacgacatgacaggccatacacactcagcatggctaacgcgggatcaaatactaatggatcccagtttttcataacggtagtaccaacgccttggcttgataataagcatacagtatttggacgagtgactaaaggaatggaagttgtacagaggatctccaactgtcaaagtcaatcccaaaacagataagccctatgaggatgtcagcatcataaatattactgtcaagtaaaataagatttgttttaatgtacttgcaaataaaaatacaatattaaacagattattttacattaggaagcttaggacttgctgaatatacagatcatgtttcaaagatacagtaatttttgtattttttattaaaggctattttttaaaaattaaa

SEQ ID NO: 61219 - DNA, 1300 bp, Homo sapiens
aacagagccgccgcggctcagccgtgggctctaacgcggggctgggggccggagacagacttcgcccaggtgacgggtagtaggggcggcgccgcttggcctcgtggggtgtaagacccacttgctgttgcccccggaccttgccgccacaccagccctgtcctggggcggaaccgaaggaaggtcgggccctgctgccccgccccgtccttcctccttcccgggcggtcactgtgcgtggctcacttttagagtttacttcaaccacgtggagcttccatggcggcctctcaggtcctgggggagaagattaacatcctgtcgggagagactgtcaaagctggggacagggacccgctggggaacgactgtcccgagcaagataggctcccccagcgctcctggaggcagaagtgtgcctcctacgtgttggccctgaggccctggagcttcagtgcctcactcacaccggtggccctgggcagtgcccttgcctacagatcccacggtgtcctggatcccaggctcttggtgggttgtgccgtggctgtcctggctgtgcacggggccggtaatttggtcaacacttactatgacttttccaagggcattgaccacaaaaagagtgatgacaggacacttgtggaccgaatcttggagccgcaggatgtcgtccggttcggagtcttcctctacacgttgggctgcgtctgtgccgcttgcctctactacctgtcccctctgaaactggagcacttggctcttatctactttggaggcctgtctggctcctttctctacacaggaggaattggattcaagtacgtggctctgggagacctcatcatcctcatcacttttggcccgctggctgtgatgttcgcctacgccatccaggtggggtccctggccatcttcccactggtctatgccatccccctcgccctcagcaccgaggccattctccattccaacaacaccagggacatggagtccgaccgggaggctggtatcgtcacgctggccatcctcatcggccccacgttctcctacattctctacaacacactgctcttcctgccctacctgggtcttcagcatcctgggccacacactgcaccatcagcctgggcactccccctgcttaccattcccatgggccttctcccttgagagacagtttcgaaggccaggcctttcaacaaactggccccagaggactgccaagctcaacctcctgctgggacttttctatgtctttggcatcattctggcaccagcaggcagtctgcccaaaatt

SEQ ID NO: 61220 - DNA, 2170 bp, Homo sapiens
gggggcaccagaagccagcagtggggttgcacacgcgcctcttcacgaggtggaaacaagatggaggattcggcctcggcctcgctgtcttctgcagccgctactggaacctccacctcgactccagcggccccgacagcacggaagcagctggataaagaacaggttagaaaggcagtggacgctctcttgacgcattgcaagtccaggaaaaacaattatgggttgcttttgaatgagaatgaaagtttatttttaatggtggtattatggaaaattccaagtaaagaactgagggtcagattgaccttgcctcatagtattcgatcagattcagaagatatctgtttatttacgaaggatgaacccaattcaactcctgaaaagacagaacagttttatagaaagcttttaaacaagcatggaattaaaaccgtttctcagattatctccctccaaactctaaagaaggaatataaatcctatgaagccaagctccgccttctgagcagttttgatttcttccttactgatgccagaattaggcggctcttaccctcactcattgggagacatttctatcaaagaaagaaagttccagtatctgtaaaccttctgtccaagaatttatcaagagagatcaatgactgtataggtggaacggtcttaaacatttctaaaagtggttcttgcagtgctatacgtattggtcacgttggaatgcaaattgagcacatcattgaaaacattgttgctgtcaccaaaggactttcagaaaaattgccagagaagtgggagagcgtgaaactcctgtttgtgaaaactgagaaatcggctgcacttcccatcttttcctcgtttgtcagcaattgggatgaagccaccaaaagatctttgcttaataagaagaaaaaagaggcaaggagaaaacgaagagaaagaaattttgaaaaacaaaaggagaggaagaagaagaggcagcaggctaggaagactgcatcagttcttagtaaagatgatgtggcacctgaaagtggtgatactacagtgaagaaacctgaatcaaagaaggaacagaccccagagcatgggaagaaaaaacgtggcagaggaaaagcccaagttaaagcaacaaatgaatccgaagacgaaatcccacagctggtaccaataggaaagaagactccagctaatgaaaaagtagagattcaaaaacatgccacaggaaagaagtctccagcaaagagtcctaatcccagcacacctcgtgggaagaaaagaaaggctttgccagcatctgagaccccaaaagctgcagagtctgagaccccagggaaaagcccagagaagaagccaaaaatcaaagaagaggcagtgaaggaaaaaagtccttcgctggggaaaaaagatgcgagacagactccaaaaaagccagaggccaagtttttcaccactcctagtaaatctgtgagaaaagcttcccacacccccaaaaaatggcccaaaaaacccaaagtaccccagtcgacctaaagtcagtgattcaactggaaggaaacctcaatgctgcctccagagctttttggaaatactcagatcctggccgcctttgtaaccttctctaaacgtcaggcctggacttaaaagattttttaaaacctccataagtagtccaggggcggtggctcacgcctgtaatcccagcactttgggaggccgaggcaggcggatcacaaggtcaacgagatcgagaccatcctggccaacatggtgaaaccctgtctgtaccaaaaatacaaaaattaattgggcatggtggtggacacctgtaatcccagctactagggaggctgaggcaggagaattgcttgaacctgggaggcggaggttgcagtgagccactgcactccagcctgatgacagagcaagactcagtctcaaaaataaataaaaataataaaacctccataagtaatcctgacatattgttcctgggtataatctgtttctaaattgtccttctgtgtatttgctaatgtaatagagggaaaaatagagtgcttctctgtggttgttcagcactttaggtagccaaggtgagaggattgcttgaggcctggagtttgagactagcctgggcaacttggtaaaaccccatctctacaaaaaa

SEQ ID NO: 61221 - DNA, 1558 bp, Homo sapiens
agttccctgtgataatttctcaaagttctcattaaaaacttaagaaaaaggtaaataaaccaaacatcttcatagaaaaattgtatttacaactccattcaaaagcagtttttaaaagcaaacacaatgtaacactgaaggtgaaaaatctaagctcacccaaagctgccaggtctaataaattactgacagaatactgtatcaaaaataaggcaataaccgaaaatataccattaaagatttctccatccccacaactagatagaatgaatctatctaggagcaaatgacatgctttattcagtttcaccatgtctgaaatctttaaggacagaagtgataaaatgttatcttcattcttcattagacttgaacacttgaaggaaaataatttctaaagcacaaagaggtaaagaagtataatctttcaaaaagatattcagtgttcaaaattcaagaatgcaatatcaatacacaatgggcattaggtgaatatacacaatacgatgagagcaaattaatttatttagtactttttccattccatatcatcaggaggattgatttcaactttccttttacctacatcagaccagttggtactcaaaactgtaccacccgactccataaaggatttgttcatggcacgtttcacttcatcagaaccatctgaatagatctgctgaaataatctgtttaaagctgcatctccctccaacttttcattcttttcttcttctttgatctcaccaaccaatttatcccaatttcttgtataaggagatgatgatggatataggttctttacatctgctacgaattgttttggcgtaggcacatctccttgcccctctagcttttcccatctcacagcctctggctttttcagtttaatttcaatctttgttgaaagtactttaaacgtgctctgttctggtattataggatgaagaagttccagtttcaaattgtaatcctctccagaaggaagtttaaccaaagcagacaactctttttctgaaaattccacatttacatcattcttctgaacattcttgatcataagtgtaatgactacttgagattctgtttgataccagtcatacttgatttttgactgatgagtccacacctcagattctgagccattctgagcttcttgacaccttttaatccagacactgaaattagcatctgcactatctaatttttgtccttctgtaaaagtttctagggcagcagcatagtttttttcatggtattcacatattccttttctcagcatagcagtggaattatttggattgagttctagagacttctttgcatcagcaacagcaacacagtaattcccaagaagaatgtgacaataagctctttgacaataatactgtgcatcatctggtttctgttccaaagccttagtcagctcctctaacgccgcctgggggtcctcgtcgattagggcatccgagaagctctggaaaaacacctctgggatgttgcagttcctgctgcagccgccgccatccctcgtagtcgctgttctgccgccgga

SEQ ID NO: 61222 - DNA, 2179 bp, Homo sapiens
ttttttttttttaatattagcaaagttttactttttttttttctgctcataaatgactctgaaaaagccaatacgcaagaggctaacacaactgtagtctaaaggcaacgtcgaggtcactgatatgtccctcagacaagaggcactgctcagaatccccctgtgctgggggtgagggaaggaggggacggtttaggacagaggaataaatacatgtggttgtgggagttctgccatcagggatggtggccccagcccaggaccccaaaaccctgaggcggtgcagtgggctgccaaccccccagctcggggttccccaaggctgcctcagtgtttggatgggctggaaggaaatgctgaggttctgggagggccccatggccagccccctcttcccactctagccagaggagagccaagctcccggctggccagggccctggggtagggagcagtgcccccaagagggctttctggtgtcaatgtctcatgcagcgtcaggtggtgaggcctgggcctggccctgaggcgggagtgggggtgacaggcgaggctggggtgggccctggcacctgcagctttgggctgcccatgtgtgtctgctgacatcccgactatggtccacggccgggaatggtgggcagacggggctgctggcagccctcagccttatagtgtgtgtgtggggtggacgaggggtcatgaggacagggatggggctgggcgtctctggtaaggaccagtaagtgccaggcaggacgtactctgaaggctcagccgtggcccatctgggacacagccctgctcccgaaggggctccaggggaactgctcagccaggtgattcaccagggcacgggcaggccaggctgaacccggggccccagtgtgcgatgtggggaggtgactgggtgagcgtgaacagggcgtggggtgcgcggggcgggtggccgtgtgaccgtgcccggccctcagaagacgaagcagcgctccgtggggtggcccacgtggtcccaggttgggaaggcaggcgtactggatcatgggtggggggccacacatcagcaccagcggctcctccctctgggggtggaaggtggtcccggatcatctcctcattcacgaagcccctggccgtagtcccaggcttcaggggctctgtccagcgtgtaccagagcttgaagcgtgcagaatgtttgttcctgagttcctccagctcaggtcgcagcaggatgtccttctcggtctggttggcaaagagcaggtggcacacagtgtggtcatcagggtccttcatgatggcgcggatcacctgcagcatcggggtgatgcctgtccctcccgcgatcatgcccacagacttcactgtcctgatgatagggttggactttttgtcaggtcggatggcgaacttccctttgccctggtagaccagcagcccactggggccccggaactcaatggtgtctccaatctgcatgctctccaggtactgagacatcttccctccagcgggaaacttgggatgggtgtccttgaagtaaaccttgatgaccaggtccacgaagcccttgtcatcatcgctggagatgggtgtatagggccggacgaccaggtttccatcaattcgagccgagaggtagatgtgctggccgacagggaggcccaggatgtgctggggtgacggcagggcaaagcggaagcgccgggtgtcatggctgatgatctcccggtcgatgagccgcagcgggtacttgatgtccgggctctcgagggtgatggctggcgtggagcgctggaacagcttcatgagcagactgtacaggaaccagactgggaagagcaccatatggcccaacgtgctgagctgggcccccatggtggccccgcgccgcgctcgctctgtcgccgccgccgccgccgccgagaccgtcgcgcccgggcccgcgtcactccggagcaggggcggggccgaggggccaggcgggcgcgcggggcggggcgggcgcgggggcggggaccgggtcgctccgcctgcttctgccggggatggagactgggaactggggatgcggccctctgcgctccgagctctcccgcgctgtgctgccccgcgcgggacggtggcctctctgggcctcgttcgccgccataaaggaagcaagatggcgccccccgg

SEQ ID NO: 61223 - DNA, 1911 bp, Homo sapiens
ttttttttttttaccagtatagaaatttatttgaattcaaaataatatggctatatttataataatataataattatctaaagcaaatatcatcattggctctgaaatgcgtctaaagatgtcattcttaagtcaaaaaatatgtagtaagaatgtccaagaaagaaaaaaatataaaaccaagtctgctgagtgtcgggagttggtgagggatatcctaccatattgtgacggagtccaaatagaaaacatgcagcaacagttctcctgctttatcagctccctggaaaataaaccagtaaccctggtagtgcagtaaccatttggttaacaggacaaacttcctgatggacacagatagtaattcactgcatttcccttctctaacttctctcttcacaccaattccttttctttcctttaagatgggtttcatcctgttgacaaaagatttggttttatttgtaaagtaaagcagataatatcctgattgaagtattcaatgatttagttgaggatgcttggggatcaaactttgtaaaaaggtcaattaagctagttagcagagactatcagtggcttgcagaaaaaaaattcggataatatgtttgttaaaaagacaaaaagaataagcggtgaaaaatcctagggattactgtgacctagacaatcaaaagcagataggtgacctttgattaaatccatttacttgtggagtgagctaaaaggaggctccaagacagagtttggttcccaacagtgtccgtggccaaagggcacactcagaaggtctcctcctctcgtaggaactggaacacggatgagaagtctttctttgagtagccctttgcacacatcatcctgtagatctgatgggccagactgccaagaaggattgggctctttgtgctggtagcagagtcttgtgccaatcccagatccttagccatgagtgttgttccaaatccaccctgatagttattagccgagggaacgccatccatcactccaggtacaggattataagtgtcacttgaccaacaccgtcctgagctcatatttaggattttagccagtagttttgggtcaagccctaacctgattccaagattcatagcttcagcagttccaatcatactaatagctaacagcatgttgttgcagatctttgccgcctgcccagtcccaacagctccacagtacaccacgttggagcccatgcaccccagcaactcttgggcagcagcaaattcatcttcaactcctcccaccataaacgtgaggttcccagatcgtgcagctcctacaccaccagaaacaggggcatccatgaaaactgctcccattttctcaacttctttggccaattcttttgaaactgcaggatcaatagtgctggaatctattaataatgagcccttcttcactttttttagaatcccatttgctccggaataagcttctattgcattgatactggtgggcagcattgtaataattctgtcagctttttcagcaacatctgctggggaagatactacctgttcacctgcatcttgaaactctttgcaggcatcagggaacacatcataaataataagtggatagccatgtttcatgagattttttgccattggattccccatgttgcccagtccaatgaatccaactggagtctttgaagccactgacctagaacacaccgctgcaaagctgccggctgccggccgcagccgccggctccagtaccggagaccggaggcagctccgaggagccgtaaggaggctgccatgctgcgcccgcccctctccccgcggtgacctccgccgcctcccggagggcccacagactgcgagcgtgtgcagcgggactggctggccggacgcgtgggtcgacccagggcatctgca

SEQ ID NO: 61224 - DNA, 3092 bp, Homo sapiens; identical to SEQ ID NO: 60680

SEQ ID NO: 61225 - DNA, 754 bp, Homo sapiens
ctagtccagtgagctggaattcgcgccttcaacttgccaggcactaattagactagcgcagagaaacggggataagtactgatgagggtcccagccctcagcgatcggatttcagagggggagataaaggactgcccagaagggtggtgagtggagtagttgatataaacaacgaggtgcgatgaaatacacaggagggctgctaatcacatatggggtgggtgccgagggcccttaattaagggaggcttcctggacgggtgacacccaagcggagtcctgacgacccgcgtcagaagtagtcaggcgaggaggagggtaaaggaatccacgtcccaagcagagaagcagctttccctacacagcacaggacacggtccgcgcacagaagccgcaggagacgcaggcacaggggctggggagaatccttgctgggccctcgccgcctccctctgccgggtgtctggtgccagcctcctgcctggcagaggagctccagcccctgctcccggaagcccctccaggccttcggcttccctgactgggcatgggcccctcgtcccctcgtcccctcgggtacggggccggtctccccgcccgcgggcggcgaagtaaaggcccagcgcagcccgcgctcctgccctggggcctcgtctttctccaggaaaacgtggaccgctctccgccgacaggtctcttccacagacccctgtcgccttcgcccccggtctcttccggttctgtcttctcgctg

SEQ ID NO: 61226 - DNA, 2297 bp, Homo sapiens
  misc_feature (1)...(2297): n = a,t,c or g
ttgcagccgcgctgcgcgcaccgcgggctccgggctcagaagtgcggacgcccggctcccggcgtggacgccatggtgctgtgcccggtgattgggaagctgctgcacaagcgcgtggtgctggccagcgcctccccacgccgtcaggagatcctcagcaacgcgggtctcaggtttgaggtggtcccctccaagtttaaagagaagctggacaaagcctccttcgctactccgtatgggtacgccatggagaccgccaagcagaaggccctggaggtggccaaccggctgtaccagaaagacctgcgggcccccgacgtggtcattggagcggacacgatcgtgacggtcggggggctgattctggagaagccggtggacaagcaggacgcctacaggatgctgtcccggtttgagttgggagagaacacagcgtgttcacaggtgtcgcgatcgtccactgctccagcaaagaccatcagctggacaccagggtctcggaattctacgaggaaacgaaggtgaagttctcggagctgtccgaggagctgctctgggaatacgtccacagcggggagcccatggacaaagctggcggctacgggatccaggccctgggcggcatgctggtggagtccgtacacggggactttctgaacgtggtgggattcccgctgaaccacttctgcaagcagctggtgaagctctactacccgccccgtccggaggacctgcggcggagtgtcaagcacgactccatcccggccgcggacaccttcgaagacctcagtgacgtggaggggggtggctcggagcccactcagagggacgcgggcagccgcgatgagaaggccgaggcgggagaggcgggacaggccacggcagaggctgagtgtcacaggactcgggagaccctgcctccgttcccgacacgcctcctggagctgattgagggctttatgctatccaagggcctgctcaccgcttgcaaactgaaggtgttcgatttgttaaaagatgaagcaccccagaaggctgcggatattgccagcaaagtggacgcctctgcgtgtggaatggagaggcttctggacatctgtgctgccatggggctcctggagaagacagagcaaggttacagtaacacagagacagcgaacgtctacctggcatcggatggcgaatactctctgcacggcttcatcatgcacaataatgacctcacatggaacctctttacatacctggagtttgccatccgagagggaacaaaccagcaccacagggcgttggggaagaaggcggaagatctgttccaggatgcgtactaccagagcccggagacgcggctgaggttcatgcgggccatgcacggcatgacgaagctgactgcgtgccaggtggccacggccttcaatctgtcccgcttctcctccgcctgcgacgtgggaggctgcaccggtgcactggcccgagagctggcccgtgagtaccctcgtatgcaggtgactgtgtttgacctcccagacattatcgagctggccgcccacttccaaccccccggaccgcaggcagtgcagatccacttcgcagcaggtgactttttcagggaccccctccccagcgctgagctgtacgtcctgtgccggatcctgcatgactggccagacgacaaagtccacaagttactcagcagggtcgccgagagctgcaagccaggggccggcctgctgctggtggagacgctcctggatgaggagaagagggtggcgcagcgcgccctgatgcagtcactgaacatgctggtgcagactgaaggcaaggagcggagcctgggcgagtatcagtgcttgctggagctgcacggcttccaccaggtgcaggtggtgcacttggggggtgtcctggatgccatcttggccaccaaagtggccccctgaagcccaggcagcatgttcattatagggatgtcctcccccaggctgcaggtggaccgcccggtccccaagtaccataggacagtcacataggagcgtgtagtcgtgactcctagcaggcagacggctgctgtgacggtgccgtctaccaggcagggtctcagtccttctccgcactccagcctgcatcttcccatcttctgcacgatttccagtgtgtttcctccatgggacgccatcgctgccgctcacccctggatgcccacaggctatggagtggcagttctctgggcggcttccatctctcctgccttggtgcaggaattccgccgcnctgtacgaaggtcatcagtggtggca

SEQ ID NO: 61227 - DNA, 6310 bp, Homo sapiens
gattgtttgaatttgaaaacggtaacatcgcagtgctgctcgcgggtctggctagtcaggcgaagtttgcagaatggaatctaattttaatcaagagggagtacctcgaccatcttatgtttttagtgctgacccaattgcaaggccttcagaaataaatttcgatggcattaagcttgatctgtctcatgaattttccttagttgctccaaatactgaggcaaacagtttcgaatctaaagattatctccaggtttgtcttcgaataagaccatttacacagtcagaaaaagaacttgagtctgagggctgtgtgcatattctggattcacagactgttgtgctgaaagagcctcaatgcatccttggtcggttaagtgaaaaaagctcaggggcagatgggcacagaaattcagttttttcccaggttttttgggcccagcaactacacagaaggaattctttcagggttgcattatgcaccccagtaaaagacctcttgaaaggacagagtcgtctgatttttacttacgggctaaccaattcaggaaaaacatatacatttcaagggacagaagaaaatattcgcattctgcctcgaactttgaatgtattatttgatagtcttcaagaaagactgtatacaaagatgaaccttaaaccacatagatccagagaatacttaaggttatcatcagaacaagagaaagaagaaattgctagcaaaagtgcattgcttcggcaaattaaagaggttactgtgcataatgatagtgatgatactctttatggaagtttaactaactctttgaatatctcagagtttgaagaatccataaaagattatgaacaagccaacttgaatatggctaatagtataaaattttctgtgtgggtttctttctttgaaatttacaatgaatatatttatgacttatttgttcctgtatcatctaaattccaaaagagaaagatgctgcgcctttcccaagacgtaaagggctattcttttataaaagatctacaatggattcaagtatctgattccaaagaagcctatagacttttaaaactaggaataaagcaccagagtgttgccttcacaaaattgaataatgcttccagtagaagtcacagcatattcactgttaaaatattacagattgaagattctgaaatgtctcgtgtaattcgagtcagtgaattatctttatgtgatcttgctggttcagaacgaactatgaagacacagaatgaaggtgaaaggttaagagagactgggaatatcaacacttctttattgactctgggaaagtgtattaacgtcttgaagaatagtgaaaagtcaaagtttcaacagcatgtgcctttccgggaaagtaaactgactcactattttcaagtttttttaatggtaaagggaaaatttgtatgattgtcaatatcagccaatgttatttagcctatgatgaaacactcaatgtattgaagttctccgccattgcacaaaaagtttgtgtcccagacactttaaattcctctcaagagaaattatttggacctgtcaaatcttctcaagatgtatcactagacagtaattcaaacagtaaaatattaaatgtaaaaagagccaccatttcatgggaaaatagtctagaagatttgatggaagacgaggatttggttgaggagctagaaaacgctgaagaaactgaagattaggggaaactaaacttcttgatgaagatctagataaaacattagaggaaaataaggctttcattagccacgaggagaaaagaaaactgttggacttaatagaagacttgaaaaaaaaactgataaatgaaaaaaaggaaaaattaaccttggaatttaaaattcgagaagaagttacacaggagtttactcagtattgggctcaacgggaagctgactttaaggagactctgcttcaagaacgagagatattagaagaaaatgctgaacgtcgtttggctatcttcaaggatttggttggtaaatgtgacactccgagaagaagcagcgaaagacatttgtgccacaaaagttgaaactgaagaagctactgcttgtttagaactaaagtttaatcaaattaaagctgaattagctaaaaccaaaggagaattaatcaaaaccaaagaagagttaaaaaagagagaaaatgaatcagattcattgattcaagagcttgagacatctaataagaaaataattacacagaatcaaagaattaaagaattgataaatataattgatcaaaaagaagatactatcaacgaatttcagaacctaaagtctcatatggaaaacacatttaaatgcaatgacaaggctgatacatcttctttaataataaacaataaattgatttgtaatgaaacagttgaagtacctaaggacagcaaatctaaaatctgttcagaaagaaaaagagtaaatgaaaatgaacttcagcaagatgaaccaccagcaaagaaagggtctatccatgttagttcagctatcactgaagaccaaaagaaaagtgaagaagtgcgaccgaacattgcagaaattgaagacatcagagttttacaagaaaataatgaaggactgagagcatttttactcactattgagaatgaacttaaaaatgaaaaggaagaaaaagcagaattaaataaacagattgttcattttcagcaggaactttctctttctgaaaaaaagaatttaactttaagtaaagaggtccaacaaattcagtcaaattatgatattgcaattgctgaattacatgtgcagaaaagtaaaaatcaagaacaggaggaaaagatcatgaaattgtcaaatgagatagaaactgctacaagaagcattacaaataatgtttcacaaataaaattaatgcacacgaaaatagacgaactacgtactcttgattcagtttctcagatttcaaacatagatttgctcaatctcagggatctgtcaaatggttctgaggaggataatttgccaaatacacagttagaccttttaggtaatgattatttggtaagtaagcaagttaaagaatatcgaattcaagaacccaatagggaaaattctttccactctagtattgaagctatttgggaagaatgtaaagagattgtgaaggcctcttccaaaaaaagtcatcagattgaggaactggaacaacaaattgaaaaattgcaggcagaagtaaaaggctataaggatgaaaacaatagactaaaggagaaggagcataaaaaccaagatgacctactaaaagaaaaagaaactcttatacagcagctgaaagaagaattgcaagaaaaaaatgttactcttgatgttcaaatacagcatgtagttgaaggaaagagagcgctttcagaacttacacaaggtgttacttgctataaggcaaaaataaaggaacttgaaacaattttagagactcagaaagttgaacgtagtcattcagccaagttagaacaagacattttggaaaaggaatctatcatcttaaagctagaaagaaatttgaaggaatttcaagaacatcttcaggattctgtcaaaaacaccaaagatttaaatgtaaaggaactcaagctgaaagaagaaatcacacagttaacaaataatttgcaagatatgaagcatttacttcaattaaaagaagaagaagaagaaaccaacaggcaagaaacagaaaaattgaaagaggaactctctgcaagctctgctcgtacccagaatcctgaacgcagatcttcagaggaaggaagaagattatgctgacctgaaagagaaactgactgatgccaaaaagcagattaagcaagtacagaaagaggtatctgtaatgcgtgatgaggataaattactgaggattaaaattaatgaactggagaaaaagaaaaaccagtgttctcaggaattagatatgaagcagcggaaccattcagcaactcaaggagcagttaattaatcagaaagtggaagaagctatacaacagtatgagagagcatgcaaagatctaaatgttaaagagaaaataattgaagacatgcgaatgacactagaagaacaggaacaaactcaggtagaacaggatcaagtgcttggaggctaaattggaggaagttgaaaggctggccacagaattggacagatggagggtaaaatgcaatgatttggaaaccaaaaacaatcaaaggtcaaataaagaacatgagaacaacacagatgtgcttggaaagctcactaatcttcaagatgagttacaggagtctgaacagaaatataatgctgatagaaagaaatggttagaagaaaaaatgatgcttatcactcaagcgaaagaagcagagaatatacgaaataaagagatgaaaaaatatgctgaggacagggagcgtttttttaagcaacagaatgaaatggaaatactgacagcccagctgacagagaaagatagtgaccttcaaaagtggcgagaagaacgagatcaactggttgcagctttagaaatacagctaaaagcactgatatccagtaatgtacagaaagataatgaaattgaacaactaaaaaggatcatatcagagacttctaaaatagaaacacaaatcatggatatcaagcccaaacgtattagttcagcagatcctgacaaacttcaaactgaacctctatcgacaagttttgaaatttccagaaataaaatagaggatggatctgtagtccttgactcttgtgaagtgtcaacagaaaatgatcaaagcactcgatttccaaaacctgagttagagattcaatttacacctttacagccaaacaaaatggcagtgaaacaccctggttgtaccacaccagtgacagttaagattcccaaggctcggaagaggaagagtaatgaaatggaggaggacttggtgaaatgtgaaaataagaagaatgctacacccagaactaatttgaaatttcctatttcagatgatagaaattcttctgtcaaaaaggaacaaaaggttgccatacgtccatcatctaagaaaacatattctttacggagtcaggcatccataattggtgtaaacctggccactaagaaaaaagaaggaacactacagaaatttggagacttcttacaacattctccctcaattcttcaatcaaaagcaaagaagataattgaaacaatgagctcttcaaagctctcaaatgtagaagcaagtaaagaaaatgtgtctcaaccaaaacgagccaaacggaaattatacacaagtgaaatttcatctcctattgatatatcaggccaagtgattttaatggaccagaaaatgaaggagagtgatcaccagattatcaaacgacgacttcgaacaaaaacagccaaataaatcacttatggaaatgtttaatataaattttatagtcatagtcattggaacttgcatcctgtattgtaaatataaatgtatatattatgcattaaatcactctgcatatagattgctgttttatacatagtataattttaattcaataaatgagtcaaaatttgtatatttttataaggcttttttataatagcttctttcaaactgtatttccctattatctcacacattggatcagtgaagatcctaggaaagaggctgttattctcatttattttgctatacaggatgtaataggtcaggtatttggtttacttatatttaacaatgtcttatgaattttttttactttatctgttatacaactgattttacatatctgtttggattatagctaggatttggagaataagtgtgtacagatcacaaaacatgtatatacattatttagaaaagatctcaagtctttaattagaatgtctcacttattttgtaaacattttgtgggtacataggacatgtatatatttacggggtatgtgagatgttttgacacaggcatgcaatgtgaaatacctgtatcatggagaatgaggtatccatcccctcaagcatttttcctttgaattacagataatccaattacattctttagatcatttaaaaatatacaagtaagttattattgattatagtcactctattgtgctatcagatattaaatcattctttttatcttatttgtttttgtacccattaaccatccccacctccccctgcaaccgtcagtacccttaccagccactggtaaccattcttctactctgtatgcccatgaggtcaattgattttatttttagatcccataaattcgacgcggccg

SEQ ID NO: 61228 - DNA, 1017 bp, Homo sapiens
ggcggcattcgaggctcggcgctcaggaagcatggcactctggcgggcataccagcgggccctggccgctcacccgtggaaagtacaggtcctgacagctgggtccctgatgggcctgggtgacattatctcacagcagctggtggagaggcggggtctgcaggaacaccagagaggccggactctgaccatggtgtccctgggctgtggctttgtgggccctgtggtaggaggctggtacaaggttttggatcggttcatccctggcaccaccaaagtggatgcactgaagaagatgttgttggatcaggggggctttgccccgtgttttctaggctgctttctcccactggtaggggcacttaatggactgtcagcccaggacaactgggccaaactacagcgggtgagctgggcaggattatcctgatgcccttatcaccaactactatctatggcctgctgtgcagttagccaacttctacctggtcccccttcattacaggttggccgttgtccaatgtgtgtctgttatctggaactcctacctgtcctggaaggcacatcgggctctaagcctgcctcactccatcgtttccaccttgcaagtgatgcagcttgacccctggaacgggtcagacaaccctcctcaaaagtgggcataccagtttcccacgggggttgggttgccggtcaggagcttaagaggactagcaccctgcaaatgcccctcttcactctaaaatgtacactgactgctttagagcccttgataatagtcttaattcccaccacatactaaggcactccataaatatctgttgaaccttcatgaccttatcaacttttacacccaatatcccagcaaatgccactcatccccactcttcatagacacatttgttactctaaccctgcctaggcttcttgtagctccagctctttagagactcccggaaccctttatatggtgcctcagtaaatatgttattaaatatgtaatccggaaaaaaaaaa

SEQ ID NO: 61229 - DNA, 1572 bp, Homo sapiens
ttttttttttttccacaaataaagtgttttatttacaggagttgtctctccaggtcccagctccctgccacccccaccccagccccagggagaagagggcggatgccagaggagctggcagaggctgggcaggtcctgagtgggccaggctaggccaagagagaaggcacgaggccctgggcgccccagtcccagggcagaggccaggcctgcctggagaaggcagcacggggtcagctctcaggggtcaggctgggttccacgccgccgcagctctgctcataagacggtggggcctcataggggtagccccaagaactgtactctggaggaagaatcaaggtgctggtagtgggcactggccccccggagccctctgcaaagtaggggacagtggcacctgttgaaatgcacaagggagggtgcagcgggtgtgaggcagggctgccatcctgagggcagggctccggcgcaccaggcacagaactcaaggtggccagcaggggctgccgctgcgaatggctcttggtggagaggaagacggggtccaagaagtgggggccgccagccgcagcctcagcctcagcctcctcctggggtggtgcggaaggcaccaccaggggtggggccccaggaggcagccccaggcctggccgggggctcactggggcatggttcacagcaatattgccaatgaagaccgggagggtcacagtagcttccggcgccttcagagagacctgtaagtagtagtcgatgtggatgaggctgcagcccggcagggccgactggggcaaggcaggcaccaggatctgctcgtgccactgcgcccgccgccaggccttgacgcccgcaccctccacctccgcaatggtccgtacgtcgtggatccagcgcttggccttataggacactttctgcagcagactggccaccacagggctggtgtccttgcctgactggttctcaacgtcggcatgcagctgcagtgcctgccccaccacatagccgcggagatcagtgctggctgtgaggaccacgctgcccgtcttcaccagcttgtaggagaacttcttggtggcagaggccacgttgggttgctcaatgtctgggatgctgttcaggttcaaggggctcaagatatagaacacgaggctgcacttgtgatccttggaaaaccgtggcgtgtggatggcggccctcacctggtgcacgatcttcccgaaaggaccctcaaaggacgtgggtgcagtggcaggaagcaggaactggaaggggaagctgtgctctccagcgggcaggctccccttgtctgccagcgacagggaactgttgaagtaaccctcctccactacccacgctgtgtcattagccttgttggagaccccgcaggaacctatgcaggtcacccggatggctcggaacggcagcggtgcccccaggcgcacgcgcacggtcccagccaacggctccccggggctgtagacgacgcggccgtggctcaggctgatctcgaagagctgcactcgccccatgccgcgctcaccggccagccgcagcgcctcgtccgaa

SEQ ID NO: 61230 - DNA, 1388 bp, Homo sapiens
aagacttgccccaaattaacctgtgccttcacagtctctgttccagattcctgctgccgggtatgcagaggagatggagaactgtcatgggaacattctgatggtgatatcttccggcaacctgccaacagagaagcaagacattcttaccaccgctctcactatgatcctccaccaagccgacaggctggaggtctgtcccgctttcctggggccagaagtcaccggggagctcttatggattcccagcaagcatcaggaaccattgtgcaaattgtcatcaataacaaacacaagcatggacaagtgtgtgtttccaatggaaagacctattctcatggcgagtcctggcacccaaacctccgggcatttggcattgtggagtgtgtgctatgtacttgtaatgtcaccaagcaagagtgtaagaaaatccactgccccaatcgatacccctgcaagtatcctcaaaaaatagacggaaaatgctgcaaggtgtgtccaggtaaaaagcaaaagaagaacttccaggccaaagctttgacaataaaggctacttctgcggggaagaaacgatgcctgtgtatgagtctgtattcatggaggatggggagacaaccagaaaaatagcactggagactgagagaccacctcaggtagaggtccacgtttggactattcgaaagggcattctccagcacttccatattgagaagatctccaagaggatgtttgaggagcttcctcacttcaagctggtgaccagaacaaccctgagccagtggaagatcttcaccgaaggagaagctcagatcagccagatgtgttcaagtcgtgtatgcagaacagagcttgaagatttagtcaaggttttgtacctggagagatctgaaaagggccactgttaggcaagacagacagtattggatagggtaaagcaagaaaactcaagctgcagctggactgcaggcttattttgcttaagtcaacagtgccctaaaactccaaactcaaatgcagtcaattattcacgccatgcacagcataatttgctcctttgtgtggagtggtgtgtcagcccttgaacatctcctccaaagagactagaagagtcttaaattatatgtgggaggaggagggatagaacatcacaacactgctctagtttcttggagaatcacatttctttacaggttaaagacaaacaagaccccagggtttttatctagaaagttattcaagtgaaagaaagagaagggaattgcttagtaggagttctgcagtatagaacaattacttgtatgaaattatacctttgaattttagaatgtcatgtgttcttttaaaaaaattagctccccattcccccactccagataaagcttcagtta

SEQ ID NO: 61231 - DNA, 2843 bp, Homo sapiens
ttttttttttttcctttcacaaaatggatttttattgtggtcatacatggtttctcagtgccacagaaaattgctatgtagggacaaaaaatttttggatggctctgtaaagaaacatggtaggttttcagaaatgagttgtgcaggaatgtggttaatgaaaagcagaaagggttaagggaagagaaaggaagccaaggagtgtggtatgtacatcaaatgattactttttaagcccctctaggctctgataaccctttccccaagtcagatcccaacaaaattcatcagtaactgaagtgattgtgctaacagatacataaagactaccggagaaaagtgggttgagatgggctcagacttattgttaggacaactctgggagtcttgtgtctgtgccaaccacgtatccgtgggctacctggagatgagttctaacaaccagcccagaacccaaagctgctctccaacacctttgtttagtagggaaaacccgtagtggggacaagagaggaagctgtgcccttcccccaaccaccgtttcatcttctgctcgctgaccttgatgtgacttgagagctctccttgcttcggctgtgcagtccagaagccagaacttcctctaggaaacttttcgtgttgtgcactgtggtgcctcccaggacaatcctcactccaggagtggtgcggttcaggttataaactgttagagcctcttcataggtggctcctccaattacaaacacaatgatatcctgaggtctgtctctgagtgtgctggggcctaaataaggatataggttttccttaagccttcctttgatgagatgatccagggtttcatgtaggaaaggttgatgctgtgtatatacattttctactcccttcagtcctttgaggaattgtttggtgatagccacagcatctttggggctgaagaggtcacttcctctgactcgtttaccaccatattcaacaactgcagacacgagctttcgatacttctcagaaacacctttattcctgaggtccatcattagtcctggcaggctattgctgctgtgtcgctcataatgtaaagcataaagcatcaccaggcgggcagcatcaaactctgtcactttggggttctgcagaagcctttttatattctggagagcactagaatggtcattttgacaggccagttcttgctcaacctctgaaacctccagcagattccgttcactgaccaatcgagacagttctccaaccactgtcacatgctttgaaacagtcccagacattttcttgaactgtggataattctcaacaaacgccttcatgtctgctattgattctagtttttgctgttcttttggtttcttcttctgaaaatcttccatgagattctttatattgctaccaatctcagcaaagttcaggtacatattattagcatagaattcatcattttcagcagatgagacccacttctcttaagtctttactgattcccggcactctggaaagatcaatccgattgttgtttatgcctagtagttcgtggaccatggcctgatatgtccactggtttagcaatggggtgatggcatcatccaagcgatctaaaataaggagcaatggaggaacctctgtccgacggaatttcaaacagttcatattctttagttatcacttgcttaacgcactctgcaagtctctttgctgcctctgatgagagctgataacgaatcatgggacacttcttcagagataaaaggagagctgtaagcccttgagttgttcctagatagctgggctggatcccaatttcgaccctggcagcaaccccaaattattgagggaaaacaaatgtgggttcacagcaatgtaatcaccataaaattcctgaaacctcagccacaacttcctgttcatcagcttcagccaatgacttcacgtcactcttgctgatcacattactgaaataaatgaaatatatagtgtatttgggtcttcggagctcctgaataatataatccacattctcctttgtaggtcgaagaaaacaaattgccttcaggtgtttcatgatctctcgattttgagaatcaatgcgttcaaagaggtacacttccttctgtagaatctccgattgtgtgtataccatactcactatgccagtcgtctctttatccatgagaagtactttcataccaggcccgctgtcctctatcattttggaaatgtactgcttcacagcaaaaaccacgttcatggcggcgaattgacaagtaccctacagcccttcccgcccccttttctggctaaattaacccccagtctgttggccgggtctcagctgcttcctcccagccgggattcggcttccgggagtccgggcagccacggtgctgggagttgtagttccgctggagtgtacaggggaccaagcctaccccggggatggaaaaatccggctgagacggcctgggccgctgccacgcgcgggcgttattctccacccacctgcggcctgaagatgcctgaggcccggactctcagacccctattgccctttggtgctggaggcccagcggcagcctgaagcccaagagagtggagcctcgcgaaatgaggaacctggcacaaggtttgcttggaagcaggaacgacggagtgtggctacgtgccctatttgccattaacgctttcttgcatggcagtgagagatgagggcaagggaggtggcataatgctcccggccgcttgggactcggagagacggcatttaataaatcacacgcggtatttgcgaaacagtggtcgagattcgtcttcccgggttcattgcgtcatta

SEQ ID NO: 61232 - DNA, 1656 bp, Homo sapiens
ccaagccgcggtcccgggccggcacccaggatgggcgaggtggaggccccgggccgcttgtggctcgagagcccccctgggggagcgccccccatcttcctgccctcggacgggcaagccctggtcctgggcaggggacccctgacccaggttacggaccggaagtgctccagaactcaagtggagctggtcgcagatcctgagacccggacagtggcagtgaaacagctgggagttaacccctcaactaccgggacccaggagttgaagccggggttggagggctctctgggggtgggggacacactgtatttggtcaatggcctccacccactgaccctgcgctgggaagagacccgcacaccagaatcccagccagatactccgcctggcacccctctggtgtcccaagatgagaagagagatgctgagctgccgaagaagcgtatgcggaagtcaaaccccggctgggagaacttggagaagttgctagtgttcaccgcagctggggtgaaaccccagggcaaggtggctggctttgatctggacgggacgctcatcaccacacgctctgggaaggtctttcccactggccccagtgactggaggatcttgtacccagagattccccgtaagctccgagagctggaagccgagggctacaagctggtgatcttcaccaaccagatgagcatcgggcgcgggaagctgccagccgaggagttcaaggccaaggtggaggctgtggtggagaagctgggggtccccttccaggtgctggtggccacgcacgcaggcttgtaccggaagccggtgacgggcatgtgggaccatctgcaggagcaggccaacgacggcacgcccatatccatcggggacagcatctttgtgggagacgcagccggacgcccggccaactgggccccggggcggaagaagaaagacttctcctgcgccgatcgcctgtttgccctcaaccttggcctgcccttcgccacgcctgaggagttctttctcaagtggccagcagccggcttcgagctcccagcctttgatccgaggactgtctcccgctcagggcctctctgcctccccgagtccagggccctcctgagcgccagcccggaggtggttgtcgcagtgggattccctggggccgggaagtccacctttctcaagaagcacctcgtgtcggccggatatgtccacgtgaacagggacacgctaggctcctggcagcgctgtgtgaccacgtgtgagacagccctgaagcaagggaaacgggtcgccatcgacaacaacaaacccagacgccgcgagccgcgccaggtacgtcccagtgtgcccgagccgcgggcgtcccctgccgctgcttcctttttcaccgccactctggagcaggcgcgccacaacaaccggtttcgagagatgacggactcctctcatatccccgtgtcagacatggtcatgtatggctacaggaagcagttcgaggccccaacgctggctgaaggcttctctgccatcctggagatcccgttccggctatgggtggagccgaggctggggcggctgtactgccagttctcgcgagggctgagccccgcccagctcccctccacaataaacgctgtttctccttgaaaaaaaaacaaa

SEQ ID NO: 61233 - DNA, 1846 bp, Homo sapiens
acaggaagccccttccgccctctgggcctcagtttccccacaccggggctggtctgctcctagctctgggtgcaggacacacaggagtggcacaggtcgggctggggagagccttctctcctttgtggtccaggatggcgcagaagtaccatgagtactcccactacaaggagcaggatgggcaggggatgaagcagcggcctccgcggggctcccacgcgccctatctcctggtcttccaagccatcttctacagcttcttccatctgagcttcgcctgcgcccagctgcccatgatttatttcctgaaccactacctgtatgacctgaaccacacgctgtacaatgtgcagagctgcggcaccaacagccacgggatcctcagcggcttcaacaagacggttctgcggacgctcccgcggagcggaaacctcattgtggtggagagcgtgctcatggcagtggccttcctggccatgctgctggtgctgggtttgtgcggagccgcttaccggcccacggaggagatcgatctgcgcagcgtgggctggggcaacatcttccagctgcccttcaagcacgtgcgtgactaccgcctgcgccacctcgtgcctttctttatctacagcggcttcgaggtgctctttgcctgcactggtatcgccttgggctatggcgtgtgctcggtggggctggagcggctggcttacctcctcgtgggcttacagcctgggcgcctcagccgcctcactcctggggcctgctgggcctgtggctgccacgccccgtgcccctggtggccggagcaggggtgcacctgctgctcaccttcatcctctttttcttgggcccctgtgcctcgggtcctgcaacacagctggatcctctatgtggcagctgccctttggggtgtgggcagtgccctgaacaagactggactcagcacactcctgggaatcttgtacgaagacaaggagagacaggacttcatcttcaccatctaccactggtggcaggctgtggccatcttcaccgtgtacctgggctcgagcctgcacatgaaggctaagctggaaggtgctgctggtgacgctggtggcggccgcggtctcctacctgcggatggagcagaagctgcgccggggcgtggccccgcgccagccccgcaatcccgcggccccagcacaaggtgcgcggcttaccgctacttgcaggcgcacaactcggacgagagcgacccggagggcgagcatgcggacgccgcgcaggaggaggcgccgcccgcagggcccaggcctgggccccgagcccgctggactcggccgccggccgtgcccgtacgaacaggcgcaggggggagaccggcccggaggagcagtgaaggggccgcctggtccccgggactcagcctcccttcttcgccggcctcagtttaccaccgtctgagggtcgggggggacccccctccgaggtcccgcgcttgtcttcaaaggccccttgtctccccttccccgacgttggggacgccccttcccagagcccaggtcaccttccggggttccgcagcccccttccaagggcggagtggagccttgggaacccctcggccaagcacaggggttcgaaaatacagctgaaaccccgcgggcccttagcacgcgccccagcgccggagcacggtcagggtcttcttgcgacccggcccgctccagatccccacagctctcggccgcggacccgggccgcgtgtgagcgcactttgcacctcctatccccagggtccgccgagagccacgattttttacagaaaatgagcaataaagagattttgtactgtcaaaaaaaa

SEQ ID NO: 61234 - DNA, 3560 bp, Homo sapiens
tcacaggaagccggaggtcgctctgatcccgaatctcccacaggcgtgaacctgctctgctgtgtatctttgcggggtggcctgcgctgaggcctgccgcgcgcggtgagtccgcgcagacctgaccctgcgtctcgcagctcggttgaggccgccgccgccttctcgggatgccgcggccggggtccgcgcagcgctgggcggccgtcgcgggccgttgggggtgcaggctgctcgcactgctgctactggtgcctggacccggcggcgcctctgagatcaccttcgagcttcctgacaacgccaagcagtgcttctacgaggacatcgctcagggcaccaagtgcaccctggagttccaggtgattactggtggtcactatgatgtagattgtcgattagaagatcctgatggtaaagtgttatacaaagagatgaagaaacagtatgatagttttaccttcacagcctccaaaaatgggacatacaaattttgcttcagcaatgaaattttctactttcacacataaaactgtatattttgattttcaagttggagaagacccacctttgtttcctagtgagaaccgagtcagtgctcttacccagatggaatctgcctgtgtttcaattcacgaagctctgaagtctgtcatcgattatcagactcatttccgtttaagagaagctcaaggccgaagccgagcagaggatctaaatacaagagtggcctattggtcagtaggagaagccctcattcttctggtggttagcatagggcaggtatttcttttgaaaagctttttctcagataaaagaaccaccacaactcgtgttggatcataactacgttttgagaattgatgcaccattgccactgtaatattgctgtcctctaattaattttaggtactgaagaacttaatattggcaacatttttaaatccttactcatacacttgttgggagggatgtacaatgcatattcccaaactgtggaaaggacacctttttttatttgtaaaggtggaaaaactttggaactcattttgggctattcatgttaaatattcaacaccaatgatctactctgttcgcagttgtttatatctactcttcgcacactaaactttggtattttgattccttttaaccatttaagactacttttcttataggtagttgatattttaaaaaccttagatttaatgtctacatgtgttagggaggaagaaaattgccttttaattgttaataagaaaaccaaatgtgatgaactgtagcccaagccctattctgcactgttcagttttatggaggaaaaataaatctaccataggaatgttagttaatattgatatatcatggtaaaattgatttctcactagcttagaaaatgtcagacttttgtttttggggtttataatttaaaccagctatgctattttttcataaaggcatttgtagtacacagaaaacagtagtttcagtagtgtaaaagagtttatacaggccttaaatatcagactttgtaacaggtagaaatattacagaataatttaagacactacaatgggggcaaatgaaataggaaaatttttagtgagttacccgtactcattacattttcagtgcttttacaaggaaaaaaggtgatatgtttaattttaacattttaattggctagctcttgcccttatatgactttaatgtctgtgagtcattcccagcttaaattaacaattgttagtattagtctcacacataagtgccatacattttatcctcatggatgtgatgcactgaaaagttagttgctctccttttttcttttttttgtcgtgcatattttatttctgtagtttctggttagctaccctaaagtgatttaaaaatttagaatgctttgtgtttcctatttggtaatcttcattgacttttctttagttaatgagtattaaatagtgcatattctgtagactatagggtttacattgtgttgcatcttataacttgtatagattgagctgattgaaataagattttgttccaagtattatctgatagaatacaagatgattcaaaattatatagatatttaaagcttttctgctgttttttttttttttaaatggcaacggtttttttgccgggccttttttccttacccaaaagggaggagttttgaacaagacaaaactgtcatattgtaaaaactttggtatgggatcccttaaaatactgattggatacccttcctagtcacttaccaatactgactagaagttaactcttaattctaagctatcttaaaatgcatatatatacttcttgcatggaagagcaaaacaaattcaagttgtcatgcctgataatttcagatgccaccgtatagcaaagggtgaacatgttttcaaccctttaactttttacggtgtttgaagaccagctactccttaatatttatcaatggattaagaagtttaagattttgcagatttatcaatttgggtttttgtactgaagttgtcttgcggctttgcaagtgtccctttatatttaaatttgaaagttgtaagcactgatgttaatgtgattgatcagcatgggcatatgtaaaatgtccttttctggttgcctctctatgctattgtgttcagatacttacaccataattaaacagtaagttatagacttgctgagtttggcatagatagtgcactcatttaatctgtgcctctcaaaacttcagaatattagcatattaccacaaataatttttggtgaaactattgagatattaaaatttttgaaatcactactgttacctgttatagaaaatagtgttggcttagtctagtctctgtgtaactggttacattttgatggttgtctatactcaactggatatgtgtatgtaaattagaaaatacatacctatccagacataaatgctaagtaacatttttttcttcctccaactacataatttgtagctcatcatttttccttaatcctttcctaacttgttgcagcagtttgaatttcccagatatttatgtttgaacataatggctcagaatacatatttgaacatcatagttgtatatatttttaaagtagaataaataatggaaagcaacttgatatacaagtttatactaaaatttcaactgtgtgaagatacattttaaggcattactttgctaataatctacacattcttttttctattaaataaacaaatggtttgtggttcacagctttcatccaagcttggtgataatcaattttgaaaatacagtggactgaaaagcaaatttattctttcgaagatttcatttaaatctctgtactatgcatttttgtttcagtttgtaaatgtgtaacatttatagttaaataggacaaagcaggccctatgactattgttttcaaaaaattaatatataaataattcagaggggtttttcatttacttttgaaaagaaatttctttaacaggattgcacctatcaatttcttgtagaataaaaaaaaatctttcaacaaaaaaaaaa

SEQ ID NO: 61235 - DNA, 1461 bp, Homo sapiens
ctcaacagggcgtgtttttgtgtcactggtgtccctgagctggaggtgatctgtctgtcggggctgcagcaggcggaatggccccgtctgggattgagccacctgggagctgtcggcgggggttggggcggccttcccacctccacctgggtttctcttcacactcaggaggtagatctggcctcggaagtggccttagaggtggtgcggacagcagagcctggcgtgtggttggaggctcaggccccggtggccctggtggctcagcctgagcccctgccggccacagctggtgtgaagagggagagcgtgggcatggaggtggcagtgctgactgatgacccgctgcccgttgtggaccagcagcaggtgctggcccgtctgcagctgttggagcagcaggttgtgggtggagagcaggccaagaacaaggacctgaaggagaagcacaagcggcgcaagcgctacgcagacgagcgcaggaagcagctggtggctgccctgcagaactcggatgaggacagcggggactgggtgctgcttaacgtctacgactccatccaggaggaagtgcgggccaagagcaagctgctggagaagatgcagaggaagcttcgggcagcagaggtggagatcaaagatctgcagtccgagtttcagctggagaagatcgattacttggccaccatccgccggcaggagcgtgactccatgctcttgcagcagctcctggagcaggtgcagcccctgattcgcagggactgtaactacagcaacctggagaagattctgcgtgagtcctgctgggacgaagataacggcttctggaagatcccacatcccgtcatcacaaaaaccagcctcccagtagcagtttcaactgggccacagaacaaaccagcccgcaaaacctctgcagcagacaatggcgagccgaacatggaggaggaccgctacaggctcatgctcagtcggagcaacagtgaaaacattgccagcaactacttccgatctaagcgggccagccagatcctcagcacagacgccaggaagagcctcacacatcacaactcgccaccaggcctcagctgcccactcagcaacaactctgccatcccacccacccaggcccctgaaatgccccagccccggcccttccgcctcgagtccctcgacatccctttcaccaaggccaagcgtaagaaaagcaaaagcaactttggcagtgagcctctgtgagcacagctgcttgccattgcctgccttataggactgtagagactgccaggccctcccagggcagccccaaccaggtctcctcccacctgccacacagcgctccggggcctgagggctccctcagccctgggaagatacattcccttccctgttccccagagagcccacctctgccctgggcaggagcccctcggaggctgtatagtcctccttagagaggcc

SEQ ID NO: 61236 - DNA, 2073 bp, Homo sapiens
catttaaacagtgtgttttcgagtaagctggtaagtggtataataggaatagtagaagaatatgccatagctatggctcaagaataggaataagaaaaatgtgcagtagacgctgtttgtccgacgatgatgaaagtgtgcacggccggctgtcctccgattgaggggccttgtcaaggcctcagaggcagcgaggtcacagcctggtggagggtctgggtgtgcgctgtgtccatctgcacctcacagacaccagtcatggggggatgaaaccgggccaagaacacatgtgtgcacaggcttgtgtgtgcctgcatgtgtgggatgcgtgtaggctgtggcgggggtggagatgagggataggacaggaaaatggcccatccaaccccacatccctggccgggcgtgtccaggtccctttggggcgagggtttggctgccccagacgtgacagggacttggctctgagggtcaggacctggctgggaacacccattgaagagggaacagaaaccaggccctgggacgctagagaccccaagagctacctggctgggtctatggtcagggctgtagtggaggaaggtgtcaggatggccattgtctcaactcctgtgggcggcacagccccaggctgggcctctgggaggagggtgggatggatgggagatcagagcccctggcgcctgggacaagggttggcctggatgtggggccccaggtgggcagggcctgggagccgccacagtatgtgacaacagaccccaccctggacccccgtgctgggggctgggtcccaccgctctcctctccacgtctctcttggcgatgcccagcttgggctgggcgcagggaagggcaaacgttgctgagccgccgaggggctgggtcttcgcctttatttctggtgcacgtctagaggggcccgggcagaggccacccacggtccctgaagtagggcctcagctcctccaggctgagcggagggaagtaggctccgatcctcttccgcacccaccacttgccctcggcggcgtgcctgcccccaggacggctgaacttgtacctgtagtgctctcctcggacccacctgggcgggggcctgcccgcgaaggggttgtgtgccagcagggacaaggcctcggcgtcgctggccaggagcttgccagccaggtggatgatccagtcgttgtgctcgtaggtctggcttgcacttgaactcgtagtcctcccacatggcatcgggggcgctggcgttggagctggctgtgccctgcaggatcacctccgcccgctccttggtgatgcttccgaaggccccgtaagtgttgacgatgtgaagagagttgaagtgggtgttcatgacctgcctggagctcagcaagttgaggaccacgggcacgctgagccaggccagcaggacgcccagcgagacgttggctgcacgccgcaccacggagccgaatctgggctcgggccgggcccctcggatgtccctctgcatctgcagaactcggtccttcaggctgcctggcccagaggggaacaagaatcccagggtggcgtcatcaaagcaggccaggctgggcaccatagtcagccagttcaggaagctgaggttcccgctgacgatgaggacggcctggaacaggatctgcagcaccccgtggatgatgcacgcccgccggccgaggaagaggaagaagggcaccaggagctcgatgaagtggttgctgagcgtctcgaagcgatggaaccaccagggtgagtggtgcaggtagtacgccacaggattgggcatcggctgggtctcatagtggaagtccatgcaggtgaggtctcgccagcaccggtccccccggatcttgatcaggcctgctccaagcatgatcctgaagatcagccaccggaagccccacaggacaatccgggatgtgggggtatgctggggcagccttgacagcgtccacagagggcacaggaagatccccaggaaccccgtctccagaagctgggactcccatccgaaagagtaccagacatggcccacattaaccagggacatgtagaggg

SEQ ID NO: 61237 - DNA, 3070 bp, Homo sapiens
ggaattcgccggatctggatcctgagtgccgggagctcctgctggacttcgccaacagcagcgcagagctgacagggtgtctggtgcgcagcgcccggcccgtgcgcctctgtcagacctgctaccccctcttccaacaggtcgtcagcaagatggacaacatcagccgagccgcggggaatacttcagagagtcagagttgtgccagaagtctcttaatggcagatagaatgcaaatagttgtgattctctcagaattttttaataccacatggcaggaggcaaattgtgcaaattgtttaacaaacaacagtgaagaattatcaaacagcacagtatatttccttaatctatttaatcacaccctgacctgctttgaacataaccttcaggggaatgcacatagtcttttacagacaaaaaaattattcagaagtatgcaaaaaactgccgtgaagcatacaaaactctgagtagtctgtacagtgaaatgcaaaaaatgaatgaacttgagaataaggctgaacctggaacacatttatgcattgatgtggaagatgcaatgaacatcactcgaaaactatggagtcgaactttcaactgttcagtcccttgcagtgacacagtgcctgtaattgctgtttctgtgttcattctctttctacctgttgtcttctaccttagtagctttcttcactcagagcaaaagaaacgcaaactcattctgcccaaacgtctcaagtccagtaccagttttgcaaatattcaggaaaattcaaactgagacctacaaaatggagaattgacatatcacgtgaatgaatggtggaagacacaacttggtttcagaaagaagataaactgtgatttgacaagtcaagctcttaagaaatacaaggacttcagatccatttttaaataagaattttcgatttttctttccttttccacttctttctaacagatttggatatttttaatttccaggcatagcaatgttatctattttaatgtgtatttgtcacaataacagaacatgcaagaacaatcattattttattttataggcatttgattactattctagacttctggtatcttcttactaacataaatatctcaagtagaaaagtttttgaaaactaacatttaaaaattaatcagttacagtaaagactttgaaaaagaaatgtacttgttaggaagtagcttaattaccccccattgcagtattattgttatatatatagttaatatgttgtacatcacaataatatataattcagtctctagtttccctagagtcatttttgaaaccactgattgcaaacctccctgacaatttttaaaagtagtaagccacattacatttatctttgtaaaaagatttatggtaactggtttcttacttgacttttataaatagtattttacatcttatttttgcctttatttcataagtaatttaaaaatcactggattgctttattatattcagggcaatatggattatttttataccaaggatttgcatcgtgaattacattaagttatttggcaatttataatttattactactttaaatcaaatgtagcattatcacactgtatttaaattgtcattttttaaaggaatattttcttcttaagatatatagaggattttggagaagagagacaggaggggtaaaaccagcttaaggttcagcgagcagaaagggacctgagaggatgctcactgtaagactgttggacagtggtgtgtattgaggggatgaatcggaacgatagtctcatgcagaaaatagtgagattaagatcatccttattgtttctaaattatttcaatcagatgaaagtgatacgattgaaatgaaatcacatagttcgtgctcagaaattctattttggtatgtttgtattagcctttagaaaaaacactccgtttcagaattgttcacagttttatttcttaggtttttagagttcaggatttcatttattaatttcttcttgcttttttggtggaaataggctttgttgtaaacattaagaatataaaatctcctctatatagaaacaagaattttgttaaaaagagaatttgaatcccttcctatactataaaatgctctatagggagacaaagtgtttcttttttcttttatgtttactgtttatgtggagtgaaatataaggctcttggatgtataacatactcaaaagctgttacactttctctgatctgctgtgatccactgaaaatgtgctggggtttgttctgctgtcactgtttatgctgctggaacttagcactgtcttgatttgaagcatatgattgagagccatttgaagcaatcttcattaatgcagataaaacaagtttacatgtgcagagttagaaaatgacatgttcaattctgtaagtggtgactttttgagcacctttcagtattatgtatttgtaaaaaccattgtttttggatataaagctaataagcactttaaaaaggaaaaggcagcctttactattttttctggttgagtcattgctctttagacctagcatcagcaatagatttcaaagataagtattaagcgctaccctaaagtgtgtaagtttttcattttgtcatattgaaaaatgatttgcatagtactgaatgctgacacacagcttatatgtatttacaagaatatctttaagtgtttttttgacacattaaaataaaggaaataaggaaattgtaagctttatttggatttttaaatacatttttaaaatttcagatgtaatttaacatcacatttgtttttcaggtattgaggtttaagatgcctactttttatgaggtaccatcagctgggacacagtgtctcatacctgtatttgcagcactttgggaggctgaagcagatcgctggagcttatgagttcgagaccagcctggacaacatagtgaaacactgtctctgcaaaaaatacaaaaattagctgggtatggtggtaagtgcctgtagtcctagctacttgggaggctgagatgggaggatgtcttgagcccgggag

SEQ ID NO: 61238 - DNA, 2321 bp, Homo sapiens
tctagcctggatgacagagcaagactccatctcattaaataaataaataaataaatattcaacaacttaagaaatggggtaagtagttcttatctgttgtttgcttaagagtatgagaatcatcgatcctcatgctattgctgatctgaattgcttttaactttttctttcagattaagaatgacccaaaataaattaaagctttgttccaaagccaatgtgtatactgaagtgcctgatggaggatggggctgggcggtagctgtttcatttttcttcgttgaagtcttcacctacggcatcatcaagacatttggtgtcttctttaatgacttaatggacagttttaatgaatccaatagcaggatctcatggataatctcaatctgtgtgtttgtcttaacattttcagctcccctcgccacagtcctgagcaatcgtttcggacaccgtctggtagtgatgttgggggggctacttgtcagcaccgggatggtggccgcctccttctcacaagaggtttctcatatgtacgtcgccatcggcatcatctctggtctgggatactgctttagttttctcccaactgtaaccatcctatcacaatattttggcaaaagacgttccatagtcactgcagttgcttccacaggagaatgtttcgctgtgtttgctttcgcaccagcaatcatggctctgaaggagcgcattggctggagatacagcctcctcttcgtgggcctactacagttaaacattgtcatcttcggagcactgctcagacccatctttatcagaggaccagcgtcaccgaaaatagtcatccaggaaaatcggaaagaagcgcagtatatgcttgaaaatgagaaaacacgaacctcaatagactccattgactcaggagtagaactaactacctcacctaaaaatgtgcctactcacactaacctggaactggagccgaaggccgacatgcagcaggtcctggtgaagaccagccccaggccaagcgaaaagaaagccccgctattagacttctccattttgaaagagaaaagttttatttgttatgcattatttggtctctttgcaacactgggattctttgcaccttccttgtacatcattcctctgggcattagtctgggcattgaccaggaccgcgctgcttttttattatctacgatggccattgcagaagttttcggaaggatcggagctggttttgtcctcaacagggagcccattcgtaagatttacattgagctcatctgcgtcatcttattgactgtgtctctgtttgcctttacttttgctactgaattctggggtctaatgtcatgcagcatattttttgggtttatggttggaacaataggagggactcacattccactgcttgctgaggatgatgtcgtgggcattgcagaagatgtcttctgcagctggggtctacatcttcattcagagcatagcaggactggctggaccgccccttgcaggtttgttggtggaccaaagtaagatctacagcagggccttctactcctgcgcagctggcatggccctggctgctgtgtgcctcgccctggtgagaccgtgtaagatgggactgtgccagcatcatcactcaggtgaaacaaaggtagtgagccatcgtgggaagactttacaggacatacctgaagactttctggaaatggatcttgcaaaaaatgagcacagagttcacgtgcaaatggagccggtatgacacactttcttacaacaacagccactgtgttggctggagagggatggggtgggcccaacggggacacaaggaggcagaggagctaacccctctactccactttcaaaactacattttaaagggaatgtgtatgtgaagagcactaccaaacatcgcttttgttttgttttgttttgttttaagcttttttttttttgcttgtttttaaagccaaaacaaaaaacaaccaagcactcttccatatataaatctggctgtattcagtagcaatacaagagatatgtagaaagactctttggttcacattccgatattaaaatagtgacatgaactggcaaagtggttttaaaagctttcacgtgggataaatgattttctttttttcttttctttcttcctatggtcttgtctgaataaactactctcctgaataaaacaacatccaacccaggtcattgaaatgaaattggccagtcaaaaaaaaaaaaggggggggccctttaaaaaaaaaaaattttaacccccgggggggggaaagaaattttttttttttggggcccccaaaaat

SEQ ID NO: 61239 - DNA, 3018 bp, Homo sapiens
cagatctccagtggcagagagttgagagtgatccaggaaagtgaagcaggagatgcgggactgccccgggtggaagtgatcctcgactgctctgacaggcagaagacagaagggtgcaggcttcaggcaggaaaggagtgtgtggattctccagtggaaggagggcagtcagaagcacctccttctctggtatcctttgccgtctcatcagaaggcacagagcagggagaagatccacgctcggaaaaagatcacagcagacctcacaagcaccgagcgcggcatgcacggctcaggaggagtgaaagcctgtcagaaaaacaagtgaaggaagcaaaatctaaatgcaaaagcattgcccttcttctaacggatgctcccaaccccaactccaagggggtgttgatgtttaagaagcgacgtcggagggccaggaaatacaccctagttagctacggtactggcgagcttgagcgagaggcggacgaggaggaagaaggtgacaaggaggatacatgtgaagtagcatttcttggtgcaagcgaatcagaggtggatgaagagttattgtctgacgttgacgacaacacacaagttgtgaactttgactgggattctggactggtggacattgaaaagaaactgaacagaggggacaagatggagatgttaccagacaccacaggcaagggagccctcatgtttgccaagaggagggagagaatggatcagatcacagcccaaaaagaagaggacaaggtaggtggaacgccaagcagagaacaagatgctgcccagaccgatggcctgagaaccacgacttcttaccaaagaaaggaggaagagtcggtaagaacgcagagctctgtgagcaaaagctacatcgaggtgagtcatggtcttggccatgttccccaacagaatggcttcagtggggcatctgagacagcaaacatccagaggatggtccccatgaatagaacggccaaacccttcccagggtctgtgaatcagccagctacccccttctcgccaacccgaaacatgacgagtcccattgctgactttcctgcacctccaccttactctgcagtcactcctccccctgacgccttctccagaggggtttcaagtccgattgctggcccagcacagccccctccatggccccagcctgccccgtggtcccagccagccttttacgattcgtctgagcgaatagcttcccgagatgagaggatctcagtgccagcaaaaagaacaggaatattgcaggaggccaaaaggagaagcacgacaaaacccatgtttacttttaaagagcccaaagtaagcccaaatcctgaactcttgtcactccttcaaaattcagaaggcaaacggggcactggagctggaggtgattccggaccggaagaagactacctcagcttgggggcagaggcttgtaatttcatgcaaagctcctctgccaaacaaaagaccccctcctcctgttgctccaaaacctgcaagtcaagtcctcatcctcccaaccagtaactccagtttccccagtctggtctccaggagtggctcccacccaacctcctgccttccccacatccaacccatcaaagggcaccgttgtctcctccatcaaaatagcccagccttcttaccctcctgcccggcctgcaagtactttgaacgtggctggtcccttcaaaggaccacaagcagcagtagccagtcagaattacacacccaaaccaacagtttccacaccaacagtcaatgctgttcagcctggtgcagtgggaccatccaatgagcttccaggaatgagtgggagaggagctcagctctttgctaaaaggcagtcgagaatggagaagtatgtggtcgattcagacacggtgcaggcccacgctgctcgagctcagtctcccactccatctctcccggccagttggaagtactcctccaatgtccgagcacctcctcctgtggcctataatcctatccactcgccgtcttacccactggctgctctcaagtctcagccatcagctgcacagccctccaaaatgggcaagaaaaagggaaagaaacccctcaatgcattagatgtcatgaagcaccaaccgtatcagctcaatgcatccttgtttactttccaacctccagatgcaaaggatggcctcccccagaagtcatcagtcaaggtcaattcagccctggccatgaagcaagctcttcctccccggccagtgaatgctgcctcacctacgaatgtgcaggcttcgtcagtgtactcggtaccagcctatacctctcctccttccttctttgcagaggcctcctcaccagtcagtgcatccccagtgcctgtgggcattcccacctcgccaaagcaagaatcagcctcatcatcttattttgtggcaccaaggccaaagttctcagccaagaaaagtggtgtcacaattcaggtgtggaaaccatctgttgtggaagagtaatcttgtagctgaagctgagtgtccactttgcttgaaatgaattgtttgcagtgtttcttgagtccctgagaatgcctagcaaagtcctcaacttacttaatttcagatatgtcacctcctaatctgggtccaaggagtataatatttttaatgagtcaaaaatccaactcagattgacctaaaatatatttatcttctttgcacacttaaaaaatccaggagcaccccaaaatagacatgtaccgttatattaagtaagcaggagacttaggatttgtgctgtagccacaagaaagacagtgatcagtgatatcaaacatcaggaatcagcctttatgtaacataacagctgtccttctatggtgaaaggttcaaatgtagtgaaggtataacctatattgactgagatttcccttttaggtagtgccttatctctattactagtgttaaaggaataaggaatctatgaaggacagggagcagctctggtctgtcaatctcagccacctgtttg

SEQ ID NO: 61240 - DNA, 1372 bp, Homo sapiens
tttttttttgtgagaaaagccgttgaggtcctctcaaatctgcatgtgagcaagtaggtctacaacaggcaaacatactgcttcccgacttctgaaaagtcaaggaatcctaagtaatctagatgaaaaagtgactccttggtttcttcacattcccctccaagagcccagtgagccatcagctcctggccagcaacacacctgatacaaaatgggagaagtgtataaattattatgttgataagcaagataagtgccaaagggtagataagagtgaaagcattgggaagcctggcagagtgcagtcagcaggtcagttcctggcggttcattgagcagcttggcccaaagatgtaagtgaagtccctcctggtggagggatgagagcagctccagttactcggccttcatgacacaggaagttgaaggtggcacaggcattgggcgtgtcctgcacttccacagcaatgccccgctgcctcatggcttgaagcacctgggactgcagcctctcggtccggtctccagtccccaccaccacgatctctatccggggctccagcaaccagaagagggaaaagctgtcttcggtgatgtcctggtgggatcccacgttccactgcaccaccgagtgcgggagcagagcgcaggggccgagcacgcggtttccgtttatcatgaagccgcggctgttgtagctgtcgatgtacattgcctgagcggcctcgcgttgcagcagagagatgcgcgtccgctgatacagctcgtcatccgccggcgagagccgatgccctcgccgcggggcccagggaagctcaacgggcggacagcgcagcgagggtcgcgctcggtacaagctacgtagcgcgagagcggtggccatggctgaccaacgcgcggcgaagtcgtcaccggcgccgttagtccccgggttgggagggccctgcggagcctgacccagcgtggctgcagcgccccctgcgtcccggagggcaccgcacagctcgaccggcccagcaggcgagtgtcctcagtcttaggaggccgagttccccgacctccggcgcagctccagtgtcagcacctgccgccctccccgccccgggcccttgcccatagtcccgggggagtggaacacctggcagcgtggccaccctcagggcgttgcctgggccgcagccgcggcctggcccccgggctctcagctattaagccgcgctcccggggcggggcgaccgcccacctggtcgcgtcccgaacacctggccaggcggtgggtgccagacttctagcccctaattccagcctttggggcttcgggcaccgtgggcggggcagccggctcaagtttctccggctagacgcggaagca

SEQ ID NO: 61241 - DNA, 1465 bp, Homo sapiens
ttttttttttttgtttccaattgcagatttatttccacacacacaaaaaaaatctatgttgaagttacaggattgccatgaatgccacacacctttcagactaagcagaaagcccacaagaaaaaaaaaaaaagaatgcactcagctgcccactgtcccccccaccctggtggactggggaaggacaggcagagccatctaacaggggagctgagtctttgggaggataggaaaagcccaggggtcaagggaaaacaacacagacactacacaggggctttcagtgagacagggatagatcacgccggtggaaggaaggccctagcgtccctcttcttgcccaagaatagcacaccatttgtgagtttgcccactgtgttcccaacatcaatgcacagatacaattctaccagcaagatcacagaaacatagtaagagcaaaaggcaaagcagtctgggattatgggttgattttcagcccaagacacaaagccagctcagacttctgaatttttccatccttgttcacgtcgcagtgacgcaggagaatctcgcggaacttatcaaggtccaccccgctgatgctgggctggacaagctccatcatgtctttgacaaacccatccacttctggggccttccagggctcctgttttactaacatcatagtaggcaaagattttctcaaagtccccttttcttttctcagtagaacaagcatccattttaaattggagaaggaagttttcctgaagagccagaatccttgctaagtcatttagatccaaccgaccatctttatttctgtcaaaaatcttcatcatggtgccagtgtattcttccagtttagcctcagaaatggcctttttgtggtgaagaaagaggtctcggaggaagttgcggagctcagcagctgatataaagccactgctgtcagcgtcatatttgcgccaaatctgcataaactccacgctgctgtccagtgggttttcccggcgaaagagcagaagaaagttttcatcctcagataagaacataccagcaagctctttcatccgaatgcgaccatctttagaggcatcttgggtagtcataaactgctgtttcaccttgtgcaaatttgctttcatgaccgtgtcatcagtacccagtttcatcaacatgtggagaaagaaagcatcgagttccttctcttctatgtaacctttttcatccgcatcaaagcgctgccagacctgccagaagccagcggcgtccaagcgccccagagtcggttcccgggagctgtccatggtgttgacgacgaagaccaggcaccggcgcggaaggacctagacaactttgggaaggactccttcaccgtatttcttgacttgctctcctgcttctttcgctatctgattagctttgagtaactgttgctggggaggacgcgagcgctgctggccgtggcgtcgctgagccg

SEQ ID NO: 61242 - DNA, 1892 bp, Homo sapiens
ggagatcctctcatttcttaagcttggcacgaggggtgcgtcctcactcggggggcttggcaatgcctttaccaaatgccactcgacctgcctccgggaggagcgaggatccgagctgaagctcgctttggaacatggtcatcgatctgagagccagagaggctgaagctggattcgtgaaggtccctcatgcccccatgccgggtgacgggccgggtaggagtgtctgcgagtggggttcccatctcttttttcccagggtgcacgacaacagcgacatcccccaggtagggagtgcggtccactcctctaacctttaaagtcttctctctctggaccagcttcttgtagacagtgtctgggaaggacctcaggggacagaacttgccggtgccctcggcgcacatgaagacgccgttctcatacacgacgcgcccccggctgatggtgaccagtggcacgccgtggcagcgcatgttctcatacaggttgaagtctcctccctggacctgcgtgctggctgagatggtctttgtggcttctgggtcccacaccaccacatcagcatcggctccgggaataatgcggcccttgcggggatacaggttcagaagcttagctgcgttggaactggtaacggccacaaaacggttctcatccatctttcctccaaccactcctctctcccagatgacgctcatgcggtcctgcacgccactcactccatgtgggatcttggtgaagtcttccttgcccatagctttctgctttgtggtgaaaggccggtgatctgatgccacgatgttcagagtgtcattggccagcaggctcatgaggtaggttgaggtgttggtgtccagtctcaggggaggcaccgtgacataggcagccgcgtgggaccagtcctggtggtagtagtgtaagcctgtcagcgtggcatgtgcagtggtggtctccgccagcacaaccttcccttgcatcttagcagctgcgataacgtcaccagccgagatactggacacgttgaccaggtagattggacagtgagtcctgtttgcaatggtgataacacgatgagtggcttcagcttccagctcctctggacggctgatctcgattccttctgggcctgtgatccccaaatccagtgcctccttagcaccctcggccacaagctccccattttcagcatggacgcgggcgattgccccaatgtccttgcaagcgtgcaacacttggtacagctcactgtctcgaagcatgtacaggtccttgtaggtcatgaacatctggaacgagttgacacccttctccctcaccagtgtctccatttctgctttcaccttgggtgcccaccaggtgatccccacgtggagggcgtaatcacagcagaccttggggtcggccaagacctcggcacttctcataagcgtccacaagggaggtctccttgtcgggcaggacgtggccgatgatcatggtggtgcctccgacgagtgctgccttggtcccatggtagaagtcgtccacgcacgtggcattcatgaaggtctggtggaagtgggtgctggtgtcgatgccaccagggatcaccagttttcctgtggcatcaatcaccttggccccgccagggatcatgagctcgcggcccacctgctggatgatgccattctcgatgtagacgtcagcctcgtgggtgcagtcatcgttcaccaccttgcctcccttgatgaggatcctcacgctggctgagttggcaagcatgttcccggctctccgcccttttgtgcgcctcacgcagaaacagaagggggagaggaggatgtcctagcccgggaggggtaagcccaccgacccacctgccatcacgtaatcgtcgaccgggactcgga

SEQ ID NO: 61243 - DNA, 2535 bp, Homo sapiens
actatagggcaaaagtgtgttttgttgttttgtgtttttttgagctcggtattatatatttttttctcattaaaggtttaaaaccaaaagcggtttctctttgcagcaaatatacattaaaatagagtctctgtacagccaagggctctgggccctggcttgccccatgtccctgcgcctccctggccaaacccaaaaataaatatagtgttattgctctgcagggcatagaggcagtgctctcctaccccctgaggaggctcgttgggagctgatggggaagccctggccaccccaggggtccaggggctggagtctgcttggagttattgcttcaaggggggacactaatgcccaatgcaaatgatgagaggaggagcgaagggggcatgggcctttgctctccaagtcccactctgctttgaagagggggtaggattaagcagcagcaaaagcatcacccactgggagactctggcctccatccccttccctccctgagataggtttctgcctcccacgcatcccgtgcagccccctatggcttccgcaaggccccctacactctgggggcacgttatggcttgcaaggggcagcactgtgcccagagcctggacacacgttcccagcttctgacaccccctaggagggggaggagagggcgtggggcctgttcccaggggctgatggcattgcccctggccctgccagcaggctgtggcactgcccagaccccagctccgccccagcccttggggctgaccccatgctaggcaggtcctgccagaacccccaccagtcccaccccttgcctcagtccatcatggcctcgagcatctccaagaacagcttgtgcatgggcaccttgccctccagcttcaccccatagaaatgggccagcactttgcccgctgtctggcggaggagcggtagcgtgagcagcagcctgcccgcccgccgccgctcagcaccccctccggggccagcccggccggcttcatactccagcagggcctcgtgcaggagcttctcgcagctgctccacagcctcggctcatcttcgatgtgcacagagtctgaattggcaagggccaaggcctttagtagaacatactcctctcgctccagccgcagggcctgcagccgccgcactagttgcagcagggcagctccccaattcccccagtccagctggccgtgccccctcttcatccaggactaagtactcagcgaaggccagctcatcctgcagcgtcagggagcgctgagccacacccagcaccagcacctccatccacacgctctgcagtactgacatctggtcagacagcgacagcgatgagaagcctgggatgctcttggcccagctgatggtgaccacaatctctcggtcaaagaggtcacagagggtagccacggctgggaggtgcccatcagggcctgcggggtcaggcatggcatagagcttctcaggctcaaccaccagcagatgagacaccagtgcattcactggggctgctgtcttccgggggcctccagcgactgccaggggcccagcagggaaggggcccgggaagggcagtgggtccacctccggccgccgcttgtacttctgccgcccaccccggacgcggtccaggcgcactccctccttgagcatgcccacccgcaggcacttggtgaagcggcaggcctggcaggccttgcgtctccgcttggtgatctcacactcgttggaggccggacagctgtactcgatgctcccctggatggtcctcttgaagaaggctttgcaggcctcacaggatgccacaccatagtggtagccggaggccacgtccccacagaccaggcagaggcgcttgggcagggagctgagcaccagcttcccaccgccctgctcgccaggcccagccccctccccatcctcctcttccttgtggcctgggaggcagcgagtgggagctgcgaccaggggccagggccacaggaggctcggtctctgtctccgaggaaccctttggactgtcagggctggccggctctgccttgatgtagagaggctcaatgcccaccacctggctggacatggcgctggtcacctggggctccggcagcgcggtcgggcaggcatgggggccgagcggcccggagtgccggagtgagccgggggccgcgggcggcccctcctccgccgttttctcgggccgagccgccccaccgcgccgcgtcccctcactcggcggcgcccgccggctgcttgtagcatacactctggttttcctcccaccgcaccaggcactttgtggtttctgagcatcttcccaagctcttccatccagactgccagggctgtccttggagctcatctccaatcccatggcaatcttccccagccgtggggctctcacgtttctacctctagcctggacttgctgtgagctccagacccatctctccagctgcctccttgacatcctgcatgtctagaaggcatctcggaccgaacacagcctacgtggactccacgtgtt

SEQ ID NO: 61244 - DNA, 4528 bp, Homo sapiens
  misc_feature (1)...(4528): n = a,t,c or g
taggagagccgagctgggtacgagactaaagggcccacatgacccagtgacgccagatttccaccgaggactgagtgagctgctcagacatggctttctgcctcccagcctgtcctccactgtgggcatagcatctgtgcctgcctgcctgcttgagggagaggagtttctgctgctgccttgagctggggggaagagcccaggggcagatcctggcagctgcctggatggggctcctccctgcccttatgagcatgccaggcccagaaaggccgagcctgggctgccttcctgccccagccgagggaggggtcagacggctctaccatgggtaactcaggcaagagctggttttcctctttattctgggtgtgtgcagctgtgaggccccaacccaggagaggccatggcctaggtacctgtgaccaccctgcccccgtgtagagggcatcgnctttcctgctattttattctttcagcttttgtcttaggcccagaatcaaagtgaaaattgagtcgagctgacccttacaacagtaggatttagtagggtagatttcaaatgaggcttcgcttctcccaaagtagccagtccaagttccagtggctgtcgttcagctcatgggagcttcatggggacacagccggcacaggtgcagggcccgagtccgcccacccagcctggcgctgaaactgcacacgtacactatgtggtttaagagcactttattattgttcttaaggctacttttaagtacaaaaaaagatggcctgccaaacctttttttttcttcttccaggaaaaacaggccacagagaatggtatattacagatttacacacatgaagagaaggtcagagcgcactgcaggcagcgcggctctgggaagaacttcacggagccccttcttagagcagggagggggctttctcagtgaaatgtttggttttctgctgcctcctctgccccaggcccccctccagggtactgcctatcccagataggtcagtgcaccagggacccggccgccagcaccgccgacccctcccagagtgacgcccttgttcactgacaaagagacctgtcccaggagtgtcctccaccgagccggtcagctgtgggtggttttcctgttacgacgctcagtagcctgtagcaataacaaactcgtggctatgaatgcagatgcagtgttctcatagaataactgttcctgcacttttacagacaaatctacgacaaaaaaaaagatcaactttttttttccgaacaacaaaaaaaatgaatgattacaataggaaagggaaaaattaaatagctacatatcattaacaaattaatgttcttcaaaaaatacctacaaatttctctgtacattctttacgcacagcgtaacgatggtctcaaaatcacccatatagaaaagtgttctcaacgatttttcctacagaaaatataggggcctgaatgccaaagcttggaagcccagtacagtgggagtgaaatgtgtgcggggcaaggagaagggcttttctttcctccacttttcaaaggcctgcagccactctgtgactacaagagccagtcctccgaccttttcacccagtgccaatttccaaaattcaacagctaaaaactgtaaaaccgggggtcatacggtgtgcagagtccacaaagccttgcaggtgaggtgaccacgcccacgtcacctggtcaggtgccatcgtcgtgagcctctggtgggccaggtgggacacagcacaccccagggggaggggatagaaacgctcattgaccaaaaaggagcagctgtgacctccacagctgtgtctgtcatgcttgcttcatctaatttctagttagtagctattaatatagcaaataataaatgcagtaataacagtataaagtcagaggaatgtatactgccttggccccagcgtacgaggaagcgtataaaacaccatatcacagattgtctgtcagtaatctgctgttcagccaagagagttcaaagggagcagtttctgcatgtagggaagttggaagacacaaaccccacctcccctgggagcttgtaacaaagcagacagggatgcaaaaataaatgatgtcagcctgcagccaaactccagcatcccacaccgcagctgacccactgctcatcgcgagggcctgccaggagctggcctcccgcactacttgtgagtaaagtgaatatcaaataccaatcttagagtacaactgtaccagcagtaagtatatctaggactgtaactgacaaaaataaactaattctgaaaagaagatagtaagtattaaggtttttgtttactgtctatataattaatagaaaccagctattttttctccattaaaacatgcatcacgtttaaagcactatggaatcctccaacctcagctctagtctaacaaactgcagtgttcagagaagataaaatgcccgtgattggtagagtctgcagtccagttgcaagcccctgaaatctagagagagaaagacctataacctgtatgagacttccccttccaaagctgtattgtctacattaaaaaaaacaaaaacagtaacaacaacaaacacacaaatggtcagaaatgtcatccttaaaccctttgtttttcagcagtttgccctcagagttctggcataacacataaagttgtcaggcaactttagtcctcctccaatagtgcaaatcagacacgacagttctcttcaagtatacacacgcacacacatggaccgaaccaaacacgccgtggaagctgagccacacacaccccggtctcaagaagcaaaggaaaaagcacaaagcgtctgagtcaccaattcatcatggcttgtgactgagaaagcgctgtggagtcctggccccgtcggggcagcagacctgcatcagaggtttctttggtaactgaggcaggaagtaaggatgctacattagacagatgttccacgcgtagttcctgctatcatgtttgagggcccccttgtacggataccaagcaagtacaaaaacagaacacaaatcccaacaacatggtttttgcaaataaaccatcccttcccttccccccaccccacccccatgatttttttttttttaagtactgactgttcaaagctcaggcaaaccatgcagatccacgtgttgttggaggaggcgctcccttcaggagaccacagagggggagtgactgtggctgaccatgtgggcagaggggctggcgggctggcccctgcgagaggcggactcagggctgctggatgctccgtccttggccgctttgatctggagccacgtgtcacccagagctttgggcaaagtggtcagtccacggagcccgtgattggacaccggagtttgggtgccggctcgggctcctttgtaattcttgcccagggctcctgcggaaaatgctcctccacccacgggtccacaggtggtggcagctgcaggcaaagcaggaaggcaggcagtcagacacaggtggcgctcggtggcctccggtagctggcaggcccgggcgcggcacagccgctgtgcgcgaatggggtagtgcgagaggttgcagttgcgggcgccagccgaggcacaggtgatcacggagggccggttctgctgtcgctcccccggggtcagtgtgggcgagaggccggctggcctgctggcgtccaggctgttcttggtcagtgcgaggggctgctccaaggccaaggcttggggagggaggtgtacaggtggctgccgtgcaggctcatggtgggggccacagcgcgctcgatggggctgcggctccgctcccgggggtctctgcggcagtctccattggcagtcttgttcagatgggggttgaagatgcgactcattttggagacgtggtcgttgtcacagtctaggtcctcgtcacctggctccatgctgaacttcctcttgctggggctgattgggggagggccggtgcggtgactgctgagggcagaggccaccggcagggtctgcattctgggttctcccctgagagcagcttcgccttcgtagcacagaatgccgatattgttgttcatcttgtccaagtactgatagttcaacaggtccatcttcataaatagcatttattgggctagcaaaaaaaaccagctctttgcttttgccccaaaagagttaagtttcaaaaatcaattgttgctgagtagctcctggctcttcaacttcccaaaggcaaaggcccagcctcagactatcaaaacaaagtatgcaaaagttaaaaaaaaaaaaatcaggcacaaaaaaatcgagctcacacgaaacccttcaagggcttactggtagacggtgtatgtactgtatccccgatcgagtatgaaaacagcgtttcagaagtccttacaagtccttcctggaaatggaaaagagtgaaaaagagaaacgcgcagcccgtttcctaggacaaagcggcgccggcccctctcacagcccgctgcaagccggcagcgctgac

SEQ ID NO: 61245 - DNA, 2018 bp, Homo sapiens
tttcgtggaggagctttctgggagtagccggtgctgagagaaccgtggctggcaaagatgattcaggcgattctggttttcaacaaccatgggaagccacggctagtccgcttctaccagcgtttcccagaagaaattcaacagcagattgttcgagagactttccatctagtcctcaagcgggatgacaacatctgtaacttcttggagggtggaagtttgattggtggctctgactacaaactgatctaccggcactatgctaccctctactttgtattttgtgtggattcctcagagagtgaacttggaatcttggacctcatccaggtttttgtggaaactctggataagtgtttcgaaaatgtgtgtgaattggatttgatcttccatatggataaggtgcactacatcctccaggaggtggtgatgggtgggatggtgttggaaacaaacatgaatgaaatcgtggctcagattgaggctcaaaacaggctggagaaatccgaggggtggcctttcagcagcccctgcgcgggctgtgtctgctgtgaaaaacatcaacctgccagagattcctcggaacatcaacattggcgatctcaacatcaaagttcccaacctgtcccagtttgtctgaggatcaagtattggcctgaaatagagtccttaagacaagcaaagacaagcaaggcaagcacgtctggaaacagaacccattttgagccttagaagagtcaagcctcaggacctggaaactttgtgtctggggaagactgtttggcatggaatagggaagggattcctattgacactgctcgggtgcacccagttctcacatgtgcagtcatgccgttctctgatgcatacggccactgcagatgtgaggggccctgccttcctcagtagggagtcaacatgcccaagtcatttgcacctttacctctcacatggatgctcccaagggttagggactgcattgagcaggcccacctgcttcccagaacctcctcactagggctgagcaccttctctgagtagagtcttcatccttagcaccacagacttctgaggtcctgtgccctttacttgctggtgaggtgtcataggtagaaaagggctggcccttcagatctgggggtgtggtgagtggcaagtaagggcagaattttaggagaaccagagtcacccgctggctctactgagattgttacacccagaatccttttggggttttttgtggttttttttttttgaggtggagtcttgctctgtcacccaggctggagtgctgtggtgcaatctcggctcactgcaacctctgcttcccgggttcaagcatttctcctgtctcagcctccccagtagctgggattacaggcacccaccaccatgcccagctaattgttgtatgtttagtagagacagggtttcaccatgttggccaggctgggctcgaactcctggacctcaagtgatctacccgccttggcctcccaaagtgctggcattacaggtgtgagccaccgtgcccggccaccagaatcctttggtatagccaagccttttggttaccgcctcatgaagaatatgcttcccgcattgtcctagtcccagttgtattctcacaggtgttatgtgcaggacacaatccaaatcataaacctggctcatgcccaacacatttctgctaatagggagagggacccaccacacacccacacatgccagaggtccctcctcacagaggagagggcctgtgtctgtagaaggttaaagctgacaacatgtgaaacatcccagaattatgactcttcccaagtttaaaatacattctcctcatgagagcagaaggtttgttgctgtgttgtgaatgatgagctgcctccatagggaacccactgccacctgggccagcttctggagcatgagaacctgagccagggtcacccttgtggggcctggacatgacgcacgctggctgcgactaggagcagggctgcctcttctccctcccc

SEQ ID NO: 61246 - DNA, 1483 bp, Homo sapiens
tttttttggtcggatcctcgtctttattctcgggaacggaaacaaccggcggcctgaaaaggaccaaagctcatcctttaaaaataaaatgaaaataaaaaacgtattatttggctccaaaacttccgtcatgagaataacaactctgaatggcaccttttcacacatccactgtgcccaacggccagtgcttcacccaaccgcaggccagatgccgtgactcctaacgtctttagagaacagtatcagacggcacaccaaggcgttttaagacacgggaatttgtttcctatggacatttcttttttaccaaaaaaaaatataataacttagtttgcattttacagcatttccaatcggccagggcatccttggctggaagctcatggggttgagtgtggcgagaacgtccacagcttcggtaccagggtcaggcctgggcccagggcatgcggctcccagcgcgcggccctcaccgcacggccccaccaggaccgcagcgcccaccgcagcctgtgactcatcaggagaggaagggcagcggcccacggagtcagtccgtgccaacctcacaagggttcagccccctctcctgggcatccctgtacatcctctggaagtccttgaagcgtggggcacagccgagccgcgcctccccgaagtgcatgtggccagtgaagaggaagtcgccatgccccggccgcacgccacactccagcagcgtcctgacgcgcccctgccagtggccgtcaccctcgggcaccggctcgaagaccctgcttttctgccgatagagtctgctcacgcgcaggtggatggctgagtcctgccgctcaggctcgtgggtaacttgctggatggagcctcgaacggcgaagtcgctggtgcagacggctaggagcacctcggtgtcactgcagggacggcacggcgcagacagctcgtgcaggtccgacgccctgtgcctcctaaccagctcgtactggaagcctgtggtcctccggccgatatcctgctgcggcgtggcctccacgaacaggccgccctgctccaggccaaaacactgcacccggccgggcctgccgtccccgtccggtaccagcagtctcagttctccagttttttccaaataaatattggcccccgaggagtccgtgaaggacctgatgcacacggtcaggtgccgggcaggcgagaaggtgttgggccgcaggttaacgatgagagcacctgttgggtacatccactccacggcacccgccgcacagcgcagatacacctgctccacctccttcctgtgtgcctcgtgcgtcagcccgctcgcagcgggggaagcaacccgttcggggtgccagcgagcacagcgtctgccctaacccggcgccctggtgctgctcggcatcagggtgcggggtcccgggagaggagccgtccagggggccgcggctcaggggcgcgcgtacgcgtgggcgaacgcgtgggt

SEQ ID NO: 61247 - DNA, 3707 bp, Homo sapiens
ggctgcccgagcgagcgttcggacctcgcaccccgcgcgccccgcgccgccgccgccgccggcttttgttgtctccgcctcctcggccgccgccgcctctggaccgcgagccgcgcgcgccgggaccttggctctgcccttcgcgggcgggaactgcgcaggacccggccaggatccgagagaggcgcgggcgggtggccgggggcgccgccggccccgccatggagctccgggcccgaggctggtggctgctatgtgcggccgcagcgctggtcgcctgcgcccgcggggacccggccagcaagagccggagctgcggcgaggtccgccagatctacggagccaagggcttcagctcgagcgtacgtgccccaggcggagatctcgggtgagcacctgcggatctgtccccagggctacacctgctgcaccagcgagatggaggagaacctggccaaccgcagccatgccgagctggagaccgcgctccgggacagcagccgcgtcctgcaggccatgcttgccacccagctgcgcagcttcgatgaccacttccagcacctgctgaacgactcggagcggacgctgcaggccaccttccccggcgccttcggagagctgtacacgcagaacgcgagggccttccgggacctgtactcagagctgcgcctgtactaccgcggtgccaacctgcacctggaggagacgctggccgagttctgggcccgcctgctcgagcgcctcttcaagcagctgcacccccagctgctgctgcctgatgactacctggactgcctgggcaagcaggccgaggcgctgcggccctttcggggaggccccgagtagagctgcgcctgcgggccacccagtgccgttcgtggctgctcgcgtcctttgtgcagggcctgggcgtggccagccgacgtggtccggaaagtggctcaggtccccctgggccgcggagtgcttcgagagctgtaattgaagctgggtcttactgtggcttcactgcgtgggagtccccggcgccaggccatgccctgactattgccgaaatgtgctcaagggctgccttgccaaccaggccgacctggacgccgagtggaggaacctcctggactccatggtgctcatcaccgacaagttctggggtacatcgggtgtggagagtgtcatcggcagcgtgcacacgtggctggcggaggccatcaacgccctccaggacaacagggacacgctcacggccaaggtcatccagggctgcgggaaccccaaggtcaacccccagggccctgggcctgaggagaagcggcgccggggcaagctggccccgcgggagaggccaccttcaggcacgctggagaagctggtctccgaagccaaggcccagctccgcgacgtccaggacttctggatcagcctcccagggacactgtgcagtgagaagatggccctgagcactgccagtgatgaccgctgctggaacgggatggccagaggccggtacctccccgaggtcatgggtgacggcctggccaaccagatcaacaaccccgaggtggaggtggacatcaccaagccggacatgaccatccggcagcagatcatgcagctgaagatcatgaccaaccggctgcgcagcgcctacaacggcaacgacgtggacttccaggacgccagtgacgacggcagcggctcgggcagcggtgatggctgtctggatgacctctgcggccggaaggtcagcaggaagagctccagctcccggacgcccttgacccatgccctcccaggcctgtcagagcaggaaggacagaagacctcggctgccagctgcccccagcccccgaccttcctcctgcccctcctcctcttcctggcccttacagtagccaggccccggtggcggtaactgccccaaggccccagggacagaggccaaggactgactttgccaaaaatacaacacagacgatatttaattcacctcagcctggagaggcctggggtgggacagggagggccggcggctctgagcaggggcaggcgcagaggtcccagccccaggcctggcctcgcctgcctttctgccttttaattttgtatgaggtcctcaggtcagctgggagccagtgtgcccaaaagccatgtatttcagggacctcaggggcacctccggctgcctagccctccccccagctccctgcaccgccgcagaagcagcccctcgaggcctacagaggaggcctcaaagcaacccgctggagcccacagcgagcctgtgccttcctccccgcctcctcccactgggactcccagcagagcccaccagccagccctggcccaccccccagcctccagagaagccccgcacgggctgtctgggtgtccgccatccagggtctggcagagcctctgagatgatgcatgatgccctcccctcagcgcaggctgcagagcccggccccacctccctgcgcccttgaggggccccagcgtctgcagggtgacgcctgagacagcaccactgctgaggagtctgaggactgtcctcccacagacctgcagtgaggggccctccatgcgcagatgaggggccactgacccacctgcgcttctgctggaggaggggaagctgggcccaaaggcccagggaggcagcgtgggctctgccaatgtgggctgcccctcgcacacagggctcacagggcaggccttgctggggtccagggctgttggaggaccccgagggctgaggagcagccaggacccgcctgctcccatcctcacccagatcaggaaccagggcctccctgttcacggtgacacaggtcagggctcagagtgaccctcagctgtcacctgctcacagggatgctggtggctggtgagaccccgcactgcagacgggaatgcctaggtcccttcccgacccagccagctgcagggcacggggacctggatagttaagggcttttccaaacatgcatccatttactgacacttcctgtccttgttcatggagagctgttcgctcctcccagatggcttcggaggcccgcagggcccaccttggaccctggtgacctcctgtcactcactgaggccatcagggccctgccccaggcctggacgggccctccttccctcctgtgccccagctgccaggcggccctggggaggggtggtgtggtgttgggaaggggtcctgcagggggaggaggacttggagggtctgggggcagctgtcctgaaccgactgaccctgaggaggccgcttagtgctgctttgcttttcatcaccgtcccgcacagtggacggaggtccccggttgctggtcaggtccccatggcttgttctctggaacctgactttagatgttttgggatcaggagcccccaacacaggcaagtccaccccataataaccctgccagtgccagggtgggctggggactctggcacagtgatgccgggcgccaggacagcagcactcccgctgcacacagacggcctaggggtggcgctcagaccccaccctacgctcatctctggaaggggcagccctgagtggtcactggtcagggcagtggccaagcctgctgtgtccttcctccacaaggtccccccaccgctcagtgtcagcgggtgacgtgtgttcttttgagtccttgtatgaataaaaggctggaaacctaaaaaaaaaa

SEQ ID NO: 61248 - DNA, 2861 bp, Homo sapiens
agcggccgccgcggtcgccgccgccgcctcctcctgccgtccgctcggctcaggcgcgggccctggccccactggggcggccccggtctccgcccctgcccccgggccgggcccggcaggtaagggaggcggcggcggaggcagccccgggcccacggcgggcccggagcccctgagcctgccggggatcctgcactttatccagcacgagtgggcgcgcttcgaagccgagaaagcccgctgggaggccgagcgcgccgagttacaggctcaggtggccttcctttcaggagagaggaaagggcaggagaatctaaagacggacctggtgcggcggatcaagatgctagagtatgcgctgaagcaggaaagggccaaatatcataaactgaagtttgggacagacctgaaccagggggagaagaaagcagatgtgtcagaacaagtctccaatggccccgtggaatcggtcaccctggagaacagcccgttggtgtggaaaggagtggctgcaacttctcctacagtacctgcaagaggtgggctacacagacaccatcctcgacatgcggtccaagcgcgtccgttccctgctgggccgctcgctggagctcaacggggcagtggagccgagtgaaggggcccccagggctccaccaggccctgcagggctcagtggtggggagtcgctgctggtgaaacagatcgaggagcagataaagaggaacgcggcaggcaaagatggcaaagagcgcttgggcggctcagtgctggggcagatccccttcctgcagaactgcgaggacgaagacagcgacgaggacgatgagctggacagcgtgcagcacaagaagcagcgtgtgaagctcccatccaaggctctggtgcccgaaatggaagacgatgatgaggaagacgactctgaggatgctatcaatgagtttgatttcctgggctcaggagaggatggggaaggggctccagaccctcggcggtgcactgtggatgggagcccccatgagctggaaagccgtcgggtcaaactccaaggcattctggctgacctgcgggatgtggatgggctgcccccaaaagtgactggcccgcctcctggcacaccccagccccggccacatgaagacgtcttcatcatggacactatcgggggcggggaggtgagcctgggggacttggcagatctcaccgtcaccaacgacaacgacctcagctgcgatctgtctgacagcaaagatgcttttaagaagacgtggaaccccaagttcaccctgcgctcgcactacgacggcattcgttccctggccttccaccacagccagtcggctctgctcaccgcctccgaggacggcacgctcaagctctggaacctgcagaaggcggtcacggccaagaagaatgcggcgctagatgtggaacctatacatgctttccgggctcacaggggcccagtgttggctgtggctatgggcagcaacagtgaatactgctacagtggcggggcagatgcctgcatccatagttggaagattccagacctcagcatggatccctatgatggctacgacccaagcgtgctgagccacgtcctggagggccacggggacgccgtgtggggcctggccttcagtcccacctcccagcgcctggcctcctgttctgctgatggcaccgtccgcatctgggaccccagcagcagcagcccggcctgcctctgcaccttccccacagccagcgagcacggggtccccacctcagtggccttcaccagcaccgagcctgcccacatcgtggcctccttccgctctggcgacaccgtcttgtatgacatggaggttggcagtgccctcctcacgctggagtcccggggcagcagcggtccaacccagatcaaccaagtggtgagtcatccaaaccagcctctcaccatcaccgcccacgacgacaggggcatccgcttcctggacaatcggacaggtaagccggtgcactccatggttgcacacctggacgcagtcacctgcctagccgtggaccccaacggcgcattcctgatgtcaggaagccatgactgctccctgcgtctctggagcctggacaacaaaacgtgcgtgcaggagatcacggcccaccgcaagaagcacgaggaggccatccacgctgttgcctgccaccccagcaaggccctcattgccagtgctggcgctgatgccctggccaaggtcttcgtatgatgcccacctggccctgccctggccgccacgctggctggggtgtagggccgggcaggtggggctgaggggactcccagcctcgctggaggtgcagaggcctggcctctgtctgtttgccatggagcctggtggtgctaacggccctttccccaggaatccctccccaacggctgccttccccaagcatccagcctggggatgggcccctttcaggaatcacccccgaggatggcctcggggtttccccctgtgccctgacagccgctcctggtatcagagctgctttccagagggcagcacagccagggccgggtgtctttagggatcagtttttccaagactccagaaggtgccaggttctccccttgagctcctgctcccccatcccccatcctcccagacctgggcaggagctgtgctgggagaaagggtggcagccgggagcctcagagctgagccccggcctggctgcccctcccctccggccctctccactgctttccagacactaaccaaggcttccaggccagggattgcccaacactcctagggcaagcctcccagcgccccatggggtcgcccatgggtagagacggctttcttgtgcccctc

SEQ ID NO: 61249 - DNA, 2066 bp, Homo sapiens
ttttttatttgtgggaaaataactttattcatgactgtgtttaccacactatcttatggagaagagatgatcaataaatatttgttgaataaatgaatagcagttacaaaacacttgattcatatggaattaatgttggttctcaaagtcgaaaaattacaaacaggcactgatgttcagccagtatacaagtctgggtcacagcaggttgtataatactgaaataccccctgccactgacctttgggcccccaagatgccctccccactggccactgcttctccccactgggaaccccctgaaagttcccaacaggctcataacaaaagggctaatgtctcgcacagcagcggagcacccaggaccgagcagccacatgggccgggtctgctggtgaaagcatccattctgactgatcaggacctgaggggcctcatggttacatattttgataatatccctaattataaataaggctcagttatatagtttgaaaacaatgcttctcctcattgcaaaatctcttagaagactccgtagatccaggaacggaaatggaaaatgacagcgtgtcaatctctgaaggttttgggcatttccattagcactccatcttcatgtaaaccagaagatatgcagtttcctgccagtggtagttaggatttccgtaggtacactggatgtcttcccaggacaccaagcaaatattggagtcattgaagcagaaccattttccatccacagcattccggacgtagacacagtaatgaccggagtctgccattcccacgtgcgcaatcacagcaaaaagctcatactgccctccagactgctcctcagcatcacaagactctcgcttcattggaaggatctggctgaaatccaagctctgggggaagtacagggagtggcagatctttctcggtctgtgaattcctgatggagaatcgcatgaggtggattgtcagggtctggggcaaatgggtcagcttcaagacctgtttcccacgggtcttcttcccacagttctcacagaagcacttgcttttgcttgataactccctgggctggaagaagcagtgcagggcgtcctccagtgtcttcaggggctttgagtccacatcaaaaagagaaagtgggagggtgagcatgctgctgtttctgctactctccatggcacagtcaacgcaaatcaaggagtccttcacccggatcgtatacagggcctgcagtctctccaccaagtgcacatcagtgatctggtccttaatcaggttccagagtttgaggtacagttgggcagcatcatgttggacaaacaagggcacgttgcacttctgcaggcagtaggccagctccaggggccgcactgctttctgccggctgtcctgcatcttctccagcagcagaagcatctggaaagggacgcttctcctctgctcgtcagctcccctgggcaccgtgatcctcttcaatatcctggtgaagtccacattcattacgaacacctgaatcaaggagttaaggcagcaggtctgtccaatgttgtgtaaacccaaccaaggccatgagggtagtcccaggccctgggacgctctctgggctgctctctcttcatgttgctgtcttcttccttcttttcttcaagatctgccggggactgcgaggactcagccaggatggactgacagatttgcctcaggagcccaaacgccttgctcattcgtgatcactccaaaacccccaggccgcagctgcctggcccgcgttcaggacagcacgacttcacttccaggaagcgcttatgtgagccaggcacgatggaatctctcaagcgccatgcaagcgtccagcctccgctgctgagttccacgtcgggactgagccggggaccgagctgggaccgaagttccgctccgggcccgccttggtctggccccgcgctcgtggcaccccgcccagctttcgttttccactgaatggaaagcgaaacttacagcggcctccgcgccgggagctgggcgccagcgtgcggggaaaccctgccggcccgagcttcacgaaa

SEQ ID NO: 61250 - DNA, 2318 bp, Homo sapiens
acgcgtccggcttttccggagctctgcacagatgctggggcactgagcaaacagccctcagtttctggagctgttccgagtcccgtggagtctccatctgagccctttcctagtccaggcatcccgatgttggtggatggcccatctgagcggccagccctgtgcttcttgctgttggctgtggcaatgtctttcttcggctcagctctatccatagatgaaacacgggcgcatctgttgttgaaagaaaagatgatgcggctgggggggcggctggtgctgaacaccaaggaggagctggccaatgagaggctcatgacgctcaaaatcgctgagatgaaggaggccatgaggaccctgatattcccacccagcatgcactttttccaggccaagcatctcattgagagaagtcaagtgtttaatattctaaggatgatgccaaaaggggctgccttgcacctccatgacattggcatcgtgactatggactggctggtgaggaatgtcacctacaggcctcactgccacatctgtttcaccccaagggggatcatgcagttcagatttgctcacccaactccccgtccatcagaaaaatgttccaagtggattctgctggaggattatcggaagcgggtgcagaacgtcactgagtttgatgacagcttgctgaggaatttcactctggtgacccagcacccggaggtgatttacacaaaccaaaatgttgtctggtcgaaatttgaaaccatcctcttcaccatctctggtctcatccattacgcaccagtgttcagagactatgtcttccggagcatgcaggagttctacgaggacaacgtgctctacatggagatcagagccaggctgctgccggtgtatgagctcagtggagagcaccatgacgaagagtggtcagtgaagacttaccaggaagtagctcagaagtttgtggaaactcaccctgagtttattggaatcaaaatcatttattcggatcacagatccaaagatgtggctgtcatcgcagaatccatccgaatggccatggggctccgaatcaagttccccacggtggtggcagggtttgacctggtggggcatgaggacactggccactccttgcatgactacaaggaagctctgatgatccccgccaaggatggcgttaagctgccttacttcttccacgccggagaaacagactggcagggtacttccatagacaggaacattctggatgctctgatgctgaacactaccagaatcggccatggatttgctttgagcaaacaccccgcagtcaggacttactcctggaaaaaggacatccccatagaagtctgtcccatctctaaccaggtgctgaaactggtgtctgacttgaggaaccaccctgtagccactctgatggccactgggcaccccatggtgatcagctctgatgacccagctatgtttggtgccaaaggcttgtcctacgatttctatgaggtcttcatgggcattggggggatgaaggctgacctgaggaccctcaaacagctggccatgaactctatcaagtacagtaccctgttggagagtgagaaaaatactttcatggaaatctggaagaagagatgggataagttcatagcagatgtggctacaaagtgaggagaagctagccagccctctacaagctgtcttcttgcacacgctgtcacttcctctcactcgttcttgaatcagctccatgtgcccatgaaatcaatggcctctgtatggagcgaccctgtgagaagcacttggctggctgagcaaattcatcctctggaaatattctctctcagccacagtgacattgaccctcttggttttctcctctctctggccatttcttccagtttccctatttcagagtcttctcctctctctgatctctgtgctgtttcctcaggactcagtcctgggctctcttctattctggtctctttatttttttttttttgtattttttcgagatggagttttgctcttgttgcccaggctggagtgcaatggtgcaatctcggctcactgcaacctccacctcccaggttcaagcaattctcctgcctcagcctcccaagtagctgggattacaggcatgcaccaccacgcccggctgattttgtatttttagtagagacggggtttctccatgttggtcaggctggtctcaaactcctgcctcaagtgattctcctgcctcagcctcccaagtagctgggattacagatatgtgtcaccacgcctggctaattttgtatttttagtagagacggggtttc

SEQ ID NO: 61251 - DNA, 1372 bp, Homo sapiens
tttcgtgaagtggcttcatttcagtggctgacttccagagagcaatatggctggttccccaacatgcctcaccctcatctatatcctttggcagctcacagggtcagcagcctctggacccgtgaaagagctggtcggttccgttggtggggccgtgactttccccctgaagtccaaagtaaagcaagttgactctattgtctggaccttcaacacaacccctcttgtcaccatacagccagaagggggcactatcatagtgacccaaaatcgtaatagggagagagtagacttcccagatggaggctactccctgaagctcagcaaactgaagaagaatgactcagggatctactatgtggggatatacagctcatcactccagcagccctccacccaggagtacgtgctgcatgtctacgagcacctgtcaaagcctaaagtcaccatgggtctgcagagcaataagaatggcacctgtgtgaccaatctgacatgctgcatggaacatggggaagaggatgtgatttatacctggaaggccctggggcaagcagccaatgagtcccataatgggtccatcctccccatctcctggagatggggagaaagtgatatgaccttcatctgcgttgccaggaaccctgtcagcagaaactttctcaagccccatccttgccaggaagctctgtgaaggtgctgctgatgacccagattcctccatggtcctcctgtgtctcctgttggtgcccctcctgctcagtctctttgtactggggctatttctttggtttctgaagagagagagacaagaagagtacattgaagagaagaagagagtggacatttgtcgggaaactcctaacatatgcccccattctggagagaacacagagtacgacacaatccctcacactaatagaacaatcctaaaggaagatccagcaaatacggtttactccactgtggaaataccgaaaaagatggaaaatccccactcactgctcacgatgccagacacaccaaggctatttgcctatgagaatgttatctagacagcagtgcactcccctaagtctctgctcaaaaaaaaaacaattctcggcccaaagaaaacaatcagaagaattcactgatttgactagaaacatcaaggaagaatgaagaacgttgacttttttccaggataaattatctctgatgcttctttagatttaagagttcataattccatccactgctgagaaatctcctcaaacccagaaggtttaatcacttcatcccaaaaatgggattgtgaatgtcagcaaaccataaaaaaagtgcttagaagtattcctatagaaatgtaaatgcagtcgacgcggccgcg

SEQ ID NO: 61252 - DNA, 3316 bp, Homo sapiens
  misc_feature (1)...(3316): n = a,t,c or g
gcggccgcggagggacgatgcgcgagtacaaagtggtggtgctgggctcgggctggggtaggcaaatccgccctgaccgtggcagttcgtgacctgcaccttcatcgagaaatacgaccccaccatcgaggacttctaccgcaaggagatcgaggtggagttcgtcgccgtcggtggctgggatatcctggacacagcagggcaccgagcagttcggcgtccatgcgggacctgtacatcaagaagggccagggctgcatcctcgtctacagcctcgtcaaccagcagagcttccaaggacatcaagcccatgcgggaccagatcatccgcgtgaaggtcagtgagaaagtgccagtcatctttggttgggaaccanagtggacctggaaagtgagagagaagtatcgtccagcgaaggcagagcccttgctgaagagtggggctgcccctttatggaaacttccgctaagagtaaaacaatggtggacgaactctttgcagaaattgtgaggcagatgaactatgctgctcagcctgacaaagatgacccatgctgttctgcatgtaacatacaatagcatccaaatatggctgtcctggatgggatttgcccaatgtcgtaggtgatagaaaactcgcctactccactgcagaacttgcagaatgcgtggtgttaatctacagagaactgcagcccttattcagaattgagcagtgattgtcagttgatatctctgagtaacatttgggttcagtaactacagttttcaccatttgtcctcagtctcctttatgcatctgcaactttaaggcatagtccatcgatctacagggtgatctcatttgaaagctatgatggcattgtcgctgagttgacagaagcaactattgtacaaattaaaaataaccataagggagaaaccagaagaattcctctgaccacttacaattaaaatattttgtcttctttaaaaaaataagtaaaggagaaatattttcctacaagagtactgaatttcaggaaatgggatagagcttctaaccagtgtattccgtcaagtaagataataacagctgacctgccaacagcattacagggagattctttgctcagctaacacatttctgtttttcaaaattgatgcttaattgtagctgttattctaatttgtgacatggaactaactcatgcttcaatccttgatagagcaaaactcagaacaggttatgtaaaaatatagtctggctttagaatttgttaattcacctgctttgccacagaaaatggaggctttcacaagggtttgatcagaattaaaaccccaaacccgccctctgttaggggtggtctttataactttactgaacaagagggaagcaactgtgatgggaagagattacctagccttactaacaagaagcattctaatagataaactagtaccatcatgtaaggaagatgaagccatgttgcatccacatgttcccgtttgcagaaacctcacaggacagtacgaatatctggcatttttaagttcattaaagcagcaaattccttctcgcctttaagggctatggttgtagtgtgacccgtggctaacctgctttcaaaatcaagtatttgctgtagcagagctttattgcaggcattttaaaaattgaataaccatgtgaaataatttgggcttaaaagtgaacataaattatagagtggaaggtaagggacaaaagccttttacctttaattttcctggagaattatataaaggttttcttagaacaattttgccctgattactgaagcgtcaaataaagctggagtgaaaattttgttttgaaaaggtgctcaagctctgacatttttggttttcatagtcgtgaagtatttatcatttgccatgactaatggcacaggaaaaacctattcataagttttacaatcaagtatagaggggtcttcagctaacttagttatacataaatgctgaaaagattatcttgagctgggccttgggagaagaatttggccttcagaactgcaatatcactgagcctgcgatctatacaccaccccacattttgttggtttcacagtcttgtgcaagtaacctctggtcttacgtgtgtaactgagagaagagtgtgtgtttgtgtgtgcatgtgtgtttattgttcctaagaatttggcacaagtcagagataattgcctatactaagaatctatactgcagaatatagtgtatcaaaaacttttttcttttaaattattaaagtgtcttttatacttttatgaaatcattggtagccccccaagtgtttaataactggcattaagcttagagggtgaaaaaaaaaaaaaagattgatggtttttttcataatgaaaaaactgaagagatacgtgaatgaaaccaggccatagctgtcataaatctttgacttttgaatatttacattcttcagtataattttttataatcctcaattatgaaccaccttgtttataggacaaaaaaatttaaccaattttattgaaacgaatttcactgtgtaaaagttggtttgattcaaacatgtagagaagttgtagattcaagatatatgatttctctatggaaataaaaatatttgttagtgaattggttgagttttgattcctctaacttctcagaatgattctttagaattctataattcatagcaatttttgacaagtaagattgcaaaatagaaatatctataaagattccacagtttgacattatggcttgctatgcagatgtgaaaataggttaaataatatgaaagatatggcagaatgtaaagtggaaaagatgacctaaaattttgagttgtattaatagttaaaaacatttgtgtcagatgacagggtgggcttttactgtcaagacatgaataagaactgatctggctgcctgatgagtgtttccacgcagccctgcatatttagtgaccaaggcatcaaggacatcccgaaactgggaaattccatatccatctgggtatggattatattaactcaggctgggccaaatggaatgtgtttgttggaggatatttacagtaattaaaacactttaggaacagggaaggttacatttgttggccatacggaaaccttagtgggctacaggaggnaagtttgaccttgtgtcacttattttatttttatggccctggtccagactaggccacttnggataaggtggaaagtttttcttaacctgccctnaaaaatnttatggggttggtcccaaggcccactttttcctttagcccttgtggataaggatt

SEQ ID NO: 61253 - DNA, 3559 bp, Homo sapiens
  misc_feature (1)...(3559): n = a,t,c or g
tttcgtcgcctagggagaaaacgtctgactccagccaccggccttcaaggcacggctttttattccttcggctggtcggcctctcgcccttcagctacctgtgcgtccctccgtcccgtcccgtcccggggtcaccccggagcctgtccgctatgcggctcctgcctctagccccaggtcggctccggcggggcagcccccgccacctgccctcctgcagcccagcgctgctactgctggtgctgggcggctgcctgggggtcttcggggtggctgcgggaacccggaggcccaacgtggtgctgctcctcacggacgaccaggacgaagtgctcggcggcatgacaccactaaagaaaaccaaagctctcatcggagagatggggatgactttttccagtgcttatgtgccaagtgctctctgctgccccagcagagccagtatcctgacaggaaagtacccacataatcatcacgttgtgaacaacactctggaggggaactgcagtagtaagtcctggcagaagatccaagaaccaaatactttcccagcaattctcagatcaatgtgtggttatcagacctttttttgcagggaaatatttaaatgagtacggagccccagatgcaggtggactagaacacgttcctctgggttggagttactggtatgccttggaaaagaattctaagtattataattacaccctgtctatcaatgggaaggcacggaagcatggtgaaaactatagtgtggactacctgacagatgttttggctaatgtctccttggactttctggactacaagtccaactttgagcccttcttcatgatgaccgccactccaagcgcctcattcgccttggacagctgcacctcagtaccagaaggctttccagaatgtctttgcaccaagaaacaagaacttcaacatccatggaacgaacaagcactggttaattaggcaagccaagactccaatgactaattcttcaatacagtttttagataatgcatttaggaaaaggtggcaaactctcctctcagttgatgaccttgtggagaaactggtcaagaggctggagttcactggggagctcaacaacacttacatcttctatacctcagacaatggctatcacacaggacagttttccttgccaatagacaagagacagctgtatgagtttgatatcaaagttccactgttggttcgaggacctgggatcaaaccaaatcagacaagcaagatgctggttgccaacattgacttgggtcctactattttggacattgctggctacgacctaaataagacacagatggatgggatgtccttattgcccattttgagaggtgccagtaacttgacctggcgatcagatgtcctggtggaataccaaggagaaggccgtaacgtcactgacccaacatgcccttccctgagtcctggcgtatctcaatgcttcccagactgtgtatgtgaagatgcttataacaatacctatgcctgtgtgaggacaatgtcagcattgtggaatttgcagtattgcgagtttgatgaccaggaggtgtttgtagaagtctataatctgactgcagacccagaccagatcactaacattgctaaaaccatagacccagagcttttaggaaagatgaactatcggttaatgatgttacagtcctgttctgggccaacctgtcgcactccaggggtttttgaccccggatacaggtttgacccccgtctcatgttcagcaatcgcggcagtgtcaggactcgaagattttccaaacatcttctgtagcgacctcacacagcctctgcagatggatccctgcacgccctctttctgatgaagtgattgtagtaggtgtctgtagcctagtcttcaagaccacaccctggaagagtttctgggctggctttaagtcctgtttgaaaaagcaacccagtcagctgacttcctcgtgcaatgtgttaaactgtgaactctgcccatgtgtcaggagtggctgtctctggtctcttcctttagctgacaaggacactcctgaggtctttgttctcactgtattctttttatcctggggccacagttcttgattattcctcttgtggttaaagactgaatttgtaaacccattcagataaatggcagtactttaggacacacacaaacacacagatacaccttttgatatgtaagcttgacctaaagtcaaaggacctgtgtagcatttcagattgagcacttcactatcaaaaatactaacatcacatggcttgaagagtaaccatcagagctgaatcatccaagtaagaacaagtaccattgttgattgataagtagagatacattttttatgatgttcatcacagtgtggtaaggttgcaaattcaaaacatgtcacccaagctctgttcatgtttttgtgaattctaggctggtgctgcactgaaatagagcagtaagcttgtgataaaggccaattccaggtagctcttgaaggtgatagccatctactttccagtggctgccaaccacagggagtgccagttaacactggaaggattaaggcaaggtcccttctcttgagactcccctctgagatctgaaaaatgaagtggcttaggaacatcagcagtgaagaactgccaagagttggtgaaggttgtctcttccgagggccttctgaagacagggctcttgaacagacaagtggaagggctgtaccagggataaaggaaagaagtgcctgtccagcagggagcttgaatttaagttccatgtatgaagtcattggctctatctgcatttttctgtcattctcttcatttgttttaaggtggaaaattttcttacagttgatgcaaagtatcaactactttaccctaccttctccccttttagatgggttcttcctgagttttggagtcttgtatgattatcagtattcccctgtcaaaatcaaatctattcaggtttcttcactgttgagaacacctaaatgtttttatttttgagaagtggggacagagtctcactatgtcacccaggctggagtgcaatggcatgatctcagctcactgcaaccttcgcctcctgggttcaagcgattctcctgcctccgcctcctgagtagctgggattataggcacacaccaccacgcccagctaattttttgtatttttagtagagacagagtttcaccatgttggccaggctggtcttgaactcctgaccttgtgatccacccacctcggcctcccagagtgctgggattacaggcatgagccaccacgcttggctaagaacacctaaatttttatgtttcttggctcaaaaaccagttccatttctaatgttgtcctcacaagaaggctaattggtggtgagacagcaggggaggaggaagagctgtggtttgtaacttgttcaactcaggcaataagcgattttagctttatttaaagtcttctgtccagctttaagcactttgtaagacatggctgaaagtagcttttcttttcaganttgcagatagtcat

SEQ ID NO: 61254 - DNA, 1487 bp, Homo sapiens
ggaattcccctttcgacgatattcggcggaagtctgcagccgagagtccagagaggaggaagctcctgccggctgagcgggcctggaggaagtgagcagcggggctcctgcctcccggcctggtccccgaagaccccagaagaacccggaacttgcttccattcggaatccagggaccaccctttgcactcagtaggcctttgttttcctgcgtggaaagcggttgggcttgggaggcgatggagccggagttcttgtacgacctgctgcagctccccaagggggtggagcccccagcggaggaggagctctcaaaaggaggaaagaagaaatacctgccacccacttcccggaaggaccccaaatttgaagaactgcagaagcctgcaggtgttgatggagtggatcaatgccactcttctccccgagcacattgtggtccgcagcctggaggaggacatgttcgacgggctcatcctacaccacctattccagaggctggcggcgctcaagctggaagcagaggacatcgccctgacagccacaagccagaagcacaagctcacagtggtgctggaggccgtgaaccggagtctgcagctggaggagtggcaggccaagtggagcgtggagagcatcttcaacaaggacctgttgtctaccctgcacctccttgtggccctggccaagcgcttccagcccgacctctccctcccaaccaacgtccaggtggaggtcatcactatcgagagcaccaaaagtggtctgaagtcagagaagttggtggaacagctcactgaatacagcacagacaaggacgagcctccaaaggacgtctttgatgaattatttaagctggctccggagaaagtgaacgcagtgaaagaggccatcgtgaactttgtcaaccagaagctggaccgcctgggcctgtctgtgcagaatctggacacccagtttgcagatggggtcatcttactcttgctgattggacaacttgaaggcttcttcctgcacttaaaggaattctacctcactcccaactctcctgcagaaatgctgcacaacgtcaccctggcgctggagctgctgaaggacgagggcctgctcagctgccctgtcagccctgaagatatcgtgaacaaggatgccaagagcacactgagggtgctctatggtctgttctgcaagcacacgcagaaggcacacagggacaggacgccccatggagccccgaattgaccctcactgcctccaaagcccagagcctgcctgtcagcccagctggagggcccgaggctgcagggtgtcctcccacagtcccgctgtttcctgtgcattcgtgacccgcttccctcccaccctgtctcctgtctccatcgttggattatctttgaacccccttgtgtggatcattttgagccgcctggccttgctcagtttattttaataaaagtatttctgggagggattctggaaaaaaaaaa

SEQ ID NO: 61255 - DNA, 1561 bp, Homo sapiens
ttttttttttttgccgcgggaagctcagtttttattgaagacagagtctgggagaagaagggggactccggaagacagtgatgcggtcggagattgtgcaggccccgggccgggaagtgggcggtgtctgggtgggcgggaccagcgccggggcggggctacggactcaggctgggagaacctccccctagcccgcgcgagggcggcacccgcggaggtcccggggggcgctgggcagtgtggggcgcggggattggacaagaggccgactgaaggcggagccgaggtaaggccgggcggggcgtggcctcagagggcgtctgactgctcgccctgggcctggctctgctgcatttgggcctgcatcttctccagcatctcttgcatgcggcgcagctcttcgtctttctcgcggatcagcttctcggtgtccgccagaggcagcatgggcagcgggatctctgtggcgctctggcgggaaagcttactgcggctggctcgatcgcgagccccaggccgggcccaggctctgtaggcagcgggcccggtagccctcgtagagcagatcgtgcgtcacctctttcaggtcctgcaggtgtgtctgcaccagcatccgtcgcaggttcaggaaatcgcagtgatgtgggttctccacctccacggtcccccaggagtagcggcgtcccctcaccggccggttcccgccatccctcaccacctcgcatgatcccacgactgcaaaagggatgctttccttcatctctgcatcctgcctcttgaagtcttcatcttcatcagagtcacattcggggaactggtagatgtggatctcctcttccttcaactgatcccggatcttctgcttgagggcctgggtttcctggggcatcagagcatccgctttgccaatgactgggatgatgttgactttctcgtgtactgcccggaggaaggccacatctaggggccggagcccccggccgaagggtgagatgaagtagaggcagcagtggactcgggagtcctggatgttcttccggttcaggccactctcatccctaaggtactgctcaaattgctcctcgatgaatttcaccaccggaagccagcagtcagagcagtccactgagtccccaaagccaggtgtgtccacaagggtcagcttcactttcacacccccttcctcaatctttacgccccggcgctcaatggccagggtctgtgtcaagcgagcactggcctctggcacctggcgatcctcatagaggttggtgaggaagaggctgttgatgagggtggatttccctaggcctgactcccctgccaccattagcgtgaagtcaaaccccttcttgacagacttgcggtgcagctggttggggagagcagcaaaacccacgtactccttgtccatgactccgccagccatcactgcacctgccgtctctccccacttcctctggtggggcaggaagctgagtgcggcttcaaccctccatccttcacacatctggattccaagtcccactgtagctccatcatcgacgaaatcgtcgacccg

SEQ ID NO: 61256 - DNA, 1539 bp, Homo sapiens
  misc_feature (1)...(1539): n = a,t,c or g
cctagctcatatctggattttcacgtgtgccttgggatcacagggatggaaaggctgggcctcacggggacctcctaggtccagggcactgagtaggagggcacagtggaagacagcaagactgtctcacatctaacaagcacactcaccctcacccggttttcctaggtcagagcttggggaaagccaaagggtaagggcaggccatggtcttcttaccccctggacaccgggcgggaagacgtactggatgacaatggtgccgtacttctcatagctgggcagtaggagggtggcgtccttagagaccagcatccgcccattctggggctggttgcccaccagctgcccatagaagcggccgcacatggggcaggcctttttcacctgcagagcccgggtgatgacagcacctctcagaatgaatgccggcacttctccaatgtcttggcattctggatctcccccagacagatggggcaggtgctctcctgctcttctgcctcctcccgaaggcgaggaggaagaggtgggggcagggggggaggaggaagggggggagcccccgagcctcctggggggcagaagtggggctgctcggagagggggtgggcctgcgcggtgcatctcagggtgctcccctccaccccccagaagccaggcaagcccatcagcttccccctgcctctgaactttccttcagctctgtctcagggctcgttttaagcagccccttgagaggccttccgggctaggtagagcccatttggaggggccgggggaggaccctgtggggaaagctggagaacatagatgtcagaagtctcgccatctatgaggatggacacacggtgctcctcccgaagccgggccagccgggctggggtctctttgctcaggaagtcccacacgggcttggacacagtcactttgttcttgcaggtgcctccacaggctgccattctggacaggacgaacgacatttgatcctgaagagcttagaattggcatgcaggctcactcttctttccctgctccctacttgtaggtcgtgtgacctggaaagcccatggaagatgatggcagcagaaatccttctatttccactcagctgaccaggacttttaaacccagcacaggcagtgctgtctgtcagctcccaagtctggcatttagggaggggcggggctcacacaagggctcagctggaggggcctgatgttttccctgagtctggtcgcattgggctacggggctgtctccacaacacttccaaatgcagctcaaacagaaagaagggccattagtgtgacctccatttattgactgatccaagaaggagcagctgtcccttcatgcctccatcatcgtcccccaaggccagatgcacctcgagattcataagtgaaaatggaaccctagagtctcagcccatacagtctatccgcgatgcaacacttctctccccatcacgggggacccaggacctaggtgtcctaggtccaatnnnnnnncgaaatcgtcgacccggggattccg

SEQ ID NO: 61257 - DNA, 4569 bp, Homo sapiens
tttcgtccacgggagcatggcggacaccgacctgttcatggaatgtgaggaggaggagttggagccatggcagaaaatcagtgatgtcattgaggactctgtagttgaagattataattcagtggataaaactaccacagtttctgtgagccagcagccagtctcggctccagtgcccatcgctgcccatgcttctgttgctgggcacctctctacatccaccaccgttagtagcagcggggcacagaacagcgacagtacaaagaagactcttgtcacactaattgccaacaacaatgctggcaatcctttggtccagcaaggtggacagccactcatcctgacccagaatccagccccaggtctgggcacaatggttactcaaccagtattgaggcctgttcaggtcatgcagaatgccaatcatgtgactagttcccctgtggcctcacaaccaatatttatcactacgcagggatttcctgtaaggaatgtccggcctgtacaaaatgcaatgaatcaggttgggattgtgctgaacgtacagcaaggccaaacggttagaccaattacactagttccagccccaggtacccagtttgttaagccgacagttggagttccacaagtgttctcccagatgacccctgtgaggccaggctccacaatgcctgtgaggcccaccaccaacaccttcaccaccgtcatcccggccactcttaccattcgaagcaccgtcccacagtcccagtcccagcagaccaagtccactcccagcacttctaccactcccactgccacacagccaacctcactggggcaactagctgttcagtctccaggccagtcaaaccagaccacgaatcccaagctagctccctccttcccctctccacctgcagtgagcattgccagctttgtcactgtgaagcgacctggtgttacaggcgaaaatagcaatgaagtggccaaattggtgaatacccttaacaccatcccttccctgggccagagtcctgggccagtggtggtgtccaacaacagctctgctcattggctctcaaagaaccagcggacctgagtcttcaatgaaagtgacctcttccatcccagtatttgacctccaggatggtggacggaaaatatgtccacgatgtaatgctcaatttcgtgttactgaagctttgagaggtcacatgtgttactgttgcccagaaatggttgaataccagaagaaaggaaagtccctggattcagaacccagtgtcccatcagcagcaaagcccccatcccctgagaaaacagctcctgttgcttcccacacccctcttctacacctattcctgctctgtcaccgccctaccaaaagtaccagaaccaaatgagaacgtgggcgatgccgtccagaccaaactcattatgcttgtagatgacttctactatggacgggatggtggcaaagtagcccagctcacaaatttccctaaggtcgccacatctttccgatgcccacattgtaccaaaaggctaaaaaacaatattcgattcatgaaccatatgaaacaccacgtagaactcgatcagcagaacggtgaggtagatggtcacactatctgccagcactgttaccgccagttttccactcccttccagcttcagtgccacttggaaaatgttcatagtccctatgaatctactaccaagtgcaagatctgtgaatgggcgtttgaaagtgagccactatttctccagcatatgaaggatactcataagcctggagagatgccttatgtttgccaggtgtgtcaatatcgctcctcactctactctgaggtagatgtccattttcggatgatccatgaggatacccggcatctgctctgcccttattgcctgaaggtcttcaaaaatggcaatgcattccaacagcattacatgaggcaccagaagaggaaatgtttatcacttgcaacaaatgccgggtgcagtttctctttgccaaggacaaaattgaacacaagcttcaacaccataaaaccttccgtaaacccaagcagctggagggcttgaaaccaggcaccaaggtgacaatccgggcttcccgagggcagccacgaactgttcctgtatcctctaatgatacacctcccagcgccttgcaggaggcagcaccgctgacctcctcaatggaccctctgcctgtcttcctttatccccctgtccagcgcagcatccagaagagagctgttaggaaaatgagtgtcatgggccggcagacatgcctggagtgcagcttcgagatcccagacttccctaatcatttccctacttacgtacactgctctctgtgtcgctatagcacctgctgttctcgagcttatgccaaccacatgatcaacaatcatgttccacggaagagccccaagtatttggctttgtttaaaaattctgtgagtggaatcaagctggcctgcacttcatgtacctttgttacctctgtgggcgatgctatggccaagcatttggtattcaacccctctcacagatccagcagcatcctgccacggggactcacttggatagctcactcaaggcatggccagactcgtgaccgagtgcatgaccggaacgtgaagaatatgtaccctcctccttccttccccactaacaaagctgccactgtgaaatctgcgggggccaccccagctgagcctgaagagctactaactcccttagccccagcactcccatcaccagcctcaactgcaaccccaccaccaacccccactcacccgcaggctttagcccttccaccgctggctacagagggagccgaatgtctgaatgttgatgatcaggatgaagggagcccagtcacccaagaacctgagctagcatcaggtggtggtggtagtggtggagttggcaaaaaggagcagctgtctgtgaagaagcttcgagtagtactgtttgctctatgctgcaatacagaacaggcagctgaacacttccgaaatccccagcgacgtattcgccgttggcttcgacgtttccaggcctcccagggggagaatctagagggcaaatatctgagctttgaggcagaagagaaactggctgagtgggtgctaacccagcgcgaacaacagctacctgtaaatgaggagaccttgttccagaaggccaccaaaataggacgttctttggaaggggggtttaagatctcctatgagtgggctgtgcgtttcatgctgcggcaccacctgactccccatgcccggcgagctgtggcccacaccctacctaaggatgtagcagagaatgcaggactcttcattgattttgtacaacggcagattcacaaccaggacttacccttgtctatgattgtggctattgatgagatctctttgttcctggatacagaggtgctgagcagtgatgatcgaaaggagaatgccctgcagacagtgggcacaggggaaccttggtgtgatgtagtcctagccattctggcagatggcactgtccttcccaccctggttttctacagagggcagatggatcagcctgctaacatgccagactccatattgctagaggcaaaggagagtggctacagtgatgacgagatcatggagctgtggtcaactcgagtgtggcagaagcacacagcttgccagcgcagcaaaggcatgcttgtgatggactgtcatcgcactcacttgtcagaagaggtactggctatgcttagtgcctctagcactttgcctgcagtggtcccagcaggctgtagctccaaaattcagccattagatgtatgcatcaaaagaactgtcaagaacttcctgcataaaaaatggaaggaacaggctcgggaaatggcagatactgcatgtgattctgatgtcctgcttcagctggtgcttgtctggctgggtgaagtgctaggtgtcattggggactgtccagagctagttcagcgctccttcctggtggctagtgttctgcctggccccgatggcaacattaactcacctacaagaaatgctgacatgcaggaggagctaattgcctccctagaggagcaactgaagctgagtggggaacattctgagtcttccactccacgacccagatcatctcctgaagagacaattgagcctgaaagtcttcaccagctctttgagggtgaaagtgagaccgagtctttctatggctttgaagaagctgacctagatctgatggagatttgagtgttggggtcatgagggggtgtggagtgggggtgggaacatgtgagggagggtaaaggggcttagggaaaagggggcataccaggtggggtatttggtttctattttttaattttataccaccactcccccctgaagttgacttacacttccctgtggatttgtggattaattaggaaaaccaatagtaatcacgtctgagccaaggagctggcccattggtcattcacttctgctaaaaacaggtttttgtgactttttttttttttaaattaaaatcactgggttgggaatttttctgacaaaaaaaaaa

SEQ ID NO: 61258 - DNA, 1704 bp, Homo sapiens
tttttttaaggttaagagctgatgttttacaggtaaaatgagaaatgtggtctgggtgcagtgactcactcctgtaatcccagcacttttataggccaaggcaggtggatcacctgaggtcatgagttcgagaccagcctggccaacatggtgaaaccccgtctctactaaaaatacaaaaaattagccaggcgtggtggcaggcgcctgtaatcccagctacttgggaggctgaggcaggagaagcgcttgaacccagaaggcagaggttgcagtgagccaagatcacgccactgcactccagcctgggagacaacagccaaactccatctcaaaaacaaaccaaaacaaaaaaaaccttcaaaggtagtatcacaatgtgaataaactgagaatgtggaagtctccacatttcacatacaccatccataaagaagtataaaactcaacacatgaatagcagacgatgctatcagcagataatagcacttttattagcagtactcagcaggaaaagaaaaagcagttcctggttgttatttctgttttctctgtttcttagggcgtccacttttcttctgtcctttcttcttcgttttaaggagaacagctttttctccaataaataagcttttaggatgtccttctgcagttttggaagtaaaattaagtccctgcttaggtttactgacattcttcaatcgtggatttgaattttgttgtttaaatttttctttattaacagaacgcatgactctgagttttctccccatgagttcagaattatttaatttcagagcaagatgaacagaatctgtattctcaaagagcacatagccaaaccctttgccgatgcctgtcattttgtctctcacaatcctcacggccatgatacttccacagtccagaaagtgcttctcaatggcagattcttcaactttataagggagattccccacaaaaaccgatctcttgtctctagatgaggtctcagatgcgagatcaactctaatacgaaatccatctgcaatctgggccccatttcttttcaatgcttgcgtggcagcactctcctccttaaacacaacataggcattaatatttttctgatcaggatgaattttacgttttattgctgccaactttttggatagcgttccctctgctggaatcagagaacgaaatcgtacagattctatttgtccatactctttaaaaaacgacttcagcttcttcttattacatgtaacaggcaaattcccaacaaacacagttctctcattctttaatctctcttcttcttggttgatttgaattttctttctttgactgacaactgtgtcttctgtgtcatcaagtatttttctatctgctactttaacaccaggttgagaatttttccttttctgcccttgtttctggtgaatttcttcttctaaatcagcactcgctagagcgctttcctttaggcacaggcacgtacacgggttgaatctggggctccagagaactgaagagggacgccagccgaccggtgccacctctggaatggtgctcgccgcgaaataagctactggcgacctgtccaagcctgtagtcttccggcggactcccgcgaacgccgtcgtcaggattctctccctcctggacacttctctttctcttccgtttgctcatcccttccaaggccattcttactccaaa

SEQ ID NO: 61259 - DNA, 2863 bp, Homo sapiens
tgaggcctgaggcctggggcgggtggcggccgggctggccttggcctcgcgccttcccctgcggccgccgcgggctccgcgggcggtatcggagtgtcgtgcggcgcgtggccgcgtgacacgcgcacttgtcggagtgacgggccctgcggaagaggaggtgcggcccagggcgcaggggagccctcgggagcgggcccggccctcagcgccgccccggccgtgtcccggaggagcggcctgcgccgccgcgcgagaggaagcacccaggcatgtggaatatgctcatagtggcgatgtgcttggccccttctggggctgcctggcaaagcccaggagctccagggacatgtctcccataatcctggctggggagcaactgggggacctggctaagaagtacttatggcaggggactgttccagctgtacctggatgaagcggggaggggtcacagttttagcttccatggagctgctctgacagcccccaagcagggtcaagagctcatggccaaggccctggaatccctctcctgccccaaggacatggcacccagtcactgtgcagagcacaaggatcagttcctgcagctgagccagtaccgccaactgaagacggccgaggactatcaggccctgaacaaggacatcgaggcacagctccagcacgcaggcctccgggaggcaggagggatcttctacttctcagtgccacccttcgcctatgaagacattgcccgcaacatcaacagtagctgccggccaggcccgggcgcctggctgcgggttgtccttgagaaaccctttggccatgaccacttctcagcccagcagctggccacagaactcgggacctttttccaggaggaggagatgtaccgggtggaccattacttaggcaagcaggctgtggcgcagatcctgcctttccgagaccagaaccgcaaggctttggacggcctctggaaccggcaccatgtggagcgggtggagatcatcatgaaagagaccgtggatgctgaaggccgcaccagcttctatgaggagtacggtgtcattcgcgacgtcctccagaaccatctgacggaggtcctcaccctcgtggccatggagctgccccacaatgtcagcagtgcggaggctgtgctgcggcacaagcttcaggtcttccaggcgctgcggggcctgcagaggggcagtgccgtcgtgggccagtaccagtcttacagtgagcaggtgcgcagagagctgcagaagccagacagcttccacagcctgacgccgaccttcgcaggtgtcctagtgcacattgacaaccttcgctgggagggcgtgcctttcatcctgatgtctggcaaagccttggacgagagagtgggctacgctcggatcttgttcaagaaccaggcctgctgtgtgcagagcgaaaagcactgggccgcggcgcagagccagtgcctgccccggcagctcgtcttccacatcggccatggcgacctgggcagccctgccgtgctggtcagcaggaacctgttcaggccctccctgccctccagctggaaggaaatggagggaccacctgggctccgccttttcggcagccctttgtccgattactacgcctacagccctgtgcgggagcgggacgcccactccgtcctcttatcccatatcttccatggccggaagaatttcttcatcaccacagagaacttgctggcctcctggaacttctggacccctctgctggagagcctggcccataaggccccacgcctctaccctggaggagctgagaatggccgtctgttggactttgagttcagtagcggccggttgttcttttcccagcagcagccggaacagctggtgccagggccagggccgggcccaatgcccagtgacttccaggtcctcagggccaagtaccgagagagctcgctggtctccgcctggtccgaggagctgatctctaagctggctaatgacatcgaggccaccgctgtgcgagccgtgcggcgctttggccagttccacctggcactgtcggggggctcgagccccgtggccctgttccagcagctggccacggcgcactatggcttcccctgggcccacacgcacctgtggctggttgacgagcgctgcgtcccactctcagacccggagtccaacttccagggcctgcaggcccacctgctgcagcacgtccggatcccctactacaacatccacggccatgcctgtgcacctgcagcagcggctctgcgccgaggaggaccagggcgcccatatttacgccagggagatctcagccctgggggccaacagcagcttcgacctggtgctgctgggcatgggtgccgacgggcacacagcctccctcttcccacagtcgcccactggcctggatggcgagcagctggtcgtgctgaccacgagcccctcccagccacaccgccgcatgagccttagcctgcctctcatcaaccgcgccaagaaggtggcagtcctggtcatgggcaggatgaagcgtgagatcaccacgctggtgagccgggtgggccatgagcccaagaagtggcccatctcgggtgtcctgccgcactccggccagctggtgtggtacatggactacgacgccttcctgggatgagggcgcctgtgccccttgcccgcttcgctcctgtgctttccttcgcccgtgtcttccctcccttctcggccccgccacctgcccagcgtgccctggctctccagaaccttctatcccacagtcaggccccagagagggcaggacaagccttgtcccgatgcctttgaccggcagctctgtgtattggtggatagatgcagaaaca

SEQ ID NO: 61260 - DNA, 2958 bp, Homo sapiens
tctttttggtaataaaaaatttcttggtttaggcgaaatactctgtgcaaccgcagtaccgagggggagccctgcccccccatccaccctccccttcctttgcctccagtaggggagaggagaagggggaatctctgggcaggggtgaatgtgggagaaaactgagaagggccagggaggggagaagtgccagcaggggagacacaccaatccatcgctgcagtctcgcccaggtggggcggcgcagcggccggcagcccgtccagctggcccgcccccgccgcccccgctcctggcagcctgttaaagcttcagctcgttggctattttggaggcaatgtttttgaaggccatggaggtgcccgatatccgcttaaatcgaaccccgttgagagagagccgcggcagtttgcacacctccatctcccactgcacgaagtcctcgtggcccggcgtgccgtgcatgcacagcagcatgtacttctcatgcagctcgctctggcagctgttcgcgtccagcaccttgcggatctcccgcatcatctcgttgggctccatggagctcgtggtcttcatactccacgtgaagcggagggagcggggcttggcctcccgaaattcttccttttctttgtcgttgccgccactgcttcaccacgtgaggtctgagcgtctccacgtcggtctttgctttcaggttcattcaggttcctgcgtacaaacttggaggtgaacttgctgaagatgctcccagaggccccccgccggccctggctgtggccagagggagaggctggggtcacaccgtagggcaaattctgctggtccccgcacctgtcggagctgcccagcatggaaggtgcttcggctggacacaccccgggggaagttagttcggtctggggctccaccactgctgctgatgttgtgggcggatggggaggcaacagggacacgctggggggctgtgctgggccgcggcacctcacagttactctccgtggggggcagcccagaggccttgttggggtgcacggaggccgacatggatttctggtgctggcggggccgggccgcagagactgcggcagaagcagaagccgtggaggcccgggaccctggcatggttaaggctgtctttgcccattctggatggaagccctggccgaaggctggcccgctcccaaaagtggggaattcctgcttcgatttgtgctggtggagaggacgctgttcgtggagggggttggggtggtcttcttcctctccagaccgggcagggggctggcaggcaccttggctgtgctgctggctttccgccctgactcccggtcctcctcaggccgcttattttctgcgttgttactctgagtcttcttagagtaagaattagaggtgggaatggcaggaccagcctggtcgctgaagcgccgctgcttgggattggccgacacgctgcgctgtaccttgtgggatggggatggggcgctgctattggtcagatcagctgaaggccggggtttcagggtgatggtgtcgccttccagctcggagctcttgtagcccaggagcagataggtggccatcacctcgttgtatctctggcccaccagcgagtcctggatctcttcccgtgtataacccatggacaccatcagctctgtccgccgggggtccttgtagtcacgggagtggctccccgtaaggctttagttcatcatccttcgtgacccacattcatccatcgatctttcatgatttgctctaaagtgcctctcttgctgggattaagaatcagaaatttcttaagcaggttttcacagtccgtggacatgtagaatggaatacggtattttcccctcagtacccgttcccgcagctccttgaggttctgtccatcaaaaggcagggatccgctgaccagtgtatagaggataactcctaggctccacacatccacctcgggtccatcatattttttgccctggaagagttctggggcagcataagggggactgccacagaaggtgtccagcttgttcccaaaggtgaattcattgctgaagccaaagtctgcaatcttgatgttcatatcagcatccaagagcaggttttctgcctttaagtctctatggacaataaacttctggtgacagtactgcacagcagacactatctggcggaatttggctcgagcctctttttctttcatcctgccatgagccactaggtaatcaaatacctctccgccactagcgtactccatgacaaggtagagcgttttctcagtctcaatcacttcaaataatttaactatgttgggatgattcaaaaccttcattattcttacttcgcggaatagtttctggaggctggaggagttcagttgagtcttgtcaatgatcttcacagctacctctttcccagtcaggatgtgtcgggccaacttcaccttggcaaaattacccttgccaatggtcttgaggagccggtagtttccaatgtggggctgctcatcagcagaggtggctgagttgcggccccgaatcatgttggacttactgctgggcttggagtcaaggtgtcccaaggtgggccgactggagaaagggaaaaggactaccagcgacttccattcagcagagcccacagcagaacctgtcaggcagcgagggcaaagtacagaggccgggaagagccaggcctagggcgggggctgccggctcagccagccacccttactcagccagagcaggcgacaccttccaccacctcctcagtgaaaagtagctaagcagccaggccgagcggttcctgcctgggaacctggacggtgtcgcaaccgaaaccaccactagcagagagactgggtttggcaaggagagcaacagggacaaagccccgctggcttctcaagggccagagcctggtggtcaggaagcgcgtgcaattccagga

SEQ ID NO: 61261 - DNA, 2314 bp, Homo sapiens
catttcgtatgaactctcccgccacccgggaacagtggctgccaccgtttgtgttttcccgagtttgaattcttgcaggtgaccaagatggagttttctggaagaaagtggaggaagctgaggttggcaggtgaccagaggaatgcttcctaccctcattgccttcagttttacttgcagccaccttctgaaaacatatctttaatagaatttgaaaacttggctattgatagagttaaattgttaaaatcagttgaaaatcttggagtgagctatgtgaaaggaactgaacaataccagagtaagttggagagtgagcttcggaagctcaagttttcctacagagaaaacttagaagatgaatatgaaccacgaagaagagatcatatttctcattttattttgcggcttgcttattgccagtctgaagaacttagacgctggttcattcaacaagaaatggatctccttcgatttagatttagtattttacccaaggataaaattcaggatttcttaaaggatagccaattgcagtttgaggctataagtgatgaagagaagactcttcgagaacaggagattgttgcctcatcaccaagtttaagtggacttaagttggggttcgagtccatttataagatcccttttgctgatgctctggatttgtttcgaggaaggaaagtctatttggaagatggctttgcttacgtaccacttaaggacattgtggcaatcatcctgaatgaatttagagccaaactgtccaaggctttggcattaacagccaggtccttgcctgctgtgcagtctgatgaaagacttcagcctctgctcaatcacctcagtcattcctacactggccaagattacagtacccagggaaatgttgggaagatttctttagatcagattgatttgctttctaccaaatccttcccaccttgcatgcgtcagttacataaagccttgcgggaaaatcaccatcttcgtcatggaggccgaatgcagtatggcctatttctgaagggcattggtttaactttggaacaggcattgcagttctggaagcaagaatttatcaaaggaaagatggatccagacaagtttgataaaggttactcttacaacatccgtcacagctttggaaaggaaggcaagaggacagactatacacctttcagttgcctgaagattattctgtccaatccaccaagccaaggggattatcatgggtgcccattccgtcacagtgatccagagctgctgaagcaaaagttgcagtcatacaagatctctcctggagggataagccagattttggatttagtaaaggggacacattatcaggtagtcctgtcaaaaatactttgagatgatacacactgtggatgattgtggcttttcttttgagtcatcctaatcagtacttttgtgagagccaacgtattctaaatggtggtaaagacataaagaaggaacctatccaaccagaaactcctcaacccaaaccaagtgtccagaaaaccaaggatgcatcatctgctctggcctctttaaattcctctctggaaatggatatggaaggactagaagattactttagtgaagattcttaggcagttttataaccctttttcctcaatagcctgtttcctgtttttaagattttgcctttgttgttgaaaaagggtttcactctgtcaccaaggcttagtgcagtgacacaattacagctgattgcagccttgaccttcccagctcaagtgatcctcctacctcagcctcccaagtagttaggaccacaggtgtgcacctcatatccagataattttttcaatttttttttgtagaggtggggggtctccctatgttgcccaggcagatctcagactcctgggctcaagcgatcctcacacctcagcgtcccagagtgctgggattacagttgtgagccactgtgcctggcctttttttttttttaaaccttttggttaaacttctctcttcactgcatcccaatccatttacgggcttgcccccttattagggaaggggggtttggggtaaccaacagagactttcacctatattttggctttgacagaaggaaagaggaagagtttctattaaaatctgtcacttgagtgatgtcattcaagtcctattttaggagataaaaacacctttggggactggttaaagtcccccagaaactacaataaagaacaacttttgttttaactcttaatcactttgtaattttgactcaatccttttctggaccgatttttgttaataaatatcaaagtgt

SEQ ID NO: 61262 - DNA, 2622 bp, Homo sapiens; identical to SEQ ID NO: 61211

SEQ ID NO: 61263 - DNA, 4566 bp, Homo sapiens
  misc_feature (1)...(4566): n = a,t,c or g
cagaattctcaaagctgacggatcggtggcagaatgctgtccagggtgttcggcagaggaagggtgacgttgatgggctggtgaggcagtggcaagatttcactacttctgtggagaacttgtttcgcttcctcactgacaccagccacctgctatctgcagtgaagggccaggagcgcttcagcctataccaaaccagaagtctgatccatgagctgaagaataaagaaattcattttcaaaggaggcgaactacctgtgccctaaccttggaagctggagaaaagttactgctcacaactgacctgaaaactaaagagtctgtgggtaggagaatcagtcaacttcaggacagctggaaagacatggagccccagctggcagagatgattaagcagttccagagcactgtagagacctgggaccagtgtgaaaagaaaatcaaggagttgaaaagcaggctgcaagttttaaaggcacaaagtgaagatcctcttccagagcttcacgaggacctccataacgaaaaagagctgattaaggaactagaacagtctttggctagctggactcagaacttgaaagaacttcaaactatgaaggcggacttaacccggcacgttctcgtggaagatgtgatggttttgaaggagcaaatagagcatttgcacagacaatgggaggacctctgcttaagggtggccatacgtaaacaggagattgaagacagactcaatacatgggttgtattcaatgaaaaaaataaagagttgtgtgcctggctggtgcagatggaaaacaaagttctacagacagcggacattagtattgaagaaatgattgaaaagttacagaaggactgcatggaagaaataaacttgtttagtgaaaacaagttacagttaaagcagatgggtgaccagttgatcaaggccagcaacaaatcaagagcagctgagatcgatgacaagctcaacaaaattaacgatcgttggcaacatctttttgatgtcatcggatcaagggtgaagaagctgaaggagacctttgcttttattcagcagttggacaaaaacatgagcaaccttcgcacctggttggctcgaattgagtctgagctttccaagcctgttgtttatgatgtctgcgatgatcaagagatccagaagaggctcgctgagcagcaggatctacagcgagatattgaacaacacagcgcaggggtggagtccgtgtttaacatctgtgacgtcctactgcacgactccgatgcctgtgcaaatgagaccgagtgtgactcgatccagcagaccaccaggagcctggacagacgctggaggaacatttgtgccatgtccatggagcggcgcatgaaaatcgaggagacgtggcgcctgtggcagaagtttttagacgactattctcgctttgaggactggctcaagtcagctgagaggacggcagcctgcccaaattcctcagaggtgttgtacaccgagtgccaaagaggaactgaagaggtttgaggcctttcagcggcagattcatgagcggctcactcagctggagctcatcaacaagcagtaccggcggctggcccgggagaaccgcacagacacggccagcaggctgaagcagatggtccacgagggcaaccagcgctgggacaaccttcagaggcgggtcacagccgtcctgcggagactcaggcatttcaccaaccagagggaagaatttgagggcaccagggagagcattctggtgtggctcacagagatggacctgcagctgaccaacgtggagcacttctcagagagtgacgccgatgacaagatgcgccaactgaatggctttcaacaggaaattacattaaataccaacaagattgatcagctcattgtgtttggggagcagctgattcagaagagcgagccccctggatgctgtgctgattgaggatgagctggaggaactccaccgctactgccaggaggtgtttggaagggtctcccggttccaccggcggctcacctcctgcactccgggcttggaagatgaaaaggaggcctctgagaatgaaacagacatggaagaccccagagaaatccagactgattcttggcgtaaacggggagagagcgaggaaccgtcatctcctcagtccctgtgtcatctagtggccccagggcacgagcggtctggctgcgagacccctgtcagcgtggactcccatccccctggagtgggaccacacaggcgacgtggggggncctcctcctctcacggaagaggacgaggagggcccatactacagcgcactgtcaggtaaatccatttcggatggccactcgtggcatgttcccgacagcccttcctgtcccgagcatcactacaagcaaatggaaggtgacaggaatgttccacctgttccccctgcgtccagcaccccttataaaccaccctatggaaagctactattacctccaggcacggatggtggcaaagaaggcccgcgagtcctgaatggcaacccacagcaggaagacgggggactggccggtatcacagagcagcagtcaggtgccttcgacagatgggagatgattcaagcacaggagcttcacaataagctcaaaataaaacaaaatttgcaacagctgaactctgatatcagcgccatcactacttggctgaaaaaaactgaagcagagctggaaatgttaaagatggcaaagcctccctctgatatccaggaaatagaactgagagtgaagagactgcaggagatactgaaagcctttgacacttacaaggcattagtggtctctgtcaacgtgagcagcaaggaatttctgcaaaccgagagccccgaatccacagagctccaaagtagactccgccagctgagcctgctctgggaagcagcacagggcgcagtggacagctggagagggggcttacgacagtcgctcatgcagtgccaggacttccaccagttgagtcaaaatctgctgctgtggttagcgagtgccaagaaccggaggcagaaggctcatgtcaccgatccaaaggcagacccccgggctctcctagagtgtcggagggaactaatgcaactggaaaaggagctggtagaacgtcaacctcaagtggacatgttacaggagatttcaaacagccttctcattaagggacatggagaagactgtattgaagctgaagaaaaggtgcatgttattgagaagaaactcaaacagttacgggagcaagtgtcccaagatttaatggccttgcagggaacccagaacccagcctcacccctgcccagcttcgacgaggtagactcgggggaccagcctcctgcaacatccgtgccagctccccgagcaaagcagttcagagcagtgagaactacagaaggcgaggaggagacagagagcagggtccccggcagcacacggccacagcgctccttcctctcaagggtggtccgggcagccctacccctgcagctgctcctcctgctgctgctgctcctggcctgcctgctgccctcctccgaagaagactacagctgcactcaggccaacaactttgcccggtccttttaccccatgctgaggtacaccaatgggccaccccccacatagagggcatagctggccacagtgctacaccacctgcctgattgccaagggtgcccagcacgtggccccagaccaatctgagtgacttagtgttggcaaggtcccgggacctgtgcagacttcttctgggcttacccagcacgggctccctggagcccagggcagctttcagattgtgttcctccccaggagcagggaacctgtgtggcaggtgccccgggtattttggcagaactagttgattagtttagggatctctggaaatgtcagtttcctgaagagccaagcactttgtgaattctggtttgtttgtaaaacagcattattataatgtaggtatggtcaatgagcagtggtgtccatcacatatattatagaagcaagcgaggacattccaccctagaaatggttcagaaactcataggcacccttagctgatggaaacaatcaatcatatttaatacgcttagaatcagttttactccaatcagctggcaattttgagctgccggttatacaccaaaatgttctgttcagtacctagctctgctcttttatattgctttaaatttttaaagaaattgtattgcatggatgtggttatttgtgcatattttttaacaatgcccaatctgtatgaataatgtaaacttcgatttttttttaaaaaaattagattttagctggagcttttgactaatgtaaagtaaatgccaaactaccgacttgatagggatgtttttgtaagttaattttctaagactttttcacatccaaagtgatgctttgctttgggttttaactgtttggccacggcgggggtgggggcggggggttggtacaaaaacttgaagctgtttgtgatatgtacaactcagatgtttctcattaaaaaacaaaattagccagaaaaaaaaaa

SEQ ID NO: 61264 - DNA, 1209 bp, Homo sapiens
  misc_feature (1)...(1209): n = a,t,c or g
ttttttttttttgacacaagactaattactttattaggtgcattctataagttgaagaggagaatttttggcaaataaataaataaataaataaataatcaaacagagactctggggcccgaggagctcaggaaaacggaagcggagtctttgcatagttctaaatgaacaggaggtggcagcagtaggcaacgcggattctcggcggaaatgcagcacttgcaaaaaccagggacagaaggctttgagaaagaggagaaggtcagaaggtgactaactatttctttttcgtagagaccatggtgtggaacattcgtcctctctaccaggggcaggatgccgcgtcctacatgatctgcctgggcatcccgtaccctgtcatgcccgcctgggaggctcccttgttgctgcccatctgcaggcctattacgttctgtccctggcgaagctgctcctcggaaaagcctctccgattctgctgggctttcctgtgaaaccaggatggctctccccgatagcagccatcatccttggtgactgcaacgctgcctaaagccatcagggtcctctgcacagctgccatgtccttcccttcccatagatccaccgtctgaaagatgtcggtggttctgacaccataggtctccgcagcttttaggaactgggagatttgctccatctgcttaaaagccatctttgactctgagatcttgggtatgggctcttgtcctggtgggtataaactatttatcagcttgcacaggaccgtcccgtccattaaccatttctgaaaatgggccctgccggggggcgggtgctctatgtcctcggcgcactgcaggatgatccagtccaccagcttgttctccaggtccgcatcatacttctgctcgatcttctcctgcacctctcggcttaagccatagctcgggcccctgttagccatctaatcaagtctgaacccccaggcagcaagggggatgggtggcggacgtttcttcccgcttctcagtagcactttgcaaaggcagaaacgatgagatcgggaagagcaggtaattagcaggcagggaggaagcctcctttcatgttgaactgcagccgctgctgcctcgcgcctggaagaatggcacattgatttgattttctcatggctgagtgggctcaaccagggccgttgctaaganccctcgtgccgaattcctgcag

SEQ ID NO: 61265 - DNA, 2160 bp, Homo sapiens
ctcccggttcgacgatttcgtggcgcagccgctgcccgagccgcagccgcagccggagcccgagccgcggggcgggtgcgaagatgcacacgacccagaaggacacgacgtacaccaagatcttcgtcggggggctgccctaccacaccaccgacgccagcctgcgcaagtacttcgaggtcttcggcgagatcgaggaggcggtggtcatcaccgaccggcagacgggcaagtcccggggctatggatttgtcaccatggctgaccgggctgctgccgaaagggcctgcaaggatcccaatcccatcattgatggcagaaaggccaacgtgaacctggcatacttaggagcaaaaccaaggatcatgcaaccaggttttgcctttggtgttcaacaacttcatccagcccttatacaaagacctttcgggatacctgcccactatgtctatccgcaggcttttgtgcagccgggagtggtcattccacacgtccagccgacagcagctgccgcctccaccaccccttacattgattacactggagctgcatacgcacaatactcagcagctgctgctgctgccgccgccgctgctgcctatgaccagtacccctatgcagcctctccagctgctgcaggatatgttactgctgggggctatggctacgcagtccagcagccaatcaccgcagcggcacctgggacagctgccgccgccgctgcagcagctgctgccgctgcagcatttggccagtaccagcctcagcagctgcagacagaccgaatgcaatagaccagccatctgatcaaagttgaattgttttctctttccctcccaattttccaatttttagtagctaataagagagttaacattgacttaacagctttaaaaaaaaaaacagccatgctattgtgaagcagagttattattttggcaatactccaggtagtgttctagatgagaaagaggtaagaatgaggggaatgggcacaattttgggaatcaatcccaaagagcctgagtaaatgaaaggccactacgaaatgacgccaggagtaacaacggaaccttcacttttgtaccgggattaatatttgtgctcttgttatagtatcagggaagcaaactgccttttacaagttagaaaatgctgtttgaatctagttgaaccagggaatacagagcgagcaatatgtagcttgaattacatttaaaagcagattttttacaaacaaaatggcgaaagcactgattgtcatttttagcagtcacttaaggcctatagaacttttttcaagtcggaaggtcctgttcttactatctcaaaaatgggcatcgaacaatcaatctaggagcgtggcagtgggtaaaatggtggacaggcaccaaagctattttctcatctgtcctgtggatgagtggaactgtggaacaagtgatgtggaattaatgggtgcaacagctgtacagacaatcaataacacacacagttctggaaagaacacatcacttgtgcttgtttgatgagcttgtcacattctaatccctctccccatcctgtttcaattttgggaaacttgtatctgctggtgtcagcaattctgattctgaaataggatcaggcttttactacaacagccttctctttctatttattgtgtcgactcgtggcttatgaataaaggcaggcaaagtttgcagaactgtcttaaggacatttattttttttccctttttaagtaattttacactttagtatctatttcagagtcatatttaaaactatttattagtgactacagtacatgagacaacaaggttactgagattacaattcttcaaaggttaatgataatgtggtttatactgtgccttaatagtaatgctatttaagatatttatttttaagttttactatgctgcactctaaagaaaggaactttagatgtgacactgtaaaattatgtattcatctcatggcataaattatttagtaagtctagatgtagcgtattaaatattaacctattcaactaaagatgttgacttgggatttatttaaattcatatgtgcactgtataagagagtactcttacattaacacattttagtttagtttttagatttttttttaaacgatatattgctagtttc

SEQ ID NO: 61266 - DNA, 1750 bp, Homo sapiens
gtatacattttcccacaaaatggttgtaaagatttaagttattttaatttaatgttgattaagaaccctagatgaaactggtcagaacctgtaaattacttagtttatatccactttgagcaggtatcaaatgatttaggatccttaaaattacattctaataattaagttatgtggaaaaagtaaggctggggaagtcgtgattaatagttttcaaagggccattttttaaaatcctctgggcattttctttcagctgtttgttagtttttgctttatttaaagcatatttaagttattttaatgtggtttaggggcaaaatgtgcagatacttcatttttgtaagattgtaatagatgctgtttatactaaacatgtcatatctatctatacagtatatattaaaagaaagcttgtactgtatcttatttgatgatatttattttctctgccaagctgtatagtaaaaggaaaataagtcacatctggtcattggcatttgtatcgtcattctgtaaagacaaaagagtacctatataagaagctccacgtagtgcaaatcgacatctggtaggctgctcgcccccaggcagcagctatgagtctgtaattctctgcgtcatcctcttctttttcttcatttttgctttttcttcgcttgagttcttctctgaaattatatgcaaagagttgtggggtcttcatcacacatttttctggtatacatcacagaggctccttaaaagtgtgaggatgggagagctggcggggccgaaggagtaggggtctatgtctgcccaactctaacagcctgccccgtgctttccaaggcgctgcgcttcagggaataacattctgagccctcgatggcagtatttccttcggaactgaaatacattctgaaccactttttccaccagcttgaatggctgctctatcttgggctgtatcaagggagtgaagtgcaccacgcccacgtccaccttcgttgtaagcaaacatattatcattctctggtttggggacaaaagcttgtcctggaattgtaaagatgtgtcgaacattgcagaggtactgagccataacagagaggcgactacgctgtttgcttcctgtattggctgcaagtctctctgccacttccttttgaaaagtcaaagtcatctgagttctgccataaacaaaaggtccatctctacaggaaatattttcaagccacttgataatcagtggagttgaaacactaaaaggcagatttccaataatatgtacatttggaggatcatcttcccagggtcttttaagactttctgaaaaagccttttctaccttaaatgtcaagacatctccatgaacaattctcagtttcccaggtgctgcatcagaaagcatctgtaatccaggaataaatcgagtgtccttttcaaccaccagaagttcagcgacgtcggcattaagaatagatcttgtgattccccctggcccagggcccacttcgtaaacataagcatttgtcagattgccagctttccttacaatcttatctgtcagcctcaagtccaggaggaaattctgtgatagctgcttcgctgcttgcagtcttaacaacttaatgatttctcgaatcgtgggcaacggagggagacggcaagtgctgagttttccggaggcagccatgatacgcggcaagcaccatccacccctacctcacccaggaccttcaccgccgctcccacttcagattgtaac

SEQ ID NO: 61267 - DNA, 1459 bp, Homo sapiens
tttcgtgtcggatgctgagaatgactgacgatgtgatgaggggcggattgaacgagtcacaggccagctggccaggagcaaaatcggcatagctgtctgactcgatggctgtacgtggttacggactgtctgccctgatagaatctcagcttcaacgtatcagaggagactgacttgaccaatggtggggatgagtcgcctgagaaatgacagactggctgacccactgacaggtggctgcagcgtgtgttgcaagtcttcttggaatcagctgcaggacctgtgccgcctggccaagctctcctgccctgccctcggtatctctaagaggaacctctatgactttgaagtcgagtacctgtgcgattacaagaagatccgcgaacaggaatattacctggtgaaatggcgtggatatccagactcagagagcacctgggagccacggcagaatctcaagtgtgtgcgtatcctcaagcagttccacaaggacttagaaagggagctgctccggcggcaccaccggtcaaagaccccccggcacctggacccaagcttggccaactacctggtgcagaaggccaagcagaggcggggcgctccgtcgctgggagcagggagcttcaattgccaagcgcagcattcttggggacgcatcactgtagagaatgaggtggacctggacggccctccgcgggccttcgtgtacatcaatgagtaccgtgttggtgagggcatcaccctcaaccaggtggctgtgggctgcgagtgccaggactgtctgtgggcacccactggaggctgctgcccgggggcgtcactgcacaagtttgcctacaatgaccagggccaggtgcggcttcgagccgggctgcccatctacgagtgcaactcccgctgccgctgcggctatgactgcccaaatcgtgtggtacagaagggtatccgatatgacctctgcatcttccgcacggatgatgggcgtggctggggcgtccgcaccctggagaagattcgcaagaacagcttcgtcatggagtacgtgggagagatcattacctcagaggaggcagagcggcggggccagatctacgaccgtcagggcgccacctacctctttgacctggactacgtggaggacgtgtacaccgtggatgccgcctactatggcaacatctcccactttgtcaaccacagttgtgaccccaacctgcaggtgtacaacgtcttcatagacaaccttgacgagcggctgccccgcatcgctttctttgccacaagaaccatccgggcaggcgaggagctcacctttgattacaacatgcaagtggaccccgtggacatggagagcacccgcatggactccaactttggcctggctgggctccctggctcccctaagaagcgggtccgtattgaatgcaagtgtgggactgagtcctgccgcaaatacctcttc

SEQ ID NO: 61268 - DNA, 1541 bp, Homo sapiens
ttttttttttttgaccaaaaaaggcaactatatttaaagtaaatgtatgtgattcttgtcacaacaaatatttgcattttctcagcggcagctgcgggacctgggtggctccgacacgccaggcccgggaaggacccggcaccctcccctgaacttcctggctactcatttccagcgaagtttaatctatttttaataatcgttcagttttcaaggaaatggaggagctgttttttcccacggagcggcggccctgggaggggccgggcccagaggttccggccgcgatgccgtcagcgccttcggcagagtgactgaagcgagatttcgttcagcgcgttgtactcgttcatggggtccatgtagctctccagctcctcggcggtcacgatgccgtcgtggttggagtcaatgagctcctcaaactccttttttcttgtctttcaacccagttgtcggtcaatgtcctggaccctgctggttctccacggtgcccacgggcaagggagatgaactcgggcacagagagctgcttgtcaccgtcctggtccaggtcccggacgatctccttcaccatgaacctgaagcattcccccggctgtgctcggggtggaggaacgacaggaactcctcctccgtcagcagcaggtctgcagggggggctgtccgcctgggtaccagcggtccttcaggttctccaggacttcctgtgtttcctcgtccactttgagttcctcgttgagcctgatggcgtcggcaacctccttctcgctatggcctttactcgccaaaaacttcaccttatactcgtcccaagacacgtgaccgtccccgtcagggtccacggcgcggaagtgtgtcttgctctcctccatggcctcctggaagtgctcggccgtcttctccatgatccagcgctgcatctccttggcactgatcttccggtcagtgttcacatccaccttggaaaagatgaccatcagcttcctccggctccgccgcggctccgcgtcctcatcaaagccacccaggtccttgcctaggaagacctcctggtggaagccgcgattgaggtgcccgtccatctccagcttcaccccgttcaggtggtctgggggcaggatctcattctcctccctgttggctactctctctcgagtggacgagtggttggcaggccgtgcagacgcgtccatcagaaggactgcccccaggagccagaggcagcacggagccaggccaatgaggggaccccacctggacgccatcgccacccagggccagaccatggggcgggctgcagggtgtgggccaggtgctgggaggggcaggggcaggggcagaggaggaagtgaggtcctggctccaatccaatccccgggcaccacggagggctctgtgtccccaggacggccgcaggatggggacaagcagctcacagtcggtctgcctccccgcgctcgggatccgaggaccggagcgaagcgtcagtgacgccgccaacgggcccggatcaggccactgccatctttcttgcgtgc

SEQ ID NO: 61269 - DNA, 5830 bp, Homo sapiens
cggccgcggcgacagctccagctccggctccggctccggctccggctccggctcccgcgcctgccccgctcggcccagcgcgcccgggctccgcgccccgaccccgccgccgcgcctgccgggggcctcgggcgcccccgccgcccgcctcacgctgaagttcctggccgtgctgctggccgcgggcatgctggcgttcctcggtgccgtcatctgcatcatcgccagcgtgcccctggcggccagcccggcgcgggcgctgcccggcggcgccgacaatgcttcggtcgcctcgggcgccgccgcgtccccgggcccgcagcggagcctgagcgcgctgcacggcgcgggcggttcagccgggccccccgcgctgcccggggcacccgcggccagcgcgcacccgctgccgcccgggcccctgttcagccgcttcctgtgcacgccgctggctgctgcctgcccgtcgggggcccagcagggggacgcggcgggcgctgcgccgggcgagcgcgaagagctgctgctgctgcagagcacggccgagcagctgcgccagacggcgctgcagcaggaggcgcgcatccgcgccgaccaggacaccatccgtgagctcaccggcaagctgggccgctgcgagagcggcctgccgcgcggcctccagggcgccgggccccgccgcgacaccatggccgacgggccctgggactcgcctgcgctcattctggagctggaggacgccgtgcgcgccctgcgggaccgcatcgaccgcctggaggagcttccagcccgtgtgaacctctcagctgccccagccccagtctctgctgtgcccaccggcctacactccaagatggaccagctggaggggcagctgctggcccaggtgctggcactggagaaggagcgtgtggccctcagccacagcagccgccggcagaggcaggaagtggaaaaggagttggacgtcctgcagggtcgtgtggctgagctggagcacgggtcctcagcctacagtcctccagatgccttcaagatcagcatccccatccgtaacaactacatgtacgcccgcgtgcggaaggctctgcccgagctctacgcattcaccgcctgcatgtggctgcggtccaggtccagcggcaccggccagggcacccccttctcctactcagtgcccgggcagcaggcaacgagattgtactgctagaggcgggccatgagcccatggagctgctgatcaacgacaaggtggcccagctgcccctgagcctgaaggacaatggctggcaccacatctgcatcgcctggaccacaagggatggcctatggtctgcctaccaggacggggagctgcagggctccggtgagaacctggctgcctggcaccccatcaagcctcatgggatccttatcttgggccaggagcaggataccctgggtggccggtttgatgccacccaggcctttgtcggtgacattgcccagtttaacctgtgggaccacgccctgacaccagcccaggtcctgggcattgccaactgcactgcgccactgctgggcaacgtccttccctgggaagacaagttggtggaggcctttgggggtgcaacaaaggctgccttcgatgtctgcaaggggagggccaaggcatgaggggccacctcatccagggcccctcccttgcctgccactttggggacttgaggggggtcatattccctcctcagcctgcccacgcactggccttccctcctgccccactcctggctgtgcctcccatttcccctcacctgtacccacacctccagaatgccctgccctgcgagtgtgtcccctgtccccacctgagtggggaggagcgtctcaagtgaacagtgggagcctgcccacctggcactgcactggagttgtctcttaccccaccctccctgcccatcaactgtatctgatttcactaattttgacagcacccccagtagggtaggattgtgtatgagggggaccccactatctcagtggtgggggtggccgcccgcccccttgtcccccatgcaacaggcccagtggcttccccttcagggccacaacaggctgtagaaggggatgacgaggacatcagaggttagacttaccctcctccctctttccaccagctgccagtcaagggcagtgggatctcgatggagcctccccccccccacccatgcctccctcttcctcctctttcctcctctctttgtgtgtaacggtttgaatgttggttccatgcctggcccaaccccacctcagtctccaggacattcctttcccagctccagcctggagggaaggggacaaagaccccaggaggccaaagggctgcagtcaccccttgtgctcacccatagtgatggccactggtatagtcatcgctctccctccatgccaaggacaggacttggaccgcttcagcctgggctgggagcagccctaaggtagaggcctcatggcccaggagaccccacctctggcagagccacattacctaccctgtgcatggtcctggggcagcaaggaagaagctcagagggtggggagaagcatgaagcagtgagcagagcactgggtgagagggagaagaccttggttcctagccagccctgctaatgtgctgtgtggccttctgtaagtccctgccctctctgggcctggccttcctcattcgtgagctgaggccctcgctttggtcatttgctctccagattgggtgtgagcttctctgtgattccaggtggatatgtggggaaagctctggtgaccctgggcttcgcagggtgtagatcccaggactcggcagtggatgggatgcagccagtcatgggttagggtcagcagagactcagagtccagggcaaggttcaaggcagactaacctcatgcatggattgtaaaaaaccagctccctttggatcaacccagcctggcacccttgcctgtctgagagtgtctcaaagggctgatggcttcctggtccccttgagtcatcaccagcttccccaagagagtgtcagaatcttaagagctgagaggccgggcacggtggctcacgcctgtaatcccagcactttgggaggctgagacaggcagatcacttgaggtcaggagttcgaggtcagcctggccaacgtggtgaaaccccatcttcactaaaaatacaaaacttaactggttaggtggtgcatgcctgtagtcccagctactcgggaggccgaggcagaagaatctcttgaactgaggaggtggaggttgcagtgagccgagatcacgccattgcactccagcctgggcaacagagcaagactccatctcaaaaaaaaataataataatcttaaagatgagaaaagccaccccatctggcaccacagctgcatcttgcttgtgagaaatggggaagagttcagggaggacacgtgacctgcacaggatcacagagcatggggcagagccaggactagagctcagggcatctgactccctcttcagtgttcttccccctccatgttgcctgcccctgaagacctttgagttcagtctacacctaagcaggtagacatccgcgaagtcagatgctttccaacatgacacctgaacatcttcctttatgcaacacccaaacatcttggcatccccaccccaggaagtgcggggaggaggttatgatccctgggcgcttcggcagaatggagagctgaggtgtccctcccctgctagtcacctaccaggtgtctgagcagctgcatgctccctggctcaagtgggcactgtaccttttgcctgcctttttgttccctatctccactccctgaggccacttagcctgagacatgatgcaagagctgcaggccggggggctcagtgccatggaagctactccaagttgcattgcctcccgcgcccagatcctgctttccatttcgagaacataaatagattgcccagcccctccagtacaatcccactggaagaaaaggcaatggcgggcttcagccagacctgctgagacctaggttgccacggtaacagccaaagacatcaacccaagtgctgggtcaagtgtctcatcatactggcactgttgctggggtgacggcagaattcagaacttcaatttcagtgacgccaagcttgatgtgtttctgttattgttttgaagaaggtagctcttgtggaggacttgggagaaggatggggtcttaggaaggaggtgacagcacttgcatggtcacttgagcccacacacacgctcaaccccaagtcctttatgctttgtcacagtgaagatgagacctctgacgtccaagccttgttcctgtgctgcatcacccactcagccttccaaagggaacaggaacaaatttccccagcaccactgtttgggtcccgcttttcctatcttctgctgcccctgagcacatccaagcagacagggaaagaggagtcagacatggcccagtcacatcctgagctgctcctggctgataaccacgatggagcccgtgtttgtcctgccatctggcactgcactgagtgtggcacaggcaccgtcctgttgatctcacaacacagttctaagttaggacgttcttggctccgttagacaggtgaggaaactggggcacagagaggtgatgtcatctgcctggtgtcaatcagctagcaagtgatggagcccagatttcaaaccaaagggggttacgtccaggggctgagttcccactcacctgtgtagagtgccatctgggcaccattgctccagacgtgttccgacccctttcccagcccacagggcttgaagtgaaggaacagaggcagggggtgggccagccccagggccagggtccccttggtgaagccgtgccagggggctcagctgcttcagggaatgtgtccctcccaccatgggccagagcttcagcccttctttagctcagctagagttcacaggagagccaaaaaagaaaaggaagctgagcatctcccgagtcctgggcagggaaggggagggaaattgctgcttctccaactcttgcttggggccaagccctgcaccagttgcttcccagctgttatctgccagatcttcccatcttgtggcatgtggtgcccccaccaacatcccaaggggaccaatccccttgccaccactttgcatcacctgggaccacagatttggacaggaagggctctgagaagaggccaaagccctcattttacagatgaggaagctgaagcccggggaggggagcgaccctcaaggccacccagctggacacgggagacttgagcccagccttctgactgcattcagccctctctaggacgcagcagcctctccccagcactgagtcccccctccctttgtgtgtcccagcacccttggcctgagtaaacttggaaaggggctccctcccagagaagggactactctcttcacccctttattccagctgccctggccaccccagacccccacctcccaccctgacccccgacccctgggtggggaaggggctcacatgggccccaggcctgaagtgtgaagtgaagcatgtccaagttgtctgaacactgtgacattagtgcacccctactgaacaacccctccccagccttgcccctttctcctctccctgttttgtacataaattgacatgagctgcaacatgtgtgcgtgtgtgtgcgtgtgtgtgtgtgtgtatgtgtgtggtgcatctgtgtcaatggttttgttacctttttgtttttgtaaacttgaatgcttcaaaataaacatgctgtttactctga

SEQ ID NO: 61270 - DNA, 1077 bp, Homo sapiens
ttttttttttttaggtgtttaatatttatttatttagttcataaacaggcactgccacctccagtgttcatccatggcactttcatgaccgcttcctgttctgtggcttcttttagtgcccaagttgtatcacatttcttgctgaagttcagacaattgaaaacaaacagactcacatctagggaaatcaacagaccaacaatggcaaaacacaatacaatgaaatggaaaaataatgtttgttacaggagtgcagcaatttagagagtgtctcaggagtgtggctcactggcagctgcagctatgttagtgcttctttctgcctcaagttcagaaacaagctggactatctcagggtgattgaattttcctgctgtggaatcatagaagtcttgcagtctcccaggtttgtgttcaaggtcttcatattcagatgcttgaagaatcatttcacattggtctagctgcttcacaaatttggcttctgcactagattgggtctcgtactccatatatacttacttcccaaagttcatagagctcctttctgaggtcctctggtaggagctgggttatctgcttcatagcttcctcttctcgcctatgtttttcttctttggggatgttatctgctggtgctatgtccccaacgatgcattctgccatatcatgaaccagggctaggcgtacacatcggtctttgttaagacggtcatctttgatcaccatagccataactgccatccggtacatgtgatctgaaacgctctccggcctctggacatttctgtatacccagccagttcgtgggactctcttgagctgccctaccagccgcaggaactgcagtagggaccgagccccgtggcccgagaaggtcgcagaggagaccgaagccatgcggccaccgaccccggctgggcggagcaggccgcggcgaagctcctccccgtcctcctcctcctccccttccccttgtctttcttccccctcctcttactcttctatctctttctcctccccctcttcttcttccttctgcccctcttcctgctccccctcttcctccctcgtgcc

SEQ ID NO: 61271 - DNA, 1209 bp, Homo sapiens
gaattcccgtgtcgacgatttcgtgagcgcggcagcccgcgcagccggtgactgggggactgggtttggagtaggacctgcggcgtgctcgagactccgacttcggtcttgcggcgcgctcgcgcccgcgggccatgccccactgactctaagtgggcactgccccggctccgggagggcgagaccgagcgccggccatgggaagcttccagctggaagactttgcggcgggctggatcggaggtgcagccagtgtcatcgtcggccaccctctggacacagtcaagactcgcctgcaggctggcgttggctacggaaacaccctcagctgcatccgcgtggtgtacaggagggagagtatgttcggcttcttcaagggcatgtccttccccctcgccagcattgccgtctacaactccgtggtgtttggggtcttcagtaacacgcagcggttcctcagccagcaccgctgcggggagccagaggccagtcctccccgcacgctgtcagacctgctcctggccagcatggtggccggcgtggtctctgtcgggctgggagggcccgtggacctcatcaagatccggttgcagatgcagacaccacccgtttcgggacgccaacctcggtttgaagtccagggcagtggctcctgcggagcagccagcataccaggggccagtgcactgcattacaaccattgtgaggaatgagggcctggcggggctataccggggggccagtgccatgctgctgagggatgtcccaggctattgcctctacttcatcccctacgtgttcctgagtgagtggatcacacctgaggcctgcacaggccccagcccctgtgctgtgtggctggcgggcggcatggcaggagcaatttcttgggggacagcgactcctatggatgtcgtgaaaagtcgactccaagctgatggggtttatttaaacaaatataaaggtgtcctggactgtatctcccagagttaccagaaggaaggtcttaaagtgtttttcagaggcatcactgtgaacgcggtgcggggcttccccatgagtgcggccatgttccttgggtacgagctgtcgctgcaggctatccgcggggaccacgcagtgacgagcccataagcgccaggtctttgctcaggctgtcccctctgcctgacatcctcttctcgctcctttcctacttgtccttggctt

SEQ ID NO: 61272 - DNA, 3138 bp, Homo sapiens
tcagaattactccagtgtgtgggttggcaggttgtagaaagtggcactgcccctactgtctctgagaccagaggggttttcagtgctttgccgggccacagccagagacaggatgagccggggtcaagtttctgtaaactaaacagtcatggcagcaaggtccaactttagaaacaaaagttcattttcaggttctttatgacactgtaggacaatacaacacattttgaagtcggacccaatgtttgttttctactatatgaaatcaggacataagatgctgcttgctaataccagctgttacaagaagacagagttgtcgccatgaaataaagctctctaggaagcacacagaaataaaaaggtcaccatgcataccaagaacaacccatcagtcaataaactaaacactttggaaataaaaacttaacacatcatttcattttgttaaaaataaaacgtatcactaatctgtgagtgtcttgttctgtcacaatgggcattgtgataaatcagggtttctcaatctcggcactactgatattttggggtggatgattctttgctgttgtaggatgtgctgtgcatggtagaatgtttggcagcattcctggcttgtagtagcacccccaagtcatgacaatgaaaactgtcaccagacatttttgaatgtccctggggtggagtcagggggcaaaatcacctcctggttgagaatgattgcaatacacagatacctacaaagaggaacaattctttctcaaaatttattgtgcagaattttaagactatacccagggttgctcatttattaaagcaaagacttagtaaggtaagtgtgtgggaagaataaatggattaatcatagtctgtttcctatgaaaatgcctcgttgagtaattgcagatagactagtgcctcttttttgttttgttttgtttttaaacattttacagccattatccaacagacagtaaagcagtggaccagttgctgtgtgggtataaagcaaacggtctctgggctcctccaagctgtggatatctctggccattatcaatagctgattctcacttgtcctaatgaagtactcagtgcaggttagcctccttctcccccgccagcttctcttccacttccccacaccgtacatgcctctccctttctctctataactcagctcatctcatagcctttttctttggaaatgcaactctgctgatcacttgtgggctgggatcccagctgccttttgaacagagcagacatcctttacagagacaggtggcctggaggggagaacaggtaggggcacactgagatcccacagcaacctgagagattctgccccgtgacctgctggccccctccagggcacttcctattttcatctttcattaattaggcagctaagaagctgctttccagcttgtagagccaagcaggcagcatcctgtcagaaacaaccagataaatagagattaaaaaggaatctgagaaaaccctgctctctcccatgcagggtgaaatcctcgtagagctcatttcctttcccctcattaatacttaatgtaatttcctaaatagaagtttaagaaataacacaaatgaaatgttcccctgaaagtaacccctaacaaaacaacccaaatcctcctcctcggtccttctcaaagtgggtcctgcagtggggaaagaagccttcaccatggtggtctggcctggctggtgcaaggctggcccacttcagctgcaaatcagcctccactcacctttaaagaatggttcttcttgtaccagaaaggggaagttgtagcagccagaggagagggaggaaaacaaaaccacccataccaacaaaacagggcttaagattgtcgttcaatgcgcatcaggtacttattaattctactggataagcacttataaataaagaacagttaatcctcatcccaggccatattccattgttaggagtcatcgtacagagggttgttgtagtttccccaggacccgtagtcatggtcgtccaaaagtcttccataggaggaatgcctgatttttaggtaggctgcaactccaaacaccagcagcaccacggcaatgactgtcacggtaatggcggcgatgctgcctgaacttaatgcatgttctacttcctgcatgatcaccctgggaaaggtggtggtggtctccatgtctatgagctcacacatcactttgcctgacacagttgttgggggtgttttctcctggggtactggctcagctgtggcatgtgaagtgggtgtgtggtcagagctggactcctctgttggggactctggtgcagttggagctccagtgggttgggtgctggtcacagtggagctatggttggtagtaacggaggcagaaaagacctcaggtggtgaggttgatagggatgagggtgatgaggctggagcttgaggggagatgagtgtgggaggctcagcagcggactgcgacagtgtagctgccacgcctgcttcaggagtgcccaagctgtgttcctccaacgtggttgttaagtggactccaccgcttgttgacgagaacccagaaggtgaggggtctgtgtttgtgccttcccaattcgaacctgggctggtgatctcctcttctctggactctatggaaatgttcttaggaagcagagatgttggggctgatgctgtaactgggagcaccgagttgttgtgagtgccgttggatggggaggcagtgtctgcatcagtgttttgtggagagctagtccagatggtggtcggtggtacaatgtttgtcggaagagaaacagacaaaggagctgatgtaggcagactctgtaccctccatcctgcagttaagatgcaaagagcgaagagagtcttgtagaccatggtagcctggtatttggtgcccagcccggggcgggcggcaaggagtttgcggactgacagagcgcactgggcgctggtagcgactcctctgccgggtgggctgcggtgggagccgggaggcgcgaacagctccagtggagggcgcgaggcaaacgaggcgaacgcagcgcagctccgtcagctgcgtgccctccggtgctccgcgctcttccgctccatcccagccgccacgaaa

SEQ ID NO: 61273 - DNA, 5944 bp, Homo sapiens
  misc_feature (1)...(5944): n = a,t,c or g
ttttttttttttttgagaaaggggaatttcatcccaaataaaaggaatgaagtctggctccggaggagggtccccgacctcgctgtgggggctcctgtttctctccgccgcgctctcgctctggccgacgagtggagaaatctgcgggccaggcatcgacatccgcaacgactatcagcagctgaagcgcctggagaactgcacggtgatcgagggctacctccacatcctgctcatctccaaggccgaggactaccgcagctaccgcttccccaagctcacggtcattaccgagtacttgctgctgttccgagtggctggcctcgagagcctcggagacctcttccccaacctcacggtcatccgcggctggaaactcttctacaactacgccctggtcatcttcgagatgaccaatctcaaggatattgggctttacaacctgaggaacattactcgggggggccatcaggattgagaaaaatgctgacctctgttacctctccactgtggactggtccctgatcctggatgcggtgtccaataactacattgtggggaataagcccccaaaggaatgtggggacctgtgtccagggaccatggaggagaagccgatgtgtgagaagaccaccatcaacaatgagtacaactaccgctgctggaccacaaaccgctgccagaaaatgtgcccaagcacgtgtgggaagcgggcgtgcaccgagaacaatgagtgctgccaccccgagtgcctgggcagctgcagcgcgcctgacaacgacacggcctgtgtagcttgccgccactactactatgccggtgtctgtgtgcctgcctgcccgcccaacacctacaggtttgagggctggcgctgtgtggaccgtgacttctgcgccaacatcctcagcgccgagagcagcgactccgaggggtttgtgatccacgacggcgagtgcatgcaggagtgcccctcgggcttcatccgcaacggcagccagagcatgtactgcatcccttgtgaaggtccttgcccgaaggtctgtgaggaagaaaagaaaacaaagaccattgattctgttacttctgctcagatgctccaaggatgcaccatcttcaagggcaatttgctcattaacatccgacgggggaataacattgcttcagagctggagaacttcatggggctcatcgaggtggtgacgggctacgtgaagatccgccattctcatgccttggtctccttgtccttcctaaaaaaccttcgcctcatcctaggagaggagcagctagaagggaattactccttctacgtcctcgacaaccagaacttgcagcaactgtgggactgggaccaccgcaacctgaccatcaaagcagggaaaatgtactttgctttcaatcccaaattatgtgtttccgaaatttaccgcatggaggaagtgacggggactaaagggcgccaaagcaaaggggacataaacaccaggaacaacggggagagagcctcctgtgaaagtgacgtcctgcatttcacctccaccaccacgtcgaagaatcgcatcatcataacctggcaccggtaccggccccctgactacagggatctcatcagcttcaccgtttactacaaggaagcaccctttaagaatgtcacagagtatgatgggcaggatgcctgcggctccaacagctggaacatggtggacgtggacctcccgcccaacaaggacgtggagcccggcatcttactacatgggctgaagccctggactcagtacgccgtttacgtcaaggctgtgaccctcaccatggtggagaacgaccatatccgtggggccaagagtgagatcttgtacattcgcaccaatgcttcagttccttccattcccttggacgttctttcagcatcgaactcctcttctcagttaatcgtgaagtggaaccctccctctctgcccaacggcaacctgagttactacattgtgcgctggcagcggcagcctcaggacggctacctttaccggcacaattactgctccaaagacaaaatccccatcaggaagtatgccgacggcaccatcgacattgaggaggtcacagagaaccccaagactgaggtgtgtggtggggagaaagggccttgctgcgcctgccccaaaactgaagccgagaagcaggccgagaaggaggaggctgaataccgcaaagtctttgagaatttcctgcacaactccatcttcgtgcccagacctgaaaggaagcggagagatgtcatgcaagtggccaacaccaccatgtccagccgaagcaggaacaccacggccgcagacacctacaacatcaccgacccggaagagctggagacagagtaccctttctttgagagcagagtggataacaaggagagaactgtcatttctaaccttcggcctttcacattgtaccgcatcgatatccacagctgcaaccacgaggctgagaagctgggctgcagcgcctccaacttcgtctttgcaaggactatgcccgcagaaggagcagatgacattcctgggccagtgacctgggagccaaggcctgaaaactccatctttttaaagtggccggaacctgagaatcccaatggattgattctaatgtatgaaataaaatacggatcacaagttgaggatcagcgagaatgtgtgtccagacaggaatacaggaagtatggaggggccaagctaaaccggctaaacccggggaactacacagcccggattcaggccacatctctctctgggaatgggtcgtggacagatcctgtgttcttctatgtccaggccaaaagatatgaaaacttcatccatctgatcatcgctctgcccgtcgctgtcctgttgatcgtgggggggttggtgattatgctgtacgtcttccatagaaagagaaataacagcaggctggggaatggagtgctgtatgcctctgtgaacccggagtacttcagcgctgctgatgtgtacgttcctgatgagtgggaggtggctcgggagaagatcaccatgagccgggaacttgggcaggggtcgtttgggatggtctatgaaggagttgccaagggtgtggtgaaagatgaacctgaaaccagagtggccattaaaacagtgaacgaggccgcaagcatgcgtgagaggattgagtttctcaacgaagcttctgtgatgaaggagttcaattgtcaccatgtggtgcgattgctgggtgtggtgtcccaaggccagccaacactggtcatcatggaactgatgacacggggcgatctcaaaagttatctccggtctctgaggccagaaatggagaataatccagtcctagcacctccaagcctgagcaagatgattcagatggccggagagattgcagacggcatggcatacctcaacgccaataagttcgtccacagagaccttgctgcccggaattgcatggtagccgaagatttcacagtcaaaatcggagattttggtatgacgcgagatatttatgagacagactattaccggaaaggagggaaagggctgctgcccgtgcgctggatgtctcctgagtccctcaaggatggagtcttcaccacttactcggacgtctggtccttcggggtcgtcctctgggagatcgccacactggccgagcagccctaccagggcttgtccaacgagcaagtccttcgcttcgtcattggagggcggccttctggacaagccagacaactgtcctgacatgctgtttgaactgatgcgcatgtgctggcagtataaccccaagatgaggccttccttcctggagatcatcagcagcatcaaagaggagatggagcctggcttccgggaggtctccttctactacagcgaggagaacaagctgcccgagccggaggagctggacctggagccagagaacatggagagcgtccccctggacccctcggcctcctcgtcctccctgccactgcccgacagacactcaggacacaaggccgagaacggccccggccctggggtgctggtcctccgcgccagcttcgacgagagacagccttacgcccacatgaacgggggccgcaagaacgagcgggccttgccgctgccccagtcttcgacctgctgatccttggatcctgaatctgtgcaaacagtaacgtgtgcgcacgcgcagcggggtggggggggagagagagttttaacaatccattcacaagcctcctgtacctcagtggatcttcagaactgcccttgctgcccgcgggagacagcttctctgcagtaaaacacatttgggatgttccttttttcaatatgcaagcagctttttattccctgcccaaacccttaactgacatgggcctttaagaaccttaatgacaacacttaatagcaacagagcacttgagaaccagtctcctcactctgtccctgtccttccctgttctccctttctctctcctctctgcttcataacggaaaaataattgccacaagtccagctgggaagccctttttatcagtttgaggaagtggctgtccctgtggccccatccaaccactgtacacacccgcctgacaccgtgggtcattacaaaaaaacacgtggagatggaaatttttacctttatctttcacctttctagggacatgaaatttacaaagggccatcgttcatccaaggctgttaccattttaacgctgcctaattttgccaaaatcctgaactttctccctcatcggcccggcgctgattcctcgtgtccggaggcatgggtgagcatggcagctggttgctccatttgagagacacgctggcgacacactccgtccatccgactgcccctgctgtgctgctcaaggccacaggcacacaggtctcattgcttctgactagattattatttgggggaactggacacaataggtctttctctcagtgaaggtggggagaagctgaaccggcttccctgccctgcctccccagccccctgcccaacccccaagaatctggtggccatgggccccgaagcagcctggcggacaggcttggagtcaaggggccccatgcctgcttctctcccagccccagctcccccgccccgcccccaaggacacagatgggaaggggtttccagggactcagccccactgttgatgcaggtttgcaaggaaagaaattcaaacaccacaacagcagtaagaagaaaagcagtcaatggattcaagcattctaagctttgttgacattttctctgttcctaggacttcttcatgggtcttacagttctatgttagaccatgaaacatttgcatacacatcgtctttaatgtcacttttataacttttttacggttcagatattcatctatacgtctgtacagaaaaaaaaaagctgctattttttttgttcttgatctttggggatttaatctatgaaaaccttcaggtccaccctctcccctttttgctcactccaagaaacttcttatgctttgtactaaagggcgtgactttcttcctcttttcccggtaatggatacttctatcacataatttgccatgaactgttggatgcctttttataaatacatcccccatccctgctcccacctgcccctttagttgttttctaacccgtaggcttctctgggggcacgaggcaaaaagcagggccggggcaccccatcctgaggagggggccgcggttccttttcccccaggcctggccctcacagcatttgggagcctgtttacagtggcaagacatgatacaaattcaggtcagaaaaacaaaggttaaatatttcacacgtctttgttcagtgtttccactcaccgtggttgagaagcctcaccctctctttcccttgcctttgcttangttgtgacacacatatatatatattnttttaattct

SEQ ID NO: 61274 - DNA, 1201 bp, Homo sapiens
gaggaatcgctggtcgccagcgaggggtgcggcttcaatttcaataactttattggtggcctgatctgcagaacagccatcacatcagtggcccttggaggagggagcgcatcgcccgaggtggtccccgacgagctgcagccatgggaaacaccaccagcgaccgggtgtccggggagcgccacggcgccaaggctgcacgctccgagggcgcaggcggccatgccccggggaaggagcacaagatcatggtggggagtacggacgaccccagcgtgttcagcctccctgactccaagctccctggggacaaagagtttgtatcatggcagcaggatttggaggactccgtaaagcccacacagcaggcccggcccactgttatccgctggtctgaaggaggcaaggaggtcttcatctctgggtccttcaacaattggagcaccaagattccactgattaagagccataatgactttgttgccatcctggacctccctgagggagagcaccaatacaagttctttgtggatggacagtgggttcatgatccatcagagcctgtggttaccagtcagcttggcacaattaacaatttgatccatgtcaagaaatctgattttgaggtgttcgatgctttaaagttagattctatggaaagttctgagacatcttgtaagagacctttccagctcacccccagggccttatggtcaagaaatgtatgcgtttcgatctgaggaaagattcaaatccccacccatccttcctccttatctacttcaagttattcttaacaaagacactaatatttcttgtgacccagccttactccctgagcccaaccatgttatgctgaaccatctctatgcattgtccattaaggacagtgtgatggtccttagcgcaacccatcgctacaagaagaagtatgttactactctgctatacaagcccatttgaagggatcccttcttgcctctaaggattcaggagaagcatctcccttgcatttctggactgaaccagtcttacctgagactggaaggctgatttgctttgaggctgatatgtgtgtttcagagcctctgagtaggatgctctgcttttgcatttgattgcagatgagagctttatgagttcacggaatttattttaagaaaaaaaaatatacatatgagaagaaggtaaatggaaaaaa

SEQ ID NO: 61275 - DNA, 2026 bp, Homo sapiens
cttcgtgtgagaccctcgcgaggtctgagagtcactggagctaccagaagcatcatggggccctggggagagccagagctcctggtgtggcgccccgaggcggtagcttcagagcctccagtgcctgtggggctggaggtgaagttgggggccctggtgctgctgctggtgctcaccctcctctgcagcctggtgcccatctgtgtgctgcgccggccaggagctaaccatgaaggctcagcttcccgccagaaagccctgagcctagtaagctgtttcgcggggggcgtctttttggccacttgtctcctggacctgctgcctgactacctggctgccatagatgaggccctggcagccttgcacgtgacgctccagttcccactgcaagagttcatcctggccatgggcttcttcctggtcctggtgatggagcagatcacactggcttacaaggagcagtcagggccgtcacctctggaggaaacaagggctctgctgggaacagtgaatggtgggccgcagcattggcatgatgggccaggggtcccacaggcgagtggagccccagcaaccccctcagccttgcgtgcctgtgtactggtgttctccctggccctccactccgtgttcgaggggctggcggtagggctgcagcgagaccgggctcgggccatggagctgtgcctggctttgctgctccacaagggcatcctggctgtcagcctgtccctgcggctgttgcagagccaccttagggcacaggtggtggctggctgtgggatcctcttctcatgcatgacacctctaggcatcgggctgggtgcagctctggcagagtcggcaggacctctgcaccagctggcccagtctgtgctagagggcatggcagctggcacctttctctatatcacctttctggaaatcctgccccaggagctggccagttctgagcaaaggatcctcaaggtcattctgctcctagcaggctttgccctgctcactggcctgctcttcatccaaatctagggggcttcaagagaggggcaggggagattgatgatcaggtgcccctgttctcccttccctcccccagttgtggggaataggaaggaaaggggaagggaaatactgaggaccaaaaagttctctgggagctaaagatagagcctttggggctatctgactaatgagagggaagtgggcagacaagaggctggccccagtcccaaggaacaagagatggtcaagtcgctagagacatatcaggggacattaggattggggaagacacttgactgctagaatcagaggttggacactatacataaggacaggctcacatgggaggctggaggtgggtacccagctgctgtggaacgggtatggacaggtcataaacctagagtcagtgtcctgttggtcctagcccatttcagcaccctgccacttggagtggacccctcctactcttcttagcgcctaccctcatacctatctccctcctcccatctcctaggggactggcgccaaatggtctctccctgccaattttggtatcttctctggcctctccagtcctgcttactcctctatttttaaagtgccaaacaaatccccttcctctttctcaaagcacagtaatgtggcactgagccctacccagcacctcagtgaagggggcctgcttgctctttattttggtcccggatcctggggtggggcagaaatattttctgggctggggtaggaggaaggttgttgcagccatctactgctgctgtaccctaggaatatggggacatggacatggtgtcccatgcccagatgataaacactgagctgccaaaacatttttttaaatacacccgaggagcccaagggggaagggcaatgcctacccccagcgttatttttggggagggagggctgtgcatagggacatattctttagaatctattttattaactgacctgttttgggacctgttacccaaataaaagatgtttctagacaaaaaaaaaa

SEQ ID NO: 61276 - DNA, 2017 bp, Homo sapiens
caacggacggacgccatgagggctctgctgctcctggggttcctgctggtgagcttggagtcaacactttcgattccaccttgggaagcccccaaggagcataagtacaaagctgaagagcacacagtcgttctcactgtcaccggggagccctgccacttccccttccagtaccaccggcagctgtaccacaaatgtacccacaagggccggccaggccctcagccctggtgtgctaccacccccaactttgatcaggaccagcgatggggatactgtttggagcccaagaaagtgaaagaccactgcagcaaacacagcccctgccagaaaggagggacctgtgtgaacatgccaagcggcccccactgtctctgtccacaacacctcactggaaaccactgccagaaagagaagtgctttgagcctcagcttctccggtttttccacaagaatgagatatggtatagaactgagcaagcagctgtggccagatgccagtgcaagggtcctgatgcccactgccagcggctggccagccaggcctgccgcaccaacccgtgcctccatgggggtcgctgcctagaggtggagggccaccgcctgtgccactgcccggtgggctacaccggacccttctgcgacgtggacaccaaggcaagctgctatgatggccgcgggctcagctaccgcggcctggccaggaccacgctctcgggtgcgccctgtcagccgtgggcctcggaggccaccttaccggaacgtgactgccgagcaagcgcggaactggggactgggcggccacgccttctgcaggaacccggacaacgacatccgcccgtggtgcttcgtgctgaaccgcgaccggctgagctgggagtactgcgacctggcacagtgccagaccccaacccaggcggcgcctccgaccccggtgtcccctaggcttcatgtcccactcatgcccgcgcagccggcaccgccgaagcctcagcccacgacccggaccccgcctcagtcccagaccccgggagccttgccggcgaagcgggagcagccgccttccctgaccaggaacggcccactgagctgcgggcagcggctccgcaagagtctgtcttcgatgacccgcgtcgttggcgggcctggtggcgctacgcggggcgcacccctacatcgccgcgctgtactggggccacagtttctgcgccggcagcctcatcgccccctgctgggtgctgacggccgctcactgcctgcaggaccggcccgcacccgaggatctgacggtggtgctcggccaggaacgccgtaaccacagctgtgagccgtgccagacgttggccgtgcgctcctaccgcttgcacgaggccttctcgcccgtcagctaccagcacgacctggctctgttgcgccttcaggaggatgcggacggcagctgcgcgctcctgtcgccttacgttcagccggtgtgcctgccaagcggcgccgcgcgaccctccgagaccacgctctgccaggtggccggctggggccaccagttcgagggggcggaggaatatgccagcttcctgcaggaggcgcaggtaccgttcctctccctggagcgctgctcagccccggacgtgcacggatcctccatcctccccggcatgctctgcgcagggttcctcgagggcggcaccgatgcgtgccagggtgattccggaggcccgctggtgtgtgaggaccaagctgcagagcgccggctcaccctgcaaggcatcatcagctggggatcgggctgtggtgaccgcaacaagccaggcgtctacaccgatgtggcctactacctggcctggatccgggagcacaccgtttcctgattgctcagggactcatctttccctccttggtgattccgcagtgagagagtggctggggcatggaaggcaagattgtgtcccattcccccagtgcggccagctccgcgccaggatggcgcaggaactcaataaagtgctttgaaaatgctgag

SEQ ID NO: 61277 - DNA, 1039 bp, Homo sapiens
ttttttttttttggcgctgccaaaactcatttttcattaacacggggtggggtcccaggctcaggcccccgggcccgatcatggccccagtccgcacagagcgcccggccctggccgcccgcagctccaccgctcagccagtgatgcgcacatccgtgcggcggcggatccgccgggcccgagccgcctcgggcaggatggcgagcagctgctcttgcaccagcatctccacgatcttgctccttggtgcgggatgtcaggccgcagccactggcggggacaagctcccgcagctgccggaaagcctcccggggacccgccgcatcctggtagcggaactgccggaaacgctggcggaacgtctcgggaccgagtctagagccggcggggcctggtgtggagcgcgcttcagcttcggcctgaggcgctacgctcacgggtgcgggcccgagaggcagctccagggccgcggaggccgcagctcggggcgtagggatggcttcagggaccgcggcgttgggactggaaggctcaggggcaggcggtgaggcctctggcagcgaggagcccacacagttacgctcaggggctgagctcgaaccggctccttccagtttctccggtggcaccgccgcgggactcccagtggccgccaagatcggctccgtagccgccataactccagctccgggcgtcactctttgtccggtagctgtgtgctcagcactgcgtctgcgcgggggtggggtgagcagggagacgtttccggttaaagggcagagctcgcgtcacccttgagggagtcggactcgggaccggccgagagtgtgcggagcttacctgcaccagcgaagcgcctgcggcagccggaagcgaaagtctctggcttctctgcgtccaggtcggcgcgcgagcacccggaagccgcttgcgggctcccggaagcggcgccctctagcgttctcgagtcgcatgggcggctgctgccctcgcggtgcgggagggcgagctgcgcgtggcctcgtgccgaattcccagg

SEQ ID NO: 61278 - DNA, 1773 bp, Homo sapiens
  misc_feature (1)...(1773): n = a,t,c or g
agagagaaatgtccagacatcaagagaagctgtgtatgtggcctggattttagaatgagatggcccagcagcttcctcttcctccctggagaagagctatgagctgccagatgggcaggttatcaccattggcaatgagcgcttccgntgccctgagaccctcttccagccttcctttattggcatggagtccgctggaattcatgagacaacctacaattccatcatgaagtgtgccattgacatccgtaaggacttatatgccaacaatgtcctctttgggggcccccccatgtaccctggcattgctgacaggatgcaaaaggagatcacagccctggcccccagccccatgaagatcaagattattgctcccccaaagcggaagtactcagtttggatcggggggtttatcctggcctctctttcccccttccaacaaatgtggatcagcaagcctgagtatgatgaggcagggccctccattgtccccaggaagtgtttcatgactggtaacagagtagtctcgaggggatccttggagaacctgttctgactttagaagcacttcctgtggacaatggagggccctgcctcatcatactcaggcttgctgatccacatctgctggaaggtggagagagaggccaggatagagcccccgatccagactgagtacttccgctctgggggagcaataatcttgatcttcatggtgctgggggccagggctgtgatctccttctgcatcctgtcagcaatgccagggtacatggtggtgcccccagagaggacattgttggcatataagtccttacggatgtcaatgtcacacttcatgatggaattgtaggttgtctcatgaattccagcggactccatgccaataaaggaaggctggaagagggtctcagggcagcggaagcgctcattgccaatggtgataacctgcccatctggcagctcatagctcttcttccagggaggaagaggaagctgctgtggccatctcatttctcaaaatcctgggccacatagcacagcttctccttgatgtctcgcacaatttctctctcagctgtggtcacaaaggaaatagcctcctctcttgggaggatcttcatgaggtagtccgtgaggtcacggcccagccaaagtcccaggcgcatgatggcatggggcagggcatagccttcatagatggggacattgtgggtgacgccatcaccctgaatccaggacgatgcctgtcgtgcggccagaggcatagagggagagcacagcttgaatggcgacgtacatggcagggacattgaaggtttcaaacatgatctgggtcatcttttccctgttggccttgggatttaggggagcctctgtgagcagggtggggtgcctcttccaggtgctaacacgcagctccattgtaagaaggagtggtgcccagatcttctccatgtcatcccagttggtgatgatgcccgtgttccaatggggtatttgagagttaggatccctcgcttgctctgagcctcatccccccacatagctgtctttctggcccattcccaccatcacaccctggtggcgagggcggcccacaatggaggggaagacagcccggggggcatcatctcctgcgaagcctgccttgcacaggccagagccattgtcacacacgagcgcggtggtctcctcttcacacatggtgtatgtggctgagtgagctggggactggagcaccgagggtatgagaggttcttctcccagtga

SEQ ID NO: 61279 - DNA, 1150 bp, Homo sapiens
gagttttgggtccacggataaaacgtgtctcttttgtctctaccagaaaatgaaaggaattgaaattaagagaagggagagattgaagtgtagcgccaagattgaaaggagaaagaggttgagggatagtgaggcaagttggagaagagagtaaaaagaggccgcttacctgatttgaaattggtgagatgtttcttgggctggtcggtctgaggacctgaggtcataggtggatctttctcacggagcaaagagcaggaggacaggggattgatctcccaagggaggtcccccaattcgagtcacagcaccaaatttcatgcgcgtccgtgtgaagagaccaccaaacaggctttgtgtgagcaacatggctgtttatttcacctgggtgcaggcgggctgagtccgaaaagagagtcagcgaagggagataggggtggggccgttttataggatttgggtaggtagtggaaaattacagtcaaagggggttgttctctggcgggcaggggcgggggttgcaaggtgctcagtaggggagcttctgagcaaggatgagccaggagaaggaatttcacaaggtaatgtcatcagttaaggcagaaaccagccattttcacgtcttttgtgattcttcagttgcttcagggcatctggatgtatacgtgcaggtcataggggatatgatggcttagcttgggctcagaggccggacattcctgtcttcttatactaaagctcggcttctgtgatggtccaggggacttccgaggcgatcgggcagcgtcaatcttcagtcgctaagccgaatagatctgggaaggagtcagagagccttgggctagagctttaggggctccaggagtggctgtcgggcgagctgggcagtctgatttccagtgggtgccagatttgaaattggtgagatgtttcttgggctggttggtctgaggacctgaggtcgtaggtggatctttctcacggagcaaagagcaggaggacaggggattgatctcccaagggaggtcccccgatccgagtcacggcaccaaatttcatgcgcgtccgtgtgaagagaccaccaaacaggctttgtgtgagcaacgaggctgtttatttcacctgggtgcaggcgggctgagtccgaaaa

SEQ ID NO: 61280 - DNA, 1618 bp, Homo sapiens
agcgcaggtgggcccgcgctctcggccctgcaagatgcccctgaagctgcgggggaagaagaaggccaagtccaaggagaccgccgggctggtggagggcgagccgacgggcgcgggcggcgggagcctctcagcgtcccgggctcccgcacgcaggctggtcttccacgcgcagctggcgcacggtagtgccacgggccgagtggagggcttctccagcatccaggagctctacgcccagatcgcgggcgcgtttgaaatctcgccgtcggagatcttatattgcactttaaacacacctaaaattgacatggaaagactcttaggaggacaactaggactagaagatttcatatttgcccatgtgaaaggaatcgaaaaagaagtgaatgtgtataaatctgaggattcacttggtctcaccattacagataatggtgttggctatgcttttataaagagaattaaagatggtggtgttattgactcagttaaaacaatctgtgttggggatcatattgaatccataaatggagaaaatattgttgggtggcgtcactatgatgttgctaagaagttaaaggaattaaaaaaggaggaactctttactatgaagttaatagaacctaagaaggcatttgaaatagagctgaggtcaaaggctggaaagtcatcaggagaaaaaattggttgtggaagggcaacacttcgcctgagatcaaaaggtcctgccaccgtggaagaaatgccttctgaaaccaaagcaaagggcaattgaaaagattgatgatgttcttgagttgtacatgggaattcgagatattgatttagccaccacaatgtttgaagctggaaaggacaaagtaaatccagatgaatttgctgtggcacttgacgaaactcttggagactttgcgttcccagacgaatttgtctttgatgtttggggagtcattggtgatgccaaacgaagaggattatgatgtgtacactccatctctgaagaaacaacccatcgttctttttttttctcttttttaaaaagtcctataagatctgtttttggacacctttactaactctggtttaatttcatgtgtatggaatatattctttgaaatataattttggtaattttgatttctgggcactttttaacattgctgatgtagtatgcttaagagaaatgacctaaataaggatcaattgtaatattcattcaaaaggtttttaaaagtaagttttaaggagtatttctcgacagatgattttaataacccctcatacccatgctttgtttttcacatataaatagatgatttcaatagctttgtagttttttttcaaaatcttaatgtaaactaggattggagtatgatttacctcatagtatcttcactgtgttatcctagtttgaacaggatatgttcaggaaatgaaaggtgaattatgccccttattggtctagaagcattggtttttttttgatcctctgagtaagggaaggaagattcctgtggcatgttgatttctatggccaactttctctctttgtaaaacaaagattgattgattttcttgtatgcttctttatacatgctcttaaaacttgtggttg

SEQ ID NO: 61281 - DNA, 3367 bp, Homo sapiens
gcacgagggaaaactaactggaaggaagtttaaatacagaaagagcaaagtattatctaactataacaatgccacattttactgtgactaaggtagaggacccagaggagggggcagcggcttcgatctctcaagagcctagtttagcagacataaaagcccggattcaggattcagatgaaccagacctgagtcagaactccatcacaggggaacacagccaactgttagacgacggacataagaaagctcgaaatgcttatctcaataattccaattatgaagaaggagatgaatattttgataaaaatttggcactctttgaggaagaaatggacaccagaccgaaggtgtcttccctcctcaaccgcatggccaattacactaatctgactcaaggagcaaaggaacatgaagaggcagaaaacatcactgaagggaaaaagaagcccaccaagaccccccaaatgggtaccttcatgggtgtctacctcccatgtctacaaaatatttttggagtgatcctttttttacgccttacatgggtggtgggcacagctggagttcttcaggcttttgcaattgtccttatctgctgctgctgtacaatgttgactgctatctccatgagtgccattgccactaatggagtggtgccagctgggggctcatactttatgatttcccgggcactgggcccagagtttggtggggctgttggcctctgcttttatcttggtaccacatttgcagcagccatgtacatccttggtgccattgaaatctttctggtctatatcgtcccccgagctgccatctttcacagtgatgacgcactcaaggaatcagcagccatgctaaataacatgcgtgtctacggcacagctttcttggtccttatggtattagtggtatttatcggcgtacgctatgtgaacaagtttgcctcacttttcctggcctgtgtcattgtgtccatcttggccatctatgctggagccatcaagtcttcttttgctcctccacacttcccggtctgcatgctgggtaaccgcaccctttcatcaagacacattgacgtttgctctaagaccaaggaaattaacaacatgacagtcccatcaaagttatggggattcttctgtaactcgagtcaatttttcaatgccacctgtgatgaatactttgttcacaataacgtcacttcaatccagggcattcctggattggctagtggtataattacagagaatctttggagtaattacctacccaagggagagatcatcgaaaagccttcagccaaatcttctgatgtcttaggcagcttaaaccatgaatatgttcttgttgacatcaccacctccttcacgcttctggtgggaatcttctttccctctgttacaggtatcatggctggatcaaacagatctggagatctgaaagatgctcagaagtctattccgattggtactatccttgccatcctgaccacctcctttgtttatttaagcaatgttgtcctttttggtgcatgtattgaaggggttgttctcagagacaagttcggtgatgctgtgaaaggtaatttggtggtaggcaccttatcttggccatccccatgggtgattgttattggctccttcttttcaacatgtggggctggacttcagagcctcacaggtgcaccgaggctgctacaagctattgccaaggataacatcataccgtttctgagggtttttggccacagcaaagccaatggggaacctacctgggctttacttctaactgctgccattgcagagcttggaatactcattgcctccctggatcttgtggccccaattctttccatgttttttctcatgtgttacctctttgtaaacttggcatgtgccttgcaaacattacttcgaacacccaactggagaccccgattccgctactaccattgggccctttctttcatgggaatgagtatctgtctggctctgatgttcatttcttcctggtattatgccattgtagccatggtaatagctggtatgatctacaagtacattgaataccaaggagctgagaaagaatggggtgatggtatccgtgggctgtccctcagtgcagcccggtttgctttgcttcgattggaggaaggacctccacacactaaaaactggaggcctcagttgcttgtattactgaaactagatgaagacttacatgtcaagcatcctcgcctcctcacctttgcctcacagctcaaagcaggaaaaggtctcactattgtgggctctgtcatcgtggggaacttcctagagaactacggtgaagctttagctgctgagcagaccataaagcacctaatggaggcagagaaggtaaaaggattctgccagctggtggtggccgccaagctgagagagggcatttcccacctcatccagtcatgtggccttgggggcatgaagcacaacacggtggtgatgggctggcctaatggctggcgtcaaagcgaagatgcccgcgcttggaagacttttattggcacagttcgagtgacaactgctgcccatcttgcactgctggtggctaaaaacatctccttctttcccagcaatgtggagcaattttctgagggcaacattgatgtgtggtggattgtgcatgatggggggatgcttatgctactaccattcctactgaaaacagcacaaggtgtggcgaaagtgcagcatacggttctttcacagtagcccaattagaagacaacagtatccaaatgaagaaggacctagccaccttcctatatcacttacgcattgaggcggaggtagaagtggtggagatgcatgacagtgatatatcagcatatacttacgagcgcactttgatgatggaacaaaggtcccagatgcttcggcacatgcggctatccaaaacagagcgagacagagaggcacaattggtgaaagaccgaaactcaatgctacgattgaccagcattggctctgatgaggacgaagagacagaaacctatcaggagaaggtgcacatgacttggacaaaagacaagtacatggcatcccggggacaaaaagcgaagtcaatggaaggattccaggacctgcttaacatgcgtccggaccagtccaatgtgaggcggatgcatacagcagtgaaactcaacgaggttatagttaacaagtcccatgaagcaaagctggttttattgaatatgccagggccaccccgaaaccctgagggtgatgaaaactacatggagttcctagaggtgcttaccgagggactagagcgagtcctacttgtccggggtggtggcagtgaagtgatcaccatttattca

SEQ ID NO: 61282 - DNA, 1875 bp, Homo sapiens
ccacgtgagcgcctgcgtttctcctcaaacctaacgatgccgccggagcggaggagacgaatgaaactggaccggagaaccggagcgaagccgaagcggaagcccggaatgagggcggactggaaagccggagcggggccaggcgggcctccccaaaagcctgccccttcatcccagcggaaaccgccggcccggccgagcgcggcggccgctgcgattgcagtcgcggcggcggaggaagagagacggctccggcagcggaaccgcctgaggctggaggaggacaaaccggccgtggagcggtgcttggaggagctggtcttcggcgacgtcgagaacgacgaggacgcgttgctgcggcgtctgcgaggcccgagggttcaagaacatgaagactcgggtgactcagaagtggagaatgaagcaaaaggtaattttccacctcaaaagaagccagtttgggtggatgaagaagatgaagatgaggaaatggttgacatgatgaacaatcggtttcggaaggatatgatgaaaaatgctagtgaaagtaaactttcgaaagacaaccttaaaaagagacttaaagaagaattccaacatgccatgggaggagtacctgcctgggcagagactactaagcggaaaacatcttcagatgatgaaagtgaagaggatgaagatgatttgttgcaaaggactgggaatttcatatccacatcaacttctcttccaagaggcatcttgaagatgaagaactgccagcatgcggaatgctggaacgtcctactgttgctcggatctccatctgtgcagttccatcccggtgcacagattgtgatggttgctggattagataatgctgtatcactatttcaggttgatgggaaaacaaatcctaaaattcagagcatctatttggaaaggtttccaatctttaaggcttgttttagtgctaatggggaagaagttttagccacgagtacccacagcaaggttctttatgtctatgacatgctggctggaaagttaattcctgtgcatcaagtgagaggtttgaaagagaagatagtgaggagctttgaagtctccccagatgggtccttcttgctcataaatggcattgctggatatttgcatttgctagcaatgaagaccaaagaactgattggaagcatgaaaattaatggaagggttgcagcatccacattctcttcagatagtaagaaagtatacgcctcttcgggggatggagaagtttatgtttgggatgtgaactcaaggaagtgccttaacagatttgttgatgaaggcagtttatatggattaagcattgccacatctaggaatggacagtatgttgcttgtggttctaattgtggagtggtaaatatatacaatcaagattcttgtctccaagaaacaaacccaaagccaataaaagctataatgaacttggttacaggtgttacttctctgaccttcaatcctactacagaaatcttggcaattgcttcagaaaaaatgaaagaagcagtcagattggttcatcttccttcctgtacagtattttcaaacttcccagtcattaaaaataagaatatttctcatgttcataccatggatttttctccgagaagtggatactttgccttggggaatgaaaagggcaaggccctgatgtataggttgcaccattactcagacttctaaagagactatttgaagtccagttgagtcacaagagaagcctgtcttgatatatcatctcagaaactttcctgaatatgtggataatatatggaaaatgatttatagatcccagctgtgcttaagagccagtaatgtcttaataaacatgtggcagcttttgtttga

SEQ ID NO: 61283 - DNA, 4365 bp, Homo sapiens
  misc_feature (1)...(4365): n = a,t,c or g
ccccacgccaccccaagcatcccaggactcttctgaaacagggcagtgacccgggaggaagtcaccaggtgcagaggaccgtgccctgtggggacctgcctgcaggctgctgacagactccgggctaccagatcggccgtccagctggaatcaaccgatggaggctccgctgcaaactggaatggtgcttggcgtgatgatcggggccggagtggcggtggtggtcacggccgtgctcatcctcctggtggtgcggaggctgcgagtgccaaaaaccccagccccggatggcccccggtatcggttccggaagagggacaaagtgctcttctatggccggaagattatgcggaaggtgtcacaatccacctcctccctcgtggatacctctgtctccgccacctcccggccacgcatgaggaagaaactgaagatgctcaacattgccaagaagatcctgcgcatccagaaagagacgcccacgctgcagcggaaggagcccccgcccgcagtgctagaagctgacctgaccgagggcgacctggctaactcccatctgccctctgaagtgctttatatgctcaagaacgtccgggtgctgggccacttcgagaagccactcttcctggagctctgccgccacatggtcttccagcggctgggccagggtgactacgtcttccggccgggccagccagatgccaagcatctacgtggtgcaggacgggctgctggagctctgtctgccagggcctgacgggaaggagtgtgtggtgaaggaagtggttcctggggacaagcgtcaacagccttctcaagcatcctggatgtcatcaccggtcaccagcatccccaagcgggaccggtgtctgcccgggcggcccgggactccacggtgctgcgcctgccggtggaaacattctccgcggtcttcaccaagtacccggagagcttggtgcgggtcgtgcagatcatcatggtgcggctgcagcgagtcaccttcctggcactgcacaactacctgggtctgaccaatgagctcttcagccacgagatccagcccctgcgtctgttccccagccccggcctcccaactcgcaccagccctgtgcggggctccaagagaatggtcagcacctcagctacagacgagcccagggagaccccagggcggccacccgatcccaccggggccccgctgcctggacctacaggggaccctgtgaagcccacatccctggaaaccccctcggcccctctgctgagccgctgcgtctccatgccaggggacatctcaggcttgcagggtggcccccgctccgacttcgacatggcctatgagcgtggccggatctccgtgtccctgcaggaagaggcctccggggggtccctggcagcccccgctcggacccccactcaggagcctcgtgagcagccggcaggcgcctgctgaatacagctactgtgaggatgagtcggccactggtggctgccctttcgggccctaccagggccgccagaccagcagcatcttcgaggcagcaaagcaggagctggccaagctgatgcggattgaggacccctccctcctgaacagcagagtcttgctgcaccacgccaaagctggcaccatcattgcccgccagggagaccaggacgtgagcctgcacttcgtgctctggggctgcctgcacgtgtaccagcgcatgatcgacaaggcggaggacgtgtgcctgttcgtagcgcagcccggggaactggtggggcagctggcggtgctcactggcgaacctctcatcttcacactgcgagcccaacgcgactgcaccttcctgcggatctccaagtccgacttctatgagatcatgcgcgcacagcccagtgtggtgctgagtgcggcgcacacggtggcagccaggatgtcgcccttcgtgcgccagatggacttcgccatcgactggactgcagtggaggcgggacngcgcgctgtacaggcagggcgaccgctccgactgcacttacatcgtgctcaatgggcggctgcgtagcgtgatccagcgaggcagtggcaagaaagagctggtgggcgagtacgggcgcggcgacctcatctgcgtggtggaggcactgacccggcagccgcgagccacgacggtgcacgcggtgcgcgacacggagctggccaagcttcccgagggcaccttgggtcacatcaaacgccggtacccgcaggtcgtgacccgccttatccacctactgagccagaaaattctagggaatttgcagcagctgcaaggacccttcccagcaggctctgggttgggtgtgcccccacactcggaactcaccaacccagccagcaacctggcaactgtggcaatcctgcctgtgtgtgctgaggtccccatggtggccttcacgctggagctgcagcacgccctgcaggccatcggtccgacgctactccttaacagtgacatcatccgggcacgcctgggggcctccgcactggatagcatccaagagttccggctgtcagggtggctggcccagcaggaggatgcacaccgtatcgtactctaccagacggacgcctcgctgacgccctggaccgtgcgctgcctgcgacaggccgactgcatcctcattgtgggcctgggggaccaggagcctaccctcggccagctggagcagatgctggagaacacggctgtgcgcgcccttaagcagctagtcctgctccaccgagaggagggcgcgggccccacgcgcaccgtggagtggctaaatatgcgcagctggtgctcggggcacctgcacctgcgctgtccgcgccgcctcttttcgcgccgcagccctgccaagctgcatgagctctacgagaaggttttctccaggcgcgcggaccggcacagcgacttctcccgcttggcgagggtgctcacggggaacaccattgcccttgtgctaggcgggggcggggccaggggctgctcgcacatcggagtactaaaggcattagaggaggcgggggtccccgtggacctggtgggcggcacgtccattggctctttcatcggagcgttgtacgcggaggagcgcagcgccagccgcacgaagcagcgggcccgggagtgggccaagagcatgacttcggtgctggaacctgtgttggacctcacgtacccagtcacctccatgttcactgggtctgcctttaaccgcagcatccatcgggtcttccaggataagcagattgaggacctgtggctgccttacttcaacgtgaccacagatatcaccgcctcagccatgcgagtccacaaagatggctccctgtggcggtacgtgcgcgccagcatgacgctgtcgggctacctgcccccgctgtgcgaccccaaggacgggcacctactcatggatggcggctacatcaacaatctgccagcggacatcgcccgcagcatgggtgccaaaacggtcatcgccattgacgtggggagccaggatgagacggacctcagcacctacggggacagcctgtccggctggtggctgctgtggaagcggctgaatccctgggctgacaaggtaaaggttccagacatggctgaaatccagtcccgcctggcctacgtgtcctgtgtgcggcagctagaggttgtcaagtccagctcctactgcgagtacctgcgcccgcccatcgactgcttcaagaccatggactttgggaagttcgaccagatctatgatgtgggctaccagtacgggaaggcggtgtttggaggctggagccgtggcaacgtcattgagaaaatgctcacagaccggcggtctacagaccttaatgagagccgccgtgcagacgtgcttgccttcccaagctctggcttcactgacttggcagagattgtgtcccggattgagccccccacgagctatgtctctgatggctgtgctgacggagaggagtcagattgtctgacagagtatgaggaggacgccggacccgactgctcgagggatgaaggggggtcccccgagggcgcaagccccagcactgcctccgagatggaggaggagaagtcgattctccggcaacgacgctgtctgccccaggagccgcccggctcagccacagatgcctgaggacctcgacaggggtcaccccctccctcccacccctggactgggctgggggtggccccgtgggggtagctcactccccctcctgctgctatgcctgtgacccccgcggcccacacactggactgacctgccctgagcggggatgcagtgttgcactgatgacttgaccagcccctcccccaataaactcgcctcttggaaatggcaaaaaaaaaa

SEQ ID NO: 61284 - DNA, 858 bp, Homo sapiens
ctgagtcttacctcgttgtggcgtcagaaccgccgtcgctcgctcccttctcggcagtggtacctgttcccggtgtccctgaggacgtgcgggccaggtacggccccgaaagtaggaagcggagggggagcaggtttgcggggccaagtgttgcggcgacgcacctcacgtcgagaatcgggaggaggagactgcaaggataggcccaggagtaatggagtccaaagaggaacgagcgttaaacaatctcatcgtggaaaatgtcaaccaggaaaatgatgaaaaagatgaaaaggagcaagttgctaataaaggggagcccttggccctacctttgaatgttagtgaatactgtgtgcctagaggaaaccgtaggcggttccgcgttaggcagcccatcctgcagtatagatgggacataatgcataggcttggagagccacaggcaaggatgagagaggagaatatggaaaggattggggaggaggtgagacagctgatggaaaagctgagggaaaagcagttgagtcatagtctgcgggcagtcagcactgatccccctcaccatgaccatcacgatgagttttgcccttatgccctgaaacctgatggttaccattctgatgttaatagggagacccctgcttcctaaacttacacatttgtggtgtacctttgtcgtaaacgttttgatgttacctatttcttgtgggtctcctattaccagcttctaaatgaatgttgtttttgacccagtttgtaagtttctgtcagcaggagagttttacctattgcatggaaaaatgccccttatatattgtgaagttaataaaacagttttaaaaagcaaaaaaaaaa

SEQ ID NO: 61285 - DNA, 1465 bp, Homo sapiens
  misc_feature (1)...(1465): n = a,t,c or g
ttttttttttttctcactaaagaatattcatttatttataattattgctaagtaaacttctcttttaaacaggaacataaaaacacagtagggctttgcacaagtggaatctctaaacagttggtttgtatacatgtcaaaataagttagaatggaatttgtccaggagtttccaagtcacccgagaggctgtgcacctcttttgagaaggttagggaggggtacagacaggagccttgccaagaccaccccccagctcaaactgtgagttgtgctgtttcctcctcctagctttgcccaggtccaaggcacagggcagggggcgttcaagtatcgaacctcacagagggccagtgctgacggcggggctgggggagggaaaggagagccccaccctgggggccagaccttctcccttcagtttccaagaccaaggccactgcactggcaggagggaggaggaggaggagaggtacagggttctttttggtaccaggggagaaagacgtgggaagaggtagttgcaggggatgatgccttctgctcagcaggagaaaatgtcttatacagtgacggggtcactgccacctgagggtcatcatggcgggcacctgggaggtcgtggggcttcggggtctggaagccatacttgggccaccttgtccacccctcagtcctgatcacagtcaccctgaggcctggcttggtccttcacttaaggatccagccttgggggtggctgcgctgcagattggttcctcccaccgcaggctgttcccttctccgggtttctaggctgaagctagtggcttcatctgtgcctttggggaagacccctgcttgcccctccccactgaggcctcaggaggcaagtgggtgggggggtccgggtgccctagagttcctgaatgtgctattcactgccctgggcctgtcatctctggttccaggggcaggagctggcgtgggaacagaggggaagagagcaggcgagcgagggagctagctgttggctgagcagagtcagcagccctgacagccgaggatgggacatgggacagagcaagtcagcgactgcaggagccaggcaggggtggagggcttcccagctctgccttctcctgcctcccaccccagcctgctgaggctgctgccagcggctgcacctccagggccagggtgacagtccccatggagccccagtcctgcccggccaggctgctcggggtgggtgggtaggaagcacgcacagcacattaggaagcttacgcttggaaaaagaaaatgcatctccatcagaaaaggtcataggtgacacacagttggaaagaaaaaaataataagttactttcagaagaccccctttgctcaaaaaaacccttgatttccctctgtgggctttactttcctttttaaaatacgttgctctttccgggaagctgctgactcgtnnggggaatcctgc

SEQ ID NO: 61286 - DNA, 1130 bp, Homo sapiens
gcagtgcggtggaattcgcagaaaggcagaaaggagaaaattcaggataactctcctgaggggtgagccaagccctgccatgtagtgcacgcaggacatcaacaaacacagataacaggaaatgatccattccctgtggtcacttattctaaaggccccaaccttcaaagttcaagtagtgatatggatgactccacagaaagggagcagtcacgccttacttcttgccttaagaaaagagaagaaatgaaactgaaggagtgtgtttccatcctcccacggaaggaaagcccctctgtccgatcctccaaagacggaaagctgctggctgcaaccttgctgctggcactgctgtcttgctgcctcacggtggtgtctttctaccaggtggccgccctgcaaggggacctggccagcctccgggcagagctgcagggccaccacgcggagaagctgccagcaggagcaggagcccccaaggccggcctgggaggaagctccagctgtcaccgcgggactgaaaatctttgaaccaccagctccaggagaaggcaactccagtcagaacagcagaaataagcgtgccgttcagggtccagaagaaacagtcactcaagactgcttgcaactgattgcagacagtgaaacaccaactatacaaaaaggatcttacacatttgttccatggcttctcagctttaaaaggggaagtgccctagaagaaaaagagaataaaatattggtcaaagaaactggttacttttttatatatggtcaggttttatatactgataagacctacgccatgggacatctaattcagaggaagaaggtccatgtctttggggatgaattgagtctggtgactttgtttcgatgtattcaaaatatgcctgaaacactacccaataattcctgctattcagctggcattgcaaaactggaagaaggagatgaactccaacttgcaataccaagagaaaatgcacaaatatcactggatggagatgtcacattttttggtgcattgaaactgctgtgacctacttacaccatgtctgtagctattttcctccctttctctgtacctctaagaagaaagaatctaactgaaaataccaaaaaaaaaa

SEQ ID NO: 61287 - DNA, 3398 bp, Homo sapiens
gttttgtttgtgtgttttttttgcataataccaaagaatttattgtaaatgtagtggcaaatacattcagaataatcatcattaaaaaggaactagaaaattatacatgtttaaagtatgtgcttttttcccaccacctttaagttaatggctagtaccaacattttaagtaatgaaatacttaatgtgatgacccattttcagataatttcatgactgtatcttcatcttaatttttaaagcagttgaccatgaatttcagtttcagttattctctgtttttatcaattccgtaatgatctgcagaatcttgtcattttcaagggacatctttggattttcaagcttttttcttaaaactgaatcaatgagaactctcagctgcttgaaaatgacagctatctttacaggggcctgaaaatagatccagccatcaatagaaagaagacgttctcggtgctgaacttctatatcaccaccaaaaagtaaaactggaaaaggggttattagggtagtttctctcaaatacactctggcataccttatcttctcctggtataagagccatccatgagtttgcaaatctcgatttactgaggatgggtgtacttgtgctttgccttgggccgtctccacaatgcaagccaatttttctgtaacatccactgactttgtatagattatcttccccacattgtcatacagtccagccaccagtacagctttaagaagggcaatttcttggaatgagagggtctgtgaggctctgtttccttcccagctggtagaagttgtggaagatgaaaatcctgctgccttaaccaactttattaactcctgctttacatcctctagggttaacagtgatgttctattaagaaagttcctccggcagtatgtgatttcagaacgataacctccttcttgtcgtgctttcttccatcctagatatgcattgtagatcgtcaggtggtctgaatccgccatggccaaagctgattttgcaagatctgcttcatcttttcgaccaattggtgtggtaaaaggagacttctctgtcataactgcagctagtgttgccactgggtcaaggcagccaaatatggcaccaaaaataagcatcttgccaatcttgacattcacaggtaaagctgcaaggtgttggcccaacggagtcagtttaggctcatttaattcacaagctccaatttttcggagcaaattcattgcattgctgatcacttggagctgaggaggatctaaggctttggagaggaaatcttcaggagaaccaagattacatttcataatatgaaggcataattcctccaaaggtacacgtaagatttcaggaacagaataatccataaagccttcaaatctttctcttgtgtacattcggaaacagaagccatctctgacccgcccagctcttccctggcgctgcaaagcactggctttactgacaaacgtctccaccaaagaactcatctgactgctttcatggtacttattttcttttgttcttccagtatcaattacaaatacaacatcaggaatagtgatacccgtctctgcaatattggttgctaaaacaatcttcctgactcctggagggggaagtgtgaatgctgcagcttgatcttgggttgaaagaatagaatgcagagctatcactttatatcgttcagaataaaatcttctatcatttgatagaagatcatacaactgctgaatatgagcaagtcctggtaaaaagatcaatactgctccttcaatatttctgaattggggacttttatctaagtatgcaagaagttccaaaatgagatccaggttgattttatgaggattcatgtatagaatagcatgctgagtgcggctgctgtacttttggtaaaatggatttaaatcagcatgtgctccagtctgaactgggatgtattcctgatatttttttattccccctgctttgcttgtaacattaatggttacttcttcttcctcttccagaaatttctgacaatattctgagtctttttccagtacaaagcctgtttcttctattatatcttcaagatgaaaaacctcaacaggataacttcttcctgaaattctgagaatggggcagtgtgtgaaatatgtagaaaatttttcgctgtccacagtggcactcattagaatcaagtgtagatcagaacgtttctgtaaaatttccttcaagataattagtaggaagtctgactggacacttcctttcatgaaacctcatctacaataaacatggagacacattacttagaagaccatcttcttgaagtttccttagcaaaacccctgttgtacaatagagtaacctggtagattcacaagctcgagattccatccggatctgatatccacacaaggaattccttcctccaggtccattttcacagcccaattcatcacatactctgttggctaaactaactgctgagattcttcggggttgggtacagacaatgttacatttacttgcttcccactcatttagaagcaaatcttccaatagaaaatgtggtacctgagtacttttaccactccctggtttcacctgccacaaccactacccgatgccttttaagagtttcaacaattgagtcccgatgtttaaatacaggtagctagttagtctttcctttagaagtttctgaatacttaggtgtgctttgcaactttctaaagaggtttctaacaggttccaaatcttccacatttgctgattccaaggacagtgcagaaaaatcctcatccgaaactaaattttcccaagattcctcgggatcttcagagttttctctcttattttcagaatgctgttgttgctgctgttgctgctgtttcagtttattcagaagtttggcaataaaaagatcacgtggtttattggtttccattttatttaattcttcccttttcttttctgcatcactccactccagccaaacatctcggtaagtgggaggaagtaactgatgaactgactgccctttaactaaacggtaaagggctaaagtagctcccaggtgctgagcttgcatgccatcttctgttaagattgtagggcatactaccaggacatcatcttcagacttgattaccctaaccctacatttccagtatctacctactggaactttttcaaaggaaggatttggactcttgggaagattcttcctgacccaatcaatcagaaattgtttgggagattttccagtccaacttcgagcaggatagtcaaaatttcttacatcatgaggttcgttgtttctaactttctcttccttaggcggcacctgccgaattctttaaataaagtataaactcattgcactttctccttttagaggctcaac

SEQ ID NO: 61288 - DNA, 2709 bp, Homo sapiens
cgaggcgctcccggagctgagcgcttctgctctgggcacgcatggcgcccgcacacggagtctgacctgatgcagacgcaagggggttaatatgaacgcccctctcggtggaatctggctctggctccctctgctcttgacctggctcacccccgaggtcaactcttcatggtggtacatgagagctacaggtggctcctccagggtgatgtgcgataatgtgccaggcctggtgagcagccagcggcagctgtgtcaccgacatccagatgtgatgcgtgccattagccagggcgtggccgagtggacagcagaatgccagcaccagttccgccagcaccgctggaattgcaacaccctggacagggatcacagcctttttggcagggtcctactccgaagtagtcgggaatctgcctttgtttatgccatctcctcagctggagttgtatttgccatcaccagggcctgtagccaaggagaagtaaaatcctgttcctgtgatccaaagaagatgggaagcgccaaggacagcaaaggcatttttgattggggtggctgcagtgataacattgactatgggatcaaatttgcccgcgcattcgtggatgcaaaggaaaggaaaggaaaggatgccagagccctgatgaatcttcacaacaacagagctggcaggaaggctgtaaagcggttcttgaaacaagagtgcaagtgccacggggtgagcggctcatgtactctcaggacatgctggctggccatggccgacttcaggaaaacgggcgattatctctggaggaagtacaatggggccatccaggtggtcatgaaccaggatggcacaggtttcactgtggctaacgagaggtttaagaagccaacgaaaaatgacctcgtgtattttgagaattctccagactactgtatcagggaccgagaggcaggctccctgggtacagcaggccgtgtgtgcaacctgacttcccggggcatggacagctgtgaagtcatgtgctgtgggagaggctacgacacctcccatgtcacccggatgaccaagtgtgggtgtaagttccactggtgctgcgccgtgcgctgtcaggactgcctgggaagctctggatgttgcacacattgcaaggcccccaagaacgctgatttggacaaccgttacattgaccccagcaggcgtcaccatccaccttccctttctacaaggactccattggatcttgcaagaacacttggacctttgggttctttctggggggatatttcctaaggcatgtggcctttatctcaacggaagccccctcttcctccctgggggccccaggatgggggggccacacgctgcacctaaagcctaccctattctatccatctcctggtgttctgcagtcatctcccctcctggcgagttctctttggaaatagcatgacaggctgttcagccgggagggtggtgggcccagaccactgtctccacccaccttgacgtttcttctttctagagcagttggccaagcagaaaaaaaagtgtctcaaaggagctttctcaatgtcttcccacaaatggtcccaattaagaaattccatacttctctcagatgggaacagtaaagaaagcagaatcaactgcccctgacttaactttaacttttgaaaagaccaagacttttgtctgatccaagtggttttacagctacccacccttaggggtaattggtaattacctggagaagaatggctttcaatacccttttaagtttaaaatgtgtatttttcaaggcatttattgccatattaaaatctgatgtaacaaggtggggacgtgtgtcctttggtactatggtgtgttgtatctttgtaagagcaaaagcctcagaaagggattgctttgcattactgtccccttgatataaaaaatctttagggaatgagagttccttctcacttagaatccgaagggaattaaaaagaagatgaatggtctggcaatattctgtaactattgggtgaatatggtggaaaataatttagtggatggaatatcagaagtatatctgtacagatcaagaaaaaaagggagaataaaattcctatctcatattatgcatgtgacccatggaatctcataactgaaagacttgaaggatgaaaattttggggatacaagattggttaaactaaaatgctgacagagaggtttccagagctaactcgtgcctggggcggccttacaataagcagatgcctgaaagaagtcggccacgtccgccgtctgctaatgcccatcacccttcaagcccagtttaaagacctgtcatatttaattgtatttatttgatgcttacaagatgaatgtgatactgtagcctaaagcaaaatgacacatagcattgcttataaagttggtaaccctgctatattatattgcaaacaaatcgtaacttggagactatgtttaagggactcaactgtaattatgggagcatcagtatgcaaatagtggttggcttctgccatcagccaaaagatgacattcagggaaaatggagaggctgcctgcaccgtttttttatgttaaatgaaagaaaggtgaaatagctacttctcgtcttcttgaaaaatttggttcttattctgtatatgacttccttacagtgctacattaacaggatatttcattacatgcatctggtatca

SEQ ID NO: 61289 - DNA, 2172 bp, Homo sapiens
tgcggccgcagccccgggctcgcgtaggcgccgaccgctcccggaccgcccccatatggcccacggctacgaggcgccgccgccgccagccccgcggagccccgcatggcgggcccggagtaagccggtagctgccgggcatcaccatcaacccctaccatcgccgagggcccatccccctaccagcgagggcgcctccgaggcaaacctggtggacctgcagaagaagctggaggagctggaacttgacgagcagcagaagaagcggctggaagcctttctcacccagaaagccaaggtcggcgaactcaaagacgatgacttcgaaaggatctcagagctgggcgcgggcaacggcggggtggtcaccaaagtccagcacagaccctcgggcctcatcatggccaggaagctgatccaccttgagatcaagccggccatccggaaccagatcatccgcgagctgcaggtcctgcacgaatgcaactcgccgtacatcgtgggcttctacggggccttctacagtgacggggagatcagcatttgcatggaacacatggacggcggctccctggaccaggtgctgaaagaggccaagaggattcccgaggagatcctggggaaagtcagcatcgcggttctccggggcttggcgtacctccgagagaagcaccagatcatgcaccgagatgtgaagccctccaacatcctcgtgaactctagaggggagatcaagctgtgtgacttcggggtgagcggccagctcatagactccatggccaactccttcgtgggcacgcgctcctacatggctccggagcggttgcagggcacacattactcggtgcagtcggacatctggagcatgggcctgtccctggtggagctggccgtcggaaggtaccccatccccccgcccgacgccaaagagctggaggccatctttggccggcccgtggtcgacggggaagaaggagagcctcacagcatctcgcctcggccgaggccccccgggcgccccgtcagcggtcacgggatggatagccggcctgccatggccatctttgaactcctggactatattgtgaacgagccacctcctaagctgcccaacggtgtgttcacccccgacttccaggagtttgtcaataaatgcctcatcaagaacccagcggagcgggcggacctgaagatgctcacaaaccacaccttcatcaagcggtccgaggtggaagaagtggattttgccggctggttgtgtaaaaccctgcggctgaaccagcccggcacacccacgcgcaccgccgtgtgacagtggccgggctccctgcgtcccgctggtgacctgcccaccgtccctgtccatgccccgcccttccagctgaggacaggctggcgcctccacccaccctcctgcctcacccctgcggagagcaccgtggcggggcgacagcgcatgcaggaacgggggtctcctctcctgcccgtcctggccggggtgcctctggggacgggcgacgctgctgtgtgtggtctcagaggctctgcttccttaggttacaaaacaaaacagggagagaaaaagcaaaccgcgccatcctgcttctttcttccgttcggcgttgggtgctgggctttgcttcagcccagcacggagaggacatccctgagctgacccgcatcgccgggcgccgaggctggagggcgcagggccctcccttagggagagctcgcctctccctttgggtcaagggatgaagacctgcagtgagcccccaggcgatggcggctctcgccaaaaggaaggagagtgaggctgggggcggcggctcatgcctgtcattccagtgctttgggagcctaaggcgggaggatcgcttgaacccaggggattgaggctgcagtgaacctcgatggtgccagtgcgttccggcatgggtgacagagcaaggctactgaaaaaaaagaagggaaatgccacctggtttccctctgtgtcctccccgccaccatctctgcccctgtggaaggcagagcttcggccttccgtgatggaaaccacttcctctacactgctcctgtcacgtagcctccgcgggaaggccgcccctgcctcttccccagcgtggcaccatcctctccctgtccccccgcttcagggagtgggggctc

SEQ ID NO: 61290 - DNA, 4368 bp, Homo sapiens
gaattccccgatgtacttctgcattaaattccttgctttcagaatcataaccagggaatcgtttggtactgtgagggatagacaagccctcatttctgtaatccctgctaagtgaggtcaaggctgacatctaagatgttctgtggcggaacctggcccccatcaggggcaacctttaatttggattctggaagactaaaactttgagatctctcccccgccccccaggctcccccggtagctctcctccggcggtggcccgcgctcggtggatgtggctggcagctgccgccccctccctcgctcgccgcctgcttttcctcggccctccgcctcctcccctcctccttctcgtcttcagccgctcctctcgccgccgcctccacagcctgggcctcgccgcgatgccggagaagaggcccttcgagcggctgcctgccgatgtctcccccatcaactacagcctttgcctcaagcccgacttgctggacttcaccttcgagggcaagctggaggccgccgcccaggtgaggcaggcgactaatcagattgtgatgaattgtgctgatattgatattattacagcttcatatgcaccagaaggagatgaagaaatacatgctacaggatttaactatcagaatgaagatgaaaaagtcaccttgtctttccctagtactctgcaaacaggtacgggaaccttaaagatagattttgttggagagctgaatgacaaaatgaaaggtttctatagaagtaaatatactaccccttctggagaggtgcgctatgctgctgtaacacagtttgaggctactgatccgcgaagggcttttccttgctgggatgagcctgctatcaaagcaacttttgatatctcattggttgttcctaaagacagagtagctttatcaaacatgaatgtaattgaccggaaaccataccctgatgatgaaaatttagtggaagtgaagtttgcccgcacacctgttatgtctacatatctggtggcatttgttgtgggtgaatatgactttgtagaaacaaggtcaaaagatggtgtgtgtgtccgtgtttacactcctgttggcaaagcagagcaaggaaaatttgcgttagaggttgctgctaaaaccttgcctttttataaggactacttcaatgttccttatcctctacctaaaattgatctcattgctattgcagactttgcagctggtgccatggagaactggggccttgttacttatagggagactgcattgcttattgatccaaaaaattcctgttcttcatcccgccagtgggttgctctggttgtgggacatgaactcgcccatcaatggtttggaaatcttgttactatggaatggtggactcatctttggttaaatgaaggttttgcatcctggattgaatatctgtgtgtagaccactgcttcccagagtatgatatttggactcagtttgtttctgctgattacacccgtgcccaggagcttgacgccttagataacagccatcctattgaagtcagtgtgggccatccatctgaggttgatgagatatttgatgctatatcatatagcaaaggtgcatctgtcatccgaatgctgcatgactacattggggataaggactttaagaaaggaatgaacatgtatttaaccaagttccaacaaaagaatgctgccacagaggatctctgggaaagtttagaaaatgctagtggtaaacctatagcagctgtgatgaatacctggaccaaacaaatgggatttcccctcatttatgtggaagctgaacaggtagaagatgacagattattgaggttgtcccaaaagaagttctgtgctggtgggtcatatgttggtgaagattgtccccagtggatggtccctatcacaatctctactagtgaagaccccaaccaggccaaactaaaaattctaatggacaagccagagatgaatgtggttttgaaaaatgtcaaaccagaccaatgggtgaagttaaacttaggaacagttgggttttatcggacccagtacagctctgccatgctggaaagtttattaccaggcattcgtgacctttctctgccccctgtggatcgacttggattacagaatgacctcttctccttggctcgagctggaatcattagcactgtagaggttctaaaagtcatggaggcttttgtgaatgagcccaattatactggtatggagcgacctgagctgtaacctggggaattcctcaactctcttgtccacacagacttctatgaggaaatccaggagtttgtgaaagatgtcttttcacctataggggagagactgggctgggaccccaaacctggagaaggtcatctcgatgcactcctgaggggcttggttctgggaaaactaggaaaagcaggacataaggcaacgttagaagaagcccgtcgtcggtttaaggaccacgtggaaggaaaacagattctctccgctgatctgaggagtcctgtctatctgactgttttgaagcatggtgatggcactactttagatattatgttaaaacttcataaacaagcagatatgcaagaagagaaaaaccgaatcgaaagagtccttggcgctactcttttgcctgacctgattcaaaaagtcctcacgtttgcactttcagaagaggtacgtccacaggacactgtatcggtaattggtggagtagctggaggcagcaagcatggtaggaaagctgcttggaaattcataaaggacaactgggaagaactttataaccgataccagggaggattcttaatatccagactaataaagctatcagttgagggatttgcagttgataaaatggctggagaggttaaggctttcttcgagagtcacccagctccttcagctgagcgtaccatccagcagtgttgtgaaaatattctgctgaatgctgcctggctaaagcgagatgctgagagcatccaccagtacctccttcagcggaaggcctcaccacccacagtgtgaatcctgaggttgcgccattggcggttctgctcgttcgctgcagggataaggtggagctaccgaacagctgattcatatgccaagaatttggagtcttctttcaaaccagtgggggttggacaatgaatgtagttaactggttcctgctcacactccagaattaaattctattgaaaaaggaaaatcagcaattcagcaaaaaaataaataaaaaataaaaatgtaaatatgatagtaataaaatagagcataacgaaactgtgaaactttctgaagccttgtcagtggttaaaagtatttaacactctactgttaatgacagatgttctgtttttataacctaccaaaaggaaactagaggcttcttggtgaagagcatttttgtgaagtgggttctgcaaggagcctataaagccaagggtggtgtccatttctgggaatggttaaacacaaaaggctgatagctggtatcacatagttggagtcagtgcataattccaagtggctttttttttttttggcacggggactgatcaggaagatatattcctgcataactcaatctgaaccaaggattgtagtttagttttcctccttgccttcccttctgtgtgaccgaccccttggccaaaaaaaaaacaaaaagcaaaaaacaaaaacctaccctgttctggtttttttcctccctttagttccacccccaacccccattccctggtgtccttcttagagatgaagaaataataaggaaacatctttcatagccacattaaataagagaaactgatatacattatttttttctttttaaagatgacttataagaaccctgaaatttatataggtgagacaatagaaataaaaagatcttcagccaggcctttctgaaggagttattctgctaaaaatggtcttagttgtctgaaaagccagctcttgaacctcttcacaacagtatcaacactggcttctcccggttcattttatgcgtgcgagaagtcagtggtaactgctgcagggcttaatacattagtggtaactggtttaaaaaacaaagactgtaagcctgtgtgtgccactgtttgcttcaacagtatatcctactaataagcctcacctatttaatccaatgagttttaaatctaaatctcattcccttcttctttccctaccttttttttctttttttcttaaaaaaatattttgtgttattaacagaaattcatatttggtgtggcttaacggtatttcagaaggtcatcagattgtgagactgcttccttgaaacatttttgtgctattgttttaaaaaaataattaaaaaacagttggcgtt

SEQ ID NO: 61291 - DNA, 3828 bp, Homo sapiens
acatccacgggaacctggggaaggcctgcatccccgacaccatccccaaccgcgtgacagaccacacctgtcccagcggaggccccctctcacccagcctcaccaccccgctgcccccgctagacatctctgtggctgagcagcagcagctgagctacatgccgctgcgggatgattacgagatcgagtatgaccaggatgccgagacgctcatcagcgggctctctgtcaactatgatgacgacgacgtggagatcgagctgaagcgcgcccacgtggacatgtacgtgcggaagctgaaagagagacagcggcggaagaacatcgcccgtgactacaatctggtgccagccttcctggggaaggacaagaaggagaaggaaaaggcgctgaagcgcaagatcaccaaggaggagaaggagctgcgcctgaagctgaggccgctgtaccagttcatgtcatgcaaggagtttgatgacctttttgaaaacatgcacaaagaaaaaatgctccgggccaagatccgagaactgcagcggtaccggcgaaacgggatcaccaagatggaagagtcggcagagtacgaggcagcgcggcataaacgggagaagaggatggagaacaaaaacctagccggctccaaacggggaaaggaggacggcaaagacagcgagttcgccgccattgagaaccttccaggcttcgagctcctgtcagatcgcgagaaggtgctctgcagctctttaaacttgagtccagcccgctacgtgactgtgaagactattataattaaagaccacctccagaagcggcaaggaatcccctccaaaagccgccttcctagctacctggacaaagtcctaaagaaaaggattttgaatttcctcacagaaagcggctggatctccagggacgcgtcttgaagctgagacgctttgaaagccagggtgatgctcagacagtgtgccagccaaaatgacttgggggaggggagccgcttccccactgttgctcttttttaaacaaattgagttcctttttttaagatagaaattcttttcatggtcctctgaaagaagcaatagtaacaatcttatattggatcatgggggaagcaaatgtgtgtattttaagtgagttcctgcgagtcatacactgcgatgatgctccgcctttacccgttcagttgggagcttattgtgagattggatcatttccttttgagtgttcttctctttggtacaaaacctattgtgggtgacaggagcagtgttttcctgctggacccgcaagccaccagctatttcctggtgacacaagctcttctcaggcggggctgcctgcaggctcccgttttctgagcccacgctgcccacagctgaccccagcgcagccccgggcacgcggcactttacatgggggcagcttgggcccagactcctccgctgtgtagcagatgaggaaaatcaggccagaggacaacaggctggcgttttgttgggaactgaagaggaatctgttgaacacagcgaccagatgaccttccatttcaccggcggcagcagtttcagcgtgcagttcccaaaccccaaagctgaccctgcgccccatttgaatacggccagagcctgctggttcactttgggtagagccgtgcctcttgggcaggctcccatagtgaccacgtccccacgaatgggaaagcacgttagtgggagggacgtaggacacgtgtggaccgccaggccctctcagtccattttccggggctgctcggtgctgctgttaagacgtgagtgcatttcacttggaagaacccattgtacaaagttcaaggctaagagttctgaattctggcgtcagcttcctcaggattttcttcagttgcaagtacctttccactgaaaatatgagcatgcccgcctggctagtaggcatctgtaagagtgtcgccaggcccgcgccagctgaggcctcagactagccaggcaagagccgtctgaccagttggctggcggtggttctggtggagcacgagggagcccgggtggtgccctgagcctcgagctgctctctgtcactgtcttgaatcagactcagaaatggcttcttcccagccctgcctacaagtttttctctggggtcctctttcaaggatgtccacggtaccttcctcctgaaacttgaggaagtcttttgtcttccagctgctcagggttctctggtccaagaccctgctttaaagagagtctttggcgtgctcagactccagcgctccgttcttcaaggaggttgacttgcctctcgggccccgtaggtaccaagagactgtttacctcccagaatgtttgggcttgaagttacattaaagtgaagttatttgaaagaaagaaaacctcatcatttctaaggatgacttaattactgtgccttttcctttctttttacacatcctactgtcccttagggtaaaattttcagcattaaataaaacatttcaaatatattgtatatggctttagttgtaaactatactgcatgctgacagagaagcgctcttttagctaagcccagaacttctcttttgacaataaagtactgagcagtggtatcatgagggccacctccacattgtcccctgcagaataaatgcggatgacagaaagcttatgctgtctaccactgaacagtgatggagatggtgctaagtttttacagttgtcttaaccccagtggttctcaaggtggggctcctggcccagcagcagcaacttgtttgttagaatgcagacgcgcaggccccacctggcctcctgaatcaaaatggtgtgcggcagggtgcagcgagctgttttcacgaggcctccaggtgactggatgtaagcttgcttgagaactatgggttttagctattctggtgtctccctgattttctacagccgcaggatcctagtttggtgaggttttaaatttaatcttatttttatataaaatgattgccagacggtactatattaagcttgaagaagcagaagatccctgttaatgtgtatggcccaggccaagagctgtcaaatgaaaaactttgtgctgaagcaggtttttagtatgtatatctttttgatggtatgaagaatttatttaggcttgactgttttaaaacaccataatgaatgtataattaatttatgttaaagtattaaccctttgtcacaaaggaatggtaatgtgattggctgcctgttagcccatcgactattcccgtcacggtagtccttacctctgtcggcagctcagagcctccacatttttatatttaattctcatgataaattagccaccataatcccatggaattaggtcttgttaaaatctagtccgggcgcagtggctcacgcctgtaatcccagcactttgggaggccaaggcgggctgatcacgaggtcaagagatcgagaccatcctggccagcatggggaaaccctgtctctgctgaaaatacaaaaattagctgggtgtgggggtgcatgcctgtagtcccagctacttgggaggctgaggtaggagagttgcttgaacctgggaggcggaggttgcggtgagctgagatcacgccactacactccagcctggtgacagagcaagactccatctcaaaaaaaaaaaatctaagcaaactatctttgagtcaaaaaaagttggataactcatctatatttgaaataatgctgtctgaatggccaacatcccaagaatgtattaaaaacagcaacctgcctaccgttttgatgacctttttccatattaaacaagttgagaacaaaaaaa

SEQ ID NO: 61292 - DNA, 2533 bp, Homo sapiens
  misc_feature (1)...(2533): n = a,t,c or g
cggcacgaggttttttttaaaagaataaaatttattgtactctcctcgccccagggtgcccctgggaaagcctgaggctacttgtacgcgttggccttgtgcttcggcaagaaggcgaagctggggggcactggcccaaggagcatctcgctgatgcggatccagtcggctgccttctggctggccatcagcgtctccaggtagtcgcggcccaggtagtagggcggccgctcgttgatcctcttgtgggagccgctccagcagccccacgggcacgtaccggcacaggaaggacagccactcgagcagaaagcggccgggtcttctccacgccctgcgtgttccgagccccagtgctccaggccgtagttgtttgaagtctcgcaggatgtccaggcgctcggacgacgagatgtcccagtgccgctgctccttgatcctccgtgaagagccccgggcttgagcagggcgccacgggcaatcatgatccccgttgaacaccaattctgcatgggggccggttggcaatcctcaaatgacaagatgtccccatttccgaaacagggggcatggggctgcggggcctgcacgcactcctcgatgtactgccagtcggctagcttggtgtagcgctgctcccgagagcggccgtggagcgtgacgagtgccacgccccagtcccgcagctcgggcagcaggcggtgcgccaggttcacacgctcctggacgcctgtgcggatcttcacagtcagcggcacatccagcacctggttcatgccacggacgatctgctggaacttggtggagcgattcatgagggcacagcccccacccttcttgtacacgaggtcgatggggcagccgacgttgatgtccacaaagtccacctccacggtgcggctcagcagctcggcacacttggtcatggtgtcggggaaggcgccctccagctggacgccaaagatgtcctcacactggtggcgtttgagtagggcccactcggacatctggccctgcagcaggttggtgcagacggccatctctccacatgtcacatccgccccgaagcgcttgcagatccgtcggaagggcaggttcccacacgtggtgaggggggccaggtaaagtttgccacggatgtccagccgcttcttctcacagggccgcagcctgaccacgtcctcatccgtcaggggcccgcaggtccgcacggggctgctgggaggggtgctagtgcccggccctgcggggacctgctgggcaccacagttttcctgcctgggagcgccctcggctgccgtgccctcggggacagcggcagcgggtgtggggccctggctgaaccggcgcagggcctgctcagctcgctcgaagcggacctcgcgcttccgcagctgctgctgcagggctttgtccaggccgttgcggatggacgggggctgggtcccgcgggccgccaactcctcctgcaccaggttctgtccctcgggcctcaggtgggccccagcgaagcggcaggtcacgccgtaggggcaccggccgaaggtctcgaagagcacgcagcgggggcccaggtcggccggcttgagcagggcgccacgggcaatcatgatcccggtgacaccagtctgcatggcgcggttggcatcctcaaatgacaagatgtccccatttccgaacaggggcatggggctggcggcctgcacgcactcctcgatgtactgccagtcggctagcttggtgtagcgctgctcccgagagcggccgtggagctgggggagaagccgccacgcagggtaggaggcagagagtgagacgcagagaggaagagaccaagagagccaggctgagagagacagagagagacacaggcggagacagagggaggtgtggaggtgaagagggagggatgggaggagaggagccattaggaagggacgcggggtcgaccgcgaggccccaatgcccgaggcgtcccaagaccccccgtgacgagtgccacgccccagtcccgcagctcgggcagcaggcggtgcgccaggttcacacgctcctggacgcctgtgcggatcttcacagtcagcggcacatccagcacctggttcatgccacggacgatctgctggaacttggtggagcgattcatgagggcacagcccccaccctggaagagacaggcgggtggagggaggccagnacgtgggctgacccaagacccctcacccctgctgcccggaggcccccacaagaagacgccgacctgcaggaaaggcagggactccagggccacacttgagcccaaacccctgaccctccaccgagacatcgccggctgggtcagtgcctccctgcccagatggggaaaccgaggcacacgtccagggccgctaccttcttgtacacgaggtcgatggggcagccgacgttgatgtccacaaagtccacctccacggtgcggctcagcagctcggcacacttggtcatggtgtcggggaaggcgccctccagctggacgccaaagatgtcctcacac

SEQ ID NO: 61293 - DNA, 2113 bp, Homo sapiens
ggaaaggtcttgtcagaccatatgtgctgtttcaggctgcttcaaattcttttaggacagtggtggatatgagtgaagacggggcaggcaggccacatctcttataagaggaaggtgattgccacgtctccttcctccatgctgatggcaaggcgtgcgggctgtgttctcttgcagccagcgtcccatgctcggtggccccagaaaagtcagtgtgtaggcctcagccacttcaggtccggcgtacattctccctggacaccatcctcagctcctaccttctgggccagtggccacgagatgctgatggggccttcacctgctgcaccaatgacaaggccacccagacgcccctgtcctggcaagagctagaaggtgagcgtgccagttcctgtgcacacaagcgctcagcatcctggggcagcacagaccaccgaaaagagatttccaagttgaagcaacaactgcagaggacgaagctgagccgcagtgggaaagagaaggagcgaggttcaccactcctaggggaccacgcagtgcggggagcactgagggcgtcccctcccagcttcccctcagggtcccctgtcttgcgactcagcccctgcctgcacaggagcctggaagggctcaaccaagagctggaggaggtatttgtgaaggagcagggagaagaggagctgctgaggatccttgatatccctgatgggcaccgggccccagctcctccccagagtggcagctgtgatcatcccctcctcctcctggagcctggcaaccttgccagctctccttccatgtccttggcatctccccagccttgtggcctggccagtcatgaggaacatcggggtgccgccgaggagctggcatccacccccaacgacaaagcctcctctccaggacacccagcctttcttgaagatggcagcccatctccagtccttgcctttgctgcctcccctcgacctaatcatagctacatcttcaaacgggagcccccagaaggctgtgagaaagtgcgtgtgtttgaagaagccacgtctccaggtcctgacctggccttcctgacttcctgtcctgacaagaacaaagtccatttcaacccgactggctcagccttctgccccgtcaacctgatgaagcccctcttccccggcatgggcttcatcttccgtaactgcccctcaaacccgggatctccccttcccccggccagccccaggccaccacctcggaaggatccggaagcctccaaggcctccccactgccattcgagccatggcagcgcaccccaccatcagaagagcctgtgcttttccagagctccctgatggtctgagggtcccacccctgccccactttaccatagagaccagtgccttggtggcaggtccctccccaggtcccctgagatggggtatggaggggcccttccctctcggccttcgagcactttctttcacttactgtgtcaaagccctgggtcctctttttgatgggcaccggcccctctgaacgtgatgggacctgccttctccactagtagctgggcagctcacaattcacacctgtgtacctgccacatccctcacttggtggaaaacacccagaaggtcttgagtcccccacccctgggtgtcagtccaaatgactgtataggaggcccttatttttgtcacagagcaagctggccatgaacgaaggagagaagacgccacagatttccttccctctcctccaggagaccataagatagatcccccatcctctcagccctattcccatgcctccctctcattggaggagctgaccaaagcagccctaacgggccataacacttgaccaattcagctgctggcagagggaggaaacaagtgttttcccaagtggcattttcatctcgctttcaccctgacttaagacaatctttagtcagggtgaaagcgagatgaaagattgtcttaagtagcagcccagcccgcccagccccaggtgggtagtggggaggagagctggcattcctccaggtggcaaatggcgactctatactctccgcccgccccagggctggatggattagaaaaatgcctatttttcttgtatcgatga

SEQ ID NO: 61294 - DNA, 1667 bp, Homo sapiens
tgtgaataaataaaagtttatcattccgtacaaacgcactcattttcaacaaacaagttttttacacgagccgcggttggccccggttggtggcacgtggggagcggccccgcgacggacgttctcgcgggcggcgtcacagcggctccaggtcctcgtccccgcatgcgtactcgtacaggtccacggcgcccagcggtgagggcgcctcgaagaagggcctctgggccagcggggaaccgcagcgcactcagcttctgctccacagggctgagctcggcctcgaacccgtcctcccaggggctctcccgcggtctcctcggccaccagggatgtcgtacttcctcggccgcgtacttctcccagtccgagagctcgggggccgccgctgtcaccgtccctgaagcagggagatctgctctttctgctcgtggtcgaggtacttctcgatgttgaagaaggtgtcgaagaagacgttggccagcttgcagcgcttcaagttctggcagcgtgatcttcccttcagtcctcggcttgaccaggtccagcatctggcagaggcagtcctggaagggcagggcctcgatggccatgctgtccagccttcggcactgctcctcgtagaagtactcgagctcgaacatggacagggcgccgtccccgtccaggtccatgcagcggaaccagtactcgatgctggtcggtgtttttttgtcttcctcagagatcaaaaaccagacaaagtcggcatagctgatcttcccttccttctgcacttttctgcctcgtgtgactgctcctgagaagatcctgtctatcatcttggtagaaagggcgtggtcattgtgccgcgccaggtcgtccgcgtcgatgagcaggtcgtggtccgtgtccagctcccagaacttgcagtagatgacgtagaaatgctcgtacgagaagaattcggtcagctggttgatgtccgcctcctcctccagcagcgccacattctgcaggaaggagctcctccgcagctcggcgcaggtgatcctgccggaccaggaccggttcacggcgtagaagatccgctggatgaccgtggtgatgtagcgcgagtggaactcggacgcctccttcaggaacgacagccccgggtgcgtgttcaccacgtcctgcaagaaggggacaaagtcctcctgcaccaggtagttgcagccggggctcatgagcagatggacgaacttggccgcgtcgtcgtggcagttctggaggatttttctccacatggcgacgaacttgtggacggacacggagcccgtgcgctccccgccggcgccatagaagagcggccccttccagtagagggggcagccgcaggccttggccaccaggcccatgtcgtccatggtggccctctcgtgggggaaccgggcgaaggtgctctcgatcttgctgatgacggcatccacgttgacggagtcctgcgggcgtcctctagggaagtagaaggtcggaatgctttggctcgtggccgggggcagaggctcttctttccgtgtctgaacctgctggaaggccttcagacgcttcttgactcgagagggcagcacgaagtcgcagccgcgggccagtgagaccagctcctggcgcaggtcggggtcctggcgcagcgagcgctcgcggag

SEQ ID NO: 61295 - DNA, 2190 bp, Homo sapiens
ttttttttttttaaaccagagaggggtgcatttattttctcacattaaaaaaaagctgaatttaagtagtctggggctggtatgtcagcaaaggcccagggtccttcccgcgttctgcgtcagcaaaggcccagcgtccttcccgcgttctgcgtcagcaaaggcccagggtccttcctgtgttctgctccactgtccttagggtgtgaccctttcctcacgctctcaggacagctgtcccagcaccagccatcacatccatgttccaggcaggaagaaggcaaaggggaagggtcctgcatgtggcagctgagtccccttcacaggagcttccctgcaagtctctcccagcaccacccacctccacgccacagctgcacaccccgggctgcaagggagcccaggacatggctctcgtctgcccgctattggaactggggcagaggcaccggggttctgttagtacggaggaaagagaatggacgctgggttagcaacttgcagagtccccaccacagccaggactcgggcaggagtgatccccactaaaaggcaaagatttcatgccaggctgcaatggggaagtgcttgggctggggtcccaccttctcctaacaaacatgaggctcttgttaaagatttaaccttgtgagagtggtctgtggcccacatgcacccagatcagctgcctggtgtgcctcggcccattccagggcttccaattcaccctggggcgggggaggcctggggcatgcagttttcccacactccttgctgattttttcttctataatttctaaaattaacactgtgcttgctagatgggatgaaaaggcaaatacgtatcaagaaagttcccctccctaggtcctgccctaggctgacccccccttacagcctttcctgctgcaagggcttctggggtcctcaaggtccttgagaaactctccagtcctggaccagtgctggaaccaactccgggggggtcccctcagcgggctgagccttgaccgctggaccccaaggacgccggcggcactgacgccactatgggctcggccgctgccctgggtggtagtcagccacgtcatcaagtgacacagcacccaaccccctcagcaccaacaggcaggagggggtgcctcaagtctgcgctccaaggtttaggaccagggctgcagctgagccaacgccgcggggccacgaggcttcccaggtttcacaagggctccttttaaggccgggcggaatccagccattgagccagatgcaaagaatggaggccaagtccagaaagaggagggccctcccctgtgggaagccacgccggctccccttgtgcccctagatcctaggctggttctgggctcaggaggccaccccctccagaccagcccacctgttcagccagtgggtgacccacatggtcacaggtcctgcaggctcaggaactcttggctccaggcacccctgcctctgcccctttgggacaactgaggacaggctacctgcgccatctgatcccaaacctctgcccacaccccagaaaagtccttagttgaattcttcttaattaaatccttggctgacacggaaggaaaaagccaaatctcctctcacaagacctttagttgagagaacatgcacagctgcctgccctgaaagccccaggcgtcccattcaggaagaggcaaccagaacagaccgacggccccaccacagtcgtgcgcgggctcctctgcgatggctggcagcacagctcactcagcacacctgtatcatcatcgacgtcaccatgttatcaaaggccctggactggatgcggtcccccgggttgtagaaggggttgcacatcacgtctgtgtaggagttgtgtagcttccggaacatgctgcgaatttcgttgtctcgaagggctgtgttggaggaatctaccaccatgacaaacttcaccttggagttggtgacgtagccgtataccttgtagtcctccgtggggtagagcaggcccaggtacagctccctctggtcgaccagggccttccccattgcggagatcttctcatccaccacgtccagagatgtgtgcaccatgtagtggaacttcagctcgttctccgtaggggtgctgcgaatgtagagggggtaattctccttggcaatcagccgcgatgcacaccgccatcttgg

SEQ ID NO: 61296 - DNA, 1643 bp, Homo sapiens
gaattccggcgagtgcgcgctcctcctcgcccgccgctaggtccatcccggcccagccaccatgtccatccacttcagctccccggtattcacctcgcgctcagccgccttctcgggccgcggcgcccaggtgcgcctgagctccgctcgccccggcggccttggcagcagcagcctctacggcctcggcgcctcgcggccgcgcgtggccgtgcgctctgcctatgggggcccggtgggcgccggcatccgcgaggtgcaccattaaccagagcctgctggccccgctgcggctggacgccgacccctccctccaggcgggtgcgccaggaggagagcgagcagatcaagaccctcaacaacaagtttgcctccttcatcgacaaggtgcggtttctggagcagcagaacaagctgctggagaccaagtggacgctgctgcaggagcagaagtcggccaagagcagccgcctcccagacatctttgaggcccagattgctggccttcggggtcagcttgaggcactgcaggtggatgggggccgcctggaggcggagctgcggagcatgcaggatgtggtggaggacttcaagaataagtacgaagatgaaattaaccgccgcacagctgctgagaatgagtttgtggtgctgaagaaggatgtggatgctgcctacatgagcaaggtggagctggaggccaaggtggatgccctgaatgatgagatcaacttcctcaggaccctcaatgagacggagttgacagagctgcagtcccagatctccgacacatctgtggtgctgtccatggacaacagtcgctccctggacctggacggcatcatcgctgaggtcaaggcacagtatgaggagatggccaaatgcagccgggctgaggctgaagcctggtaccagaccaagtttgagaccctccaggcccaggctgggaagcatggggacgacctccggaatacccggaatgagatttcagagatgaaccgggccatccagaggctgcaggctgagatcgacaacatcaagaaccagcgtgccaagttggaggccgccattgccgaggctgaggagcgtggggagctggcgctcaaggatgctcgtgccaagcaggaggagctggaagccgccctgcagcgggccaagcaggatatggcacggcagctgcgtgagtaccaggaactcatgagcgtgaagctggccctggacatcgagatcgccacctaccgcaagctgctggagggcgaggagagccggttggctggagatggagtgggagccgtgaatatctctgtgatgaattccactggtggcagtagcagtggcggtggcattgggctgaccctcgggggaaccatgggcagcaatgccctgagcttctccagcagtgcgggtcctgggctcctgaaggcttattccatccggaccgcatccgccagtcgcaggagtgcccgcgactgagccgcctcccaccactccactcctccagccaccacccacaatcacaagaagattcccacccctgcctcccatgcctggtcccaagacagtgagacagtctggaaagtgatgtcagaatagcttccaataaagcagcctcattctgaggcctgagtgatccaaaaaaaaaa

SEQ ID NO: 61297 - DNA, 801 bp, Homo sapiens
  misc_feature (1)...(801): n = a,t,c or g
tggtgctttgaaacttggacacattacccagcttgcacgaggggcgggcccttaacaggcaccgctgcggggactggagtcggcggagaaaaccggggtccccagcgctggggcccgcggcgccatggctcacgtcggctcccgcaagcgctcgaggagtcgcagccggtcccggggacgggggtcggaaaagagaaagaagaagagcaggaaagacacctcgaggaactgctcggcctccacatcccaagagagaagcaagcagaaggcccggaggagaacaagatccagctcctcctcctcttcttccagttcttctagctcctcttcttcctcctcggcctcctcctcttcctccagtgatggccggaagaagcgggggaagtacaaggacaagaggagnnnnnnnnnnnnnnnnnnnnnnnnnctgaagaagaagggcaaggagaaggcggaagcacagcaggtggaggctctgccgggcccctcgctggaccagtggcaccgatcagctggggaggaagaggatggcccagtcctgacggatgagcagaagtcccgaatccaggccatgaagcccatgaccaaggaggagtgggatgcccggcagagcatcatccgcaaggtggtggaccctgagacggggcgcaccaggcttattaagggagatggcgaggtcctagaggaaatcgtaaccaaagaacgacacagagagatcaacaagcaagccacccgaggggactgcctggccttccagatgcgagctgggttgcttccctgagggcccccgctggccaaggc

SEQ ID NO: 61298 - DNA, 2072 bp, Homo sapiens
tacatgaaatctgcagtttcataatttccgtgggtcgggccgggcgggccaggcgctgggcacggtgatggccaccactggggccctgggcaactactacgtggactcgttcctgctgggcgccgacgccgcggatgagctgagcgttggccgctatgcgccggggaccctgggccagcctccccggcaggcggcgacgctggccgagcaccccgacttcagcccgtgcagcttccagtccaaggcgacggtgtttggcgcctcgaggaacccagtgcacgcggcgggcgccaacgctgtacccgctgcggtgtaccaccaccatcaccaccacccctacgtgcacccccaggcgcccgtggcggcggcggcgccggacggcaggtacatgcgctcctggctggagcccaacgcccggtgcgctctccttcgcgggcttgccctccagccggccttatggcattaaacctgaaccgctgtcggccagaaggggtgactgtcccacgcttgacactcacactttctccctgactgactatgcttgtggttctcctccagttgatagagaaaaacaacccagcgaaggcgccttctctgaaaacaatgctgagaatgagagcggcggagacaagccccccatcgatcccaataacccagcagccaactggcttcatgcgcgctccactcggaaaaagcggtgcccctatacaaaacaccagaccctggaactggagaaagagtttctgttcaacatgtacctcaccagggaccgcaggtacgaggtggctcgactgctcaacctcaccgagaggcaggtcaagatctggttccagaaccgcaggatgaaaatgaagaaaatcaacaaagaccgagcaaaagacgagtgatgccatttgggcttatttagaaaaaagggtaagctagagagaaaaagaaagaactgtccgtcccccttccgccttctcccttttctcacccccaccctagcctccaccatccccgcacaaagcggctctaaacctcaggccacatcttttccaaggcaaaccctgttcaggctggctcgtaggcctgccgctttgatggaggaggtattgtaagctttccattttctataagaaaaaggaaaagttgaggggggggcattagtgctgatagctgtgtgtgttagcttgtatatatatttttaaaaatctacctgttcctgacttaaaacaaaaggaaagaaactacctttttataatgcacaactgttgatggtaggctgtatagtttttagtctgtgtagttaatttaatttgcagtttgtgcggcagattgctctgccaagatacttgaacactgtgttttattgtggtaattatgttttgtgattcaaacttctgtgtactgggtgatgcacccattgtgattgtggaagatagaattcaatttgaactcaggttgtttatgaggggaaaaaaacagttgcatagagtatagctctgtagtggaatatgtcttctgtataactaggctgttaacctatgattgtaaagtagctgtaagaatttcccagtgaaataaaaaaaaattttaagtgttctcggggatgcatagattcatcattttctccaccttaaaaatgcgggcatttaagtctgtccattatctatatagtcctgtcttgtctattgtatatataatctatatgattaaagaaaatatgcataatcagacaagcgtaatgcataatcagacaagcttgaatattgtttttgcaccagacgaacagtgaggaaattcggagctatacatatgtgcagaaggttactacctagggtttatgcttaattttaatcggaggaaatgaatgctgattgtaacggagttaattttattgataataaattatacactatgaaaccgccattgggctactgtagatttgtatccttgatgaatctggggtttccatcagactgaacttacactgtatattttgcaatagttacctcaaggcctactgaccaaattgttgtgttgagatgatatttaactttttgccaaataaaatatattgattcttttct

SEQ ID NO: 61299 - DNA, 1160 bp, Homo sapiens
  misc_feature (1)...(1160): n = a,t,c or g
ggtcaccactttagtccctggccaccagcacaccccaggagggtgagtggcctgaggtagttacggcacttaaaactcccttgctaccgatctggaactcaagccccaagacatccccttagatgatctgaatacgcattcagggacagatctaggcagtttctaaacaacacttagactggggtctaacgttgacaaatccttctagaatttgcctctttgggactgaagtctaaggggctgagaccaagaagggagagcacaagactaactttggtctcttgaccttttcttaccttgcaactgtcagtgcctccagccaaatgcctagcacagagctcagtggatttgattcttccattcagatactcatagcgattgcacactttattctcaatcacaagaagctggggctttcttgagaaggccagccccaaaggtacctgtgtttaaaagatgaaagaaatggttgctgaacccaaaacatgtttaggaggaaaaccagaagaacagagcagtggcactggacctcctgtctgtccgtgaggctgcagaacacaaggcagctcccaatgccgctggactctctgaccttggagagtgtaaacatcatatatgattctgtgttcctgagatctgggtttaacgatctgggctttggcatggtgctttacgatcgttgttgcttgtgtactttttgcttttcttttgaaaggacgtagacgacccttacaatgtaaagagagtctgagaaatgcaattgctattctttttatatactttttcagattttttatatgcttctttactacttacatcataatgcacaattttatatactgattttttcaatcaatgtatatcatgagtttttaaaataatgctacaatcttcataactaatattttnnnnnnnnnnnnnnnnnnnnnnnnnnnnnnnnnnnnnnnnnnnnnnnnnnnnnnnnnnnnnnnnnnnnnnnnnnnnnnnnnnnnnnnnnnnnnnnnnnnnnnnnnnttcagtggtaccctgcaaaataattaaaatcctaactcttannnnnnnnnnnnnnnnnnnnnnnnnnnnnnnnnnnnnnnnnnnnnnnnnnnnnnnnnnnnnnnnnnnnaagagggggcccccttnnnnnnnnnnncatctctccc

SEQ ID NO: 61300 - DNA, 2399 bp, Homo sapiens
  misc_feature (1)...(2399): n = a,t,c or g
ggcacgaggcagctgccgccgcctagcccggggtctggacctggggactccccagaagggcccgagggggaggctccggagcgtcggcggaaggcgcacgggatgctgaagctttactacggcctctcggaaggggaggcggcgggacgccccgcggggcccgaccccctggacccgactgatctgaacggggcgcacttcgacccggaagtttacctagacaagctgcgtagagagtgccctctggcccagttgatggacagtgagacggacatggtgcggcagatccgggctctagacagcgacatgcagaccctggtctatgagaactacaacaagttcatctcagccacagacaccatccggaagatgaagaacgatttccggaagatggaggatgagatggaccggctggccaccaacatggcagtgatcaccgacttcagcgctcgcatcagcgccacgctgcaggaccgccacgagcgcatcaccaagctggcaggggtccacgcgctgctgcggaagctgcagttcctctttgagctgccctcgcgcctcaccaagtgcgtggaactgggcgcctatgggcaggcggtgcgctaccagggccgcgcgcaggccgtgctgcagcagtaccaacacctgccctcgttccgcgccatccaggacgactgccaggtcatcacggcccgcctggcccagcagctgcggcagcgctttagggagggcggctcaggcgccccggagcaggcagagtgcgtggagctgctgctggccctgggcgagcctgcggaggagctgtgcgaggagttcctggcgcacgcccgcggccggctggagaaggagctgagaaacctggaggccgagctggggccctcacctccggctcccgacgtgttagagttcaccgaccatggtaggcagtggcttcgtgggcggcctctgccaggtggcggcggcctaccaggagctgtttgcggcccagggcccagcaggtgccgagaagctggcggccttcgcccggcagctgggcagccgctattttgcgctggtggagcggcggctggcgcaggagcagggtggtggtgacaactcactgctggtgcgggcgctggaccgcttccaccggcgcttgcgggctcccggggccctgctggccgctgccgggctcgcagacgctgccacggagatcgtggaacgagtggcccgcgagcgcctgggccaccacctgcagggtctccgggcggccttcctgggctgcctgacagacgtccgccaggcgctggcagcacctcgcgtggctgggaaggagggccctggcctggccgagttgctggccaatgtggccagctccatcctgagccacattaaggcctctctggcagcagtgcaccttttcaccgccaaagaggtgtccttctccaacaagccctacttccggggtgagttctgcagtcagggtgtccgtgagggcctcatcgtgggcttcgtccactctatgtgccagacggctcagagcttctgcgacagccctggggagaaggggggtgccacaccacctgccctgctcctgctgctctcccgcctctgcctggactacgagacggccaccatctcctacatcctcactctcactgatgaacagtttctggtgcaggatcagttcccagtgacgcccgtgagcacgctgtgtgcagaggccagggaaacggcgcggcggctgctgacccactacgtgaaggtgcagggcctggtcatatcacagatgctgcgcaagagcgtggagactcgcgactggctcagcactctggagccccggaatgtgcgggccgtcatgaagcgggtggtggaggataccaccgccatcgacgtgcaggtgctgcccaggctggccggggtagccctgacgcaggctgggggtactgtcccttcaagaggggctggggcagcagaggatcactggcagtccctgcctggaggaggggacatgtgtatctgggcttctcacggggccagttctgtagccagggcgtccgtgagggaaccccaggggaacaagtctccaaggatgaataccaaacgggctggggagtgcctatgtccacggtcttgttccttctcagcccaggattatgacatcttcgcccctattttacctgtggagaagcagaggctcagggttacccaggaagtcagggcagggttggtgctggtgctgaagattagacctcagaccaactcttgtatcctgcctttgccccactccactggttctataaatagcgaccatgtacctactaaatagcgggccccgcggtgattaccctgtgatccttgtnatgcttgagtagctgacttagggcatcctcagcaccgatgggcttggtggtttcccctga

SEQ ID NO: 61301 - DNA, 1189 bp, Homo sapiens
ttttttttttttagcacttgggaaccagctttatttctgatttttttttttttatcagagtataaaaaagtgagtgcagcaaaacaaggaagacgagacaggcgtgcgtgggccagggcaagacagaggagaagggagggaagcagaggcagaagggccccttggcgcaaggctgtatggtgtggaggcgggcagaatacttgcgcagccacacaggggcagggatgagggtctccccgtggtgggggcttacaggatgggagcggccaggccagttgtccaaattccacctgggacctgcagtgaccagcctcgagtctggaggctcaaagcacacagaggggactaggggctcagcctcatctgtccctgagattttcagaagccacagggggactgggagagggcagaggcgcaagagggtggaggcggctagggccgccctcactgtccttccgccaggcagcaccagccccaaaccacccagagaggggttgctcaggcctctgggagggtgtaaggggagtggccctgggaaggcctctcccctgaatccaggccttcttgggaaagcagcaatgggaaggcccacgcacaaggcccttgttcttgagggcgagaggggggaagaccataaaagcaagattttcccaaagatagggcagggagcactgctaagcctgggccctgggcgcggagccacctggacagggctggggttctcgttgtgccacattttgtctctggcgcttggtcaatctggtcctttctcagctttacttctcatgaatagagggggtgtggtgacgatgtataaataatgatgaaagtgcttggcatggtgcccgttaggcgggtgctgatggccactactctagatgatgggttggcctgctgggccctggcaggtgcatgggcacaagccacagggagccgaggcagcttatggtacctgtgtgggccaacctggaggtgctggggaacgacctagaactgggctgggtgggtggacagacaagtgactcagcaggcgatgggggaccgacatcacgtggagaggggaatgtaaataaacagactccctgggagtctaggggggacatccaaaccggttctggctccaggcagctgccccacatgctgccagctgcaccaggggagggcttgggctcaggtcccaggaggtggg

SEQ ID NO: 61302 - DNA, 6309 bp, Homo sapiens; identical to SEQ ID NO: 60546

SEQ ID NO: 61303 - DNA, 2675 bp, Homo sapiens
gtccgtaattgccgggtcgacgatttcgtgtctgacagaggaggctccgtgtctgcagctagtgtgtcaactcagcgtttctcctctcgtccctggaagagctaaagatggctgaatttctagatgaccaggaaactcgactgtgtgacaactgcaaaaaagaaattcctgtgtttaactttaccatccatgagatccactgtcaaaggaacattggtatgtgtcctacctgtaaggaaccatttcccaaatctgacatggagactcacatggctgcagaacactgtcaggtgacctgcaaatgtaacaagaagttggagaagaggctgttaaagaagcatgaggagactgagtgccctttgcggcttgctgtctgccagcactgtgatttagaactttccattctcaaactgaaggaacatgaagattattgtggtgcccggacggaactatgtggcaactgtggtcgcaatgtccttgtgaaagatctgaagactcaccctgaagtttgtgggagagagggggaggaaaagagaaatgaggtttgccatacctcctaatgcatatgatgaatcttggggtcaggatggaatctggattgcatcccaactcctcagacaaattgaggctctggacccacccatgaggctgccgcgaaggcccctgagagcctttgaatcagatgttttccacaatagaactaccaaccaaaggaacattacagcccaggtttcaattcagaataatctgtttgaagaacaagagaggcaggaaaggaatagaggccaacagccccccaaagagggtggtgaagagagtgcaaacttggacttcatgttggccctaagtctgcaaaatgaaggccaagcctccagtgtggcagagcaggacttctggagggccgtatgtgaggccgaccagtctcatggcggtcccaggtctctcagtgacataaagggtgcagctgacgagatcatgttgccttgtgaattttgtgaggagctctacccagaggaactgctgattgaccatcagacaagctgtaacccttcacgtgccttaccttcactcaatactggcagctcttcccccagaggggtggaggaacctgatgtcatcttccagaacttcttgcaacaggctgcaagtaaccagttagactctttgatgggcctgagcaattcacaccctgtggaggagagcatcattatcccatgtgaattctgtggggtacagctggaagaggaggtgctgttccatcaccaggaccagtgtgaccaacgcccagccactgcaaccaaccatgtgacagaggggattcctagactggattcccagcctcaagagacctcaccagagctgcccaggaggcgtgtcagacaccagggagacctgtcttctggttacctggatgatactaagcaggaaacagctaatgggcccacctcctgtctgcctcccagccgacccattaacaatatgacagctacctataaccagctatcgagatcaacatcaggccccagacctgggtgccagcccagctctccttgtgtgccgaagctcagcaactcagacagccaggacatccaggggcggaatcgagacagccagaatggggccatagcccctgggcacgtttcagtgattcgccctcctcaaaatctctacccagaaaacattgtgccctctttctcccctgggccttcagggagatacggagctagtggtaggagtgaaggtggcaggaattcccgggtcacccctgcagctgccaactaccgcagcagaactgcaaaggcaaagccttccaagcaacagggagctggggatgcagaagaggaagaggaggagtaatggtgtctccagagactttacatcggttcctgtcttctgtgcacagcagcacttgccgctgtgcaggcccacctctttggctctttgggtgggagagtttttccagattttagatttttctaggttatggccattttgtgtcttttgaggttgtgctgtgggggtttgggtttgagggaagggagcagggtggcggttgaggaacgcttcagccttagctgctacctttcggcagcagtgaaatacaagctgcagcctcggctgccagggctcccttttgacttattgtcgccactgccccttggtgctgtgtggtcccagtggaaggaggggaagattttggaaacctggtagccaccagtaaggtgattctctgccctgttggggcctaaatttgggggcttttgggcaacctctccgtgtactgcgtctgtccacactcgattgggccccaggtgtgtatgaggcgctctggtaaggtgctcaggccagttgcaatgtctgtcagtaacgaggcttttgatgtgttgagctggaggtgagtggaccgggggctgtgttttaagctgcttccttggcatttggcatcactgccttctggttcccgggggagcatggatcttttgtcctcactgctttctaatggggagggctgagggctccctgtccccacagcaggtatgttgggctctgccccagccccacacttgctttgaaaaccaagtgtcagagccccttccccttgtttttattttactgttataataattattaacttccttgtaatagaaataaagtttgtacttggagttcagctc

SEQ ID NO: 61304 - DNA, 2174 bp, Homo sapiens
ttttttttttttcatgccaatgaatttattgaaacggaggtctgtacacaggcaaacctgtactgtggaaactaagacatcaggagctctctccactcccctggccctccagggtggggtgaggagggagtagaccttgggggcagaggacaggaggggagttacagctgtaggaggggcggggccaggttggacggtgcgaatcgacgttttctttaagaaaaaaattataacaatctatttacacccgggggccagggaagggaagaggagacgggctgggctggttctatttacaagggacacacagaggggagggggtctggaggaggtgaaaatctgggggaggtggaaagggccaagggggtaaggaagtcctcatccccccaacacccctgtccttctcttcccctcccccacaaccagtttaaaatcctccttaaaaagccccaccacaggggtgaggctggtgagggagggactggaggtggggacagggactcatttacctctgccctctagtctaggggcccagccagggcaggagcttgatgggctatggccccccttcccagcccctcttggggctcccagatggaagtggaagggtgcttggtggggccctcaggaggagttagtgagggtaggtgtggcatcggtcgactgccagtctgagctggtcggagtctcagttaaagcttgtgaggacggggtgaagggtggtagtgcccgctggggaacctccaagtgaaggagggatgagaatggcgttgagagacggttggattggagagttcaccagcactgaagttgaagagagggggaagtgggcggttgttaggcagctgggttcccagacatcgcagttcatcaaagaagctgtgcgcacaggcctctagtggggagagccttgaggatggggtgtactcccagcaggctagagcagagcgcgatggcctctggcggcgttcgagatttgaacacttttgtcccaggggtgagctttaatctgagggaacttgaactccgtgtagttggggttcatctctcggatttgttcccgggttggtgttcccagcaccttgatgatctccaccagctggtccaccccactgtccccagggaagatgggctggcccaagaggagctctgccagtacacagccagctgaccaaacatcgatggatgaggtgtaatcagtggctccaaagatgagctctggggcccggtagtagcgagaacagatgtaggagacattgggctcccctcggaccaactgctttgcactgccaaaatcgcagagcttgaggacagcagtgtcagggtccaccagcaggttctggggcttgatgtcgcggtgacacacgccctgggagtggatgtaggccaagctgcggaagagctggtacatgtacaccttgacatagaggatagggatggtcaacttggccttggtgaagtggcgggccacccggtacactgtctcgggcacatattccagcaccagatttaggtaaagctcgtctttcttctcgccactggagtagaaaaagtatctcagcctcacaatattgcagtggtccagcttacgcatgatctgcagctctcggttcttgaacctcttgtcctggagaaccttcttgatggcgactagttccctggtctctgccagccgtgcctggtacacgaccccaaatgagccattgccaatcactttgatgtccgtgtaagccacttcttgggagcgctctgggccttggcctagagtggctacgactgtggtcaccttcccgctgtcacggcccagcttcaccccgggcggcgggaagctagtgcctgcgccggggcctccgctgcctcctccgccgctgccgccgggtccacccccggagctcgaggccccgacgcccccacccatggccccgacagatgcctttccgccgccggtgccgcctgggccggaggccgagcctccggggccgccgccgcctcctccgcctccgccgccgggctccgcgaacgagctagtccgcgccctgcccgagcccccagggccgcctcccgaaggcccgccgccgctcatggcgccgagcacaggcccaggctgcggggctcgggctgcccgggctgccccagccgccgccgcggccgccgcctcccccggagcccaagcc

SEQ ID NO: 61305 - DNA, 1409 bp, Homo sapiens
gcgcccgccgccatgtcggtgctgggcgagtacgagcgacactgcgattccatcaactcggactttgggagcgagtccgggggttgcggggactcgagtccggggcctagcgccagtcaggggccgcgagccggcggcggcgcggcggagcaggagggaactgcactacatccccatccgcgtcctgggccgcggcgccttcggggaagccacgctgtaccgccgcaccgaggatgactcactggttgtgtggaaggaagtcgatttgacccggctgtctgagaaggaacgtcgtgatgccttgaatgagatagttattctggcactgctgcagcacgacaacattattgcctactacaatcacttcatggacaataccacgctgctgattgagctggaatattgtaatggagggaacctgtatgacaaaatccttcgtcagaaggacaagttgtttgaggaagagatggtggtgtggtacctatttcagattgtttcagcagtgagctgcatccataaagctggaatccttcatagagatataaagacattaaatatttttctgaccaaggcaaacctgataaaacttggagattatggcctagcaaagaaacttaattctgagtattccatggctgagacgcttgtgggaaccccatattacatgtctccagagctctgtcaaggagtaaagtacaatttcaagtctgatatctgggcagttggctgcgtcatttttgaactgcttaccttaaagaggacgtttgatgctacaaacccacttaacctgtgtgtgaagatcgtgcaaggaattcgggccatggaagttgactctagccagtactctttggaattgatccaaatggttcattcgtgccttgaccaggatcctgagcagagacctactgcagatgaacttctagatcgccctcttctcaggaaacgcaggagagagatggaggaaaaagtcactctgcttaatgcacctacaaagagaccaaggtcaagcactgtgactgaagcacccattgctgtagtaacatcacgaaccagtgaagtctatgtttggggtggtggaaaatccaccccccagaaactggatgttatcaagagtggctgtagtgcccggcaggtctgtgcagggaatacccactttgctgtggtcacagtggagaaggaactgtacacttgggtggtaagtgaacgctaagcattttggaacagtgctgtaagcctaattgtttactgggcccacgatgtctaagcattttattagttgaacctatactaagggagtggcaacatggggtgatggaatggaagctcttataagagcagggattttgtctgtttagttcactgatgtatgcccagggctggtacatattaggtcacctataaatgttttt

SEQ ID NO: 61306 - DNA, 1186 bp, Homo sapiens
aggacggggcccctccatacctggccctttcccgtgatgttaaggtggcacggccctgaaaatatatggggtagttatcccacccccgcgggcagagattcaggaggggggattgtaagagacgccctcctctgtacgctcgatataaagagaagtcccctcccatccctcccatgtccctttatgatatattgagacagctcagtaaatattttctaaaattatttaccccctgggggcagagcctgagcagggaggatgataagggatgccggcctctgtatgattgaaataaagagaaataaccaactctagcagctgtgagtcattctgaaagatgtagagaatacagggactagaagcgcttatattctcccaccaaatttgcatacatgacaaaaaacaggcaaaaggcagagagacccaaagacgggatttattgggggcccaagtcatcacctggaaagtcaagaaagcctttgaagtattcgcggggatcttcatgatgagcaggaacagggctcatcatggcaaggactgtgaataaagtcaaaaaactgaactctgttgacctgggcgcaccccactgcaggtaacggaaaagttccccctgttcccacaggcaaatgcaattacctcggcccacttcgtaagggtgcacagaacgaaacaaaatctgtcaaagctgggaacccaaggaaacttttgggttttaaatccatccatccagcacctcactgtcttcctcgatcttccctttccactcatagatggatgtaatctgagggatgaggttgacgcaggctgctaggcgcttctccaccacggccctggcgatctccttggcgaccttctcgttggggcaagtaacaaaggctgcagagaccgagcccggaacgtagccagagccggaatccgaggccggcgagggctgggtcggagggcttccagaggccatggtcagcaagactcggggtagcaacaaaaggcgggaggccacaggcagcagcgccggcatccaaacaaaagacaggagcagagaggccactccgccgagcaggaccgcgggagcccgccccccactcatgcggcctacgctggtacaggagagttgatctcaaaggccacacgtcacacggagaaacaaccccaggaagagcggccctcgtgccgaattcgaatcgat

SEQ ID NO: 61307 - DNA, 765 bp, Homo sapiens
ccttcccaatctgtctccccagaagacacaggaaacaatgcattgcctttgattgctgggcagacctggggttccaggcgggcagcagctgcaggctgaccttgcagcttggcggaatggactggcctcacaacctgctgtttcttcttaccatttccatcttcctggggctgggccagcccaggagccccaaaagcaagaggaaggggcaagggcggcctgggcccctggcccctggccctcaccaggtgccactggacctggtgtcacggatgaaaccgtatgcccgcatggaggagtatgagaggaacatcgaggagatggtggcccagctgaggaacagctcagagctggcccagagaaagtgtgaggtcaacttgcagctgtggatgtccaacaagaggagcctgtctccctggggctacagcatcaaccacgaccccagccgtatccccgtggacctgccggaggcacggtgcctgtgtctgggctgtgtgaaccccttcaccatgcaggaggaccgcagcatggtgagcgtgccggtgttcagccagggttcctgtgcgccgccgcctttgcccgccaccgccccgcacagggccttgccgccagcgcgcagtcatggagaccatcgctgtgggctgcacctgcatcttctgaatcacctggcccagaagccaggccagcagcccgagaccatcctccttgcacctttgtgccaagaaaggcctatgaaaagtaaacactgacttttgaaaaaaaaaa

SEQ ID NO: 61308 - DNA, 1165 bp, Homo sapiens
ttttttttttttagtttaaaaaatatttattatagaaatgtacatttaattagttttaaggaatgtacctgaccacagtgttaatatatatttcttcaaatttgcaaactttacacctttaagatatctacaaagatgatagtttatttacaagttttacaagaaatgatcacttcacaatactgttgacacagttacgattgaatcttcttctcactttttatttcactctgtacttatagaaagaacagagagtatgggtgaagttccatcccagtgccagggaaagcccgtagagcagaatcagaggtgcaaatggatacagaagaattactgtatttttcaaaaatggcaatgctggaaaagaaaaggagtccaacactgtatcccaggaaagttacatagatataatagccaactgcaaccaaccataaggtatttccaactaaatatccaataaatgtgtctgtcaggataacatggttgatgaaaaaaagctggataaaatgcaaaatgaccaggagtggataaaaagcattgagatgcacatcaaaagcatagccccattccacatcatagtctctgctctgtcgtttcactaaatacttgttagagatgaaccacattaaagttgctatcagaagaccaacgcctacacaatctatgagtacaacccaaaggagaagctttattgtctcaaagaatcccatgtccagcacaaagccaaatcctatagtggacacacagagccagatacttaacaggaccaagaaagcagggtcatctctggcccactggtccttcgtctgttttcgataatgaaaatttctgtaaactctctgtggggatgtgaacaggtagagcatctgccaggcagcaaattcaaagtccatttgccgaaagcggaaaagccttctcagatatttgtagcgtttcgctccggctgtgtgtcttgccgcatccctggaattcaagactccgttcccctgcactaaggaattcactgaagtactcggtaacatcttcctggagtcctgctacagcctcgacccacgtccgaaccagcccaccacctcctcccagcagccgaccccagccgccaccgggcgggcttcccttccctcaacggagccggcccttggggcgcgccgcgtcacgggaaccg

SEQ ID NO: 61309 - DNA, 2103 bp, Homo sapiens
  misc_feature (1)...(2103): n = a,t,c or g
ggccccataaaaaaaattttaccttgccagcccgcggaagttaaacttggtcctctaaaacgggcccccttttttttttttttcaatgaaaacttttatttactggtaaaatataaaaatccaggtctcttaaatccacacaatctctccaaatatttggcaagattgattccaagtccatatgggtggataacaagaacaaaggggtctctgctcagagagacgtattgtcgttcagagttctgccctgcttccctctaaatgctcaccaacctggactcttctaaagtgggcagacaagccctattctaagcgtaggaatagccccatttgtgcgtgacactaagttcctccaatggtccaaactgagcgtggatgactatccaacatcacacacaaatgcacatcccctctctttacaagacatgcagaatctcaagatatgtcaagatatgcagcaagtttaatacctgaaggttaacataaatgacaacaggacacagatgcaatgctacagtcaaatgtggttggggatggaagggggcagagggacactggatatcatcacagcaaccagtgagtgagtcctctggtgccctgaggaggttgtgagccacttgactcgtgtcacaaagaatggagtaaactaacaactctgaaagacaagagggtggcagcattgctgagatgagactcaaggcaggggtctgcagctctgtcacagagtgttaatgctcaacgatgcctgggctcaagagcgttctggtcagcattttaacatcagaagaagggcttcttcaggacacactcccttctcttaacatgaggtgaagaaacccatcccattctgaaaccaggtcccataataccttggtcttttgatacacagcagcactacacaccactgtgccccccagccagcttcactctgtctgctaagcacccactctgcaaacagatctcagagtgaacaaatccagaggaggtgggaggagccaccatggtgggatgtgagggacaggagttggctggaggagcagatgggtcccatgtcaggaacctcctaggcatcatgaagattgctatcactcagaagcaccttttccccaggtttgaaggctggcatcccaaggtaggggcagctggcacagcggaaggcatcgcccaggtagcagtttccacaagctgacttgggttgggagctcatctgttcccttgacttctctttttccagttcttcggcaaggccacaggtgcagttcttacaggccttcctctttttcccttccccacaagaagcagcccgcagggaagctggatctggcttcttcaaatcttctggatccagcagctcatctgagtcaatgagatccatgctgtcgtcctccatatcgttggctgagagggtccaccagcttggcagcagcagggtccacagcaggtttcactgaaggagaagacttcttggtgatagaaagcttaagctgcctagaagaacccacttcaaagtttggttttttgcctgtgatctgaacaaacagcaggttgtcactttcatgaccaaggtgttctcgaacagactgtacttcctcaggggttaggggctcccgctgcagctctttcacttccacaagaccagaaagagtcagggctgaacacagcttagatgctgtcttcactttgctattgttatctacagctgtctctactggctccttcagaaaaagacatccaccaggccgaaggatccgggcgatttcagccaaaatctcagcactgtgcagagtggtgcttcctgggactaaacattgcaacagctgcttgatgttttccacagacacgcggccctcattgccggttaacgcttgaagcttatccaccagacctttcagagcctccactggggatgacttatcccagaccactgccacaaactggccagcagagatcccaaaatctgccattcttgcagtgcagtactgacagacctaaaaactgctggccaaaagggaatcaagactgncgcctgggctcgctcccggcttctctccagccgtcgactcncacgcctcgcgctctcgcgagaggagganggtccacgga

SEQ ID NO: 61310 - DNA, 2739 bp, Homo sapiens
agaggcgcgaatgcgaacctggcccgtgcggaaagggcgcggagagccccggcgcggagcaggcggtaaactgaagataacaccaacttggcagcgggagtttgtgtcttctgtatgaaatctccctgcctctgcacctggttgagttgctgtcattattttaggggacggtattcagaattcgagcgcaggagctccgcttctccacctgctcccggggagctattgggatccagagaatcacccgctgatggtttttgcccaggcctgaaacaaccagagagctacgggaaaggaagggcttggcttgccagaggaattttccaagtgctcaaacgccaggcttacggcgcctgtgatccgtccaggaggacaaagtgggatttgaagatccactccacctctgctcatggcgggccagggcctgcccctgcacgtggccacactgctgactgggctgctggaatgcctgggctttgctggcgtcctctttggctggccttcactagtgtttgtcttcaagaatgaagattactttaaggatctgtgtggaccagatgctgggccgattggcaatgccacagggcaggctgactgcaaagcccaggatgagaggttctcactcatcttcaccctggggtccttcatgaacaacttcatgacattccccactggctacatctttgaccggttcaagaccaccgtggcacgcctcatagccatatttttctacaccaccgccacactcatcatagccttcacctctgcaggctcagccgtgctgctcttcctggccatgccaatgctcaccattgggggaatcctgtttctcatcaccaacctgcagattgggaacctatttggccaacaccgttcgaccatcatcactctgtacaatggagcatttgactcttcctcggcagtcttccttattattaagcttctttatgaaaaaggcatcagcctcagggcctccttcatcttcatctctgtctgcagtacctggcatgtagcacgcactttcctcctgatgccccgggggcacatcccatacccactgccccccaactacagctatggcctgtgccctgggaatggcaccacaaaggaagagaaggaaacagctgagcatgaaaacagggagctacagtcaaaggagttcctttcagcgaaggaagagaccccaggggcagggcagaagcaggaactccgctccttctggagctacgctttctctcggcgctttgcctggcacctggtgtggctgtctgtgatacagttgtggcactacctcttcattggcactctcaactccttgctgaccaacatggccggtggggacatggcacgagtcagcacctacacaaatgcctttgccttcactcagttcggagtgctgtgtgccccctggaatggcctgctcatggaccggcttaaacagaagtaccagaaggaagcaagaaagacaggttcctccactttggcggtggccctctgctcgacggtgccttcgctggccctgacatccctgctgtgcctgggcttcgccctctgtgcctcagtccccatcctccctctccagtacctcaccttcatcctgcaagtgatcagccgctccttcctctatgggagcaacgcggccttcctcacccttgctttcccttcagagcactttggcaagctctttgggctggtgatggccttgtcggctgtggtgtctctgctccagttccccatcttcaccctcatcaaaggctcccttcagaatgacccattttacgtgaatgtgatgttcatgcttgccattcttctgacattcttccacccctttctggtatatcgggaatgccgtacttggaaagaaagtccctctgcaattgcatagttcagaagccctcacttttcagccccgaggatggttttgttcatcttccaccacctttgaggacctcgtgtcccaaaagactttgcctatcccagcaaaacacacacacacacacacacacacacacacacacaaaataaagacacacaaggacgtctgcgcagcaagaaaagaatctcagttgccaagcagattgatatcacacagactcaaagcaaaggcatgtggaacttctttatttcaaaacagaagtgtctccttgcacttagccttggcagacccttgactccaggggagatgacctgggggaggaagtgtgtcaactatttctttaggcctgtttggctccgaagcctatatgtgcctggatcctctgccacgggttaaattttcaggtgaagagtgaggttgtcatggcctcagctatgcttcctggctctccctcaagagtgcagccttggctagagaactcacagctctgggaaaaagaggagcagacagggttccctgggcccagtctcagcccagccactgatgctggatgaccttggcctgaccctggtctggtctcagaatcacttttcccatctgtaaaattgagatgaattttggtgttgaaagttcttcctggagcagatgtcctagaaggttttaggaatagtgacagagtcaggccaccccaagggccatgggagccagctgacctgcttgaccgaaggatttctgacagactatctttggggatgttttcaagaagggatataagttatttactttgggcatttaaaagaaaatttctctcgggaataattttatagaaaaataaagcttctgtgtctaaggcaaaaaaaaaa

SEQ ID NO: 61311 - DNA, 3758 bp, Homo sapiens
ttttttttttttgagtattccagcattatttatttgatcagagtaaaatacacttcccatcactacaaactgagcacaactacagttgtctacacattcatatttttgacgtgccaacattttgcattctacatgaaacatttggtttaaacaaaatcttaagaattctctattttgtttcccatcttccctcctgttctctcccatcctccaaagatgttttatattaactgctatgagatttatttgccggtcacgtaatacggaggacagcagggaacaacacaagatttaccatgcctaggggatgaatggcaaacccaactttggctaatgtcattgagaacaacttggaagcgtgagcagagatatctcatgaagtggcagtgaacctacatttccatttatcagaagcaaacatggaaggttacatacatgatgaagtattggaagttaaagacttaagacacaaaatcactaatttaaaagaacatgcaacatgagtatcaacttgctatgtagtgtacatgtaaatgacccaaatattcacctctagcatcctgaatctcttcttactacagctgttatttgtacagccactgaatgtagattagtaaatactgacatcacaatgttgacacatgcagggagggggagatagataaagcaacagttcttccttccaccttttccaaagtctcaggattaggggaggtaataagttttggaaagaaactcaaatgcaacctggaggagagttggacaagccacattttccactcatgggaaagaagcggaccattctgctactttcccaaagacaaagggactccttaaagggtaactgaaaaatgagcgctatcctcccagactgttttcttctatcaagtactgcatcatcggtaagcactgaatcctacctttcttaattatactagccaatgacttccttgttctcgttctttattctaagatttcccaaaatttgtaatatcaaatccaggctttagtttatttggaaagtggtttcagcacctggaagatgagctggctctggggctctggaaaatcatattcctttatccttgtcccagagaaaagtaggtaggaggtagaaggtttgcttttgtggctctggatggtggagaaaggtaaaaggaaaatgagaataatgggagggaagaagacaggttaaatctgcaagggtagatcaaaggtaaaaataaggtggaaaaacccattggtacttccctttttctttctttacacagttagttagtttgtttttttatagaaaaattagggttctacatttacacatagcctgagaaaatgaattacaggatagtgttaggctcacatgggtaagtaaaaaatctacagaaaaatctagtttcaactgacatggctgaacactgaaaaactgccaagaagttacccccaaaagatacagagaatgtatagacagggacaagtcaaagctcttcctgttataccctctccctaccctgttacagggctgagcagagttggtggtagatgatcataattcaagcaactattgctttttcttctatggctttggctgaaatgtatatgctgattgattgattattatttgattagtacatatccagatatattcagattttgacatttaatacacagcagaggaggctgcatcagacacatgacactctgtgacatccatttcattcacaccccccacccccacagtcagactgaaaactcacaagaaggtgtctgtggtgaagaacattacaaaggttataaatcttaatagggccctgagagtttttccccttatgcttaggtgaaaaaggcaatgaacaagatgctctcgttctttaagtgctttgtgcaacaacgtccgtgtcgatgccgaaatctttttttaaatctttttttggaggaatcttttggacggaggcaaaagtcttcctccagacttccagtctcagaagcttcgatttccgccggtggtgacgctccagtttaccctacggtgatcacacgtgtgctgatatacctctttgtgcccacgttcctccttggggtcagtcctgcagaccctgcatcaaaatgcttttcagagagtctgtggactttggggacgtgtcatctgggtgaaatgctggggctagggaaggagcccggaaattccttggtgactgcaaaggggatggcggaggatgtgggggatctcttggggctaccacaggtccccattgtgcagtttccacagaagctcctcgttttccatagagagtcgcttgttgactttcgactccttctccagcgactcttgcagaacagcctgctccgtggaaagctgccttgagattgccatgtgcttgtccatccgagctttcaattcttcattctcctgctggaaacgcttcaatttgtcaaccaatgctgtgttgttgtccaccagtttctccattttcattaacttgatgtcctgttgatgcagtttctcattcttgatctctaacacagctttcaggctttctaactcctgttctagatacatgatctgaggatttttcaaatttgctttttctcttgctcttcttttttgttcttctgatttcaatttttcatttaaagcatcattttcactcttcagatcattgatttgcttctctagcgattcctgcttctcagaaagtaaatcttcaagcgatttcttttctatttcatggcctttcttaatttctgaaagggaggcttcataggccttctttagcaattcaagtttctctgagtggctagcttcaatttccaacttagaggtttcatgcgcagcatttaagttgtcaaactgctcttgcaattgcattttgtacttctctgcttcttcaatgtaagtgtcccgaagcttttcatactccctggtgtaaaactctttaagccgattctctcgttctgttttttcagcctggtgctgctggacgaatgcttcatacactgtttgtaactcattcctggctttttctaatttctcacaggtggttgaagcagtgactagctctccccggaggttaacaagttcttgagatagggttttgtgttgtttcagtgcttcctcccgctcagacagcaggtgctgaatcacaactgtcaatgcctcaaacttggtattaccacaggcaagaagctgcttgagctgcaggataaatccactttggttttcacattttgttttatattgcgtcaattcaagtgttttctcagggggcagcgcatcgggagctgtctgtggctggatacataagcttcgaggattcttttgcctgctcttttcaactgtgtggaaaacaacagtgcttctcctaaaccctgaaggaagtcgaaggtttcgaagcaatcctttggccgtcagtcgtatgtgaatggtggataaggagaatttgggagacaacaacatgtcttcggagcaggtggcgagatttcacagaagaggcaatttccatggactgtcacatactgtctttttaaactcagtactcttcaaggccaagaaatacagtcagaggaaagatgcctacacagcaaatgtcattccaccagagaggcatagaagaaaaaaatcccccagggctggccaagtgtttctggcttccgttttcactttcagatgttgccaaaatgatgctcttcctctgaatacaatctccctcctgcaggtctagaagctgcctctgaaccacatcacactgtgcatgcttgtg

SEQ ID NO: 61312 - DNA, 2128 bp, Homo sapiens
tcaacacgtgaattcccacagaagctgctcagggactatccatggcctccccgtggccaacttgagtctgctctgcagctttaggcccgacttggaaggcccatgggctgcagatgaggaaactgaggtccagacagccgaagagtggtagtgtccaggacacacaactgggccggcggcggcggctgccccgagggacgcggccctaggcggtggcgatggggaccgcccggatcgcacccggcctggcgctcctgctctgctgccccgtgctcagctccgcgtacgcgctggtggatgcagatgacgtcatgactaaagaggaacagatctttctgctgcaccgtgctcaggcccagtgcgaaaaacggctcaaggaggtcctgcagaggccagccagcataatggaatcagacaagggatggacatctgcgtccacatcagggaagcccaggaaagataaggcatctgggaagctctaccctgagtctgaggaggacaaggaggcacccactggcagcaggtaccgagggcgcccctgtctgccggaatgggaccacatcctgtgctggccgctgggggcaccaggtgaggtggtggctgtgccctgtccggactacatttatgacttcaatcacaaaggccatgcctaccgacgctgtgaccgcaatggcagctgggagctggtgcctgggcacaacaggacgtgggccaactacagcgagtgtgtcaaatttctcaccaatgagactcgtgaacgggaggtgtttgaccgcctgggcatgatttacaccgtgggctactccgtgtccctggcgtccctcaccgtagctgtgctcatcctggcctactttaggcggctgcactgcacgcgcaactacatccacatgcacctgttcctgtccttcatgctgcgcgccgtgagcatcttcgtcaaggacgctgtgctctactctggcgccacgcttgatgaggctgagcgcctcaccgaggaggagctgcgcgccatcgcccaggcgcccccgccgcctgccaccgccgctgccggctacgcgggctgcagggtggctgtgaccttcttcctttacttcctggccaccaactactactggattctggtggaggggctgtacctgcacagcctcatcttcatggccttcttctcagagaagaagtacctgtggggcttcacagtcttcggctggggtctgcccgctgtcttcgtggctgtgtgggtcagtgtcagagctaccctggccaacaccgggtgctgggacttgagctccgggaacaaaaagtggatcatccaggtgcccatcctggcctccattgtgctcaacttcatcctcttcatcaatatcgtccgggtgctcgccaccaagctgcgggagaccaacgccggccggtgtgacacacggcagcagtaccggaagctgctcaaatccacgctggtgctcatgcccctctttggcgtccactacattgtcttcatggccacaccatacaccgaggtctcagggacgctctggcaagtccagatgcactatgagatgctcttcaactccttccagggattttttgtcgcaatcatatactgtttctgcaatggcgaggtacaagctgagatcaagaaatcttggagccgctggacactggcactggacttcaagcgaaaggcacgcagcgggagcagcagctatagctacggccccatggtgtcccacacaagtgtgaccaatgtcggcccccgtgtgggactcggcctgcccctcagcccccgcctactgcccactgccaccaccaacggccaccctcagctgcctgggccatgccaagccagggaccccagccctggagaccctcgagaccacaccacctgccatggctgctcccaaggacgatgggttcctcaacggctcctgctcaggcctggacgaggaggcctctgggcctgagcggccacctgccctgctacaggaagagtgggagacagtcatgtgaccaggcgctgggggctggacctgctgacatagtggatggacagatggaccaaaagatgggtggttgaatgatttcccactcagggctggggccaagaggaaaaacagggaaaaaaagaaaaaaaaaa

SEQ ID NO: 61313 - DNA, 2474 bp, Homo sapiens
  misc_feature (1)...(2474): n = a,t,c or g
agagggagggaacgatttaaggagcgaatactactggtaaactaatggaagaaatctgctgcaccactggatattgggagtgtgtggcatgcatcctcatcatcaggaaactctaaaaaagaaccgagtggtgctagccaaacagctgttgttgagcgaattgttagaacatcttctggagaaggacatcatcaccttggaaatgagggagctcatccaggccaaagtgggcagtttcagccagaatgtggaactcctcaacttgctgcctaagaggggtccccaagcttttgatgccttctgtgaagcactgagggagaccaagcaaggccacctggaggatatgttgctcaccaccctttctgggcttcagcatgtactcccaccgttgagctgtgactacgacttgagtctcccttttccggtgtgtgagtcctgtcccctttacaagaagctccgcctgtcgacagatactgtggaacactccctagacaataaagatggtcctgtctgccttcaggtgaagccttgcactcctgaattttatcaaacacacttccagctggcatataggttgcagtctcggcctcgtggcctagcactggtgttgagcaatgtgcacttcactggagagaaagaactggaatttcgctctggaggggatgtggaccacagtactctagtcaccctcttcaagcttttgggctatgacgtccatgttctatgtgaccagactgcacaggaaatgcaagagaaactgcagaattttgcacagttacctgcacaccgagtcacggactcctgcatcgtggcactcctctcgcatggtgtggagggcgccatctatggtgtggatgggaaactgctccagctccaagaggtttttcagctctttgacaacgccaactgcccaagcctacagaacaaaccaaaaatgttcttcatccaggcctgccgtggaggtgctattggatcccttgggcacctccttctgttcactgctgccaccgcctctcttgctctatgagactgatcgtggggttgaccaacaagatggaaagaaccacgcaggatcccctgggtgcgaggagagtgatgccggtaaagaaaagttgccgaagatgagactgcccacgcgctcagacatgatatgcggctatgcctgcctcaaagggactgccgccatgcggaacaccaaacgaggttcctggtacatcgaggctcttgctcaagtgttttctgagcgggcttgtgatatgcacgtggccgacatgctggttaaggtgaacgcacttatcaaggatcgggaaggttatgctcctggcacagaattccaccggtgcaaggagatgtctgaatactgcagcactctgtgccgccacctctacctgttcccaggacaccctcccacatgatgtcacctccccatcatccacgccaagtggaagccactggaccacaggaggtgtgatagagcctttgatcttcaggatgcacggtttctgttctgccccctcagggatgtgggaatctcccagacttgtttcctgtgcccatcatctctgccttggagtgtgggactccaggccagctccttttctgtgaagccctttgcctgtagagccagccttggttggacctattgccaggaatgtttcagctgcagttgaagagcctgacaagtgaagttgtaaacacagtgtggttatggggagagggcatataaattccccatatttgtgttcagttccagcttttgtagatggcactttagtgattgcttttattacattagttaagatgtctgagagaccatctcctatcttttatttcattcatatcctccgccctttttgtcctagagtgagagtttggaaggtgtccaaatttaatgtagacattatcttttggctctgaagaagcaaacatgactagagacgcaccttgctgcagtgtccagaagcggcctgtgcgttcccttcagtactgcagcgccacccagtggaaggacactcttggctcgtttgggctcaaggcaccgcagcctgtcagccaacattgccttgcatttgtaccttattgatctttgcccatggaagtctcaaagatctttcgttggttgtttctctgagctttgttactgaaatgagcctcgtggggagcatcagagaaggccaggaagaatggtgtgtttccctagactctgtaaccacctctctgtctttttccttcctgagaaacgtccatctctctcccttactattcccactttcattcaatcaacctgcacttcatatctagatttctagaaaagcttcctagcttatctccctgcttcatatctctcccttctttaccttcatttcatcctgttggctgctgccaccaaatctgtctagaatcctgctttacaggatcatgtaaatgctcaaagatgtaatgtagntctttgttcctgctttctctttcagtat

SEQ ID NO: 61314 - DNA, 5276 bp, Homo sapiens
gggaatgcaggttgaccacatctggctcctgccaggcaacgagcagcatctggcagagtaaggggccaacgcccatgggggatggaccctctcagttcttgggaattctgccccaaaagtcctttccctggggtctcagagggcccccgtccttcccttcttggtgtcactgtggcccctcactgctcttttcctattcaaacctgagtcccaccaggcccagggcttcacctgctgagctgttgtgtccttgcctgtgacgaggcctggccaggggtgcaggagcagaaggtggggagggttatagacgctgcaaaggccaagagaacatctgagagtggcagctggtgacctggccagaggggctggtgaggggcagagaacctggctagaggctgggtccctcaggtggtcctctcaggtgggaggcgagcagcaggtgtgggtgaggggaaggttctgatgacagctgcagaggcagggcccagtgctggcaggtggggggccaagaccctcccctggtgggacgttgaagccaaggatggccttggaccctgtcaggcccagcatggtcccgccacctcccccaccccacaggtggtgttgggacacctgggcgagatgtgagggtgggctcacttgagccactgaaaccagccaggtcttccctcaggccggacagatggcgcctgaccaaagttcctggcacctggaaaacccacaggtcaaagtaaggggagaaaggaccctgccctccctgttccacgtctgtggggggagaggacaaatgccaggcacagggtaggcggtgagaacaaggcactcaatgtgtagctggggcagagactcggcctctggggagctgagcgggttccctccacccccaaccgtggtggaaagacaagctcgctggggcggggtgggggtctggtctccacctgcccctcccactcagccactgaggacaaggtggggcccaggcttctgggagggggagctggcacaaaaggaagtcctggggttgatgtgtttgagcgttaggcgaagtggttccccccatcccccaaacggaaaaatgtcagtatttgctaagctgtagagacctgatgccgtgatgtggcctgttccgcctccacccattacacggggataacgctggggggtggcgggcccacaaaagaggtgctggaggagactctcccacccctggccgggccggggctttggggccggaaggttcacagtacgcggtttgtccgaacgtcacggcttttattgggagttgggggtttggggtgccctgtcaggtgatcagaacattaaaaatggactcaacgtaaaataatcttctggacccttctaggacgacatggccgtgaccggtagtgctagaaaccagtcttcgagcccccagtgccacaccatgtccccccacctgcatacctgtggtctccccctgccaggcaccctgtgctgggcacagggacatccctgccaggcctagagggccttgtgtttttaaggcagtcaaatcttgcagcctggttcagtgccagctccaagggctattgggtagctgcaagggtcaattatgcattcctgtgagtcaggtttttccaacccaggcccttgactctgccctgagcttgcagctggatacaaagtgcaaaaaagcttggctccttctgtattctttaaaaacaaaccaacaacaaaaaaaaactgtaaaaacagcctccatgtccacgcccttcctggcccatcaggtcctggtggcatctcagggtcctgccccccccacccccacccccaccccggctcctgcaggccgaccttattgctgtgctctgggcttgggggcggctgaggtgcccctctgtcctccagcagggcacgagtgacctgagaggcccactcaggcagaagagacgcaagctgggccgtccaactggtttcaactgccagctttaccaatgcagcatttattttaaaattaaattaaattaaaaaaaaaaaagattgcatcaccaggtagttttctcgattaaggaggcagcctgaccagggtgggccgtggccgggcggcagcagcatcacactgggccatttaaggcagctccttctggcggggcatctgtcttcccgtcctttgtcaattgtccccagggtgggccaccatggctgggggctgctgtgactgccatgatgggcccctaggggaaccgccacggccaagtgcagaaagagactgctggggttgggtattgccggggcaggccttgcttcagtgcctgtgggtgatggccacagtaagcctcgggggggcacagccaacggcttgggggcagcagtcactttccttttggccccggggcaaggcagggcttaaaagccggctgtcagcacacccgaccctgccgacagcctcctctgtcctggccactgtgggcagcgggggggcctcccggccgggacccctgctcaccgcatccatggcactcgctgccttctggtcgccatcctcgctgtgggagccccggaggggagctactgtcagaggccagcaggggggcccttcctggtgacccacacgttccaggcacatggagaaaccgggctgaaggctttctcaaggccttgggtccggctgccctcagcatggctgcattctgtgtccaccggagagctgcacctgggccctgactcggagcagcagaaaggttggaagtcagtgaacttggcccagcctttctcctctggagctgaggtgccagctgcccacacactggaacccacgtccctcaccactcctggggctgtgggcgttgagttcgctggctcatcaaacactgccgtccacatggcgcctgcttctgagtcaccctccacagggggggcttccttcttcccgggggccggtggggcacctgccccaggtgcatctctgtgtgcttccaagctcgccttcccatcctggcctccacgctctgggccattctttgagcaactctctgaagcatggggggctccaaacctgggtctggccatcacccgggcagcacagcgagtgtcactgtcctcccagatgtcctcgtcctcatcatcatcaaagggctggatgcggtcactgcagcaggcctcaaacagagctgcgctgggactgtcctcgtcagcgtcgatgttgaagttgatctctgcgatcctgtcaaacggggcattgatgttgtcgtcctggtcggcaaactcctcatcattgaagccaaactgatccacgaagttggctgtcatctgctggatacaggtagtcagaaaaggccaggtccacagtgttcctgcggttcgtctccgtcagcgtctcctccacgaagctctcccagcggccacggcagtccgcaagggagccctcggatgacctcgctgatgtgcgtctgcacagggccccgctccaggttctgcaccaccgcgttggcgatccgtgtgaggtggcccatgttcccacgtctcatgccacccgctgcctgcgtgtggtcgttggcttcccaggcctccaggatcctctgcaccaggcagcacttctggaacaggtgggtcaccattgtgttgtcagggaggctggcggccggctggggagtctccaggctccggttcccgttctcatgcggaggctccaccctgctctgggatccgctggcttctgtcctctcctcacgggcagcgtgggagagaatagcggctatgcatagttccacttggaagtgcaaaaagttattccaggtgtacttaaagaacaagtccagcagtaagtccatcgtgttgagccggcagagctcctggttgatgctgggtgtgtttgtgtgcagcagtgctgccatgaggcgggcgccatgcagacgggcattccccaggggctcctccagcacaccaatggtggtcaggatcgctttcttcttgggcgggttgagcaggagctggtggaagtccttcagccgaggctcgatgccgtgtagtacgctgctgctgacagcgtatgacctttccagtccctgagaaaaggagtccaccaagccctctgtcccaacccgcctggtttccagcaaggtgagtaacacctgagtcccactgacgaggcagctctccgtccggtctccatcaaacatgttcttcagaagctgctccacacagtcctgcgactccagcgctgtgaggagcgggtctggctccagagcctcttgcagctgactgccctggtctctgcccagcctaactatgtcacagagagtctgagaagcatttgactgcctatcttcatcctggctcgggtggatcaactccacaagcctctggatgaccttctcttcattcagccagtgcaggacgtcctgccggagcccggctggctccacacagctgaccaggcgcagcagcaggtccataagcgctgaggtgccgatgtgcttcaacaccaggctgatgaacttgtccttcttcttcaaaaacgtaatcacctgttcggtttttcttgcaatgagattgccaatggtcttgctgaaaaaactggcgagcagaggattgagaggcggctcatggtccaagaagtcgtacaggaggctcagcaggctctcgtccccaccgaggcggtcgctgatctgcggcacatcacaagtcagaagctcacaggctgtgtttggatatttgaagcggaccttctcctccatgtccaggggcggatcctgtgtgatgaggctcaccagctcctccatgcactgctgcctgcacaggaagtccagcagcttctggttctgagccttacactcctgcaagatgtcatcttcatccattaactcctgcagcgtcacatgctccttgtccagcagcttgtcaacatgggacgtggtgttcaagtcaaacttccagaacatcgtgacggccgcagagcttctgtggaaatctcttgtttaaatcatgtattcaggcaaaacagaaaaacatttgtggtttttttcttggagtatatgcagctttaagaaaatttttttcattcagtggaagatttataatctctttacctgccctgcgggccgggcgtcgcggcagctcttcggaggcccgtgtggaggcccgagcggaggccagggcgctggtggaggcaaagcccgggcggcctcgggcgggccgcacacacatgggcccggccgagggcgcagcgcctacggacaccggcacggccggccggcggctaaagaccgactcggggccgcgggcggcactccgatcgc

SEQ ID NO: 61315 - DNA, 3794 bp, Homo sapiens
ctccccccggtgtttaaccgccgcccccggattttatttttggggccccataaaaaaaataatacctttccagcccccggtcgtaaaatttgtttctttaaaaagggcccccccttttttttttttttgtcataggagtgtggtttttttaataccatctgtgccaagcaatatcaaagttgtccatactctccaagtttgtcctatttttaatagacaatattaaaaattttttaagtgtgtgctgataaagagactagtcacacctctgaggggatttaaaaatgagaagccacataaattctcttccttaaaaaacagccatttcaaaagattttctttaatatcataaaatattttcatggacaagtgagctagcaaacacacatgcaccaatgtgccttttgacaagagtaccccctaccccgactcccacaccaaaatggacatgagattggagaaatgaatacagcagatggaacagatagaagaaaaaaaaatcagtaaaaaggatggaatataactttgtgcttggttattttcctatgtcgcaacaaaacaagacatttcggtgcaaatagttaatctttcctctttttttccatttgtctggtggagaaaaaatactttttctataataaaatatcgtagttttttggtttttaaccgtaactttttttttcttttttggcagaaaataattttgtaaactggtcacttcgcgggcagggagggatcgatgccacgctgggccccagctcacccggggtggaggctgggatgctgaaaccgaacccaggcaggagatgggccgacggcggaggtgcaaggcagggcacggcgcacaagacgaggggcggccgggcggggtggattagaggtcactctcgccgtacagcgccgtggagaaggacatgtagtccagagcacctggcacggagtcggggccggtgtagggggccatccgcgcgatgcagtactcagcctggtcgggtggcagctcgcggcgcagctcgtccatggtaatgtagttcttgtccccagccaggatcttgaaggaagccatgacttggtctgctgtatctgtgtcggctgtctcgcgggacatgaagtcaatgaaggcctggaatgtcactacccccaggcggttggggtccacaatgctcatgatgcgggcaaattctgcttctccctgggggtcgttgccaatatcataacccaagctgatgaggcaggctttgaactcctcgggacccagtgtgccggagtgatcccggtcaaagtggttgaaggaggcccggaactcattcatctgctcctggctgatgcccttggcatcccgggtcaggatctggttctctacctcattgatggtcctggcgatggtggtgagcagctgctcccagcccacacggatgtgctccatggtgtagttggtgtgcttgttgtcgaagatgagcgcctcctggatgagctggtggtcgccctccagctgatcaatctttggcttgtagttgacgatgctcttctcatactgccgcaggtggctgagctggtcctccagggtcccatgcatctcaatggagatcctcccgatctcctccatcttggtctggatccagggcccgatgacattggcctgggctccaaactgcttgcgtagcctctcattgtgctgctgtcgggcatgctcctccgtcagagcttggtccctccgaggcaccagctgccgcacgtggtcccatttgccattgatctcctgaggcgtgatggttgtgtaggggttggtgcccgccatattgacgtggtaggtctggacaatcttggacacctcattgtggatgcccaggatggccaggcgctccttgtcggcatcagggagggtggccttgaactgctcatgggctgtggtcagtccctggatctcctcaatggtgtgcacaatgaaggtgtcctgcaggtcctccatggccccctccatccagttgttgaagggtgcagcccgcttggcatactccaagtacagctggtcaatggtctccagcagtttctcggtccgctccagagcttcccttcgcttctgagttagggcccccagattgtcccactggtcacagatcttttggcaacgggcgttgacactgggtgagtcataatagtccagctcattgagctcctgtgcgatggcggcaatctgctccacacggtcctggtgggcagccaggtcactctcgaaggcctcatgcttcttgagcagggccttgatctccgagagggtggcggtctcatagtccttctgtcgcagcatggcctctttgccgtcagtccaggcctcgtggatggaggcccttctgccggaaaacttctctgcccaaggtggtccaaatcgctccaagcttccgtatctcattcaagcaaaccactccctcaatagcccttctccacatgctcccaggcaagcccccaggcattgttgatgtccgagaccatcctgccctcagagggcatgaaggcaggccggttgctgagccgcagcttggtctgcagcgtgttgaagttgatctccagctggcacttctcctgcaccttgggcggcttgtgcaggcgccggtagtcccggaagtcctccagcttctgttgcatggcatgcatggtgttctcgggcacccggttctccagccacgggattgtgcggcggatccactccaacagatcactggccagcttctcgtagtcttccataagctgctcgttctcctggttgacggccaacaccttgcagatgcgattggctgctgtctccgccttctgggctccagagaaggcgtggtagaagctagacacgtaagtcatgatggctttctcatccggtcgggcagttccaacgatgtcttcggcatccagcatcttggggatgtccaggtacttctctgccacgtcaaaagccatattcagatttgtgagtggatcatccttccgcagcttcccgtagtcaatcagctcgggccggtgtcggtggatcaaagcacagaagccgaggccatccttccagcttatgtggaagttctggatgttgacatttttgtaaggggctgtctttctctgacaccacaggagcagcccttccttggctgaagtctcttccacggagatgtcctggatggcaaagcgcaggatgatggtccagatcatgcccagggtcatcttcacattcccatccacgatttcttcggctccgatggacaccagtttgacgcctttgctggctatgaaatccagggccttgttgacgttggagatcttgtgcactctcatcttgcctcgctctggcttggccaagcgttcacctgagatgacctccagcagcagcatgagcttcaggccatcccggaagtcctcttcgatgttctcgatctgtgtccccgccttccggaggtgggagttacaccatgccgtgaatgtctttctctgctgcttctcccaggccgggtccaggagcaggtcccggtcccagtcctcttctggctgcatgtaatcgttggtttgctgagaatcataatggtccatgatggtgcgcgcgtgctagggtctggatttcttcctccaccttctctctgagcaacggctgctgccctggcgtggggagggagtagggctgggctgggctgggctggcggggccgggctcgctcccctgcgcccggttccgccgcggcgctgctggcgaaggctgctactggcggcgacagcggcggctgggctcgcggactgcctgcctctgggcgggctcgtgcc

SEQ ID NO: 61316 - DNA, 1357 bp, Homo sapiens
tttttttccacattggaggcacaagtttattgagcacccggatatggaagatggcaccgggcacagagccgtgggactggcctgcaggccccgcacccctcaccgtgtgcttgtccttgggggtgcctcacaaagaacagcaccttggcttccatcggctgcttgagagaggtagaaggtggcagtcccgctgtagtgctccctggatgtgccgcatggcgttgggggagcaagcggaggcctccagcagtgtcaccgtgcagccaccgaagccaccgcccgtcatgcggctgccataaaccccaggcacagcaagcgcagcctccaccagctggtccagctctgggcagctcacctcatagtcgtctctgagtgagcggtggctctcacaccatgaggcggccaaaggctctgtagtcgccacgtctcagggcggccgctgcctgggccgtgcgccgaatctcccccaccacgtgccgggcccgccggaagccctctttgctcaccaggtccctggcagcctctagctcttccagttgtacctcccggaggctttccttgcccagcgcccgggccacttcttcacattggcgccgccgcacagggtactcgctggaggccagggagtggcggacattagagttggtgatgagcacggccagcttggggtccgagagtggcaccaggctggtctccaaggacctgcagtcaatgagcagcgcgtggcctttctgtcccataagtgagatgaactggtccatgatgccacagggcatccctgcgaagctgtgctcggcctgctgacacacctgggcgcgggcagctattgtgcccgagtctggacagagctgctggaggaaggtgtacgtggccacttccaaggatgctgagctggacaggccaccccccaggggcactgagctgaccaccactgcactgaagccagggaggggggcagctgggtagtactgaatcactcccttgacatagttggcccaccgaggagtcccaggctccagcgagcgctgggctgtgggcagtggaaactgcagccgctggggctcatcggcaccctcagaggtggtgaggagagacaccagcccatccttgcgggggctgcccaccagcaccgtcatgagctccagagccataggcagcaccaggccctggttgtagtccgtgtgttccccgatgaggttgacgcggcccggcgctgacacggccagctcgggctcggccccgaactcctcccggaaggctcgccgggcctcggccagcagctccgcgacctggggctgtctcaaagcagccatgacgcgcgcctgcagctctgcacagctgctccgcacagccccgt

SEQ ID NO: 61317 - DNA, 854 bp, Homo sapiens
gggtcgacccacgcgtccgagtaggcagagagcggacctggcggccgggcagcatggcggggctggagctcttgtcggaccagggctaccgggtggacgggcggcgcgccggggagctgcgcaagatccaggcgcggatgggcgtgttcgcgcaggctgacggctcggcctacattgagcagggcaacaccaaggcactggctgtggtctacggcccgcacgagatccggggctcccgggctcgagccctgccggacagggccctagtgaactgtcaatatagttcagcgaccttcagcacaggtgagcgcaagcgacggccacatggggaccgtaagtcctgtgagatgggcctgcagctccgccagactttcgaagcagccatcctcacacagctgcacccacgctcccagattgatatctatgtgcaggtgctacaggcagatggtgggacctatgcagcttgtgtgaatgcagccacgctggcagtgctggatgccgggatacccatgagagactttgtgtgtgcgtgctcagctggcttcgtggacggcacagccctggcggacctcagccatgtggaggaagcagctggtggcccccagctgggccctggccctgctgccaagccttcaggacagattgcgctgcttgagatggatggcccggctgcacgaggaccacctggagcgggtgttggaggctgctgcccaaggctgcccgagatgtgcacaccctcttagatcgagtggtccggcagcatgtgcgtgaggcctctatcttgctgggggactgaccacccagccacccatgtccagaataaaaccctcctctgcccgcaaataaaaaaaaaa

SEQ ID NO: 61318 - DNA, 1125 bp, Homo sapiens
gcacgaggtcgtcatggaggcggtattgaccgaagagcttgatgaggaagagcagctgctgagaaggcatcgcaaagagaagaaggagttgcaagccaaaattcagggcatgaagaatgctgttcccaagaatgacaagaagaggaggaagcaactcaccgaagatgtggccaagttggaaaaagaaatggaacagaaacatagagaggaactgggagcaattgaagctgactactaaggagaataagatagattctgttgctgttaacatttcaaacttggtgcttgagaatcagccacctcggatatcaaaagcacaaaagagacgggaaaagaaagctgcattggaaaaggagcgagaagaacggatagctgaagctgaaattgaaaacttaacaggagccagacatatggaaagtgagaaacttgctcaaatattggcagctagacagttagaaattaaacagattccatctgatggccactgtatgtataaagccattgaagatcaactgaaagaaaaggattgtgctctgactgtggttgccttgagaagtcagaccgctgagtatatgcaaagccatgtggaagactttctgccatttttaacaaaccctaatacaggagatatgtatactccagaagaatttcagaagtactgtgaagatattgtaaacacagctgcatggggaggtcagcttgagctaagagctctgtctcacattttacaaacaccaatagagataatacaggcagattctcctcccattatagttggtgaagaatattcaaaaaaaccactaatacttgtatatatgagacatgcatatggcttaggagaacattataattcggttacacgactgagttggtgcgctagtaattcccaggatcatgactgagagattgttaataaaagcattgagtgggggtaaaaatacgaagatcattactttgaatgggaagaagatgacaaagatgccctcagcattaggaaaactgcctggcctgaagactctagtccttcagaataacctaatccccaaagtgtgtccagagttatgcaacttgacccaggactggaagataagcaagaatctgaagctggtgcctctccaagtatta

SEQ ID NO: 61319 - DNA, 2250 bp, Homo sapiens
ttttttttttttgacgggaattaaataacttttgactttatttcactagagataaaaccagcagcatcacagcttgagccccttacccacccccttgtcctccccaccccccactcttctgcctaatgtcggtaatgggggcttcgggatcgggaccttgagcgccttcgagaagagctgtattctcgactgtatcggggggagggtgagcggctctgccggctgtactggcgttcccactcttctctctccttctctcggcgttcccgctccttcatgcggatcttgcgggccatggctcgaagctcgtcttcccgctcctgccgctcatgctcctgctggatcatcttttcttgtgccgccttcttatccgccttgaactgcctgttcagcgccttctgcatcctcagtttctccttctcctgaggcgtcagcttgggtgactttggcagctcctgtctctttaccagccggcaggttcggtctttttcagcttctcgcccacagcaggggacgcggccggcctggtcagcttctctcttgcgggtgatggcgaggggctctggctgcggctgcggctgcggctgcggctctggctggggctggggctatggctgcggctgcgagtcaggctgcgactgcgggacgggctgagggaccagctgctgcggctgcggctactgctgtggtgcctgaggccccggccgccccgcctgtagcggtcccctgagtgggagcggctcctgcttctgcgccggggcccgtaaccaccacgccgggcgggcgagcgggagtaccggtgtccgtctcgggagcccccacctgagtgccgccggccacggctacgggaccgggaatagcgccgggagcgggagcgggagcgggaccaggagcgggaccgggagcgggcgtggcggccggaacggtagtagcccccaccacggcgagagcgggagctggagcgagagctggagcgggagctggaggtcctcgaggcagaagaggaggaggaggaggaggaggagcggcggcgggcgctggcattacgtcccggggcggggccgccaggctggggaggtgcggggggcttccctgtggtgactcctgatgctgctgcggcagcagcggctgcggctgcctcctcatcgctgcccccaaaactggtgatgaacgtgatcttctcctcgcggcccggggtcggggagcgggagcgggagcgggactctgagctggactccgagggtgaccgcttataggggtcataggtggggctgtctcggcgggcatagctgggtgggctgatcttgcgacccctcagccgcttctcccgaaactctctccgctggcgtcgagagcggcgtcccgagtacatggccttctcctcctcaagagccttggcatgcttgatggcctctgcctcctccttgtctttccggagcatcctgacgaagtcaccgtcggccatgccataagtcgtggcctgtttgttgagatctgccacctgctcctggttcaattcatccacgtccacctccacgtcgatgtcggggatgacctcatcttcgtccgagttgctctcctcctcggccgctgactcctcctcctctggcttttctgccgccttctctacctcggccaccgtgctgtcctcgtaggtataaccgatggaagccttcttctctgccagcttcttcttctcatcttcgctgggtctctggaggcctccgtacaactcatcaatgtagatctggtacaggcactgctcctttgagatgccggcaaagtcgttctgcaccaggcctctgtagcgctcgtagttacacttccgttcgtccgactcctgttctggggagatggtggtgagcagagggggggtgtagtcggggatgtggtccaggtgggcacggacatcgaatcggtcaatcatgttgttggtgtccccctgccagggcatcatattaacagggctctcagcggccagggcgactgcagaatccaggtgcaccttgcaagctcggccatgtacctgcaggaactgggctgggtccttcttgatcttttcataatactcccgtcttcgctccgccctcttcttgtagtcgaccatcatgcctcgaagcttccgctcatgcttccgagcctcgtgccacattgtggtgaggccaagcctggggcctcaaccggctggtcgccgcctcccaccgctgcgctcgcgcgcggcccgcaccggaagcggaaatgaaaggccgc

SEQ ID NO: 61320 - DNA, 3097 bp, Homo sapiens
tttttaaactcaaaaactaaaagggtttactatttcaacatattacttcctccagaactctcataacatgtacataaataagaatgtttctcatttcttaatttattaacaatgtatacatttgaaaaaatatatacaatatttcaaaacaagcccttcaagactatatttaagcaatgacatccaaggaagcagaactcaggtaccatgtaatatttggaaaatatggtaacttgaagattaagatttctcttccttgctggttactctgaagtctccaatatacaaaggttgctcctaacgtggttttcttattgagccaagcatcttgatgggtcaatcccagtttcattttctccagtactgggcaaacttgtgaatctgttccaccactgcagcaaaaagagcatggacactctcatcaatcagactctgcatgtaatgcacagcctcttcatccgacaggtctaagcggaatttatcctgaacctttttcacagttttatctggttcaagtgcaatatctggaatgtttgcatcaaccatcaaggaaaacaagttcaaaatcagattagaataccttcgcaggtggaggaaagccgtgtaacactgtttacggaactcttggtactgctcactctgtgtgccccccattccttctaccatttctttattcagcttcattggtggaggaagaggctttggatcccgacccaaaatatatccaaagtctatgtggaagagtttgcctgtttttgttagcaaaaggttatccaggtgcctgtctccaactccaagtatataggtgatcacgcaatatccagcacagcttttaacgtaagtgtccatgacctcagcactaatcccatttggcccattctcacttggtgcatattttctaaaaaagttctgaatgcttccctctgtatcaagaacttcagccacaggaactgactggataaactgcatgaagccatgttttgtactggtggctaacaccttataaggtgtcaatttcaagtccagattttctttccgtaacagcttgtccatgagtgaaatgatttgaagaataagttgatcttgacgtaaatcatctccatgcttaaatataactggatatttgcctccatcttccgtcttaaaaaacaactgtgcaggcataagggcacttttaaacagtgtagctgtttccggaattattcctctaattttcacttggggttctaaaggcaacgggataagttccacatctgacaaattcatcttttcattatctccaagcaatgcctgtagtctctcattctttttcttacgatttccactttcgcgttgtactgccttcattagatgcaccaaccgatctacaaatgtctgttgtgcagccagcaaagaacgcataactctgacagacttatcacccttcaacaatgcttggctgaatcttctcattacgttcaagtacatctcatgggtctttggatctctctgctgagtatcttgatcttcacattccactatcacataccagtataaataattagccagtgttgagtttttggaggctctcgatatcaagaaggtacagagatcttgttccagattttcgccatctggaacttcttttgtttttgatgccaggaggaggtgaagagactgaagggaagggggcctggttataatttgggagctatctatttctgcagaatttattccagaatttgacacattttctgacactgaactctgactatccttcttggtaggttccaatccattctttatatcatcaaaattttcatatttgagagcctggaccaattgtaataggtacatcaacaaatcctcatcatcggcctgtcgcaaccgggcaacagcataacgcctcacagttgggttggtgtaatgagaggataacagctccaaggagtcctctacatccatcggcttccattttcccagaagtgccaaggcctgtttggccccctgaggtagatcccaaataacagatgtcaggattttggtcaaggctttatcttgattcgtaagataatatctaaactcccaaacaagatcttgttcttcatatgtgggtggcttggatggaggataactcacaatattttttaactgatctctcggggaaggatagggtttcagatcgtggtcagaaggtccacttcttaaactccggggaaggttgtggtgtttgctctcaactaaattctccagggacatctgggggtcaggaactttcactaattcaaaacttgttaaaattggagatgattcatcaccgtccttttcataataaacaataccatattccttatcatcacacttgacacatcgaaatccacccatcaggtacatgaaattagaacttcgtttcacactctcatttatcatttctatttctctaaatgtcaatctatccagccaatctactttcaccatgtgtccttgtcgatgagctttggtgagcttggcaagacggctcatctgatcttctgagagagtgctacttgttctgccaggagtttttgtgggtttctgatccatctggcttctacaattaggccagactttcaagtcatgcatcccttggcgaaacatgccgtattttccaaagagcgaaaccgttgttcctcctacaggcactgcttttccgggaccatacacatcccatatggtgagggccacttgggcattcctgggcaggtcagggtattttactggtagtttcagccattcattccagttccatcttgtactaaatgctttgtaggatgttctcactggcaaggccaaaggcttcccttctgcaaaaacttgacaagtaacataaagatcagagcatgtctcttgatatagtcctgagaacttcaacattgggtcttccaggacagctttataactcttttgttctctcttcccttccaagcttcctatcttaagctggacgttgatatccaggtcacaactatagatgtagtgaaacttctctgcttcccccatcgcaccgtctgcaaaggtaccacctacagcgggaacttaggtacaggaaaaacaacataaatgaaccagctgagcccca

SEQ ID NO: 61321 - DNA, 2344 bp, Homo sapiens
cgggtcgacccacgcgtccgagaaaatggcactgcaaaccctatcaagaacggtaaaacaagtccagcatctaaagatcagcggactggaaagaaaacctcagtacagggtcaagtgcaaaaggggaatgatgaatctgaaagtgattttgaatcagatcccccttctcctaagagcagtgaagaggaagagcaagatgatgaagaagttcttcagggggaacaaggagattttaatgatgatgatactgaaccagaaaatctgggtcataggcctctcctcatggattctgaagatgaggaagaagaggagaaacatagctctgattctgattatgagcaggctaaagcaaagtacagtgacatgagctctgtctacagagacagatctggcagtggaccaacccaagatcttaatacaatactcctcacctcagcccaattatcctctgatgttgcagtggagactcccaaacaggagtttgatgtatttggcgctgtccccttctttgcagtgcgtgctcaacagccccagcaagaaaagaatgaaaagaacctccctcaacacaggtttcctgctgcaggactggagcaggaggaatttgatgtattcacaaaggcgccttttagcaagaaggtgaatgtacaagaatgccatgcagtggggcctgaggcacatactatccctggttatcccaaaagtgtagatgtatttggctccactccatttcagcccttcctcacatcaacaagtaaaagtgaaagcaatgaggacctttttgggcttgtgccctttgatgaaataacggggagccagcagcaaaaagtcaaacagcgcagcttacagaaactgtcctctcgccaaaggcgcacaaagcaggatatgtccaaaagtaatgggaagcggcatcatggcacgccaactagcacaaagaagactttgaagcctacctatcgcactccagagagggctcgcaggcacaaaaaagtgggccgccgagactctcaaagtagcaatgaatttttaaccatctcagactccaaggagaacattagtgttgcactgactgatgggaaagatagggggaatgtcttacaacctgaggagagcctgttggaccccttcggtgccaagcccttccattctccagaccctgtcatggcaccctccaccatcagggcctgagcggacatccgtgctgatcacaatactggtcctgccagggcgggccaagacaaaattcactacatgggtcattccatagtgcagatgtattgaaaatggatgattttggtgccgtgcccttttaacagaacttgtggtgcaaagcatcactccacatcagtcccaacagtcccaaccagtcagaattagacccatttggtgctgctccatttccttctaaacagtagatacttctgatggattctcggcattaactcctgtttcaaaaaagtgtgaacagttttatgaatttgaaagaaaatttggtagctctttatagcattcattcttaaagatcagtcagaataggtgatttctaaataaaccaaatagaagaatgaagtatctctacagggtagtaacttgattcctcttcaggagaaaagggagctaaattgcaagctctaactaagggtttctgctactgacatcacaacacagaaatgcaagtgtggtacttccagtgaaagcacatggcacctttctaggtgtgtagccactgagaagggacagtgaaactgttatttttgatatcagaatgtcatttttatgtgcatatccctaaaattagggttatttctacatacactagttacacttgtgaattttttttaaggtctcttttaaatttccaggacagttaaaaaccaatctaggttatcttaaagcatttagaaagttattatctggagagtgcagagatttcagtccatacacctttctccacaaagcagagccagaagtaactgacttattgtgccttaaaactctgtttcatttttaaaaacaagtgccattaaaatggaatatctaatgataagcatatgaaataatgtgtaattagctcaatttaactattccacaacttacatattccaaaacaatgttatacatgataaatatatataatttttgtcagttaaaacaaattaaaaaaatggactatcgtcgcacagaagcctagaacaaaaatatgaagagaaatatctgacatttgtaaagaaattataagaagaaaaaaagatacagaacagaaaacattcactactttagaaacactttatgcatggcttcttgccccaaacttttattgtgatggccctaataaagcagattattg

SEQ ID NO: 61322 - DNA, 626 bp, Homo sapiens
gccgagcccgcgagatgctccccagagctgcctggagcttggtgctgaggaaaggtggaggtggaagacgagggatgcacagctcagaaggcaccacccgtggtggggggaagatgtccccctacaccaactgctatgcccagcgctactaccccatgccagaagagcccttctgcacagaactcaacgctgaggagcaggccctgaaggagaaggagaagggaagctggacccagctgacccacgccgaaaaggtggccttgtaccggctccagttcaatgagacctttgcggagatgaaccgtcgctccaatgagtggaagacagtgatgggttgtgtcttcttcttcattggattcgcagctctggtgatttggtggcagcgggtctacgtatttcctccaaagccgatcaccttgacggacgagcggaaagcccagcagctgcagcgcatgctggacatgaaggtgaatcctgtgcagggcctggcctccctctgggactatgagaagaagcagtggaagaagtgacttgcatccccagctgtctccctgaggctccgccctggctgggagcctctggcggcccctcccctcccctgcccttaaccccagtaaagctccaaa

SEQ ID NO: 61323 - DNA, 2126 bp, Homo sapiens
gaggaaggacagcacagctgacagccgtactcaggaagcttctggatcctaggcttatctccacagaggagaacacacaagcagcagagaccatggggcccctctcagcccctccctgcacacacctcatcacttggaagggggtcctgctcacagcatcacttttaaacttctggaatccgcccacaactgcccaagtcacgattgaagcccagccacccaaagtttctgaggggaaggatgttcttctacttgtccacaatttgccccagaatcttgctggctacatttggtacaaagggcaaatgacatacctctaccattacattacatcatatgtagtagacggtcaaagaattatatatgggcctgcatacagtggaagagaaagagtatattccaatgcatccctgctgatccagaatgtcacgcaggaggatgcaggatcctacaccttacacatcataaagcgacgcgatgggactggaggagtaactggacatttcaccttcaacttacaactggagactcccaagccctccatctccagaagaaacttaaatcccagggaggccatggaggctgtgatcttaacctgtgatcctgaaactccagccgcaagctaccagtggtggatgaatggtcagagcctccctatgactcacaggttgcagctgtccaaaaccaacaggaccctctttatatttggtgtcacaaagtatattgcaggaccctatgaatgtgaaatacggaacccagtgagtgccagccgcagtgacccagtcaccctgaatctcctcccaaagctgtccaagccctacatcacaatcaacaacttaaaccccagagagaataaggatgtcttaaccttcacctgtgaacctaagagtgagaactacacctacatttggtggctaaatggtcagagcctccctgtcagtcccaggggtaaagcgacccattgaaaacaggatcctcattctacccaatgtcacgaggaagtgaaacaggaccttatcagtgtgaggtacagggccgatatggtggcatccggaagtgacccagtcaccctgaatgtcctctatggtccagacctccccagcatttacccttcattcacctattaccgttcaggagaaaacctctacttgtcctgcttcgccgagtctaacccacgggcacaatattcttggacaattaatgggaagtttcagctatcagggacaaaagctctctatcccccaaataactacaaagcatagtggggctctatgcttgctctgttcgtaactcagccactggcaagggaaagctccaaatccatcacagtcaaagtctctggactgggatattgaccctggaattctacttagttcctccaattccattttctcccatgggaattcacggaagaggcaaggaccccactctgtttccaggaaggccctattaagctgggagggtggggacaacttcggatgttaaattttcatggggggaaaaccccttgttaccctggacatgtggaggccattcaggaacttcaccaaaatgtttcggacaccataacaacaggctactcaaactgtaaaccagggataacaagttgatgacttccacactgtgggacagtttttcccaaagatggtcaggaacaagacttccccattcatggattaagggctccccacccccccctaaactgtcccttgcctcatgccctgccctctttccacttgggcagggttaatggcagttcatttaggaattttcacatgtagttaggtttttgaggggttaacaacaggagtgttcaggatatggttcatcttcaaccttcaaactttttacgttaacatcttcagggggggaaatgtgggcttcttctccatcttggcatacaggggctcccaataggaaatggaacacaggggttattggcctgtgtgttttgcagaggaggtgggtttctataaagagtaggaaagctgaaattatagtagagtctcctttaaatgcacattgtgtgggatggctctcaccatttcctaaggagatacagtgtaaaaacgtgacagtaatactgattctagcagaataaaacatgtaccacatttgctaaaaaa

SEQ ID NO: 61324 - DNA, 1005 bp, Homo sapiens
ccccatccaagactcaaacttagaaacttgaattagatgtggtattcaaatccttagctgccgcgaagacacagacagcccccgtaagaacccacgaagcaggcgaagttcattgttctcaacattctagctgctcttgctgcatttgctctggaattcttgtagagatattacttgtccttccaggctgttctttctgtagctcccttgttttctttttgtgatcatgttgcagatggctgggcagtgctcccaaaatgaatattttgacagtttgttgcatgcttgcataccttgtcaacttcgatgttcttctaatactcctccttctaacatgtcagcgttattgtaatgcaagtgtgaccaattcagtgaaaggaacgaatgcgattctctggacctgtttgggactgagcttaataatttctttggcagttttcgtgctaatgtttttgctaaggaagataagctctgaaccattaaaggacgagtttaaaaacacaggatcaggtctcctgggcatggctaacattgacctggaaaagagcaggactggtgatgaaattattcttccgagaggcctcgagtacacggtggaagaatgcacctgtgaagactgcatcaagagcaaaccgaaggtcgactctgaccattgctttccactcccagctatggaggaaggcgcaaccattcttgtcaccacgaaaacgaatgactattgcaagagcctgccagctgctttgagtgctacggagatagagaaatcaatttctgctaggtaattaaccatttcgactcgagcagtgccactttaaaaatcttttgtcagaatagatgatgtgtcagatctctttaggatgactgtatttttcagttgccgatacagctttttgtcctctaactgtggaaactctttatgttagatatatttctctaggttactgttgggagcttaatggtagaaacttccttggtttctatgattaaagtctttttttttcctga

SEQ ID NO: 61325 - DNA, 2785 bp, Homo sapiens; identical to SEQ ID NO: 60914

SEQ ID NO: 61326 - DNA, 3182 bp, Homo sapiens
  misc_feature (1)...(3182): n = a,t,c or g
gactgtggaagcacgagcttacataagtggttaggcaagctggcgtgtggacttgtgtgggatgggtgcaggtctgcatataaatcatgttcctgggtttctgggtgtgaagcgcacaccgacggggacgagagcgcataggatggcgcttttagatacttccagtcttccgatgttgtgatcgcagtgtgagtgaagacactcaggatggctcaaggatccggggatcaaagagcagtgggggttgctgacccagaggagagttctccaaacatgatcgtttactgcaaaattgaagacatcattacaaagatgcaagatgacaagacagggggtgtgcccatcagaacagtcaagagctttctctccaaaatccccagtgtcgtcacaggtactgacattgtgcagtggcttatgaagaacctttccattgaggacccagttgaagcaatacacttggggagccttatcgctgcccagggctacatctttccaatctcagaccatgttctcaccatgaaggatgatggcaccttttatcgtttccaggctccgtacttctggccttcgaactgctgggaacctgaaaacactgactatgccatctatctctgtaagaggacaatgcaaaataaagcaaggctggaactggcagattatgaagcagaaaacttagcaagactccagagggcctttgcgaagaagtgggaattcatctttatgcaagcagaagcacaagttaagattgaccggaaaaaagacaagacagaaaggaaaattttggatagtcaagaacgagccttttgggatgtccacaggcctgtgccaggctgtgtgaacacaacagaaatggatatccgaaaatgtcgacgtttgaagaatccacaaaaggttaaaaagtccgtgtatggcgtgactgaagagtcccaggcacagagcccggtgcatgtactcagccaaccaatcaggaaaacacccaaaaaggaccatccggaaacagataacatttttgaacgcacagatcgacagacattgtttgaaaatgtccaaagtggctgaaagtttaattgcctacacggaacaatatgtggaatatgaccctttgataacaccagctgagccatccaacccttggatcagcgaagaagttgctttgtgggacatagagatgagcaaagaccccagccaacagcgagtaaaaagatggggcttttctttcgatgagatattgaaggaccaggtggggcgggaccagtttctacgattcctggagtccgaattcagttcagaaaacctcaggttcctggctggctgtccaagatcttaagaaacaacccctacaggatgtggccaagagggtagaagaaatctggcaagagtttctggctccaggggctccaagtgcaatcaacctggattctcacagctatgagataaccagtcaaaatgtcaaagatggagggagatatacatttgaagacgcccaggagcacatctacaagctgatgaagagtgacagctatgcccgcttccctccggtcaaatgcttaccaggatttgctgctggccaagaagaagggaaagtcgctggcgggcaagcgctgcacgggcctgatgcagtccctcctgaaccgtcctcaccgcagtccaggggcctggggccgcngggaccccacagggcaggcggcggcgctccacatctgcggacagagtttccttacgaggagacttggtcactgtgaaggagaaagagtgagggcaatgaagggcgatggtggggagactcggtgggtgaatggggagaccagaaagaaagagtccacagagcctgggctgggcccggtggaggctcctgtttacagccctctcttctttgtacagttgtattccaacactccactcgctaagaggccctgatcccagctcattcaggggagaacacgtcgtggggttcctgtcacgactatcacttgagattatattattatcctcactccctcgctgtctggagacggtcacaccttctggcaaattcaagaggcatgagtggaccgagagcacatccagcatttgcatcacctccctggcacctcccatagttacagccactacatccccaccgccgcctgtcatccctcacgtctctgtggccacccgggtgtcactgccagcaccaggcactgctttcacgtaaaatgtccaaatcacatcttcagcaagaaagcaacctcacggattgccccgcctcaaggtctttccaccctctttgatatcagcgttcggagaggtccccgccagcccggtggctgccctcaggtcccgtcacatgtctcaagggtccagcgttcgaggaagcactgttgtagatgacagagctttttgtttcacagctgcggggattctgctgaccatcttttagaaaattatttcataatttattctggctttgcccccttgctccttggtttattccctcatgttttactcaaaataaacatggccatgaactcaggggccattgggattctcccctctggcagccccaggtgggagctgggagggtccccagcccaggaggtggctggattgcagggctggcagcccccacgtggtggcatcctgacaggcacagtgagacccttgctgggtcaggtctcctttgtgtgtgaagctggggcagagtatgcctaccgaagggaccaggccaggccacagggctctccctccccagtctttatctgaaggccccagcccaaagcaccccctcctaaacccgggtcaccctagggggaaatgcaaaaacctgcaaaagatccacctgtattccctgtgtgtgtgtgtcaaaatgaccatttgccaacctggctgtgaggtaatgtatgtaaagcaccgagtcaggtgcctgatacgcagtaggtgcttaacaaacagtagctaatactatcatcattgtcattgttattgtgacacccatgagcccacagacagagctgtattaagtaacctgttttgaatccagacattcactcccccacttgctatgactaccctcctttgatctatttttggtcataggtaaaaaaaaaaatctctcttgggagcatataaacaaaaaacatagaagcaataaagcgatcgctggtatttcttttctcatgcagccaaattcgccaaaaaaaaaa

SEQ ID NO: 61327 - DNA, 2695 bp, Homo sapiens
ctcaaaaggggccggatttccttctcctggaggcagatgttgcctctctctctcgctcggattggttcagtgcactctagaaacactgctgtggtggagaaactggaccccaggtctggagcgaattccagcctgcagggctgataagcgaggcattaatgagattgagagagactttaccccgccgtggtggttggagggcgcgcagtagagcagcagcacaggcgcgggtcccgggaggccggctctgctcgcgccgagatgtggaatctccttcacgaaaccgactcggctgtggccaccgcgcgccgcccgcgctggctgtgcgctggggcgctggtgctggcgggtggcttctttctcctcggcttcctcttcgggtggtttataaaatcctccaatgaagctactaacattgctccaaagcataatatgaaagcatttttggatgaattgaaagctgagaacatcaagaagttcttatataattttacacagataccacatttagcaggaacagaacaaaactttcagcttgcaaagcaaattcaatcccagtggaaagaatttggcctggattctgttgagctagcacattatgatgtcctgttgtcctacccaaataagactcatcccaactacatctcaataattaatgaagatggaaatgagattttcaacacatcattatttgaaccacctcctccaggatatgaaaatgtttcggatattgtaccacctttcagtgctttctctcctcaaggaatgccagagggcgatctagtgtatgttaactatgcacgaactgaagacttctttaaattgggaacgggacatgaaaatcaattgctctgggaaaattgtaattgccagatatgggaaagttttcagaggaaataaggttaaaaatgcccagctggcaggggccaaaggagtcattctctactccgaccctgctgactactttgctcctggggtgaagtcctatccagatggttggaatcttcctggaggtggtgtccagcgtggaaatatcctaaatctgaatggtgcaggagaccctctcacaccaggttacccagcaaatgaatatgcttataggcgtggaattgcagaggctgttggtcttccaagtattcctgttcatccaattggatactatgatgcacagaagctcctagaaaaaatgggtggctcatcaccaccagatagcagctggagaggaagtctcaaagtgccctacaatgttggacctggctttactggaaacttttctacacaaaaaggcaagatgcacatccactctaccaatgaagtgacaagaatttacaatgtgataggtactctcagaggagcagtggaaccagacagatatgtcattctgggaggtcaccgggactcatgggtgtttggtggtattgaccctcacagtggagcagatgttgttcatgaaattgtgaggagctttggaacactgaaaaaggaagggtggagacctaaaaaaacaattttgtttgcaagctgggatgcaaaaaaatttggtcttcttggttctactgagtgggcagaggagaattcaagactccttcaagagcgtggcgtggcttatattaatgctgactcatctatagaaggaaactacactctgagagttgattgtacaccgctgatgtacagcttggtacacaacctaacaaaagagctgaaaagccctgatgaaggctttgaaggcaaatctctttatgaaagttggactaaaaaaagtccttccccagagttcagtggcatgcccaggataagcaaattgggatctggaaatgattttgaggtgttcttccaacgacttggaattgcttcaggcagagcacggtatactaaaaattgggaaacaaacaaattcagcggctatccactgtatcacagtgtctatgaaacatatgagttggtggaaaagttttatgatccaatgtttaaatatcacctcactgtggcccaggttcgaggagggatggtgtttgagctagccaattccatagtgctcccttttgattgtcgagattatgctgtagttttaagaaagtatgctgacaaaatctacagtatttctatgaaacatccacaggaaatgaagacatacagtgtatcatttgattcacttttttctgcagtaaagaattttacagaaattgcttccaagttcagtgagagactccaggactttgacaaaagcaacccaatagtattaagaatgatgaatgatcaactcatgtttctggaaagagcatttattgatccattagggttaccagacaggcctttttataggcatgtcatctatgctccaagcagccacaacaagtatgcaggggagtcattcccaggaatttatgatgctctgtttgatattgaaagcaaagtggacccttccaaggcctggggagaagtgaagagacagatttatgttgcagccttcacagtgcaggcagctgcagagactttgagtgaagtagcctaagaggattctttagagaatccgtattgaatttgtgtggtatgtcactcagaaagaatcgtaatgggtatattgataaattttaaaattggtatatttgaaataaagttgaatattatatatagttaaaaaaaaaagaatgaaatagaaaaaaaactaaactaattagaactactgtataat

SEQ ID NO: 61328 - DNA, 862 bp, Homo sapiens
gttttttttgtggaccccactcaaaacgtatttattgaatgacaatttcttagtacagtgtatactatccccaccaaaggaaaaaaacattaagagcaaaacaaggggtggggggtgggaatattgctaaagaaaattctaataagagttatctataattatagcttttatttattatatcttcattcaatcatttatatcacaattagtctaattgcattcttgatgaataactgacttcagcaaaggagtcaatccactaagcaaagttcatatatatttttcaagatgttcttctttcgatcttgagtctttactctcctggattcccaagagaactgcattagcctctagtacagttgtaatctgttgttgctcccaggaacctagacgtaagttcaagatctaatagccgcaaaccggaccctggttcctttctgggtatttctctccatccacttctggtcttctacatacacaatgaaactttccaccaaaatctatgtaccagatcattctccacaatatgaaagatccgtccaatgaccagtttatcctttgcaggtcccatctgtgtaagaggagaatgtctcagcatagatgcaaaggattccacattttttggagaacccttctgtaggggctccaccttctgtagaagctccgagtgccgctccaacgcgctcgcgaaaccgcctgcgcgcgtcttaggctccttggcattggaactaccactttcggatccactctcagtgcctacaccccgaaagggcctgaagaagagaaacactcgcagaaaatggctctcggcagccacagcacgggtccgacacagcgccgccatgacttctttacctctgac

SEQ ID NO: 61329 - DNA, 2142 bp, Homo sapiens
ttttttttttttgggatgggaaaactttattaggtttggtttccagcttcggccacgcgggctccgcccgccccgagctcgggtcacggggcgcccccgccgccctcctcgtcgtcctccacgtcgaggcccgggatgccgcggatctggcgttgcagcgccccacccagcaagggcacggcgccctcctcctcctcctctgggggcgggcggcggtggcggcgacacggccccgggggctggctctgggggcacgggaggctgcgccggcacgccctctgcgccctccggagatccctgccgcttcgccctgcgccccctcgtccagggcaccgccttcaagcctcctcctagctccttctcctcctcggggcttgtccggtgaaaagggttctcgccctttcaagtaagcgctccagcttcttgctgatgagcttgttgttgagaatactgcgggccaccatgagggaggacttcttggactgctccatcatgagcctgcggttccggttgtgattccatggtcttcagatgcttctggatgatgccaaactggcatgggaatgaagagggtcgcagtctgcacaatgggctgtcttcaccttcttcacaaaatgctccatggcaatttcctgggtcagatcctggtctctgtagatttgctggatgaggccatcaaggtcctccacggtttttcggagctcctctgtcttcttggtcttgttagtgacgtactcctgcagaaagtcagccgtctgcttagggagcttggtgcctacgtacttaaagtgttccttgtggaacttgctgtcaagatggctggccatctcgtcctcatagaaggtccggtatttgcacagagaacacacaaactggatcctttccaccatgcggtctcgctgccgctttttctgcttgtcctgactcttcttgcctgcctgcaacttgcgcttggtctggccattttcatcctgggtggttagggcccccttctctggatcctctttgccttcttctctcccatcctcttttccctcctcatcctctccgtccactctggagcccttctccacagcctcggtgccttcaaggccctctgtggcttccccctcggtgccctcatcattgtctgagtcgctgttgtccgagcagtccgtgcgggtggctttgctatctggctcatcaggactgccgccctgctttctcttcttcttcttggttcggaagtcggctgtggtccaggtcttccaggtccgcctcatctgcttcatgccattgccaaacccgaaaaccaaaacgggagccgcccgggaaggcgccccaacctcgcatgcccctggaacatgccgtactcggggaatgatgttctgggagaagagggagggcaagccgagaggcaccagacatgcactggccccgggcccccatggggtcttcccacatgcgcccatagcctgaggccattggccggccgctccgggcatcccgggcccagccctgtgccctgggaccgaaggtgtcgttgccacgcatgcggaactggtcgcggtaggcatcgtattggccctcataggccatttccatctcagggtcaagctcgctgtagtcatagcctgaccggtacaggtcgcgctcactcaggacggccctcgagtcgcaggactcataagagtcatacctttctccacttgagccgtacacgcctccttgcatcatgtctgtctccaaatgcggcaccatatctaagcgctggttaattctggataaaacggaatcggcactggcgctacccgaggcactagtgtttgcatttgtgtcagagctaggcatttcccaagagtgtgaagtggccataccatacccatagttggtggtgttatcctggccatagccatagccatagccatagccctcgtagcctctatttgtcccagagttccaagttccatatccataatcacaggtgggctgagcgctggtatccgagtatgtcgactgcaaagtggtttcagatccctggacaaagcctgtgtagctcatggtggcgggcaacacaacatccgacgacgccggcttctgctgctctgaacatccgacgctgcgatagctgctgctaaccacagggtcccccggacgcgtggg

SEQ ID NO: 61330 - DNA, 2372 bp, Homo sapiens; identical to SEQ ID NO: 61136

SEQ ID NO: 61331 - DNA, 897 bp, Homo sapiens
atttttttttccattttcataaacagatctttataatcatgtaaattaaacaattttgtctttaggagacgcgcacacagaacatagaggtaagagctagaataccagcaatcttaggaaggcaaaattaaatcatcttttgggagaagagagaaaattgtgaggagaaggtgccagtgtcaaagattggcttggcgaggttattttctctctgggagtctgggaggtgatgagctcctaccgctcactgcctctgttgtcttgcctattggttcctttctgggcaaggaagaacgttgtctctcttttagagttttgtaggcctctgtcagtaatccgtggaagacagctgtcctggggcccagaatggcaagttctgtaagtgaatgttttctgttgggatgtcatcatggaaaggctcaggtgtagtctggaatttgggttgatgaagactcattctataactcatacaattctcaaaggatgcttttggatcatctgggattttcattgttcttggttgtaccattttcatttcttgacatgtggagcacagctgttggtttctgagcagcatggagtcacactggttcctcctggcctcagacttgctatcagctgaagcctggcctccaagaagagctgctccatttctatctggagaagggatgagggcattgaagagtcgtggaaggcagctgtgacaggctactttaaaggcgactcaaacatttgagacgccatgtcctgcaggcctcatttcctccattctgtcttgctttctttcccagccctgaaacccaggtctttggtctttttcttctgttgcattcccttctcactcggtttccttacgaccagctcagcagcaatcggacgcgtgggcggacgcgtggg

SEQ ID NO: 61332 - DNA, 2254 bp, Homo sapiens
gagcctttgagtctgaggccaaagttgccccaccacccccagctaagtcttcagctgtggcatcctggcccagccacacaagctgtggaggtgcgggggaccaactcccactctgcccttggaccacaaccctccttgctgggcaccaagcccaggtttttggtttgggggggacactggcctgcttacagcggggagcagcacccagggcggctctgtcctgagcatgactgtgctgtcccacagaccaacaccaactacagccaggagaagcaccgctgcgagtacctgcacagcaagctggcccacatcaagaggctcatcgccgagtacgaccagcggcagctgcaggcttggccctagccgccctccccgatggcggggatctgggagggtcgggggagcaaaaggcggtgagagaggatttatttaaaaaaataaacccgaggaagatgctcatctgagccagcaccgccggctttcagggcagcccctgcagacgtctggccctggcgggtggctgcaagcccacctcggccctccctgcgcttcctgagcagtccctgcttatgatgggctccccaggaagcccactgcctcctccctggctgcagcctccggggttcagcctcctgtctcgccagaagactcctaggcccttggggtggcgcgcctgccttttctagttttatacaaagacagccacttttagctactgctaatgagacttgagtctatttttgtacaaaagagaagcaaaatcttttttctaaacctgtgcctccctctcctcggacacccagggtctagccgctgccctgggtcctgcctgcagtattacagaggtcgtcgaaaggtgcagctgcgttctgagggcgtggggaatgggcaggtggcctctgctggtctctggctctacgtttaggcacccctttccccagcctctcctccttgggcagggtctctgctccagcaagcaaacagggtggcccaggtggctattttgagaactccagctggtgcccccagacagctgctcagagccaagggggcagagggctttcagcgcccccaggcctgccctgctatttcaggccctcagctgtcgggggccactgtgtttctgtgctccaagttgagactcggccgcagcggcgtcagacttttctttgcgatgtcctcggttttcccattttgtttgctgctgctgctcattccacactgttgagaccttgtggtctcgatgctgctggcctccctccgtccctctgtccacttgtgggtcctggggtcgtcttagcagagccaccgccaaggtttgcactcagggaggggctgatggagggctgggcgccatggggtcagggaggccccagggacccatgggcagagctggggagccaggaggatgggtctgcctgctctgggggtgcaggctctgcagacaccccaattgctgctctgttgctgtgcctagtctagtgtcccccaaagcatcggggggccacgcaagtgtgggtgtgtgagtgtgcgtatgtggggaccccccagggcatggtggggtctgaggcgtgtgttcccatttagggctgaatgaagccatgacttggaaaggtggtggggggtggatggcggctgtgactcatggcccagggatcacatgggggtcactgctgccatcagcagtcaggcagggagaacagaaatgcaaaaatacagatgtgtctatttttctaaactggggggtggaggggtgcctcctgacagcttccaaagagctgactgtggagggcccacagtgtatcccacccctgcccgagagtctctctcctttgggaccccccgggttcccagagctccgaggaaactgatccttcatgtttcaatagctgttgttgtttttctctttgggccgggccgggccggggaagggccgagcaggctccaggaggcctccagagtcagctggaccttgctgtgtcgcccgcaggcagccctgcagacaccggtgaggtgggatgatttcaggaggtcccagcccgggactgcccgcccctctgccctgggaaccagtccaaggggctgtcagttgaatttgcctttttgttgttgttgttgtttttgttgtttatttgttctccttttaaggaattatgaagctaagaaaagttttgtgttttgggggttggtggacaaagttctagctgattaaatatggtctaacttattgatactattttttttcttttaatgg

SEQ ID NO: 61333 - DNA, 4601 bp, Homo sapiens
gcgaccgccggaaaagcgcttcggccacatccagcagcagtagtcagccgcaaggaccgggactcgaaggcccaccgcagccggactaagtcgtccaaggagccgccttcggcctacaaggaaccgcccaaggcctaccgggaggacaagaccgagcctaaggcctacaacgagacgacggtccctcagaccactgggaggccgggacgacagaccggtgtcacacagggcctctcagagcctgaggagccgcaagtcccccagcccggcaggaggtggcagcagctcctattctcggcggctgccgcgctccccgagcccctacagtcgacgccgctcccccagctacagccgccacagctcctacgagcggggcggcgacgtgtcccctagtccctacagcagccagcagctggcgccgctctcgcagtccctacagccctgtgctcagacggtctggaaaatcccgaagcagaagcccgtattcatctaggcattcaagatctcgtagcaggcacagattgtctagatccagaagtcgtcattctagtatttctcctagcacactaactctgaagagtagcctggcagctgaattgaacaagaataaaaaagcacgagcagcagaggcagcaagagccgcagaagcagcgaaagctgcagaagcaactaaggctgctgaggctgctgccaaggctgcaaaagcttcaaacacttctacacctaccaaggggaacacggaaactagtgccagtgcatcacaaacaaaccatgtgaagggatgtgaaggaaaattaaaattgaacatgcaccttctccctcaagtggtggaactttaaaaaatgacaaagcaaaaacaaagccacctcttcaggtaacgaaggtggaaaataatttgattgtagataaagccaccaagaaagcagtcatagttggaaaggagagtaaatctgctgctacaaaggaggaatcagtatctcttaaagagaaaaccaaaccacttacaccaagcataggagccaaggagaaggagcaacatgtagctttagtcacctctacattaccaccgttacctttgcctcccatgctgcctgaagataaagaagctgatagcttacgaggaaatatttcagtaaaagcagttaaaaaagaagtagaaaagaaactccgatgtcttcttgctgatttaccgctgccccctgagctaccaggaggagatgatctttcagagagtccagaggaaaagaaaacagcaacacagttacatagtaaaaggaggcctaaaatatgtgggcctcgctatggtgaaaccaaagaaaaagatattgactggggaaaacgctgcgtggataaatttgatatcatcggaattattggagaaggtacttacggacaagtttacaaagccagggataaagacactggagaaatggtagccttaaaaaaagtacgtctggataatgaaaaggaaggctttccaattacagcaattcgagaaattaaaattctccggcagcttacccatcagagtattatcaatatgaaggaaatagtgactgataaagaagatgctttggatttcaagaaggacaaaggtgcattttatctggtgtttgaatatatggaccatgatctgatgggactactggaatcaggcttggttcattttaatgaaaatcacataaagtcatttatgagacagctcatggagggtctggattattgtcataagaagaactttttgcatagagatattaaatgttccaatatccttctaaataatagagggcagataaaacttgcagactttggacttgctcgattgtatagctcaaaagaaagtcggccgtatactaacaaggtaattactttatggtaccgtccacctgaactgctactgggagaagaacgatacacaccagccattgatgtatggagctgtggctgtatccttggcgaactcttcactaaaaaacctatatttcaagcaaatcaggaacttgcacaactagaattaataagccgaatatgtgggagtccatgtcctgcagtgtggcctgatgtaatcaaactaccatatttcaacaccatgaaaccaaagaagcaatatcgtcgaaagttaagagaagaatttgtttttattcctgcagctgcgctagacttatttgattacatgcttgccttggatcctagtaagcgctgcactgctgaacaggctcttcagtgcgagttcctccgagatgtggaaccctcaaaaatgcctccaccagatctccctttatggcaagattgtcatgagttatggagtaaaaagcgaagaagacagaagcagatgggcatgactgatgatgtttccacaattaaagcccccaggaaggacttgtctctgggcttggatgacagcagaaccaacacaccccagggtgtgctgccatcttcacagctgaaatctcagggcagctcaaatgtggcacctgtaaaaacaggccctggacagcacttaaaccacagtgaattggcaattctactaaacctactacaatctaaaacaagtgttaatatggctgattttgtccaagtgttgaacattaaggtaaactctgaggactcaacagcagctaaataaaataaaccttcctgctggaattttggcaacaggtgaaaaacagacagatccatcaacaccacaacaggagtcttcgaaaccgttgggaggaattcagccttcttctcagaccatccagcctaaagtggagactgatgctgcccaggcggctgtgcagagtgcatttgcagttctgttgactcagttaataaaggctcagcagtcaaagcagaaagatgtgctactagaagagagggaaaatggatcgggacatgaagcgtcattacaactcaggccacctccagaacctagcactccggtgtcgggacaagatgacctcatccagcatcaagatatgaggatcttggagctaacgccagaaccagaccggcctcgaattctgcctcctgaccaacgacctcccgagcctcctgaaccaccaccagtcactgaggaagatctagattatcggacagaaaaccagcatgtacccaccaccagttcttcattaactgaccctcatgccggagtgaaggcagccctgttacagctgcttgctcagcatcagccccaggatgaccccaaaagagaaggtgggattgattatcaagcaggagacacttacgtgtccacttcagactacaaggacaactttggatcctcttctttctcttctgctccttatgttagcaatgatggtctaggaagcagttctgctccaccactagaacgacgtagtttcattggaaattcagatattcagtctttggataactacagtactgcttcatctcattctggtggtccacctcagccttctgccttttctgagtcatttcccagttcagtagctggatatggagacatttacctcaatgctggtcccatgttgtttagtggagacaaggaccatagatttgaatatagccatggtcctattgcagtcctggcaaacagcagtgacccttccacggggccagagagtactcatcctttgccagcaaagatgcacaactataactatggtggtaacttacaggaaaatccgagtggccccagcctcatgcatggacagacctggacttctcctgcccaaggacctggatattcacaaggatacaggggacatattagcacatcaactggcagaggcagaggcagagggttaccatactgagtatctgtttttcctcaggcacatcatttttatctggaaagacttttctagctgcaatttaaggcagcaatccaagagacttgaataataataattcaacaacagctttatttttatgtggagaagggtcttgcatacaatagtttaaaaaagacaaaaaaaacctttgcttaaattcatgctgttctaaaaactagatcgattgtacatcttcacaaattctagttaacaattttattttgtattcttgcagttttaagtggatgctaattttaggggcataagccttttatggccctcttgcagatcttctgaactatgcacatttgtgctttttttgtaagtttggaccaacttttatgtaacaaacagcccctccccacctccagttttacaacaatcagaaagggcactgatttatttggtatttttctttttacaaagctacctttagtcaaaggtcactgtcagtctttgcacctgctttcagtgttattgtgaaaggtgtactttgtgctcatttcagaaaataaaacacaacctttctcttgatgcaacagttttataaaaaaaaaaaaaaggggcggccgttttaaagaacccctgggggggcccaactttacccgggcttgcaacgtaatagttttttccttatagggggccgtattataacctacctgggaattttgggaaaggacccttatttttggggggggacatattgggccaacctccctacaaaaattaaaggctttagggaaaatataaaattttaaagggtaaaaggggtaaaactacctgcatatgcttgcggtttgg

SEQ ID NO: 61334 - DNA, 1565 bp, Homo sapiens
  misc_feature (1)...(1565): n = a,t,c or g
ttttttttttttgaaggatttggcaaagatttatttttttttccatttccagttttttaaagtagacacagatttgcttagaataaagctgattttaaaagcacacaaaagttgaacacaaaggagaggattaaattcaccaatgcagagtgataaagaggaaaagatactgagtaggtgccttcagcagaaaactgatcatccagggtgatcacctaataatcggagacttaattccttataatgcaaaagcaagaagagtttagtgtatgaactgtacagctgagtttgtagctctatcttggtttctgttgattatgaacaattagcatagttatatataatctttctttagtagacaacctgcatccatttaaattaaataatactttctacaatagtgtgatatataaggccacaatatttattttggacaaaccccttaaagtagcgattttattatcaatgttattcattcttttgaaatataaagtacttcagctgaattaaggttgcagataatttttaaaatacaacacacatcatgactagtatattaaaattatttatattcagatatttatatctaatatcaaatgaaaatttactaccaaattttcacagtagacattaatcagtctgacatgcttattgatcccataggtgtaattatagatcaacatgattttagtgtctattcttttattttactaaattaggaacgcagcatttacagaacaaataaacacaagtgacgtggccaccccaggatctaacagctcttcagtgagctatgttgcaagctcagaagtaatccactaacgaaccaagtcagactccagttcttcatcaaaaggtgctggtggaggttgtcagacgccttccaatatagatccccaatccgatggccagcaaatgagagagcagcagagatggaaggaaaactttcagaaattctgcagagaatatgccccctttcttcatgacgctcgtgttcctcatgctgagggtggccgtgcgcttcgggtgtttaaagaggaactccttggggggaatattttccggccgacttgaccaatcccatatccaatctgagtttttcttcaagatgctttcaacttctttccttctttcaatatcatcttcctcagactgtgagctgtttttctctccaatgctatgggtatctgtttcagaagccctgttggtatcttgtggtgtctgcgaagcaaggtgggctgtcacagtnaagaagctcttggagctactccgtccagactcatgctgtgcgtccagcagtattttttccatgtctccattataaatagaaaccgaggctggaacgctgcccccgttcccattattgctgaagtgcagttctacccaaggagccctgcaggctctcctcctgcatcccgggcgctccgttctgcgacatggcgccagagggcaactgcggcgatcggaggtcgcgccgggctgcgggatgtgcttcagctgcgggcggtgggaaagcggagcgtcggagcgccgcggcccacgtgcgctcccggactgagcggagg

SEQ ID NO: 61335 - DNA, 2200 bp, Homo sapiens
  misc_feature (1)...(2200): n = a,t,c or g
tttcgtagccggtgctgctgcaggctgaggctgcggcagaggcggcgaggcgcgggcggtgaggacggacagtcaccgacttagtccagttccctgtgatctcaaaacaattgttgcagcaggctcctggcagtctcaagcagttcatcttcttggtgtactggtttcctattgtgattttatcatggaaaatcaattggctaaatcaactgaagaacgaacatttcagtaccaggattctcttccatcactgcctgttccttcacttgaagaatcattaaaaaaataccttgaatcagtgaaaccatttgcaaatcaagaagaatataagaaaactgaagaaatagttcaaaaatttcaaagtgggattggagaaaaattgcaccagaaattgcttgaaagagcaaaaggaaaaagaaattggctggaagagtggtggctgaatgttgcctatctggatgttcgtataccatcacaattgaatgtcaactttgcgggtcctgcagctcattttgaacactactggcctccaaaggaagggactcaattagaaagaggaagtataactctttggcataacttgaactactggcagctattaagaaaagaaaaagtgcctgttcataaagttggaaatactcctctagatatgaatcaattccgaatgctattttctacctgcaaggttccaggaattactagagactccattatgaattattttaggactgagagtgaagggcgttccccaaaccacattgtagtgctgtgtcgaggccgagcttttgtctttgatgtaatacatgaaggatgtttggtcaccccgccagagcttctcagacaactgacatatatccacaagaagtgccatagtgaacctgatggacctgggattgcagcattaactagtgaggagcgaactcgatgggctaaggcacgagaatatctgattggtcttgatccagagaacttggctttgttagaaaaaattcagagtagtttactggtatattccatggaggatagcagtccacatgtaacaccagaggattattctgagattattgcagccatccttattggagatccaacagtacgctggggtgacaaatcctataacttgatttccttttctaatggagtatttggctgtaattgtgatcatgctccttttgatgcaatgattatggtgaacatcagttattatgtggatgagaaaatttttcagaatgaaggaagatggaagggttcagagaaggtacgagatataccacttccagaagagctcattttcattggggatgagaaagttttaaatgacatcaaccaagctaaagcccagtatctcagggaggcatctgatctacagattgcggcttatgcctttacatcttttggcaaaaagctaaccaagaacaagatgcttcacccggatacgtttattcagcttgcacttcagctggcctattacagacttcatggacaccctggttgttgctatgaaacagctatgacaagacatttttatcatggccgtacagagactatgcgatcatgcacagttgaagcagtgaggtggtgccagtccatgcaggatccttctgtcaatcttcgtgagcggcagcaaaagatgttacaagcttttgcaaagcataataaaatgatgaaagattgttcagctggaaaaggatttgatcgtcaccttttaggtctcttactcatagcaaaagaggaaggtcttcctgttccagaactctttacggacccacttttttccaaaagcggaggaggtggaaattttgttctctcaacaagtctggttggctatttaccgagtccagggagtggtagttcccatggtacacaatgggttatggatttttctaccatatcagagatgacaggtttgttgtgggcctgttcagcctgggaaatcctgtcccgagacttgatgcgggaaaagctagttcagctgactttttgtgcttttcatgatatggatacagctggatgaactcttactcatctttgaggagatgaattcatctatttaaggcacttacccaaaacatatccattaaaacttgagtgctggggagttgagttgggtaatatggagatggggaagggaatgtttgacttgcttaacattcctttaaacaagttaagaaaacttgtttaaatgttggaantttggttg

SEQ ID NO: 61336 - DNA, 1651 bp, Homo sapiens
ttttttttttttactgggaaatgatgttcttctggacgtataaataaccatcaggtggccaattctcatccagagtggacagggtggaatgggatcatccctgctttcaaatagggacattgacgtacagagagaggagtgggttagctggggccccagggcacagcttcaccaccctggggaggtctggggagagcatcctgtccttcaggacaccccccaccagcggctgggaggtgagcacgccatgagtcgccccaggtctgggaagagtgggtgcatgggtgcttaagaggctgcattcttcagcaggccctgcacctgccccgtccttccaacccctgtaggccgacgttttccttttgctccacttggatgtccgaagccgggttcaagaccagtttttgagggcctgaattcaggctgtgctgcaggatgtgcacgcccttcagggagaccacggcaagctcctgcagcccatccccggacaggtccacgtgagccatggccagcaggggactggagaagctccgctgccacagcagatggaacccgtgctgggcctcaggaagccccgactctgggccccggtacttataacacagcagttcctgtccataggtggccaccaggacttctggccgcccatccaaatccacatcggtgaccaggctgcagaggacgctgtcaaactggtcactgccaggcaggagaagctggtcttcaagaccccggttcagcaggtcccgatacaccactgctggctccaacatgctggccacgagcacgctgtactcatcttgtagtggcctgtccttggtctccttggcggccgagaggctgaacacaatcactcgggagatgggaccgtcctgcaggaccgaccacatctgcagaacctctcgactccgctggtccacgtgggcgacacggacataaccactctgacagcccagagctgagaggcgccgggacgtgccggggaagttgtggacgtccagccagaggacgctactggtcaggttcgtcagctctgggaagaggttttccacgggctgttcctcaaactgatgcagcccctcgttctccttgtagagatgaatggccgggtcgttcccactcaagagaaacacagtctcaagttgatccccgacctggacctccgcatggcacagctggaacggagtgaactggagctccaggttcaggcagctctgggcaatagagtcaaggttgtactcagagccgggctcgtagtcgcagtaaatgttcaggaaggggctgcccttgtcccctgaatccttgatgaacgtgatccccacaaccagaccccgcttggggggtgacttgttgaaagtgtcgatggagacaatctccgcatccacgggaatgtagttgaactgcagctccttggccactggccggattttctgtcggaggtcttggtagcggaagccgagcaccttgcctttaagggtggcggccagcagctccccgcgcccgccggcgccgcctgccagcccgtacacattgctctgcgacgagaagcgcgtgaagctgtcctcgcgcaacggacaaggccccgcggccacggccgcctcccccatcatgcccctcagttaagcaccctctccgcagcccccgccccaac

SEQ ID NO: 61337 - DNA, 2735 bp, Homo sapiens
ccacaccaatgccttcatgtgtgggcaatcccatggagcacacccacgcggccaccgccgcgttgcctgctgcaggtcctgtcaacctgcccacaggcatctctcgcgtccccactggctaccctagcgacctcaagccagtcacctggaaccagcaccagctggcccacctacagcagatgtgcagcgaggctagtgggacgccagcccctggcctgacaggcaagcatgcggcaggacgcgagttggcagggcctggctttgtgggcaaggcccctgcctacccgcaggaactctgcctggcgcagtccttccatctgaagccacccctggaaaagccgaccccatccccaccagtcaacggcatggcagccccattggcctaccccaatggtcactacttccaacccctgtggaacaacattctgcccactcccaatagcgacagctcggggtctcaggaccttgccatgccgttccacggtgggcagcccacaggtgcacccctcgactgtgcggcagctcccggggcccactaccgagcagggaccgggggcggtccagtggcaagccagaacagcttgatgcaaacagtggattacctaagtggggatttccaacaggcctgcttccgagaacagagcctggccatgctgagcaaggcccaccgagcccctggcaaccgagcccccgatcccacagagagtcgaagtcttcatattcagcacccagggtatagataggtagccctgctgccctccacgtgcaacacatcatacatcaccctcctaggtttagtcttttaagtaactggatagtttcaaagtttcactgctccagtgtgatcattcttagatgtctaagaaagggaatttggtgggatctaagtggggacagaaggggtcctctcgtcctcccctccagcaacttttggttttatgttagaacctaaccctaagcccaggcttttctctccactgactgcctgtcagctagtctctccaccttggccatttccagccagctcccacccatcttttcttgaatctcttcctgtttcccttaggacgactgaggtgtgggctgacggaatgccctagttgaggtagtataggtgctcaggcccctaatccagacctctacctgttgctaccccccttcccctccctccaggactaagaagcaagatttcccaggtgctctgaaagctaattacttactcatcgaaggatctcaaatcaaagctgacccagtcttcatatccttcaagttcctttccattcctcaaggctttgttttgtgtctatattgatcccacagccactgcacttgcccttgccacacttgatctcaagggcatcttggaagtatttgaccatttcttgagatatggggggaaaaagtctttgtattggcatcttggttccagactcccctttccaaacctagaaaaatacagtgacctttgagcatacccaagatccctttctcactgttgcctgtcccctaactcacctccccacagcccctatcctttccccctcaacaaaaacaaaatctaccttacttgaggaattaggtaggtaaggaatgatcacattggagtttgggattaaaaacaccaaaaaaaaaaatgcatttggttctctctacactggctaagaatattgctctacactgtaagttttaaacgttacgtttctgtatgaatgtagtgtgggtttgagtagcattgtgtgtgagtggccccacaggtacattcaccctctagtgcagcccctcagtttaatgaaggaaaaaaaaacaaacacaaagccttaagctctttgagtacttcctttaccaaatgagcatggttctaacacctggagctgggcctacattggaaacaagcccctcctgccctctgtccattcttagagcataccttcatccactccatgctcagcacgtctcatcccaagcgacaattagttggctagaaacacttttctgtaattttaaacttagactgttttgttacaaatttttgcaccattctgttaaagatgcagaattgggcttttttattttttacagatgaaataagcccttacctttcctcttgtctctggggaatgtcagctgatggttcttatttaaggttttgcattttgttcactatccactactgttcgttagccagaaattctctagtgatctgaagcaatgtgactgaagaccagttttaagttatgtgttggcaagttgccttatatttaaaaggaaaaagaaaaaaaaaaaagcctgattgtgttatgccaaatgatagcaacatgaagtcctaatttattgttcccaattgttttcctgccgtctgtgaacactggtacctccctgtcctgatcccccaggagcacctgtagcttctgactcaatgccttctccgaaggtgttggccgccatctcacccagggccctcttccagttcctgcttttctgagtcagatttaaagagcaccactgtcttccccctaccccttgcttgatctccaaagcagatattcttgctgtatttttttttcctccccaatacctctccctgaaaggtggagctgctattttaggaaactgggaccagacaacaacttgggggctttaagtcaaacaacctcaaacccatctcttcctgtgtaggggtgcaagcctctgaagctctcactcccacccttagtctgcatggaaaatgactggga

SEQ ID NO: 61338 - DNA, 5669 bp, Homo sapiens
tttttttttgccagttgaagtatttggatttaactttacccaactaagacattcacacaacatatgcatgtcagtctcctgttcagtcctagagcctgcagtattgtaatttattgtaaaaccatgtaaccaaatacttaaatatatccacaacatctataccacagaaatgcatagtacataatatactaacatctcaaaataaacttctattacagttttatgcaaattatggtaaaagattatcacctgccacattttgaaatggcaccaacttcaacatcaatgcactagtcaaaatccttactagaagtgatgtcttctgcattatcatctgaacattcaaaatcaagctgttaatctaataaccacagtatgttatcatttaaaatcactgtatatttggatgttaaagcaggtagtaatacagcaggaaaagtgtttctaattcacagtttcaaaactaaagggtgcagttttcaaatatctgattgcttaaattggtcactcaatttaacaactgcctccttcaatacatgtaaactatgtttgcacagcattaggagatgtcttttatttcagaattagttcttactgttacaggagcaccacaaattttaaggaagaggctacagtgtgaaatgagctcactgaaggatatgttaaataaaattttaactacaatataaggtactgcaaaagctttgttccccagcacagatcccttaatcaggaaaagtagtgaacacttacccaatacaatatgtaaattcgctctacaggagatggggaaaaacctaactcaactaaaagaaaatactattattagctaacaaacctgtgatagctggcttcagaattttcctaaaaataaaattcaaaagcatacacagtatttatatcctttgataaggaatgtagacatccaaacggaatgaaagaaaaatctggttttaagaatttctaagtggaatcacacacacacaaatgggtaactgagaaaaactaaatattcaaaatttaagtaagaagatttataatagaaaaaagtggcaaattgttactgtgacttgattttctgaaaacatctgcaaattcacactggcattaagaaaacccaagtctcaaaaattctcctttctttctctccagataatgtgttttctgtgcaaaaataaatatctgaaaattgcactaatacttattttaacttctatattatgaataatctgcacatgctgctttacagacgatacatatttgtaaacttactcatgcaaaattagtgtgcgcaacagggatattgttaattttcatacttaaaaatgataccttattatcttttaaaaattgccaaactctctgaaatggttaacaaatcttatatggatattcttgtctgccagctaaaaatcaatttatgttgctgaaaacaaaaagttatacaagaaaaagaaacatggtttttgttttgcaagatttttgatttttaaatgagaaaatttataaaagaaagaaattcatggtcacaaaattttaacattttaatcctaaacattacagggtaaatagatactggaccctatctccatactccataaaatcctaacttttagtttccatttcaaatgttgctgtaaccactaaaacactagtggttttacaacctctggattatggaaatacacatttctgaaataaatgctacaaaaacaacaatggaagaaagccaaacaaacagtctccatgaaggaaaaaaaagtggaacattttgaagcttttagacacttctctttccatgtcttatgattaacctgtcaattcagtgcattgtatggtcatatgtaatggtccccatggtgaacaaacatctaactagtgtccattgattccaagttagtagatgatgaatctttctggatactttcaaagatagccgccagctcagggttagaactgatctgtgactggaattcactcatcagtggactcttctctgcttctggaatggttagtagtgctgctactgctctcatggcagatcgctttaattcatcttgtttttcaaactcctgctttactgagtttgcctttaccttagttgtacatgttgcacgtaatggctcaacaagtcggtccaacctctgcagtactgcacttggacaaagggtagacagtctcaccaacattaaaaatgtcagcatcttaatatcataatggtccttcaaaccatcttcaacatgatttagaaattcaaagatatcaagtctatcaagacaactgtctagaagtgtgtacatacactcaaatgctgcctttctaatatccagaccatcatcaaccgtatgtttaaatggacccatttctacctctcttataagctcctttctaacttttgtttcattgtaaagatgtggaagaacagtatccaatagatcccttattaatgatggcttgttatgtgctgctgaattaaatgtgaccaaggctactcttctcacattcaaatctgggtcttccaaagtttttaggaaatcacctatgcagttctttaacagtggatcaataggttgtggatggtcagaaattgtaaatttcacagccgtaaccactgagcttcgggcatatgatgagcctgatatcaagtaccccttaagccgtggaaggagagtttctggatcaattagagtgagttttcctagacattcagcaacaacatttctggttccttcctctgcacactcacagtgctttagtaataaggcccagatgttttcaacatatggtttaaggcccaccactgatgcagagctaataatttccttcaaggaatgaagtaaaagatactgccttttgggttgactagttatttcttgcaggacaaacggcagatattcaggaaggttgcccacactaatgctgcctaatgcataggatgcagctgatttgacttcttcactaggagatgagaaagcttctagtattacagattttagttccaactgtccacttaagtcaatatgatgcccaacttctccaagagaaagtagagctaagagacgaatggaatctgtagaccttgagttcttgacatcttgaataaactgacctactacagctggtccctctttagggcatgctcgagtaagggcagctacacatttggcaatggaataataagactgcttatgagtaagagctgtgctctgagagtaaactggaccagtcagcatgcgcaacaaatccatgtatcctaaattatttgttccagtgacaaccagagcttggaaaaagtctagcatggcactaagagctcccccctgcaataagggtgatctcacaagtccaataagttcattgagaatggatccacttatctttgaaagggaggagggatatacttttgccaaagtggtaagaaaactgatggccatttgtgaaacatgcatatcactttcgctgataagaggtgggagctcatctagaactgcatcaatcatggcagctgtcaagctgtcactatagttttttattagaatatcaagggcagaaagagtacccagtttcaaagctctctggttttttctaagaaatgaagcaaggataggaaccccttctcccagaacaggcctcaaatctatcttcaaaggtgacccagcaatcagtgtcaatgcctttactgtagttaacctggtaatttcattctttagtctctccaagaaaatctgaagtgtattaggcaagtcagaacccaaattgtctccaaggttgcaaataatttgtcccatacaggaaatagccctttccttgacttcctgatcaatgtcagctgcttttaatctcttaatggtacaggtaaatagatctttgatataaggagttgcatcaaacgaggaaggctgatctaaaggacgaattactttgacaagctgttgagtaacaagaagtgcttcagatgtaattttgtaaaatgggtctccaacacaagccaccactggaggaaccaaagcctgaacgtgaggatggaagacttgaggagaatggttacagaggattacgtatagacatgacaaagcatcgatcttcaaattcgatgagcttgatttatcattcagtgagaaaatgattcctggtacaagtacaggaatgtgttgagttagggccccaggtaatacatttaccagctcagttaacatgttaaaacaacactgtcgggtcttcacacttttttctttcatctgtttgtgaagagctttaacaatgttgggaacctgactctgaagcattgttaaaggtgtttctccctgctccattgcatcagggtcacatagccaactttgtacaggacgagtttgcttcaaaagagaaaggtatgcgtgaaaaacatctgcccttacattctcctcacgctctttaaatctggatattagtgcagggagagacggtcttgtagaattctggaagcatttcatgccttgtgctaactacagcatccaagcacttcgcagctgcacgtctcactttccaactcatgtcatcatcatcactgtattcatcatcactcccttgatcatcatcatcaccaccatcagcatccattgcattttcatcttcatcttcatcatcgtaattataatttggatcataggtaagatatttaagacaaatatttataatggtagaaacatgaggatatacttccttaggacatcttcttacaaatgattcaaaggcttgaatacagtactctcttaattcatcatcatctacattgcaaaattttaccaccaaaggaattatcttctcaaggtattcacctattctatgaccagcttgcctactaatagcagcaatacattgtatgtaggttcttgttgttgacatagaatcatttttggacaactctgacaacagatgttcaataagatctacaaaaactatatttccacagctcataaccagatggccaagagcgataatggttcttttcctcactgcaagtctagggctggtcaactggggaagtagacaggtcagaattgaaggatggaaattaacaagaagtcctccttgcctgctcaacatatcagccataatatccaaggcttctagctgaacagagacatcttcctgttttgctattgcacttgtaagacgtccagtaatctttttacatacattagcagctaatgcagagccactggaagctggaggaagttctccaattactgttttaagaccaatacttgaaatgtctcgaagttgttctttatcagaaagcatgttagtgcagagggtatctacaattgtctctacttggtattctttcactttactcactaaaggaccaagacatttgacagctaaattctgtacctctccatttttatcttccaataacttcaaaatcattttcactactttcctttcactatcatcatccaacttgatggaatctttctgcagttccgtcatcaaatcatttgtagccataaacctaaagtccttgtcgctggatgtcattttttccagcaaattggaaatgtggtacgaggcgctcgccatgttgacggcctcgatcccgcctgctggcgctgctggagctgctgccccccgccgctgccgccgccgccgccgccactgaagctcctcctctcgctcgcggccgc

SEQ ID NO: 61339 - DNA, 2580 bp, Homo sapiens
gcgcgccgaggatgcgggactagccgggcaggctgctggcggccgtcgggccagcgaggcctcgcagcgggcgggccctggcgagtagtggccgggcgccgccccctgcgccctgaggcccgggccccgccgcttctgctttcccgcttctcgcggcagcggcggccgaggaggcgcccgcgccggccgcccccgggggaagccgcgccgtctccgcctgcccggcgccctgacggccgctgttatgcgtattcccgtagacccaagcaccagccgccgcttcacacctccctccccggccttcccctgcggcggcggcggcggtcaagatgggcgagaacagcggcgcgctgagcgcgcaggcggccgtggggcccggagggcgcgcccggcccgaggtgcgctcgatggtggacgtgctggcggaccacgcaggcgagctcgtgcgcaccgacagccccaacttcctctgctccgtggtggccctcggacttggggctgcaacaagacgctgcccgtcgccttcaaggtggtggcattgggggacgtgccggatggtacggtggtgactgtgatggcaggcaatgacgagaacttactccgttgagctgcgcattgcctcggccgtcaatgaagaaccaggtggccaggttcaacgaccttcgcttcgtgggccgcagtgggcgagggaagagtttcaccctgaccatcactgtgttcaccaaccccacccaagtggcgacctaccaccgagccatcaaggtgaccgtggacggaccccgggagcccagacggcaccggcagaagctggaggaccagaccaagccgttccctgaccgctttggggacctggaacggctgcgcatgcgggtgacaccgagcacacccagcccccgaggctcactcagcaccacaagccacttcagcagccagccccagaccccaatccaaggcacctcggaactgaacccattctccgacccccgccagtttgaccgctccttccccacgctgccaaccctcacggagagccgcttcccagaccccaggatgcattatcccggggccatgtcagctgccttcccctacagcgccacgccctcgggcacgagcatcagcagcctcagcgtggcgggcatgccggccaccagccggcttccaccatacctacctcccgccaccctacccgggggccccgcagaaccagagcgggcccttccaggccaacccgtccccctaccacctctactacgggacatcctctggctcctaccagttctccatggtggccggcagcagcagtgggggcgaccgctcacctacccgcatgctggcctcttgcaccagcagcgctgcctctgtcgccgccggcaacctcatgaaccccagcctgggcggccagagtgatggcgtggaggccgacggcagccacagcaactcacccacggccctgagcacgccaggccgcatggatgaggccgtgtggcggccctactgaccgccctggtggactcctcccgctggaggcggggaccctaacaaccttcaagaccagtgatgggccggctccgaggctccgggcgggaatgggacctgcgctccagggtggtctcggtcccagggtggtcccagctggtgggagcctctggctgcatctgtgcagccacatccttgtacagaggcataggttaccacccccaccccggcccgggatactgcccccggcccagatcctggccgtctcatcccatacttctgtggggaatcagcctcctgccacccccccggaaggacctcactgtctccagctatgcccagtgctgcatgggacccatgtctcctgggacagaggccatctctcttccagagagaggcagcattggcccacaggataagcctcaggccctgggaaacctcccgacccctgcaccttcgttggagcccctgcatcccctgggtccagccccctctgcatttacacagatttgagtcagaactggaaagtgtcccccacccccaccaccctcgagcggggttcccctcattgtacagatggggcaggacccagcacgctgctggcagagatggtttgaggaacacatccaagccagtccccccaggcccagcttcccctccgttcctaactgttggttttcccccagccgcacgggtcccaggccccagagaagatgagtctatggcatcaggttcttaaacccaggaaagcacctacagaccggctcctccatgcactttaccagctcaacgcatccactctctgttctcttggcagggcgggggaggggggataggaggtcccctttcccctaggtggtctcataattccatttgtggagagaacaggagggccagatagataggtcctagcagaaggcattgaggtgagggatcattttgggtcagacatcaatgtccctgtacccccctgggtccagccaagctgtgccccatcccccaagcctcctgggaggatccagccaaatcttgcgactcctggcacacacctgtctgtaacctgttttgtgctctgaaagcaaatagtcctgagcaaaaaaaaaa

SEQ ID NO: 61340 - DNA, 827 bp, Homo sapiens; identical to SEQ ID NO: 60912
  misc_feature (1)...(827): n = a,t,c or g

SEQ ID NO: 61341 - DNA, 4465 bp, Homo sapiens
ttttttttttttcagtagaaaccattgaagtttattggcggtcacaatgcttacactgtatgcagcaaacacccttacaagtctatccgcaacctgatcacgcaagaaaggattcatcacacagtcgccagaggagaaggaaaaaaaattaacaggcttgtttctgggggtagaggaaagaaataaaaataaaacctaattgatgagtgtcccgtgggcaagagctgaactagagatgtgtacaactagcagcaacaattgtggaaaaagtacaaggcaaatagctgtctccattaattttcctctgtaggttattattttttttaatattcaaaacatttattatggttttcattttataaaaatgtatattttttaagggatgggagaatgttaaatacttcatgctaggtagaccttgttattaagaacccttccactgtagtaacttcctccagttcatacattcatgagtgcagggtacatatataaatatccacacgcatacatccacacacactgcctcgagggctggggaagactaaaatttattggccacacacagcagggcctctggtggactcacccacattgctcccaggagagcagtgggctcacttccttctctctggtctctgccttcacacagaccaagaaccctacaacacgtcgttaaatccaacttttaaaagcaagaggcatctgtctgaggatgagggtaagcaaagtaggaaagagggtggagataagaacacccaaacacttttagctggagttatttatcactgcaaggggctagggacccagggcagaatctatacggtccaaggggagggacggtgttctggcatggcttagagttcctaataacaagggttaatacagtaacaggaattgatcatttctgggtgaggacagggcaatacgaaaaaatatacatttggaattttagctttttttttgcctctctactgtgtcactaaatatatctctgcactctcacacatccttgtccagtaaagcttcaggccaccagaatacacattttcttcactcgcatacacaacccctcacatcagcattggtgcactagactctgtaaaaatttttcagtcacactttttgtttttaaacttgagtcaatataaaccttgttcaaaatgttatgaaaaaatgtacatgtttatacaaggcaggttgggcaggacactaggggttctccccacttgggtgggccccaggaggagaggctggagtctcagtttgtatctcttatctcctcccaccacccttcccacccagtcccccaggaaccagcagcgccctgccccctagtgagtgtactcacacccctattccctggggaagcagctagttgacctttgccattttccccacacccctggagaaaagagccaggatcagccaggccctctcccttgcaattgttcgcccctctgggccaaaccaaagggacgctgctctgtacaggtagagtccaaggaggtgtcagctcatcatgtcattgctattcacgccataagtggaattcttcattgagtcgttgacttctcgacggaatgctgacaggttctgggtgaacctgtctctgtttttcgtaagaagatttcgctcgatgccttccatcaggttctcaaaacacaggtgcatggcctgctgcttctccggtggctggctgttcacaatactgtttcttaggtcagaaaaatacttttcattaagcaatatcaagccaagtagtggtcgggacatagaccactggttcctacagtcttcaaagatgatgatgttcagcaccgtggacagcatctgctggatcatctctggatgctgctgcatgatgtgcagaaagcggtcgctctcctggttcaggggtgtggtcctcttcttggtgctacgtgacagctgcttgaagaggtatgtcacaatgtggtccaggcaggagcagcagcctgtgcataccatggtgtcaagtgcagtaagtccttcagaaatggaagagagaatatacatgatgacgtgaggttccaggcttgcaataaagttcatatggtcctgggtcaggacttccagtagtgaataataagactggctgagcttggggtaatccaagagatcactgtgaggaatagagaggagcagcttgatgaaggtctgcagagcattgtccagggcatcgtctccatagagacgaaagactccgaaattgacgtaactcccactgagagcagccttcagcatggagaagcagatggagatgcccttgagcttcagagcatagacctgatcctttgggacctctcctagtgtcaggatgcgattgccatacattgttatcatcttgctggtttctcggaagagtaagatgccattgggggaagagacatcaaactggagtcgctgggacctattatgaaccaattcagccatcaacttgagtacaggtgtagtacaggctggatcatggtaccagagctcaattgcccgttggagaattggcatataggatggatatatccattcaaagagcatcatgaagctggtcttggcattgaaagcgaaagcgatccctctcaggtctcttactaggccaactagagttcgctttgcctcctgctcgttgaaactattggtgctaaacatctgggccacagcctcaaatgctgctgtgagtggcagcatgaactgctcatactgatcttcatcctctcctaaatccaccatgaggagacgcccaagtgctgtgtagaaggtagtccgacaccgcatgtctgtcaggttggactgattgttaatacccaaaaatgaaaagtgctcgctcgtgtgattgttcagcatgaactgtaccgcactaagcttcactagcttccttacgctactgtacccaatggagaggtcattgagaagctgtagtgtcttggaggtgattggttcacaacggccccagtacttcaagttggtgatgatttttcctatgaagacgcttaggaccatggtctcatcattcaagcccagaacttctgagagtcggcggtacagcttagaggatttctgcacttggtccccaatgtagatcttacgaaactgttcaaaaaagctcagcatggccaactctagcttctcattacccgcctgggccaaacgagaatctgttaggttcatcagctggagcacccgacagacaagctcaccatccatggcgtcttgctcatcagtgctggcaaaagaaacccggccaccgatcactgctccaataatgtaaaccagccatgtcagccttccctcctgcactgcaatgtccattgggcttgcgctggcgctctgtagcagctcctggtacgactgggccgactggtcaaacaactgcacgaggagtgcacacgtcttctcatattcacaacgcccaatggtggacagctgcaaggttgaagaatctaagaaggctgatctccagctggtgggaatctgcactgtacacaggtcgtctgaggactcatcagtggaagtgccgatgaagtcaaagttgaggcagttatgagtgagcttgagcagttgcatgagcaagccatgctgactttcatcattcaagtttagattctttcctgaagcctgttttagtaaattgcaggaaagtgtgaagatatcaaataatgatgaatcgcgaaaagaagaggctatttttctgtgcttggttaaaggatgggtggtgtctgcttcaatgaggaaggctgtagcacttacttgattaatttcattggttagctgagataaaattgtgacaccaatgatgcagtattcaacactatcctgtaaaaaccttgtgacgtctgtgattgcatttctgaagacatagtcatccttctgaacaatcaaaaccagcccagttttgtgattctggcatataactgaaataaagtgcttgtgtcacgaaagtagccaacttcggccgagtggcaaggtagttgagcacatagttccgaatatctattcgctgttccaatggtagggggttgtttgtgcgtgatacaagcttggtaaggcatgtagctgccagtaactgggagtaagaggaacttcctctttcgaggagtagctggcacttgctcaggcaatcagggctgttggtaaattcaaccaaggctttctctgcctggagtcgagtggttgtgtctgtggtttcatacagctgtttgcacagattctctagttgggccaggctcttcctccctggatccctcatgtctaaagttcagcagactctcttctgttgcactttaaactcttactttggttccaaatttaaaatgaaagcgtcaaaataaattcaaccctagcatatgctcactcacagataagacaagggaaacacccacaagcaaactcttctctccccctcttgaaccagttccagggaggcaggaaggggtatgggtgtgtgctttgg

SEQ ID NO: 61342 - DNA, 2895 bp, Homo sapiens
actagctgtcgctccacaggcgagcagggcaggcgtgcgggcgggtgggtggtggaggctgcgagggtgcacggccggccctgggcaggcggtagccatggagctgtggcgccaatgcacccactggctcatccagtgccgggtgctgccgcccagccaccgcgtgacctgggatggggctcaggtgtgtgaactggcccaggccctccgggatggtgtccttctgtgtcagctgcttaacaacctgctaccccatgccatcaacctgcgtgaggtcaacctgcgcccccagatgtcccagttcctgtgccttaagaacattagaaccttcctgtccacctgctgtgagaagttcggcctcaagcggagcgagctcttcgaagcctttgacctcttcgatgtgcaggattttggcaaggtcatctacaccctgtctgctctgtcctggaccccgatcgcccagaacagggggatcatgcccttccccaccgaggaggagagtgtaggtgatgaagacatctacagtggcctgtccgaccagatcgacgacacggtggaggaggatgaggacctgtatgactgcgtggagaatgaggaggcggaaggcgacgagatctatgaggacctcatgcgctcggagcccgtgtccatgccgcccaagatgacagagtatgacaagcgctgctgctgcctgcgggagatccagcagacggaggagaagtacactgacacgctgggctccatccagcagcatttcttgaagcccctgcaacggttcctgaaacctcaagacattgagatcatctttatcaacattgaggacctgcttcgtgttcatactcacttcctaaaggagatgaaggaagccctgggcacccctggcgcagccaatctctaccaggtcttcatcaaatacaaggagaggttcctcgtctatggccgctactgcagccaggtggagtcagccagcaaacacctggaccgtgtggccgcagcccgggaggacgtgcagatgaagctggaggaatgttctcagagagccaacaacgggaggttcaccctgcgggacctgctgatggtgcctatgcagcgagttctcaaatatcacctccttctccaggagctggtgaaacacacgcaggaggcgatggagaaggagaacctgcggctggccctggatgccatgagggacctggctcagtgcgtgaacgaggtcaagcgagacaacgagacactgcgacagatcaccaatttccagctgtccattgagaacctggaccagtctctggctcactatggccggcccaagatcgacggggaactcaagatcacctcggtggaacggcgctccaagatggacaggtatgccttcctgctcgacaaagctctactcatctgtaagcgcaggggagactcctatgacctcaaggactttgtaaacctgcacagcttccaggttcgggatgactcttcaggagaccgagacaacaagaagtggagccacatgttcctcctgatcgaggaccaaggtgcccagggctatgagctgttcttcaagacaagagaattgaagaagaagtggatggagcagtttgagatggccatctccaacatctatccggagaatgccaccgccaacgggcatgacttccagatgttctcctttgaggagaccacatcctgcaaggcctgtcagatgctgcttagaggtaccttctatcagggctaccgctgccatcggtgccgggcatctgcacacaaggagtgtctggggagggtccctccatgtggccgacatgggcaagatttcccaggaactatgaagaaggacaaactacatcgcagggctcaggacaaaaagaggaatgagctgggtctgcccaagatggaggtgtttcaggaatactacgggcttcctccaccccctggagccattggaccctttctacggctcaaccctggagacattgtggagctcacgaaggctgaggctgaacagaactggtgggagggcagaaatacatctactaatgaaattggctggtttccttgtaacagggtgaagccctatgtccatggccctcctcaggacctgtctgttcatctctggtacgcaggccccatggagcgggcaggggcagagagcatcctggccaaccgctcggacgggactttcttggtgcggcagagggtgaaggatgcagcagaatttgccatcagcattaaatataacgtcgaggtcaagcacattaaaatcatgacagcagaaggactgtaccggatcacagagaaaaaggctttccgggggcttacggagctggtggagttttaccagcagaactctctaaaggattgcttcaagtctctggacaccaccttgcagttccccttcaaggagcctgaaaagagaaccatcagcaggcccagcagtgggaagcacaaagtattttggcacagccaaaagccccgctatgacttcttgcgcccgagaccgaatcagagctgtcgctcaaggagggtgacatcatcacatatccttaacaaagaagggacagcaaggctggtggcgaggggagatctatggccgggttggctggttccctgccaactacgtggaggaagattattctgaatactgctgagccctggtgccttggcagagagacgagaaactccaggctctgagcccggcgtgggcaggcagcggagccaggggctgtgacagctcccggcgggtggagactttgggatggactggaggaggccagcgtccagctggcggtgctcccgggatgtgccctgacatggttaatttataacaccccgatttcctcttgggtcccctcaagcagacggggctcaagggggttacatttaataaaaggatgaagatgg

SEQ ID NO: 61343 - DNA, 2419 bp, Homo sapiens
  misc_feature (1)...(2419): n = a,t,c or g
ttttttttttttaaaaacatttgggatttttttttaaaaaaaaaaaaaacatcacaaccatgaacattgttacagttaagaggccctcttggttctccacaatgatactgagcatgctcacaaggggttcccattgttaaagtcttaaacaaccatttttaaaagaaggaagaaaaaaaaactccgcacactaccatttaacttgttttaatgtttcttcacaaatggtgaaaaatactaaagtacagacaaggaataatcataatgttgtggccaacattataaatatggaattataaatttaaaacattttctggtttaaaaaataaatctggtagtcaatgcagctctgcggggtctctgcatctagtagggccgatctctgcgctcctgacggtgctcgcctttatccatttttccaggtcctccacgtcctcctcttcttcctcccatctgttccatcaaaggtccagggggccccccagggccacctcgtcttcctccaccaaagccacctcggtccatgccccggccaccacggaagccacctctgtctccaccacggccacctctgaacattccaccgggaccaccacgatccatgaggccacctcttcctccccgcatgccaccagggccacctctgccacgatcaccacccgggggcggaaagggtggcgggaggaagccttcaggctttggggccttacactggttgcactctgttctccaggcgaagttctggtttccacaacccggattgggacactgccagtctccagctcggtgctggacgtttcctcctccagaggggttccctcgggaaccccggggtcctcttggagggaagcctcctctatctcctccacggcctcccatgcgacccatgggtcccccaggacctcctgggcctcctggacctccacggagtggtggtggcatgcctctgccctcacggggtggcagaccaccccgcatactgttcattggaggcttcttccgagcaagggagactttaagtttgctcccttgaaaatctttcccatcaaaccattccacggcagccttggcagtgggtgggtcttcataggacactgtggcatcgcctttgggctttcctgtttccttgtccaggtagatgtggatcatgggttgcccagttctcttgttcatcttaacaaccccacactgcttaaagaagtctgccagatcatctagagtcacactgtcatttaatccttgtacataaattgcactgttgtcagagtcttcatctggatctacaggtgggcctagatcaagatctggtccttcatccatgggtccaccaggcttattgaagccacctcgctctccagcgctgcccattccaccgcgtcctcctccccgcccacctctgctcatgcctccacgatcaaatccccctcttcccctgccccggttatcagggccactcatgctccggttctctcctggtccggaaaatcctccagactcctgcccataaacaccccatgcctactggggtggtcctgtcggaatgaactctgctgcccgtagctgctgctctgttggctatattgacttggagcttggctgtaggatccagtttggggtgggtaactagtgggaggctgctgcccatagctgctttgttgaccatagctactctgctgtccatagctgctcggttgcccataggtgttctgctgagagtaactgctctgatcataactagtcggctgtgtagaggaatagctggtaggagggtaggatggaggtgcagtgactggctgcatggggtagctcccaggtacctggggataactgtagttactctgtccatatcctaggctgggctggttgtaaccccctgtgctagattgaggttgactagtctcagtgggcttgtttccatcctgcggtcttgtaggtgcagtggctgctggctgctgcccataggctggataagcaggctgagtgccatatgcagactgagctgcataggaggcctgggtggtggtgactgtagcagtggtggtatcataagcaccagtgccatacccctggacaggctggctgtatgcctggggggcagttggagtagtataaccagtgggaggctgtccataagaagttgcataggcggtctgcccataggttgcagtggtctgagcctgggtatagctgacatcagtgggctgtccataggttccatagctttgttgcccatatgcctgggtggtctgtgcatatccttgagtgggctgggcggtgtaagcactgtagccctgctgcgctgcagcttggctataggtactgtaatccgtggacgccattttctctccttcctcctcgttctctcaacgtccgcggacgggtgggtcgactnnnnnttnanngtcnnntgcgcagcctc

SEQ ID NO: 61344 - DNA, 771 bp, Homo sapiens
  misc_feature (1)...(771): n = a,t,c or g
accacgctgcaggcttgatagtcatatcatctgaataaatattcctgatgtatcgatatcggtaattcttattccttcgctaccatccattggaggccatccttcctgaccatttccatcattccagtcgaactcacacacaacaccatatgcatttaagtcgcttgaaattgctataagcagagcatgttgcgccagcatgattaatacagcatttaatacagagccgtgtttattgagtcggtattcagagtctgaccagaaattattaatctggtgaagtttttcctctgtcattacgtcatggtcgatttcaatttctattgatgctttccagtcgtaatcaatgatgtattttttgatgtttgacatctgttcatatcctcacagataaaaaatcgccctcacactggagggcaaagaagatttccaataatcagaacaagtcggctcctgtttagttacgagcgacattgctccgtgtattcactcgttggaatgaatacacagtgcagtgtttattctgttatttatgccaaaaataaaggccactatcaggcagctttgttgttctgtttaccaagttctctggcaatcattgccgtcgttcgtattgcccatttatcgacatatttcccatcttccattacaggaaacatttcttcaggcttaaccatgcattccgattgcagcttgcatccattgcatcgcttgaattggccacaccattattattttcnnatggtngttgtcatatgcngtcagtctcat

SEQ ID NO: 61345 - DNA, 708 bp, Homo sapiens
gcaatattcccgggctgcgaaaatgcgtaccagcaaatggaagaattactctttgaagtgaatgaaggtatgctgcattaatcatttctttaattcagcataagttgttatggcgaaatcagcactgttcacggtgcgtaataatgagtcctgcccaaagtgcggggctgaactggttattcgatccgggaaacacggtccgtttcttggatgctcacagtatccggcgtgtgactacgtccgtcctctgaaatcttcagcggatggacatatcgtcaaagttctggaggggcaggtttgccctgcatgtggcgcaaatctggtattacgccagggacgctttggtatgtttattggttgcattaactaccctgaatgcgaacataccgaacttatcgataaaccggacgaaacagcaattacatgcccccaatgtcggacgggccatctggtccagcgccgctcccgttatggcaaaacatttcactcttgtgatcgctacccggagtgtcaatttgccattaacttcaaacccatagctggagaatgccctgagtgtcattatccgctactcatcgaaaagaaaaccgcgcagggtgtaaaacacttttgtgccagtaaacaatgtggaaagccggtttcggcggaataataacgtgaataataacctgcaaagagacgctatcgcagctgcgatccatgttctca

SEQ ID NO: 61346 - DNA, 1554 bp, Homo sapiens
ttttttttttttctttaattgattttatttttttacataaaaagttcagtaaaaattggataaagtaaagtgattttaagcagtaaatcaatcttatcaacatagcacaaggctggccaaaaccacaaggcagcctgctttggaatatttacatgataacaaattaaaccttgcaggagaacttaaactgtccttacaaagtcttcctgtgatcctagcatgtagaggctaaaagcaaaacgaaaaccaaacaaaaaccaggaaaaaacaaattattttcaatatattcacatatacattaaaatataatacagatcatcagggtaaagggttgtgggtggggatgcgcatgggtctgtgcgctgacagcaccgccaaggagaagacccaggtttaagagtggagtcaggtctggccagggtcttttttaagcccttgcacctctgatggcttctaaccacatgccaacagctcacaactaggtaatcacttgtagatggagttcatttttgtggccttcagttgacatctgcagggttgaattccccagggtgatgtatcatcagtagcacagtgctgacaggggtggaacagaaaggcccacaggatttcctctccctagagtctgtcttacctgaccacccatcctcccagcctggcccaacagtcactctaaattcagtgtcctctttgggtttgtaaacagccccaaacttctgcatgtacttcttaatgtactccttggttttgtgtttcacattctcattgcactccaggtccctcaggattcttacagtacttcagctccttattcataacaccgtgagtcagcttgcgagccagatgtttaaagtcttcagttgtggtaattcttccccactttgcagtcaggtttccggtaagggttcaggcactggacgatgaactgggacatctcttttctgaatacttctttgcttttctttgctagttcactggaggtgtctgcttctgctgtcttgggctttttcgaagcccttcatggggttttcatcatatgttggagttcccaggtccatctcagcttcatgctcaaggctggcatcatctcctgggctttcccaagtaggaggatcccactgagtctgccttgtgatcacatggtagtaataaatcttcccttctggatctcgagctgtcttccagttgggaggtaagacaatggtttttggtttgggaggagaggggggcggcagatccaagagattatttgtcacaaccatttcagatggctgcaagggctgaggctgccctggtgcaactattgtagtcactgctgcggctggctgtaccaccactccttgtggatgagctgtgaaaatctgttgcccctggatatactgaagacttggctgggcataactctgtacaattggtggagttgtctgtgaataaggtgatgtcacaccatagaactgttggacatgtcctgtcccttgataatatatggttgccttgaaactgtgcaggagagtactggctgctgtaccactgacagactgttggtttgaatcc

SEQ ID NO: 61347 - DNA, 1738 bp, Homo sapiens
ttttttttttttcagaatccacacaccacctggtggctccttttattatatcaatttattcaagtgattaaaaaacttcttggcagcaggatgacaaaacaggtctgtaaacatgatttcatccccccatcccttcttccaaggagcttcctatgacaggaaatcgaattctagttggcaaatccagtgatgaggtctgtagaaaaggggtcccgtgtcacagccaggaaggcagactcgtccctttaacccactccagccaggggtgctggccaggatgtgctgttctgtcatgacgtggtcactgagtctggttcgttggcagccccttccccaggaggagggagactctttggcagtgcggcagccctcccgggggcacgggcttctcagcagcagacacaggcaggcgaaaagcaggcagctgagcctctccagcgagcatggtattgctagggttgcaggtgccctggcaggtggccaggtgaggggctgaggcacaagtgctatcaggaacttggctgccccacaggggctgaggacacccagatggtccacgccagtggccttgaaatttcccctgcagaagccagaccgtggggaaacaagctttcgcgacgtgccaccccgggcagcttgaggcttcagtccttgaaggggttgtgggcgccccctggctgctccttctctgcggccagaggctccccattcatctcctgcagcgggtggtatgcatagtccccatgcaggcgccggttcctctctgctctggacaggagcaaggacaggtttgctgcagtgctgatcagcaggaggaaggccagcgccagggtgagggctagccaggcggtcctggtgaaaaaggagagttctcccgccctcagggtggcttcaggtggctggagacactgctttactctggagacgctgcagttgccagtcttggggtcacagggacaatggtgctcacacttacaaggcctctggcagcccggcccatgccagccaaggggacactcttcactgcagttggacccggtccatccggcatcacagcggcagccggtctccgtgcacagtccgtgctggctgcagttagaggggccacagtccagctcatcacagccgggaccccgccagaagtgcccggtgcattggcagtgcccgtccacgcaggtcccgtggccgtggcagtcaggcggctggcagcggggttcgtgcacacacaccacggtggacacttggcggggacagcgccacatgttgtcctggcagtgatctgacgggtaactggccaaggtcccgttgagcacaaaggtggcagagccacccccatccaggttgatggcgttgaccacgtcctgtttcagcaggaactccgccatttcccacaggttgatgctgcggcacaaagcggcgctgctcaggctcagcgcccaccatcatttctcatttaactccttttccttccacagtgcagagcatcacgcccacagtgcaggcacatttttaagtggcccccgcccccaagcatgtctcatcctagcccccggaagctgtgaacacgtgagatcacacccatgcctgtgctgttacatggcataggaatccttaagggaggggaaacggcccggaggatctgggtgcagccactggaatcacaggagtgttcaacacagagagccttctctggctcctcgtgccaagcttaacgtgttcacagtcaaggtgtttctat

SEQ ID NO: 61348 - DNA, 3500 bp, Homo sapiens
taattattgttttcttttttttttcaactaataatggccttttttatttatgtggttggaaaggttaaaataggtgacacgtgaaaagtgccttgcacatagaaagcactctattaattgagggggatattattgttactgttcattgttagtagtagcattaaaactgatatgattgctaatgaagaaacagacttaaagaggaagcaaacctcgaacagatgccacaataaagcaacaaaattgctgattcttcagggctctttctacaggacagagggactagagcttactctccctgaggttctcttgctgtttactttggaagctctgacctttccagcagacaccatcacctgtgccctgcagggagcagagattcggactttttaagtttccgcttctggctgggtctgtggcccttgtctaggctctgctaaaacagatggcaaacacggccactcagtaggtgtctttattcatacttgttgacatttcccatggggaatggttgaagggaggggcagggagggctgagcgggaagccacggcttggttttcctccatccagtggagaagagactcggtagggacatgctaagtagagtgaacaggggaaccatcactatgtgggctgagatgcactgtgcagtgacttcagacaacctgagtccttctgtcaggaaatgcaatttctaagtggaaaaaaaaaacaagacccaaagaaaaaaacaaagtgcatacaaagcaaactgctaatgtaagaaaggttctaaggcagccagcagtgaaaagccaggggtctggagtggccacctggccatgccctgtcccactgccctgtgccaggctgtcgggccaccagtgccctcttgagacagtctccattggctccaagggttctgtgagccacagaaggttgtgaaaggagaagagcctgaagtgtggcagcaccagggcagcccaaagcagggctgcgttgaaaatatcaaagtatctctttaggggtggctctgagggttggtgggattggagggggaaggggcgcctgggaggagtacagtcagcatctattcttgggcaccgggaggagccactctctggaatcttaaattaccaggtaggagtgagaatgctgattagctgtagagctgaaggcacggctgccaggcccctccgggtccttctctagttctccaggcccggtgtatcgaaggcagtggagaggaagggcctgtgggagccagggccagctcagcagcctagccagtcggatttgatgcttccaaacttcacgctcttcagactttggttctccagcttcaggtaataggcacccttgaagaagtagctgtgaccgccgccctgcaggtccacgacggcatccaggttatcggggatggcattccaggcatctgcgatgagcttggggaagccaggatccattttcttcttcacctcattgtatctccagaatttgtctccagcaaagatgtatgtcttcttgtttttgctccagttaaaggcggcatccactcgctggacatcagggggcagtcccaggctggtcagtggcttggggtaccctcgctccagggtgctggctgagtagatccagtattcattccctgcaaagaacacagccttctcctcctgtggggcctcgtataccgcatcaatcttttccgggagctcaggccagaatgtggccaccagcaggggccccatgggcttgtcacgtggcgtcacagtccgccaaatgaaccggtccttgaagaagaagatctcaccacggatctgagcgatgccatcaaatacaatgtcctgtttgcagatctcaggagtgacagggcccagcgtgggggtggggccggtgccaaggtcaatgtcaggagaggccccatagagctcctgaatgcccttgatgtcatcctgggacagacggaagttcttggtgtaggtgtaaatgggtgccatcagggccccagggtcttgggagtgctccagccccatggcgtggccaaactcgtgggctgccacgaggaacaggctgtacccttggtcagggcagaagccccacttgcggtcgtcatcgtagttggctgtggtcgcacaccacatctttccgtcactgcggccggcgctggtgcagctctcatatttgttgcccaggaaagtgaaggggaagacacagggggcaccttctgagttcccaccaacagtggacatggcggtctcagggcagaagccatacttcttgtcgcggtcgtagtcctcagtggtgccgcaccagcggtagccatccgtgcggccctcagtggtgcagctgtcataggatgtgccctggaagcggaatggaaacttgcagggctgtccttcagcgttgccgcccatggtgaacagggcttcatggggacagaagccgtacttgccatccttctcaaagttgtaggtggtggagcaccagaggaagccatcgctgcggccggtatcagtgcagctgttgtactccttgccattgaacaagaaggggaacttgcagtactccccatcggcgttcccatacttcacacggaccacttggccttctcccaaggtccatagctcatcgtcatcaaaatgggagtctcccccaacaccagtgcctggggcgaaggcatgagccaggagtccgtccttaccgtcaaaggggtatccatcgccatgctcccagcggccaaagttgatcatgatgtctgcctctccatcatggattcgagaaaaccgcagtggggtcacatcgctccagacttggaaggcacgagcaaaggcatcatccactgtctctgggtccagatcaggtgtgtagccaatgatcctgtatgtgatctggttcttgtcccacttgggcttgcgagggaagaagttgtagttggccacatctgggttgccgcagcgtggcttccgcatggtctcgatggtattctggtcaagatcacctgtctggggcagtccaaagaacttctgcatcttctttagtgtgtccttcagcacaaacaggttgcagctctccttggggcagccatagaaggtgttcaggtattgcactgccaactctttgtccgttttgggggcgacatcgccggggaacttgatgatgggcgacggcgcggcggcggcgtggctcagcaggcagcccaggagacagagcgccctcaggggacccgtgagcgcggccccgggccattagcgcctccatcgtagcgctccctggccccgcgcgtcgcccgggggtcgctggctcggtgcgtgtggccgcctcgccgcctggttggagcctgctccgcggcgcagggctgcgctccgagggtccgctggctcggtggcctggggtttgcccggctcagcggctcatggtccggcccccgcgccccagcccccgccgccgccgccgccgccgcaggtcctggcaatccctttgtatgtttaaagccccagatgcgcagcctccagccaccgcc

SEQ ID NO: 61349 - DNA, 2018 bp, Homo sapiens
tttcgtgagcctcctgcgcccgttgaggcgctaaagggcttaccccggaggcgggtggaagggcgggcagaggctcctcttaaataccgctcccggccgcacttcgcgctcaccccggcgtccgctttctccctcgcccacagctgccggatagtgctgaagaggagggggcgttccccagaccatggcatctacggaaggtgccaacaatatgcccaagcaggtggaagtgcgaatgcacgacagtcatcttggctcagaggaacccaagcaccggcacctgggcctgcgcctgtgtgacaagctggggaagaatctgctgctcaccctgacggtgtttggtgtcatcctgggagcagtgtgtggagggcttcttcgcttggcatctcccatccaccctgatgtggttatgttaatagtcttcccaggggatatactcatgaggatgctaaaaatgctcattctccctctaatcatctccagcttaatcacagggttgtcaggcctggatgctaaggctagtggccgcttgggcacgagagccatggtgtattacatgtccacgaccatcattgctgcagtactgggggtcattctggtcttggctatccatccaggcaatcccaagctcaagaagcagctggggcctgggaagaagaatgatgaagtgtccagcctggatgccttcctggaccttattcgaaatctcttccctgaaaaccttgtccaagcctgctttcaacagattcaaacagtgacgaagaaagtcctggttgcaccaccgccggacgaggaggccaacgcaaccagcgctgttgtctctctgttgaacgagactgtgactgaggtgccggaggagactaagatggttatcaagaagggcctggagttcaaggatgggatgaacgtcttaggtctgatagggtttttcattgcttttggcatcgctatggggaagatgggagatcaaggccaagctgatggtggatttctccaacattttgaacgagattgtaatgaagttagtgatcatgatcatgtggtactctcccctgggtatcgcctgcctgatctgtggaaagatcattgcaatcaaggacttagaagtggttgctaggcaactggggatgtacatggtaacagtgatcataggcctcatcatccacgggggcatctttctccccttgatttactttgtagtgaccaggaaaaaccccttctccttttttgctggcattttccaagcttggatcactgccctgggcaccgcttccagtgctggaactttgcctgtcacctttcgttgcctggaagaaaatctggggattgataagcgtgtgactagattcgtccttcctgttggagcaaccattaacatggatggtacagccctttatgaagcggtagccgccatctttatagcccaaatgaatggtgttgtcctggatggaggacagattgtgactgtaagcctcacagccaccctggcaagcgtcggcgcggccagtatccccagtgccgggctggtcaccatgctcctcattctgacagccgtgggcctgccaacagaggacatcagcctgctggtggctgtggactggctgctggacaggatgagaacttcagtcaatgttgtgggtgactcttttggggctgggatagtctatcacctctccaagtctgagctggataccattgactcccagcatcgagtgcatgaagatattgaaatgaccaagactcaatccatttatgatgacatgaagaaccacagggaaagcaactctaatcaatgtgtctatgctgcacacaactctgtcatagtagatgaatgcaaggtaactctggcagccaatggaaagtcagccgactgcagtgttgaggaagaaccttggaaacgtgagaaataaggatatgagtctcagcaaattcttgaataaactccccagcgtatcctatggtaactgatgatataaacaagctttctttaaaaaggaaaaaaatgcgtatatttctat

SEQ ID NO: 61350 - DNA, 2507 bp, Homo sapiens
ttccgttgagcatctagacgtttccttggctcttctggcgccaaaatgtcgttcgtggcaggggttattcggcggctggacgagacagtggtgaaccgcatcgcggcgggggaagttatccagcggccagctaatgctatcaaagagatgattgagaactgatgcaaaatccacaagtattcaagtgattgttaaagagggaggcctgaagttgattcagatccaagacaatggcaccgggatcaggaaagaagatctggatattgtatgtgaaaggttcactactagtaaactgcagtcctttgaggatttagccagtatttctacctatggctttcgaggtgaggctttggccagcataagccatgtggctcatgttactattacaacgaaaacagctgatggaaagtgtgcatacagagcaagttactcagatggaaaactgaaagcccctcctaaaccatgtgctggcaatcaagggacccagatcacggtggaggaccttttttacaacatagccacgaggagaaaagctttaaaaaatccaagtgaagaatatgggaaaattttggaagttgttggcaggtattcagtacacaatgcaggcattagtttctcagttaaaaaacaaggagagacagtagctgatgttaggacactacccaatgcctcaaccgtggacaatattcgctccatctttggaaatgctgttagtcgagaactgatagaaattggatgtgaggataaaaccctagccttcaaaatgaatggttacatatccaatgcaaactactcagtgaagaagtgcatcttcttactcttcatcaaccatcgtctggtagaatcaacttccttgagaaaagccatagaaacagtgtatgcagcctatttgcccaaaaacacacacccattcctgtacctcagtttagaaatcagtccccagaatgtggatgttaatgtgcaccccacaaagcatgaagttcacttcctgcacgaggagagcatcctggagcgggtgcagcagcacatcgagagcaagctcctgggctccaattcctccaggatgtacttcacccagactttgctaccaggacttgctggcccctctggggagatggttaaatccacaacaagtctgacctcgtcttctacttctggaagtagtgataaggtctatgcccaccagatggttcgtacagattcccgggaacagaagcttgatgcatttctgcagcctctgagcaaacccctgtccagtcagccccaggccattgtcacagaggataagacagatatttctagtggcagggctaggcagcaagatgaggagatgcttgaactcccagcccctgctgaagtggctgccaaaaatcagagcttggagggggatacaacaaaggggacttcagaaatgtcagagaagagaggacctacttccagcaaccccagaaagagacatcgggaagattctgatgtggaaatggtggaagatgattcccgaaaggaaatgactgcagcttgtaccccccggagaaggatcattaacctcactagtgttttgagtctccaggaagaaattaatgagcagggacatgaggttctccgggagatgttgcataaccactccttcgtgggctgtgtgaatcctcagtgggccttggcacagcatcaaaccaagttataccttctcaacaccaccaagcttagtgaagaactgttctaccagatactcatttatgattttgccaattttggtgttctcaggttatcggagccagcaccgctctttgaccttgccatgcttgccttagatagtccagagagtggctggacagaggaagatggtcccaaagaaggacttgctgaatacattgttgagtttctgaagaagaaggctgagatgcttgcagactatttctctttggaaattgatgaggaagggaacctgattggattaccccttctgattgacaactatgtgccccctttggagggactgcctatcttcattcttcgactagccactgaggtgaattgggacgaagaaaaggaatgttttgaaagcctcagtaaagaatgcgctatgttctattccatccggaagcagtacatatctgaggagtcgaccctctcaggccagcagagtgaagtgcctggctccattccaaactcctggaagtggactgtggaacacattgtctataaagccttgcgctcacacattctgcctcctaaacatttcacagaagatggaaatatcctgcagcttgctaacctgcctgatctatacaaagtctttgagaggtgttaaatatggttatttatgcactgtgggatgtgttcttctttctctgtattccgatacaaagtgttgtatcaaagtgtgatatacaaagtgtaccaacataagtgttggtagcacttaagacttatacttgccttctgatagtattcctttatacacagtggattgattataaataaatagatgtgtcttaaaaaaaaaa

SEQ ID NO: 61351 - DNA, 4723 bp, Homo sapiens
  misc_feature (1)...(4723): n = a,t,c or g
tgaacatcaggtgacattttcatttattctgtttacagatgccacttagttacactgtttttntttttttttttttcagtctcatctgggttggatccaaagacattcagaggcatggtaagaggcaaagcatcagacatctcattggtggcaggtacttcctgactactgtaccacctgctgtatccttccccacctcatcacccccaaagccatttagtgccaaatgctacagtaaaaacccaatgcatttacataaaataatgcctaactgcatatttaccattttttagaaaaaaaaatcccatttaagctcttctaggaaagttatggcaggaaaggtaaggaccaaggctattgagcaagcccttattgtgggaaccttaaaagtaagatggggcactgagttttcccccataagttgggaaaaaagccacactggggcccactcttccctgtgaggcaagatgagaccttccttttataccctgttgagaatctcaggtggacaacgtgactgcatgagtgttgaaaggcagcttgccggcttagttatcaccttgcagaggtagctatgcactacacagccacactgcccaaagcgcgctactaagaacactggtcctacaaagggctccttgtaagagaactttaggaatcacaagtatttagaaaatactatacactatcatttccttcctagagatccgcaatgcacattatcacatggaagtttccagaagttctttcataaagaaatgcttaactttatttaacctagagtttccatatcaacctgaccttggaatctcttacttttttaggtgacacatatcatagaacatattctgagaaatgctcctctatggctttgagaaaatctttgcagaaacaaaataataataattttttacttaaaaaaattaagtaactagtaggatcaagtgttggtcaacaacaaagagatcaaagagtcaggaagtccacgtcatagacccccactttttaattccagcctagcactgacgccataaactgtgcctgcctgaaaacaggcagaaatcagttgtccatgatttctctctttaaggcttgagttgttcggcatggaaatcacagtacagaattgaatgaggtccatcaggagcccatatttcatgtacagaggccaagcgtcttctcttgtcttctgctataacagtgaaatcattaaacatctattgttgcttatcacatgactatgaggtttttcaaatagacctgacaagccctttgtttctaacaaaaaaaggggatgataactcgtagagcttctcattattttcagccacaactacacagaccaagagatcataatacaaagcttttggccaaataatttaaaagtattacagcaaggacagggaaagatgaaaatcaatgacattactggaatgatgtacacatttcatcatctgcataatacataattttttattcttgtttccagggagtttcacatgatattttaaagcagaagcagattctccacatgtagaacttggcagacaataataacgtattatctatgccctgctgggatacaagcacgcattcacacctcaatagcaatcctcgcaaatcgatactgcagagaggcgggaggcctcagtagcactaagcccctctgcgctgcaggctggctggacagcatatccagcaagcctgtcaagctaacaaaccccagggcttctccacagccaacagccatggaaaaatctccctgagtcacaaagcctaggagagttctggagcagtgcaacgtcacacgcggcagagggcctgaccacagccctagagtcagagcttcctgcccagccacgggctcttcccccgccgggccatcagaagaggcacgtcctgggcttctgcctcttctcccttttcttcttctctttctgtttcaggatcttgctcctgaatgggtcactgtgtttggattcctggggcccacagtaatgccagtcctcatggagctggaggaagtcctccttggctgggacacagatcatggtgtgaggctcggggctgcccttgctgagcagggacaggctgacccaaaccagggccctggggaagtggcccaagatggacaggcaagcctctctggtcaatccttgctggcctctgccgggagctcgccggcctccccgactatcctcagaactgggcccacaccaggctgacagttgcttcagtaattttctactcctgagaacgcagaggtgactccctgtggcagcaacatggttttcactggcctcctggtctgtgatcctctcaggccctgccgattcttgacaccctgcatccattacctcctctgcctccctggggtgctctatggatgtgcccacttcatcagatggctgatgagtttttttaggcatgggagcacaaggcacctcagatcttcttaggtcactctccttaccatttggagatgaagctacagaaggttcttcgtaagcctggactcttgactcccagtcttgagttaactgctcccagggacagcagaaaggtgccagagtgccaagcttaacgtagttgggccgttttgcaggagggcgtcttttgtacttttcaagaagattcttagcttgctcttccgcaaacagcatcccggcagggcagtctggaaaatcgcctgggacattaggcgacctcttatactgagaatgcactgcagactctttcaaccctccgactctcacacctcgataaataaatggaatccagaaagccatgccccagccctttgggagtaggacatcccagccacttccccagcctagtcgatcttcaccagtcacttttcctggctgctgaatcaaaagtataggtatcttggattcatggggacctaaaataagctgtgacccaggcaccagcaattcactcctcatccggtttaaatcctgatccgagattttattctctgtgacactcttacagatatcttggttccagataaagctatgcgtacattccacaggcacaccctccagaagcagctgtctaactttctcattatcttggcatttttctggattgggcaaagctttggacttcttttggggcaaatttattcgaggatccccaactgtcagtcccagaatagtacctgccggaatttctgctggtgatgttattcctcccaacaactcgaaaatggcttcttgtctgcaatgaagggaaacgctgtcaggtttcttacaggtttctatccaccagcggtgaggtgtctcctctgtgtcctctcccacagtgtggacagaagcagcttttattgcttcagttaggatggagtgggaaagtggcccaatcagccggaatctgttcatctccatcgtcaaatcgctgattataatgcctgtggttggagagatccaagagtatggtagacatggatctctagttccatcaccgataatttttttaattggtttagcattttctccatcatctttcctttttcttttcttgccaattttctcgtcaggcaattcagtttggcttttttcttgggatggtgttggaagtgggtcagcgatgcagacagctgatttgatgggttccacacactggcacgctgcttttatttcctctaagatatcctgtttaagggttggatgcagccagatccacagctgcctgctctcagaagggtcacccggggtcctctgggacttccagataaacgtaacaggcccaagcatttctctgggatatttattcacccgataaagcacaaggctcccttggcgctttccagacaagcagtgaactgctgcaaacgtcagccctgtgtctatgttacacattccagaaagcgcctttagtatttcttcctctttgcctttcaactccaaacaacagtaataggataaatcctgcaggaggcaccggttcgtcatggctcgatagcaggctctgtggctcttgactgttggcctctccccaaggcagtagccccacttcttgaccatatgaaaccgcttggcgtgccagatgtgagtttctaaccaaatgttcttcttttgtctacggttaaattctagcgtccggttcatgtgacatcttcgagctttatggcatttattttttgaatgttcttttttctgatgtacggctttctccgcctctttctgggcaatctcctgtaaccgtctgggaaggcgtttgacgttgtggctcatggctcttcgtcgcatgtgccgtggcagagtctgaaaaaccagtgaattcgaagacttctgggtcacagcttttaacatagcactgatttcagcagctcgtgcttgagcaaaagtagaagcagttatatacttggggatctcctgagacgtgccctcgggacctgctttccatcctcccttttttctaaacatccctttggaggaagactgctcattcacttcagggtcaggcagagaatgggggttgactctggtttgccgctgtcgtgaagttccaggatgaggctcttgtttttgagcttggaaaggtttttcacctccactgtggtgctttacacctctgtcagccacaaagccagaggacagagtcacattggtaggctggtttctcattttcttggcgtgttttctttcttttgcatttgacatttctgccagacgctgtgaggaatccccgggtcagaatgacaagcctccgcgac

SEQ ID NO: 61352 - DNA, 1962 bp, Homo sapiens
cccaaggccgcggccccgacgctgggcccgggagcggtccccgcgcacagcgcccggacgcgtaggtcccgaagtaggcccgcgctttgcttcgtaactggggatctctgaggacatcttagttctgaccttgtggaggccgcgtctctgctgcgtgttcgcgggccagtcgggccactttgtagaaatcatagccctctaaatcaagggacgaacgctgctggctggagtttgctggacactttcattccacctcctaacaaagagaattcctattccttgaggtcccttggggcagcagttaaagactacacgatccaggagcacctaggacctggggccaccttcctgcccgctttattggatggagcactgcctccccagtttctgggacaccttggggtgtggccttggtgagtgaaacttggggtgctgcctgctgggaaggaaatccggaaacgcagagaggactctctggtggtgacccaggccttgtcagatctgagattcttggaatctcagattgtgggggtgtggatggtgaatgaatttgggtatgcccccctttaccccagaactgaagaggaagcaaactacttgccacacttgaggctgcatgactattcagagaagggaggagccacttctgaattcagagtaggactgcatcaccaggcaaatacctgttctgagccagaaagactctggcttctgaggagatcctgagagtctgagtagtgccaggaagcagcctcagaatttgggggcccattacacaccccagccatgttcctgcgacggcttggtggctggctacctcgcccttggggccgccggaaaccaatgaggcctgacccgccttacccagaacccagacgggtggacagctcctcggagaattcaggaagtgactgggatagtgccccagaaaccatggaagatgtggggcatcccaagactaaggactcgggggcattgagggtttctagggctgcttccgaaccaagcaaggaggagccccaagttgagcagctagggagcaaaagaatggattccctcaagtgggaccagcctatctctagcactcaagagtctgggagactggaggctggaggggccagtcccaaactcagatgggatcatgtggattcaggtggcaccaggagaccaggggtgtcccctgaagggggactcgagcgtccctgggccaggagccccattggagaaacctggtaggcgtgagaagctgttgggctggctgcggggggaaccaggagctccctcccggtacttggggggcccagaagagtgtctgcagatctccaccaacctgaccctgcatcttctggagctgctggcctctgccctgctggccctgtgctcacgaccactgcgggcagccttggacacactgggcctgcgtggaccgctgggcctctggctacatggcctactgtccttcctggctgccctgcatgggctccatgctgttctgagcctacttactgcccaccctttgcacttcgcctgcctctttggtctcctgcaggccttggtgctggctgtcagcctccgggagcccaatggggatgaggcggccactgactgggagagtgaggggttggagagggaaggtgaggagcagaggggagacccgggaaaggggctgtgaccgtggggtgggggcaaagggtgaagagagtgtgggctttaggagaaaagtgtgaggcatgacccaaattgtaagcatagggacctcagggatggggaagaaacccgagtacgagggtgcagggccccccttcatacacaggagagaacagaactatttagggtgtttgtgtttatggacagtgagggcactgctcttggattcaccagctgttatttttgcttttacttttctcccaccttcagttttttttttttttccacctccactttttaaaagcaaaaaaaaaa

SEQ ID NO: 61353 - DNA, 5656 bp, Homo sapiens
aattccgggcgccagtcccgctccgcgccgcgccgctccgctccggctcgggctccggctcgcctcgggctgggctcgggctccggggggggtgtcccccgtgccgggtcccggtatgggtggggacgctccaaccatggcccgtgcccaggcgctcgtgttggaactcaccttccagctctgcgcgccggagaccgagactccggaagttggttgcaccttcgaggagggaagtgacccagcagtgccctgcgagtacagccaggcccagtacgatgacttccagtgggagcaagtgcgaatccaccctggcacccgggcacctgcggacctgccccacggctcctacttgatggtcaacacttcccagcatgccccaggccagcgagcccatgtcatcttccagagcctgagcgagaatgatacccactgtgtgcagttcagctacttcctgtacagccgggacgggcacagcccgggcaccctgggcgtctacgtgcgcgttaatgggggccccctgggcagtgctgtgtggaatatgactggatcccacggccgtcagtggcaccaggctgagctggctgtcagcactttctggcccaatgaatatcaggtgctgtttgaggccctcatctccccagaccgcaggggctacatgggcctagatgacatcctgcttctcagctacccctgcgcaaaggccccacacttctcccgcctgggcgacgtggaggtcaacgcgggccagaacgcgtcgttccagtgcatggccgcgggcagagcggccgaggccgaacgcttcctcttgcaacggcagagcggggcgctggtgccggcggcgggcgtgcggcacatcagccaccggcgcttcctggccactttcccgctggctgccgtgagccgcgccgagcaggacctgtaccgctgtgtgtcccaggccccgcgcggacgcgggacgtctctcaacttcgcggagtttatggtcaagagcccccaactcccatcgcgcccccacagctgctgcgtgctggccccacctacctcatcatccagctcaacaccaactccatcattggcgacgggccgatcgtgcgcaaggagattgagtaccgcatggcgcgcgggccctgggctgaggtgcacgccgtcagcctgcagacctacaagctgtggcacctcgaccccgacacagagtatgagatcagcgtgctgctcacgcgtcccggagacggcggcactggccgccctgggccacccctcatcagccgcaccaaatgcgcagagcccatgagggcccccaaaggcctggcttttgctgagatccaggcccgtcagctgaccctgcagtgggaaccactgggctacaacgtgacgcgttgccacacctatactgtgtcgctgtgctatcactacaccctgggcagcagccacaaccagaccataccgagagtgtgtgaagacagagcaaggtgtcagccgctacaccatgaagaacctgctgccctatcggaacgttcacgtgaggcttgtcctcactaaccctgaggggcgcaaagagggcaaggaggtcactttccagacggatgaggatgtgcccagtgggattgcagccgagtccctgaccttcactccactggaggacatgatcttcctcaagtgggaggagccccaggagcccaatggtctcatcacccagtatgagatcagctaccagagcatcgagtcatcagacccggcagtgaacgtgccaggcccacgacgtaccatctccaagctccgcaatgagacctaccatgtcttctccaacctgcacccaggcaccacctacctgttctccgtgcgggcccgcacaggcaaaggcttcggccaggcggcactcactgagataaccactaacatctctgctcccagctttgattatgccgacatgccgtcacccctgggcgagtctgagaacaccatcaccgtgctgctgaggccggcacagggccgcggtgcgcccatcagtgtgtaccaggtgattgtggaggaggagcagggcagcaggaggctgcggcgggagccaggtggacaggactgcttcccagtgccattgaccttcgaggcggcgctggcccgagggctggtggactacttcggggccgaactggcggccagcagtctacctgaggccatgccctttaccgtgggtgacaacaagacctaccgaggcttctggaacccaccacttgagcctaggaaggcctatctcatctacttccaggcagcaagccacctgaagggggagacccggctgaattgcatccgcattgccaggaaagctgcctgcaaggaaagcaagcggcccctggaggtgtcccagagatcggaggagatggggcttatcctgggcatctgtgcaggggggcttgctgtcctcatccttctcctgggtgccatcattgtcatcatccgcaaagggagagaccactatgcctactcctactacccgaagccggtgaacatgaccaaggccaccgtcaactaccgccaggagaagacacacatgatgagcgccgtggaccgcagcttcacagaccagagcaccctgcaggaggacgagcggctgggcctgtccttcatggacacccatggctacagcacccggggagaccagcgcagcggtggggtcactgaggccagcagcctcctggggggctccccgaggcgtccctgtggccggaagggctccccataccacacggggcagctgcaccctgcggtgcgtgtcgcagaccttctgcagcacatcaaccagatgaagacggccgagggttacggcttcaagcaggagtatgagagcttctttgaaggctgggacgccacaaagaagaaagacaaggtcaagggcagccggcaggagccaatgcctgcctatgatcggcaccgagtgaaactgcacccgatgctgggagaccccaatgccgactacattaatgccaactacatagatattcggataaaccgagaaggttaccacaggtcaaaccacttcatagccactcaagggccgaagcctgagatggtctatgacttctggcgtatggtgtggcaggagcactgttccagcatcgtcatgatcaccaagctggtcgaggtgggcagggtgaaatgctcacggtactggccggaggactcagacacctacggggacatcaagattatgctggtgaagacagagaccctggctgagtatgtcgtgcgcacttttgccctggagcggagaggctactctgcccggcacgaggtccgccagttccacttcacagcgtggccagagcatggcgtcccctaccatgccacggggctgctggctttcatccggcgcgtgaaggcttccaccccacctgatgccgggcccattgtcatccactgcagcgcgggcaccggccgcacaggttgctatatcgtcctggatgtgatgctggacatggcagagtgtgagggcgtcgtggacatttacaactgtgtgaagactctctgctcccggcgtgtcaacatgatccagactgaggagcagtacatcttcattcatgatgcaatcctggaggcctgcctgtgtggggagaccaccatccctgtcagtgagttcaaggccacctacaaggagatgatccgcattgatcctcagagtaattcctcccagctgcgggaagagttccagacgctgaactcggtcaccccgccgctggacgtggaggagtgcagcatcgccctgttgccccggaaccgcgacaagaaccgcagcatggacgtcctgccgcccgaccgctgcctgcccttcctcatctccactgatggggactccaacaactacattaatgcagccctgactgacagctacacacggagtgcggccttcatcgtgaccctgcacccgctgcagagcaccacgcccgacttctgggggctggtctacgattacgggtgcacctccatcgtcatgctcaaccagctgaaccagtccaactccgcctggccctgcctgcagtactggccagagccaggccggcagcaatatggcctcatggaggtggagtttatgtcgggcacagctgatgaagacttagtggctcgagtcttccgggtgcagaacatctctcggttgcaggaggggcacctgctggtgcggcacttccagttcctgcgctggtctgcataccgggacacacctgactccaagaaggccttcttgcacctgctggctgagggggacaagtggcaggccgagagtggggatgggcgcaccatcgtgcactgcctaaacgggggaggacgcagcggcaccttctgcgccctgcgccacggtcctggagatgatccgctgccacaacttggtggacgttttctttgctgccaaaaccctccggaactacaaacccaacatggtggagaccatggatcagtaccacttttgctacgatgtggccctggagtacttggaggggctggagtcaagatagcggggccctggcctggggcacccactgcacactcagggccagacccaccatcctggactggcgaggaagatcagtgcctcctgctctgcccaaacacactcccatggggcaagcactggagtggatgctgggctatcttgctcccccttccactgtgggcagggcctttcgcttgtcccatgggcgggtggtgggccaaggaggagcttagcaagtctgcagcccagccccacctccatagggtcctgcaggcctgtgctgagaggcctggtgctgcctggcagagtgacaaaggctcaggacggctggctctgggggactcaggccaagccccttggcaccatcctggcttttggcagggatgagtgaggccctgcagagagcatcccaggccaaggttcccactcagcctgccccctctgcatgtgggtagaggatgtactgggacttggcatttaggattccatctggcccagcccctgaaggtcctggggaagcaggtctcaattctgaatagccagtggggcacactgactgtccctccccaggggaactgcagcgcccctcctccccactgccccctgcaaccccctgagatattttgctcactatcccctcccccacttgcttccctgatatgtgctctgagcttccctgaaccaggatctgcctattactgctgtgccccatggggggctccttccctgcctgacccactgttgcagaatgaagtcacctcgcccccctcttcctttaatcttcaggcctcactggcctgtcctgctcagcttgggccagtgacaatctgcaaggctgaacaacagcccctggggttgaggcccctgtggctcctggtcaggctgcccgttgtggggaggggcagtgttagagcagggctggtcataccctctggagttcagaggaagaggtaggaccagtgcttttttgtttcttttgttatttttggttgggtgggtgggaaggtctctttaaaatggggcaggccacacccccattccgtgcctcaatttccccatctgtaaactgtagatatgactactgacctacctcgcagggggctgtggggaggcataagctgatgtttgtaaagcgctttgtaaataaacgtgctctctgaatgcctaaaaaaaaaa

SEQ ID NO: 61354 - DNA, 2735 bp, Homo sapiens
tttttttgttttttattttttctttttaagtttgattttttttatttcaaaatgctttgcaattaaatgaattactgttcagaagtctcccacttttcatacaaaaatactgtgctactgatacagttgaaaaaattcaatgatgtctctcctgcaggagaaattcacagcatccccagggtcaacatgaaatctggccctgtccccgccactgggggctccccaggcctgcgttcctgataaactgggacaggttttccaggcactgaccaactatccaccaagggtcctctgcctccaagacagaccctgaatcaatagcagcaactttcccatatttcatgtagggatatgtggagggggacaggaactctcccatttccccagctgggcctactacctgcctgccctgttcactctggtgccatgaggcaggttcagtgattgattggtcttgcctgctgcagaggacctggccagctccagaagggtcactcatcaggtcctgcaaaggtctgtatcattaatcagtgtcatcagtgtcctcagaagacactagcagagtccagggtgatgcgttcagccacaagcacaaagactgctttttctaaagagcaggatgaggtgaatgtgggaacggaaagcagttgtcacgaaggctgtgtggctctgctgggggagaggcatccacagtctgtgccaaggaggtacctcaccctgtgcagcaggagcgttaaggccaaaaaacaaaaggggccaacagaaaacagctcaggtgatggggggaggagcagcaagaaaaaacgacaaccgagaccaactgaaggttcggtcaggaatgcaggctcttccgtctatacagtgtttaaaaagatccaaatgtgactgagatcattccagcctgcactttttatttgtaggcagaaggaacgggataggttgaggggcatgacgggggctctcgccacctcttgtctgcacctctggaacaggtgggagccgaatcattcaagtcctacctggtcagactcccaaccacgctgaggcaggcccttaccttggattgcctcatgggcctccctcttgaaaaagaccctcactctgtttggaaaagatcccttagcagccataatcaggaaagagactctagagcgagcccagggcttccccaaagcggattttctgtcctgttttcagctggaaattgaagtccttgggggcctcgaagatgagcacgatggtggagcccaggttgaaactcgccccaggtgctcgccccttaacgccatggggacgccctctctattggtgtgcgtcacgaagctgaagtcattgtaggagcccttgctgtgccttgggctgtttgtgtgcaggtcccggtcaaagtagatgcgaatggagccccagttgggtggcccccacagctgtcagtgagaagaagccatgtttccagtcccccgtcaggaccacccgctcgttatggcagaagagctctttgatccagcgagccatgccagggttcactgacatcagggagcctgggaagtggcgccggtgggacacagtccagtcggtgggggagtggaagcagtggtagtccccaggggccaggtagatgacacagtgatagagctcattcccttcccgggtgaccagctggttcttgaaggagtcacacgacgcggctggtgggaagggcaggtcctctgtgcacatacgcgggcccaggaacgactccagggagtaggtgaccccctttacctgctccacctcacagttcttcacctgcccaaagttgaggatccttccatccgatgggctaatcacgctgtgcaggccacagacaggccgggcctgcggcttcagcttgcgccggaagaactcgctgaggttgcggtagtgatgcaggtcctccacagcggcctctttcatgttcaccccaaacgtccagatgtacaggctgtagacgggcctgcgcagccagtgtggcagctccacctgattgaggcgaccccaggcccgtgacagcaagcgcgttggcactgacttgtacaaagccaccctgcttacgggcctccatcccacccggctgagcggtctgagggcgccgaagggcaggaggtagtagaggacggtcaagggccaggagcgcagtttcagagcgggtctggacatgcagctcagctgccccagcctccgcctcagggccagctgggggaagtgcaaccatttcgccgcgcggagctctggtccttgccgcgcctctgactgacacatcatgggccggcgcagggagggcggggcgaggctcactcgatcactccctttgttttcctctttcctccccttcccccgagccagcagatctcctgtgctgtcactgctccagggcctctgcctctgcgaggctggttggtggcgccgcttcctgggtttggttcagtctcggtggctcacagggtgcagaatagagggtcagggccgcgcccggcaggagataagatgtggaggaagtgagctcacgcagcccgggccgtgcccacgtggggacggaaaaaaagcccacgactcgctcaaccttgtccgcggggctcctcaggccggggccgcgtcgtcacagctgggagagcccacctgcgaccgaaggccctagaagggcacccccacccggcactggccctctgagcgggcagggtggggcgcctccctgagaagtcacctggggctccacgaaa

SEQ ID NO: 61355 - DNA, 716 bp, Homo sapiens
ttttttttttttcacagcagcaccagaaacatatacactttattgaatgccattgtagaaaagcgtgtgaggataaagggctgatgcaggactcggctgtggggacagggcgaggaatggaaggtggagtaagtggaatacaggtcaagggcagagctcctggcctctgggggcagggcgaggaatggaagatagagtacgtgggatacaggtcacgggcagagctcctggcctcaatgatgcctcctgatctatcgctgggcctggacgaccaacactgggatgatgatgagcagaatggtcatgaagatgcccaaaatcagggcccagatgttcaggcacttggcggtggaggcataggcctgggccccggtcacgtcgccaaccatcttcctgtccctagacttcacggagtacgcgaatgctatgaagcccaggcagcaggtgttcatgaagagggtgttgaacagggaccagacgacatggtcaggcacggaggtctcgctgcggatgtggatcacggtggacatcgggggagcagggttgtggggcgcccccagcatagccacttcctgctcctccttgagcatctcgtagttgggaggctggccggctgttgacaggagagaaggtttgcaacaatgtgggtcatggtgaccaagcggtgatcgggggtaaccgggatgggttctcaatggagccccttcccttttccc

SEQ ID NO: 61356 - DNA, 3133 bp, Homo sapiens
cgttgctgtcgacgccccaccatggggtctactctcgggaggaggagctgctgagggagcggaaacgcctgggggtcttcggcatcacctcctacgacttccacagcgagagtggcctcttcctcttccaggccagcaacagcctcttccactgccgcgacggcggcaagaacggcttcatggtgtcccctatgaaaccgctggaaatcaagacccagtgctcagggccccggatggaccccaaaatctgccctgccgaccctgccttcttctccttcatcaataacagcgacctgtgggtggccaacatcgagacaggcgaggagcggcggctgaccttctgccaccaaggtttatccaatgtcctggatgaccccaagtctgcgggtgtggccaccttcgtcatacaggaagagttcgaccgcttcactgggtactggtggtgccccacagcctcctgggaaggttcagagggcctcaagacgctgcgaatcctgtatgaggaagtcgatgagtccgaggtggaggtcattcacgtcccctctcctgcgctagaagaaaggaagacggactcgtatcggtaccccaggacaggcagcaagaatcccaagattgccttgaaactggctgagttccagactgacagccagggcaagatcgtctcgacccaggagaaggagctggtgcagcccttcagctcgctgttcccgaaggtggagtacatcgccagggccgggtggacccgggatggcaaatacgcctgggccatgttcctggaccggccccagcagtggctccagctcgtcctcctccccccggccctgttcatcccgagcacagagaatgaggagcaggcggctagcctctgccagagctgtccccaggaatgtccagccgtatgtggtgtacgaggaggtcaccaacgtctggatcaatgttcatgacatcttctatcccttcccccaatcagagggagaggacgagctctgctttctccgcgccaatgaatgcaagaccggcttctgccatttgtacaaagtcaccgccgttttaaaatcccagggctacgattggagtgagcccttcagccccggggaaggtgagcagagcctgacgaatgctatctgggtcaatgaggagaccaagctggtgtacttccagggcaccaaggacacgccgctggagcaccacctctacgtggtcagctatgaggcggccggcgagatcgtacgcctcaccacgcccggcttctcccatagctgctccatgagccagaacttcgacatgttcgtcagccactacagcagcgtgagcacgccgccctgcgtgcacgtctacaagctgagcggccccgacgacgaccccctgcacaagcagccccgcttctgggctagcatgatggaggcagccaagatcttccatttccacacgcgctcggatgtgcggctctacggcatgatctacaagccccacgccttgcagccagggaagaagcaccccaccgtcctctttgtatatggaggcccccaggtgcagctggtgaataactccttcaaaggcatcaagtacttgcggctcaacacactggcctccctgggctacgccgtggttgtgattgacggcaggggctcctgtcagcgagggcttcggttcgaaggggccctgaaaaaccaaatgggccaggtggagatcgaggaccaggtggagggcctgcagttcgtggccgagaagtatggcttcatcgacctgagccgagttgccatccatggctggtcctacgggggcttcctctcgctcatggggctaatccacaagccccaggtgttcaaggtggccatcgcgggtgccccggtcaccgtctggatggcctacgacacagggtacactgagcgctacatggacgtccctgagaacaaccagcacggctatgaggcgggttccgtggccctgcacgtggagaagctgcccaatgagcccaaccgcttgcttatcctccacggcttcctggacgaaaacgtgcactttttccacacaaacttcctcgtctcccaactgatccgagcagggaaaccttaccagctccaggtggccctgcctcctgtctccccgcagatctaccccaacgagagacacagtattcgctgccccgagtcgggcgagcactatgaagtcacgttgctgcactttctacaggaatacctctgagcctgcccaccgggagccgccacatcacagcacaagtggctgcagcctccgcggggaaccaggcgggagggactgagtggcccgcgggccccagtgaggcactttgtcccgcccagcgctggccagccccgaggagccgctgccttcaccgccccgacgccttttatccttttttaaacgctcttgggttttatgtccgctgcttcttggttgccgagacagagagatggtggtctcgggccagcccctcctctccccgccttctgggaggaggaggtcacacgctgatgggcactggagaggccagaagagactcagaggagcgggctgccttccgcctggggctccctgtgacctctcagtcccctggcccggccagccaccgtccccagcacccaagcatgcaattgcctgtcccccccggccagcctcccccacttgatgtttgtgttttgtttggggggatatttttcataattatttaaaagacaggccgggcgcggtggctcacgtctgtaatcccagcactttgggaggctgaggcgggcggatcacctgaggttgggagttcaagaccagcctggccaacatggggaaaccccgtctctactaaaaatacaaaaaattagccgggtgtggtggcgcgtgcctataatcccagctactcgggaggctgaggcaggagaatcgcttgaacccgggaggtggaggttgcggtgagccaagatcgcaccattgcactccagcctgggcaacaagagcgaaactctgtctcaaaataaataaaaaataaaagacagaaagcaaggggtgcctaaatctagacttggggtccacaccgggcagcggggttgcaacccagcacctggtaggctccatttcttcccaagcccgagcagagggtcatgcgggccccacaggagaagcg

SEQ ID NO: 61357 - DNA, 1120 bp, Homo sapiens
gttatgtgttcccgtccgtactggaggctagctcttgtcgcggccgcggcgagttaacatcgtttttccaatctgtccgcggctgccgccacccaagacagagccagaatgttcaggatgctgaacagcagttttgaggatgaccccttcttctctgagtccattcttgcacaccgagaaaatatgcgacagatgataagaagtttttctgaaccctttggaagagacttgctcagtatctctgatggtagagggagagctcataatcgtagaggacataatgatggtgaagattctttgactcatacagatgtcagctctttccagacaatggaccaaatggtgtcaaatatgagaaactatatgcagaaattagaaagaaacttcggtcaactttcagtggatccaaatggacattcattttgttcttcctcagttatgacttattccaaaataggggaataacccgcaaaaggtttttgcaggcctcaactcaaactcgtcgagctccaggaggaataaaggaaaccaggaaagcaatgagagattctgacagtggactagaaaaaatggctattggtcatcatatccatgaccgagctcatgtcattaaaaagtcaaagaacaagaagactggagatgaagaggtcaaccaggagttcatcaatatgaatgaaagcgatgctcatgcttttgatgaggagtggcaaagtgaggttttgaagtacaaaccccgggacgacacaatctaggaaacactagaatgagaagtgttggccatgagaatcctggctcccgagaacttaaaagaagggagaaacctcaacaaagtccagccattgaacatggaaggagatcaaatgttttgggggacaaactccacatcaaaggctcatctgtgaaaagcaacaaaaaataaatagccatgcatttgatttgtttagttttgattgttttaacagttagtaatggtgctgggtaataagcataagaccaatctcttgctgttaaatcagttctgtccttggcaactttcttctgatatctgaatgttcatgaaggtcctagctttatattgtccctcttttaggaataaaattttgattttcaacaaaaaaaa

SEQ ID NO: 61358 - DNA, 3584 bp, Homo sapiens
cggacgcgtgggggcgcggagcccgggacgcgcgtacgccctgctgcttctcctgatctgctttaacgttggaagtggacttcacttacaggtcttaagcacaagaaatgaaaataagctgcttcctaaacatcctcatttagtgcggcaaaagcgcgcctggatcaccgcccccgtggctcttctggagggagaggatctgtccaaaaagaatccaattgccaagatacattctgatcttgcagaagaaagaggactcaaaattacttacaaatacactggaaaagggattacagagccaccttttggtatatttgtctttaacaaagatactggagaactgaatgttaccagcattcttgatcgagaagaaacaccattttttctgctaacaggttacgctttggatgcaagaggaaacaatgtagagaaacccttagagctacgcattaaggttcttgatatcaatgacaacgaaccagtgttcacacaggatgtctttgttgggtctgttgaagagttgagtgcagcacatactcttgtgatgaaaatcaatgcaacagatgcagatgagcccaataccctgaattcgaaaatttcctatagaatcgtatctctggagcctgcttatcctccagtgttctacctaaataaagatacaggagagatttatacaaccagtgttaccttggacagagaggaacacagcagctacactttgacagtagaagcaagagatggcaatggagaagttacagacaaacctgtaaaacaagctcaagttcagattcgtattttggatgtcaatgacaatatacctgtagtagaaaataaagtgcttgaagggatggttgaagaaaatcaagtcaacgtagaagttacgcgcgtaaaagtgttcgatgcagatgaaataggttctgataattggctggcaaattttacatttgcatcaggaaatgaaggaggttatttccacatagaaacagatgctcaaactaacgaaggaattgtgacccttattaaggaagtagattatgaagaaatgaagaatcttgacttcagtgttattgtcgctaataaagcagcttttcacaagtcgattaggagtaaatacaagcctacacccattcccatcaaggtcaaagtgaaaaatgtgaaagaaggcattcattttaaaagcagcgtcatctcaatttatgttagcgagagcatggatagatcaagcaaaggccaaataattggaaattttcaagcttttgatgaggacactggactaccagcccatgcaagatatgtaaaattagaagatagagataattggatctctgtggattctgtcacatctgaaattaaacttgcaaaacttcctgattttgaatctagatatgttcaaaatggcacatacactgtaaagattgtggccatatcagaagattatcctagaaaaaccatcactggcacagtccttatcaatgttgaagacatcaacgacaactgtcccacactgatagagcctgtgcagacaatctgtcacgatgcagagtatgtgaatgttactgcagaggacctggatggacacccaaacagtggccctttcagtttctccgtcattgacaaaccacctggcatggcagaaaaatggaaaatagcacgccaagaaagtaccagtgtgctgctgcaacaaagtgagaaaaagcttgggagaagtgaaattcagttcctgatttcagacaatcagggttttagttgtcctgaaaagcaggtccttacactcacagtttgtgaggttctgcatggcagccggctgcagggaagcacagcatgactcctatgtgggcctgggacccgcagcaattgcgctcatgattttggcctttctgctcctgctattggtaccacttttactgctgatgtgccattgcggaaagggcgccaaaggctttacccccatacctggcaccatagagatgctgcatccttggaataatgaaggagcaccacctgaagacaaggtggtgccatcatttctgccagtggatcaagggggcagtctagtaggaagaaatggagtaggaggtatggccaaggaagccacgatgaaaggaagtagctctgcttccattgtcaaagggcaacatgagatgtccgagatggatggaaggtgggaagaacacagaagcctgctttctggtagagctacccagtttacaggggccacaggcgctattcatgaccactgaaaccacgattaccgcaagggccacaggggcttccagagacgtggccggagctcaggcagctgctgttgcactgaacgaagaattcttaaaaaattatttcactgataaagcggcctcttacactgaggaagatgaaaatcacacagccaaagattgccttctggtttattctcaggaagaaactgaatcgctgaatgcttctattggttgttgcagctttattgaaggagagctagatgaccgcttcttagatgatttgggacttaaattcaagacactagctgaagtttgcctgggtcaaaaaatagatataaataaggaaattgagcagagacaaaaacctgccacagaaacaagtatgaacacagcttcacattcactctgtgagcaaactatggttaattcagagaatacctactcctctggcagtagcttcccagttccaaaatctttgcaagaagccaatgcagagaaagtaactcaggaaatagtcactgaaagatctgtgtcttctaggcaggcgcaaaaggtagctacacctcttcctgacccaatggcttctagaaatgtgatagcaacagaaacttcctatgtcacagggtccactatgccaccaaccactgtgatcctgggtcctagccagccacagagccttattgtgacagagagggtgtatgctccagcttctaccttggtagatcagccttatgctaatgaaggtacagttgtggtcactgaaagagtaatacagcctcatgggggtggatcgaatcctctggaaggcactcagcatcttcaagatgtaccttacgtcatggtgagggaaagagagagcttccttgcccccagctcaggtgtgcagcctactctggccatgcctaatatagcagtaggacagaatgtgacagtgacagaaagagttctagcacctgcttccactctgcaatccagttaccagattcccactgaaaattctatgacggctaggaacaccacggtgtctggagctggagtccctggccctctgccagattttggtttagaggaatctggtcattctaattctaccataaccacatcttccaccagagtcaccaagcatagcactgtacagcattcttactcctaaacagcagtcagccacaaactgacccagagtttaattagcagtgactaatttcatgtttccaatgtacctgatttttcatgagccttacagacacacagagacacatacacattgatcttaaaatttttctcagtcactgatatgcaaaggaccacactgtctctgcttccaggagtattttagaaatgttccacaatttactgaagacatagaga

SEQ ID NO: 61359 - DNA, 3061 bp, Homo sapiens
ctgctgctcctcctcctttcccagcccgccgcggccatggcggacagcgccagcgagagcgacacggacggggcggggggcaacagcagcagctcggccgccatgcagtcgtcctgctcgtcgacctcgggcggcggcggtggcggcgggggaggcggcggcggtgggaagtcggggggcattgtcatctcgccgttccgcctggaggagctcaccaaccgcctggcctcgctgcagcaagagaacaaggtgctgaagatagagctggagacctacaaactgaagtgcaaggcactgcaggaggagaaccgcgacctgcgcaaagccagcgttaccatccaagccagggctgagcaggaagaagaattcattagtaacactttattcaagaaaattcaggctttgcagaaggagaaagaaacccttgctgtaaattatgagaaagaagaagaattcctcactaatgagctctccagaaaattgatgcagttgcagcatgagaaaggcgaactagaacagcatcttgaacaagagcaggaatttcaggtcaacaaactgatgaagaaaattaaaaaactggagaatgacaccatttctaagcaacttacattagaacagttgagacgggagaagattgaccttgaaaatacattggaacaagaacaagaagcactagttaatcgcctctggaaaaggatggataagcttgaagctgaaacgcgaatcctgcaggaaaaattagaccagcccgtctctgctccaccatcgcctagagatatctccatggagattgattctccagaaaatatgatgcgtcacatcaggtttttaaagaatgaagtggaacggctgaagaagcaactgagagctgctcagttacagcattcagagaaaatggcacagtatctggaggaggaacgtcacatgagagaagagaacttgaggctccagaggaagctgcagagggagatggagagaagagaagccctctgtcgacagctctccgagagtgagtccagcttagaaatggacgacgaaaggtattttaatgagatgtctgcacaaggattaagacctcgcactgtgtccagcccgatcccttacacaccttctccgagttcaagcaggcctatatcacctggtctatcatatgcaagtcacacggttggtttcacgccaccaacttcactgactagagctggaatgtcttattacaattccccgggtcttcacgtgcagcacatgggaacatcccatggtatcacaaggccttcaccacggagaagcaacagtcctgacaaattcaaacggcccacgccgcctccatttcccaacacacagaccccagtccagccacctccaccttcacctccgccacccatgcagcccacggtcccctcagcagccacctcgcagcctactccttcgcaacattcggcgcacccctcctcccagccttaatgcatgagcttagtctgaatttcaagatgggactcatccaatggagccgtctactcaacgccaaaggcttccttctctggcatatttggatatgacttatttgcactgaggttatctaggcttcactatccattgtgttgtaaatgtttgtcagaaatgcagccagtgttgtgggtctacaacactaaccagacgactttttccatcagtgttttacttgaatcttcatgtacgtccattccctggctggaaccttcgctgtttggtatttggtatttcagcagcagtgtgcaatttttgcttggcccagagcttcattctcctggcttttaggtttgtaaaagaaaaagggatatcttttttatatttttttccatgaatctgcagaaaattactgagctgttgttaccctcctctcattataatagtgtttaccaaacataccaataattcagcactacaattcagacctttgaaaatctggctttcagtgtagaacagaaagttagatgaatcagtgcccaagacatattttctgtttaacagaactttctacagatacattttttacaggttattttcattgtgttattgacatccatgtctctcgtaaaacagatggcccaaagtaatgaatcatgtggctgtaccttctccacataaatgggatggataattatcgtatattaagatgtgattctcttttttatccttaatgttaatctacttaacctggccccctctaacatgagtcgataaatgttgtcctactcaccggtggtttcaatggctaattagaatgtgttatttgatttctgctgcagaaggcagtgtgattgtaacaaaaacaatgcggcttccccctttcgtacttcatttgtgttctcttaaaatagagtttgaacaaatattttaaaggtgcaaaataccattagaaaatactatttgaaatggacattatcgcattatcttggcataatggccagaaaattattgtattgcttggcagaaaagaaaataaggtctaaaggaaagtagcacattagcattgatggctgttcatttcacccagtataagcaagtgcagtgtacaaagaagtatattctgaatacattatttccattcatttagcacaaataaatcatttggtttcactttgcagtggaacactgagtcactcttttcttaatacgtgcaacatcttaatttttgtttttcagcagttgctgttttgtactttggtagtgaagtgatttttaccacctgtgtttgcatatttatatatgctgtggatgaaaataacttactagagaatgtatattttatgacaagaatgtgtatctgttggatataatcagagaactgaaaagtaatttatcagtaatttttaagagtccatgttttgtgacaaccatctctaatagccaactctttattaaacacactcctaaaaataaggaaccatgacattgtagatatttaatattgtacagtatagaaacctccatttttgccttcgaatgcatatttaagagttaacagaatgaaaaaaaaaagtcttgttggataatagtgtttgactagcgttttaagaacttg

SEQ ID NO: 61360 - DNA, 5229 bp, Homo sapiens
gcggctgcctagttgacgcacccattgagtcgctggcttctttgcagcgcttcagcgttttcccctggagggcgcctccatccttggaggcctagtgccgtcggagaagagagcgggagccgcggacagagacgcgtgcgcaattcggagccgactctgggtgcggactgtgggagctgactctgggtagccggctgcgcgtggctggggaggcgaggccggacgcacctctgtttgggggtcctcagagattaatgattcatcaagggatagttgtacttgtctcgtgggaatcacttcatcatgcgaaatctgaaattatttcggaccctggagttcagggatattcaaggtccagggaatcctcagtgcttctctctccgaactgaacaggggacggtgctcattggttcagaacatggcctgatagaagtagaccctgtctcaagagaagtgaaaaatgaagtttctttggtggcagaaggctttcttccagaggatggaagtggccgcattgttggtgttcaggacttgctggatcaggagtctgtgtgtgtggccacagcctctggagacgtcatactctgcagtctcagcacacaacagctggagtgtgttgggagtgtagccagtggtatctctgttatgagttggagtcctgaccaagagctggtgcttcttgccacaggtcaacagaccctgattatgatgacaaaagattttgagccaatcctggagcagcagatccatcaggatgattttggtgaaagcaagtttatcactgttggatggggtaggaaggagacacagttccatggatcagaaggcagacaagcagcttttcagatgcaaatgcatgagtctgctttgccctgggatgaccatagaccacaagttacctggcggggggatggacagttttttgctgtgagtgttgtttgcccagaaacaggggctcggaaggtcagagtgtggaaccgagagtttgctttgcagtcaaccagtgagcctgtggcaggactgggaccagccctggcttggaaaccctcaggcagtttgattgcatctacacaagataaacccaaccagcaggatattgtgttttttgagaaaaatggactccttcatggacactttacacttcccttccttaaagatgaggttaaggtaaatgacttgctctggaatgcagattcctctgtgcttgcagtctggctggaagaccttcagagagaagaaagctccattccgaaaacctgtgttcagctctggactgttggaaactatcactggtatctcaagcaaagtttatccttcagcacctgtgggaagagcaagattgtgtctctgatgtgggaccctgtgaccccataccggctgcatgttctctgtcagggctggcattacctcgcctatgattggcactggacgactgaccggagcgtgggagataattcaagtgacttgtccaatgtggctgtcattgatggaaacagggtgttggtgacagtcttccggcagactgtggttccgcctcccatgtgcacctaccaactgctgttcccacaccctgtgaatcaagtcacattcttagcacaccctcaaaagagtaatgaccttgctgttctagatgccagtaaccagatttctgtttataaatgtggtgattgtccaagtgctgaccctacagtgaaactgggagctgtgggtggaagtggatttaaagtttgccttagaactcctcatttggaaaagagatacaaaatccagtttgagaataatgaagatcaagatgtaaacccgctgaaactaggccttctcacttggattgaagaagacgtcttcctggctgtaagccacagtgagttcagcccccggtctgtcattcaccatttgactgcagcttcttctgagatggatgaagagcatggacagctcaatgtcagttcatctgcagcggtggatggggtcataatcagtctatgttgcaattccaagaccaagtcagtagtattacagctggctgatggccagatatttaagtacctttgggagtcaccttctctggctattaaaccatggaagaactctggtggatttcctgttcggtttccttatccatgcacccagaccgaattggccatgattggagaagaggaatgtgtccttggtctgactgacaggtgtcgctttttcatcaatgacattgaggttgcgtcaaatatcacgtcatttgcagtatatgatgagtttttattgttgacaacccattcccatacctgccagtgtttttgcctgagggatgcttcatttaaaacattacaggccggcctgagcagcaatcatgtgtcccatggggaagttctgcggaaagtggagaggggttcacggattgtcactgttgtgccccaggacacaaagcttgtattacagatgccaaggggaaacttagaagttgttcatcatcgagccctggttttagctcagattcggaagtggttggacaaacttatgtttaaagaggcatttgaatgcatgagaaagctgagaatcaatctcaatctgatttatgatcataaccctaaggtgtttcttggaaatgtggaaaccttcattaaacagatagattctgtgaatcatattaacttgttttttacagaattgaaagaagaagatgtcacgaagaccatgtaccctgcaccagttaccagcagtgtctacctgtccagggatcctgacgggaataaaatagaccttgtctgcgatgctatgagagcagtcatggagagcataaatcctcataaatactgcctatccatacttacatctcatgtaaagaagacaaccccagaactggaaattgtactgcaaaaagtacacgagcttcaaggaaatgctccctctgatcctgatgctgtgagtgctgaagaggccttgaaatatttgctgcatctggtagatgttaatgaattatatgatccattctcttggcacctatgactttgatttggtcctcatggtagctgagaagtcacagaaggatcccaaagaatatcttccatttcttaatacacttaagaaaatggaaactaattatcagcggtttactatagacaaatacttgaaacgatatgaaaaagccattggccacctcagcaaatgtggacctgagtacttcccagaatgcttaaacttgataaaagataaaaacttgtataacgaagctctgaagttatattcaccaagctcacaacagtaccaggatatcagcattgcttatggggagcacctgatgcaggagcacatgtatgagccagcggggctcatgtttgcccgttgcggtgcccacgagaaagctctctcagcctttctgacatgtggcaactggaagcaagccctctgtgtggcagcccagcttaactttaccaaagaccagctggtgggcctcggcagaactctggcaggaaagctggttgagcagaggaagcacattgatgcggccatggttttggaagagtgtgcccaggattatgaagaagctgtgctcttgctgttagaaggagctgcctgggaagaagctttgaggctggtatacaaatataacagactggatattatagaaaccaacgtaaagccttccattttagaagcccagaaaaattatatggcatttctggactctcagacagccacattcagtcgccacaagaaacgtttattggtagttcgagagctcaaggagcaagcccagcaggcaggtctggatgatgaggtaccccacgggcaagagtcagacctcttctctgaaactagcagtgtcgtgagtggcagtgagatgagtggcaaatactcccatagtaactccaggatatcagcgagatcatccaagaatcgccgaaaagcggagcggaagaagcacagcctcaaagaaggcagtccgctggaggacctggccctcctggaggcactgagtgaagtggtgcagaacactgaaaacctgaaagatgaagtataccatattttaaaggtactctttctctttgagtttgatgaacaaggaagggaattacagaaggcctttgaagatacgctgcagttgatggaaaggtcacttccagaaatttggactcttacttaccagcagaattcagctaccccggttctaggtcccaattctactgcaaatagtatcatggcatcttatcagcaacagaagacttcggttcctgttcttgatgctgagctttttataccaccaaagatcaacagaagaacccagtggaagctgagcctgctagactgagtgactgcagttaggagggatccgacagagaagaccatttccactcattcctgttgtcctaccaccccttgctctttgagggctggctattgagaactggaaagagtaaaatgataacttaccttagcattgccaagaacttcagcagacaacaagcaattctatttattttatgttgtgtatacatcttgatcattagcaagacattaagctttaaccattatggcaccattttgtgagaatgattgttctttcacttgggctgtttgagagcataattatggtaatcatgagattaatgtttcatgatttctacctccaaagtgtgaagacaagtaaaacaatgtttctaaattgtcttattttgttggcggagaagattacaatggctattagtgctacatttggtcaaatgtaatcacttaaatagcttcttgtcaccttaaactaaagcagaataaaaagtatcctttgaaattataagccctcctttgctgacagctattattttgtaacatcttaccaggtcatgtgctttcagttataactgggctgagcctcctataattacaatgtctatagggactgttttactgcctgtgtattttctgctagagagttagcaatgttagagctagaacagattagaatttctaaacagtatcatgcacagttggtgtgagtgatcagtgtgcattgtatggcatgcatggttgtgaattattctctgttctccaaatactgtttctttaactcagatatttttgttagtgtctaggccacttcatttatttttcgtcatggtactttactgacttctctttattcaattctccacgccctcaccaaaaaaaactgtctcaaaatgagaatattttattttcatggtgagtctagaaaacgcccacttcattctgattaaaaat

SEQ ID NO: 61361 - DNA, 714 bp, Homo sapiens
ttttttttttttgttttccagttttgtttttctgtactaaaaatatctagtgggtgctaggattgaaagggcaagagaggttgagatactgacatctcctcatgtggatgaagtggccattacctctggtttctgtctattggttgcatctctgtgaacactgaagagaggctattccaaatatcctccaggccaatcctgacccgtttccaaaaagccagggctgggcaggggctggcgggtggcaggctgggactgcttctgaggtggatggtggggaagggggtagtggtggtcctggtactggtggtgctctgagaggcacagttggtgtcagtacagagacttgtgtccagggggcactcttcccgaagtcggttgcagggacattgttgataggtgcaaggcttgtgctccgtgcggagctggctcagcgccccaactcgaaggcgcccggaaaggccgtgcagcttcccagaccggctccggctcatggtgcccgacttgcagtggcagtgccacgggccccagggcatcagcaccagccgcagatcctcaggagatggcatggctgtgggtgagggtgacggccaccggctcggggtagacccaggtgtggacctctggctcagggtggcctgcgagcctggcaggtcctcagtagacctcccgggggagcgcggcaggcttgaagtcagcctgatttcaggctcc

SEQ ID NO: 61362 - DNA, 3603 bp, Homo sapiens
tgcggtcagaggagcaggaggaggtcccccgacatgcctgaggcaaaaccagcggccaaaaaggcccccaaaggcaaagatgcccccaaaggagcccccaaggaggctccccctaaggaggctcctgcagaggcccccaaagaagccccacccgaggaccagtccccgactgcagaggagcccaccggcgttttcctgaagaagccggactccgtctcagtggagactgggaaggacgcagtggtcgtggccaaggtgaacgggaaggagctcccagacaaaccgaccatcaagtggttcaaggggaagtggctggagctgggcagcaagagtggcgcccgcttctccttcaaggagtcccacaactccgccagcaatgtgtacaccgtggagctgcacattgggaaggtggtactgggggaccgtgggtattaccgcctcgaggtcaaagccaaggacacctgtgacagctgtggcttcaacatcgatgtggaggcaccccgtcaggatgcctctgggcagagtctagaaagcttcaagcgtacgagtgaaaagaagtcggatactgcaggtgagctggatttcagtggcctgttgaagaagagggaggtggtggaggaggagaagaagaagaaaaagaaagatgacgatgacctaggcatccccccggagatttgggagctcctgaaaggggcaaagaagagcgagtacgagaaaatcgccttccagtatggcatcaccgacctccggggcatgctgaagcggctgaaaaaggctaaggtcgaggtcaagaagagtgcagcattcacaaagaagctggatccagcctaccaagtggacagaggcaacaagatcaagttgatggtagagatcagcgacccagacctgaccctcaagtggttcaagaacggccaggagatcaaaccaagcagcaagtacgtgtttgagaacgttggtaagaagcgaattcttaccatcaacaagtgcacgctggcggatgacgctgcctatgaagtagctgtcaaggatgagaagtgtttcaccgagctcttcgtcaaagaacctccagtcctaattgtcacacctcttgaggaccagcaggtgtttgtgggtgaccgggtggaaatggcagtggaggtgtcagaagagggtgcccaggtgatgtggatgaaagatggtgtggaactgactcgggaggattccttcaaggcccggtaccgcttcaagaaggacgggaagcgccacatcctcatcttctcagacgtggtccaggaggacaggggtcgctatcaggtcataaccaatggcggccagtgtgaggccgagctgattgtggaagagaaacagctggaggtcctgcaggacatcgcggatctgacggtgaaggcctcagaacaagctgtgttcaagtgcgaggtgtctgatgagaaagtgacgggcaagtggtataagaatggggtcgaggtgcggcccagcaagaggatcaccatttcccatgtaggcaggttccacaagctggtgatcgatgacgtccgccccgaggatgagggagactacacgtttgtgcctgacggctacgcccttggttcgctctcggccaagctcaacttcctggaaatcaaggtggagtacgttcccaagcaaagagccaccaaagatcccacttggatttgcctcggggggaaagacctcagagaatgccgatttgtggttgtggctggaaacaagctgaggcttgacgttgtccatcacaggggaagccccctccccgttcgctaccttggctgaagggagaatgaggtattcacgaccaccgagggcaggacccgcatcgagaagcgggtggactgcagcagctttgtgattgagagtgcgcagcgggaagacgagggccgctacaccatcaaggtcaccaaccccatcggcgaggacgtggcttccatcttcctgcaagttgtagatgtcccagaccccccggaggctgtgcgcatcacctcggttggagaggattgggccatccttgtctgggagccaccaatgtacgatggggggaagccagtcaccgggtacctcgtagagcggaagaagaagggctctcagcgctggatgaagctgaactttgaggtcttcacagagaccacctatgagtccaccaagatgatcgagggcatcctctatgagatgcgtgtcttcgccgtcaatgctataggggtctcccagcccagcatgaacaccaagccttttatgcctattgcacccacgagtgaacccctgcacctgatagtggaggatgtgacagacaccaccaccacactcaagtggaggcctccgaacaggatcggggcaggtggcatcgatgggtacctggtggagtactgcctggaaggctccgaggaatgggtccctgccaacaccgagcccgtggagcgctgtggcttcaccgtcaagaatctcccgaccggagccagaatcctcttccgagtagttggggtcaacatcgcggggcgcagcgagccggccaccctggcccagccggtcaccatcagggagattgcggagccacccaagatccggcttccccgccatctccgccagacctacatccgcaaagtgggcgagcagctcaaccttgtcgtccccttccagggaaagccccggccccaggtggtgtggaccaagggcggggccccgctggacacctcccgcgtgcacgtgcggaccagcgacttcgacaccgtgttcttcgtgcgccaggcggcccgctccgactccggggagtacgagctgagcgtgcagatcgagaacatgaaggacaccgccaccatccgcatccgcgttgtggaaaaggctgggccccccataaacgtgatggtgaaggaggtgtggggcacgaacgcgctggtggagtggcaggcccccaaagatgatgggaacagtgagatcatggggtatttcgtccagaaagcagacaaaaaaaccatggagtggttcaacgtctatgaacgtaacaggcacactagctgtactgtgtccgaccttatcgtgggcaatgaatactatttccgagtttacaccgagaacatctgtgggctcagtgactcacctggtgtctccaagaacacggcccgcatcctcaagacaggaatcaccttcaaaccgttcgagtataaggagcatgacttccggatggctcccaagttcctgacacctctcatagaccgcgtggtcgtggctgggtactcggcagccctcaactgtgctgtcagaggccacccgaagccgaaggtggtctggatgaagaacaagatggaaatccgtgaagatcccaagttcctgataaccaattaccaaggagtcctgacgctgaacatccgtcgcccctcgcccttcgacgctgggacttacacctgccgggccgtcaacgagctgggcgaggcgctggctgagtgcaagctggaggtccgagtgccgcagtgagacctgtcccctacctgccaagacaattggtggtggagtcctgaccccaatccccaacctcccaggactgtgttctttctggagttttcgctgagaacaaaacagtgttgtctggaaaaaaaaaaa

SEQ ID NO: 61363 - DNA, 4264 bp, Homo sapiens
cttttagaaacaaaaatcaaggattgcacaaactatggcattttatttcagagcctttgccttacatttgtacaatatattacataattcttcattgtttgcagatcctaatatatactttatagcttttattctataagcttttttcttcaacattttgctgtcaacaaatctttacagtcctgtacaaatttgaataacttgaaaccattttcaacaaaattagttactgtaagcacacactacaagactgaaaatgcttttcttagaaaagttgaatgtaaaggattctgacacgttagcatctacaacaaaacgcattgaaattcccacgtcgtattgccaggaaacaaagaaaacatgccagccccatccaaaaaaagtacacagaactacaattaaaacagtaaaacagtctgtacaataaagtactgtgtattaacagtgccagatattaaatagcttgaatgaacacatccacaatatacaaatgtcttacaaaggtgaagaattaaatacaagtgccaaacagaacagagattggaatcatacaacataaagtcaatacaagtgaaaacaattttgcattcattttggattttatacaaggcatttaattttataggcctaccacccccattagctatttatatttaaaataaccaccatccttttgagacagttcctatcaacaatcttgaaccatactaatacattacttgttcctgaagtccttttgttgtagctcataataaaataagcaatacaaatgaattatctgtatttaagggaaaagaaacatttacaagaaaacacaaaaatataactgttataattcattatgaataaatatacactttgaactggctaagtacaatctttatacattgtttaagatttaatacagtttattagccattttcttttttcacacaatgtatatcaaaattaaaaaaaaatactgatttatagaaaaatggcaaagtacagtagttccattccaatttgaagggccatgaaaagccactgcaagaccttttagcctaattcaaacctgtaaacatgttcagtcttttttaaagagaatctttaatatttggttaccaggattgatgtctaatatcctgttaactgcaggttttgaatttattacatgtgcttgacttatacaattaaagccaccctaaggtgacttgctttaaaaaacaattaccttgtacaaatgaaaataggttcatattttttcataaataaatggaaaaatatcaaatgttccagcatttaacaaaatacaagggaatacatatacagtaagttatcttaacatgttctgacccaccccttaactatgcttactgtattgtctctacaggcagtgaaaagcctccatttgccacagtggaaggccttccagttaccagacacacaattcccagacaagttggaaacaattattgcttgaggaaaagcagttcattgtactttttcttcataaaaaagtgcacttaagtgccaagtcagcttgtcaagaaacaatttttaaatataaaatagtgcttgtctgatatttttttgtgccactgtgcagtataaaaaaaaagtggccctcaacagccattaagtgcaaagtgctttagcaagtcctgctgtcacctgcactcaactgacattccattttgtgatgcgctggacattgacggttcagctaaagttaacataacagcagctgttatggaactggatgaaggtgaagaggaggatgaggatgtagcagcactttctctctctttcttctttaaacgctttctcctccgatcaatggaagctacttcagattttaatgacagataatgttttctgatttcttgaagtttttcttgaagaattgtgatgcgttcggcacttgtcatattttccaggtccgacatctgaaaactccatttgtaaactttgggtaatcgattactgggttccttgagatcaggatccttatcaccattctttccacattttcctggagactgcgtccttgcgggagatttggtactatgagacttcattccagtggaaactgatttgactggctgactcttagttatactttcaccagctgaaagttcttcactatcactactatttgtgccttttcccttctttttgttgtttaccactgttgctttatggcttcttttctgcttttttgatgaacttcctcctccctgagcatctttcactcttttctgacctgtacaggctttttcaggatgttctggttctggctgattactactgctcgagctcacactggcatcaaaacctgctggcgagctattccctttcagactggaggtcttggagctccccagcaacactatccacctcaattgtgctatcagtttcactcttgatacttcgaacctcttcttggtttggagccagtggttctgatactgttacagaagactgctgccggctgcctttctgttacagtgactgatgaaggcgattcaggtgtaagtaaggaaggggtatttaagcactgaaattactgccactacttggaaattctgcttttctgtcattgacctctactgttttttcttcaatgggtttactatcgacattgactggaggtggtttttctagttctacactgggtgaacaactctcctcttcagccacagtctgcagtgactcctctgccaccccctcctctggggcaggatgcggtggggaagctgcagcctcagtatcagagtctgaaaaaagctctttcagcgtttttttaggccactgtccctgaatacttgaccagacatcttttcgatctttggccctgctgttttgaagtctttcatcagagttatttaaaagtttaatccttttttctgccacttctgaaaatcctgaatagaaaccagttgtccgtagagattttcttttttcctccaaaccattgtatttcttagttggtgtcatctttgcttttgtttcttcttcatcttcatctgaagagctgttgctactgttttccatgcaaagtgattctttgttcttggccttctcttcctttttgccaggtgatccagtttttagacactcttctgtattgcaataccttcttttaccacgttttatttgtggttttgaagatttatctgttgtgtccttcttgacatcctttctcttttttgtgacttcatcttcttcataatcagtatcttcggataatacttctatatctttccttaatctttctggagattttgacactggtttggatattaccaaatctgcatgaactttgttttcttctagcaaagatgaactgttctgttcctcctttgaaataagatcatttctgttgttggtcaaatgatcaatcttagattcctctttgccattattatccatgtcttgagcacctctctcatcttcctgctcactgtcttcagcagaactttcagaagcttgaagtccattaaggatcgaagtaatttctatggacttaatatgagcagtatcagagtttttggcatcagtgagatccagtttggataccatttgcaggagatgggatttgtctgaaatggtgggtttgggccaagcgccgaagtttacagttttttggagagtatttttcatctttgtctttttctttgtctaatttattctttattttcttccgatgttttatctttggcacatttttatcagcaggtcttactattttatctgctttaatccattcatcgtatctcacattccatccgcagtaatgcaccaagtaaaggacctctccaccttcgacatcagaatctttaatactagcttcatacattttttgatttttccctcgtccataccgcacttggactttcatgcctggtggatagcactcaaactcctcttcctcattgttgtcatcatcatcttcatcctcttcttcttcttcctcctcctcctcctcttctgcttcttcatcatcttcatcttcttctttattcgtttcatctccagattttgctttttcttcctcagcttctacctttatgttgagggattcatctaccctagttgtgtcatcatctttgtcatccagattttcattgtcttctggttttttaatgttaacttctttttcctgatcagaatgtgtaggtatagattctaataaattctttttacttcccagagagggcttaatattttcttttctttcaatttcatcctcaataggcttttcttctcttggtattatatt

SEQ ID NO: 61364 - DNA, 2466 bp, Homo sapiens
ggcacgagaactggggcgggggggtgtttcctggaccccagtcctccgaatcagctcctagagtggaaccaggaaggattctggagccacagaagatagacagatggaaggtggggaccaaagtgaggaagagccgagggaacgcagccaggcaggtggaatgggaactctctggagccaagagagcactccagaagagaggctgcccgtggaagggagcaggccatgggcagtggccaggcgggtgctgacagctatcctgattttgggcctgctcctttgtttttctgtgcttttgttctacaacttccagaactgtggccctcgcccctgtgagacatctgtgtgtttggatctccgggatcattacctggcctctgggaacacaagtgtggccccctgcaccgacttcttcagctttgcctgtggaagggccaaagagaccaataattcttttcaggagcttgccacaaagaacaaaaaccgacttcggagaatactggaggtccagaattcctggcacccaggctctggggaggagaaagccttccagttctacaactcctgcatggatacacttgccattgaagctgcagggactggtcccctcagacaagttattgaggagcttggaggctggcgcatctctggtaaatggacttccttaaactttaaccgaacgctgagacttctgatgagtcagtatggccatttccctttcttcagagcctacctaggacctcatcctgcctctccacacacaccagtcatccagatagaccagccagagtttgatgttcccctcaagcaagatcaagaacagaagatctatgcccagatctttcgggaatacctgacttacctgaatcagctgggaaccttgctgggaggagacccaagcaaggtgcaagaacactcttccttgtcaatctccatcacttcacggctgttccagtttctgaggcccctggagcagcggcgggcacagggcaagctcttccagatggtcactatcgaccagctcaaggaaatggcccccgccatcgactggttgtcctgcttgcaagcgacattcacaccgatgtccctgagcccttctcagtccctcgtggtccatgacgtggaatatttgaaaaacatgtcacaactggtggaggagatgctgctaaagcagagggactttctgcagagccacatgatcttagggctggtggtgaccctttctccagccctggacagtcaattccaggaggcacgcagaaagctcagccagaaactgcgggaactgacagagcaaccacccatgcctgcccgcccacgatggatgaagtgcgtggaggagacaggcacgttcttcgagcccacgctggcggctttgtttgttcgtgaggcctttggcccgagcacccgaagtgctgccatgaaattattcactgcggatccgggatgccctcatcactcgcctcagaaaccttccctgggatgaatgaggagacccagaacatggcccaggacaaggttgctcaactgcaggtggagatgggggcttcagaatgggccctgaagccagagctggcgcgacaagaatacaacgatatacagcttggatcgagcttcctgcagtctgtcctgagctgtgtccggtccctccgagctagaattgtacagagcttcttgcagcctcactccaaacacagcgtgggaggtgtcgcattggacgctcaatgcttactattcggtatctgaccatgtggtagtcttttcccagctggacttcctccaacccccattcttcccaccctggctatcccagagccgtgaactttggcgctgctggcagcatcatggcccacgagctgttgcacatcttctaccagctctgtggtactgcctgggggctgccttcgcctgtgacaaccatgccctccagggaagctcacctgtgcctgaagcgccattatgctgcctttccattacctaggcagaacctccttcaatgactccctcacattcttaggagaatgctgcagacgttgggggggctagccattcgcgcttgcaggcattacagcaaggaggctgtttacgggcaccatggggagactgtcctgcccagcctgggaccttcagcccccagcagatcttctttcgaagctatgcccaggtgatgtgtaggaagcccagcccccagggacttttcacgacactcacagccctccacacctccgagttccacgggcccctcagcaggcaccccagcctttgccaggtatttccgctgtgcacgtggtgctctcttgaacccctccagccgctgccagctctggtaacttggttaccaaagatgccacagcacagaaatatcgaccaacacctccctggtcacatccatggaatcagagcaagatttcctttctgcttctgttccaaaaataaaagctggcacttggcttccgcccggaattc

SEQ ID NO: 61365 - DNA, 2100 bp, Homo sapiens
agcagcaactggaaaacaagcattgcattgcatcaggatgtctatgaaatggacttcagctcttctgctgatacagctgagctgttactttagctctgggagttgtggaaaggtgctggtgtggcccacagaattcagccactggatgaatataaagacaatcctggatgaacttgtccagagaggtcatgaggtgactgtattggcatcttcagcttccatttctttcgatcccaacagcccatctactcttaaatttgaagtttatcctgtatctttaactaaaactgagtttgaggatattatcaagcagctggttaagagatgggcagaacttccaaaagacacattttggtcatatttttcacaagtacaagaaatcatgtggacatttaatgacatacttagaaagttctgtaaggatatagtttcaaataagaaacttatgaagaaactacaggagtcaagatttgatgttgttcttgcagatgctgttttcccctttggtgagctgctggccgagttacttaaaataccctttgtctacagcctccgcttctctcctggctacgcaattgaaaagcatagtggaggacttctgttccctccttcctatgtgcctgttggtatgtcagaactaagtgaccaaatgactttcatagagagggtaaaaaatatgatctatgtgctttattttgaattttggttccaaatatttgacatgaagaagtgggatcagttctacagtgaagttctaggaagacccactacgttatctgagacaatggcaaaagctgacatatggcttattcgaaactactgggattttcaatttcctcacccactcttaccaaatgttgagttcgttggaggactccactgcaaacctgccaaacccctaccgaaggaaatggaaggagtttgtccagagctctggagaaaatggtgttgtggtgttttctctggggtcgatggtcagtaacacgtcagaagaaagggccaatgtaattgcatcagcccttgccaagatcccacaaaaggttctgtggagatttgatgggaataaaccagatactttaggactcaatactcggctgtacaagtggataccccagaatgatcttcttggtcacccaaaaaccagagcttttataactcatggtggagccaatggcatctatgaggcaatctaccatggaatccctatggtgggcgttccattgtttgcagatcaacctgataacattgcacacatgaaggccaagggagcagctgttagtttggacttccacacaatgtcgagtacagacttactcaatgcactgaagacagtaattaatgatcctttatataaagagaatgctatgaaattatcaagaattcatcatgatcaaccagtgaagccccttgatcgagcagtcttctggattgaatttgtcatgcgccataaaggagccaagcaccttcgggttgcagcccacgacctcacctggttccagtaccactctttggatgtgactgggttcctgctggcctgtgtggcaactgtgatattcatcatcacaaaatgtctgttttgtgtctggaagtttgttagaacaggaaagaaggggaaaagagattaattacgtctgaggctggaagctgggaaacccaataaatgaactcctttagtttattacaacaagaagacgttgtgatacaagagattcctttcttcttgtgacaaaacatctttcaaaacttaccttgtcaagtccaaaatttgttttagtacctgtttaaccattagaaatatttcatgtcaaggaggaaaacattagggaaaacaaaaatgatataaagccatatgaggttatattgaaatgtattgagcttatattgaaatttattgttccaattcacaggttacatgaaaaacaatttactaagcttaactacatgtcacacgattgtacatggaaacaagaacattaagaagtccgactgacagtatcagtactgttttgcaaatactcagcatactttggatccatttcatgcaggattgtgttgttttaactgttgttgaggaagctaataaataattaaattgtaaaa

SEQ ID NO: 61366 - DNA, 3936 bp, Homo sapiens
  misc_feature (1)...(3936): n = a,t,c or g
tttcgtggcggcggcgcaagggtgagggcggccccagaaccccaggtaggtagagcaagaagatggtgtttctgcccctcaaatggtcccttgcaaccatgtcatttctactttcctcactgttggctctcttaactgtgtccactccttcatggtgtcagagcactgaagcatctccaaaacgtagtgatgggacaccatttccttggaataaaatacgacttcctgagtacgtcatcccagttcattatgatctcttgatccatgcaaaccttaccacgctgaccttctggggaaccacgaaagtagaaatcacagccagtcagcccaccagcaccatcatcctgcatagtcaccacctgcagatatctagggccaccctcaggaagggagctggagagaggctatcggaagaacccctgcaggtcctggaacacccccctcaggagcaaattgcactgctggctcccgagccccctctttgtcgggctcccgtacacagttgtcattcactatgctgggcaatctttcggagactttccacggattttacaaaagcacctacagaaccaaggaaggggaactgaggatactagcatcaacacaatttgaacccactgcagctagaatggcctttccctgctttgatgaacctgccttcaaagcaagtttctcaatcaaaattagaagagagccaaggcacctagccatctccaatatgccattggtgaaatctgtgactgttgctgaaggactcatagaagaccatttttgatgtccctgtgaagatgagcacctatctggtggccttcatcatttcagattttgagtctgtcagcaagataaccaagagtggagtcaaggtttctgtttatgctgtgccagacaagataaatcaagcagattatgcactggatgctgcggtgactcttctagaattttatgaggattatttcagcataccgtatcccctacccaaacaagatcttgctgctattcccgactttcagtctggtgctatggaaaactggggactgacaacatatagagaatctgctctgttgtttgatgcagaaaagtcttctgcatcaagtaagcttggcatcacagtgactgtggcccatgaactggcccaccagtggtttgggaacctggtcactatggaatggtggaatgatctttggctaaatgaaggatttgccaaatttatggagtttgtgtctgtcagtgtgacccatcctgaactgaaagttggagattatttctttggcaaatgttttgacgcaatggaggtagatgctttaaattcctcacaccctgtgtctacacctgtggaaaatcctgctcagatccgggagatgtttgatgatgtttcttatgataagggagcttgtattctgaatatgctaagggagtatcttagcgctgacgcatttaaaagtggtattgtacagtatctccagaagcatagctataaaaatacaaaaaacgaggacctgtgggatagtatggcaagtatttgccctacagatggtgtaaaagggatggatggcttttgctctagaagtcaacattcatcttcatcctcacattggcatcaggaaggggtggatgtgaaaaccatgatgaacacttggacactgcagaggggttttcccctaataaccatcacagtgagggggaggaatgtacacatgaagcaagagcactacatgaagggctctgacggcgccccggacactgggtacctgtggcatgttccattgacattcatcaccagcaaatccgacatggtccatcgatttttgctaaaaacaaaaacagatgtgctcatcctcccagaagaggtggaatggatcaaatttaatgtgggcatgaatggctattacattgtgcattacgaggatgatggatgggactctttgactggccttttaaaaggaacacacacagcagtcagcagtaatgatcgggcgagtctcattaacaatgcatttcagctcgtcagcattgggaagctgtccattgaaaaggccttggatttatccctgtacttgaaacatgaaactgaaattatgcccgtgtttcaaggtttgaatgagctgattcctatgtataagttaatggagaaaagagatatgaatgaagtggaaactcaattcaaggccttcctcatcaggctgctaagggacctcattgataagcagacatggacagacgagggctcagtctcagagcaaatgctgcggagtgaactactactcctcgcctgtgtgcacaactatcagccgtgcgtacagagggcagaaggctatttcagaaagtggaaggaatccaatggaaacttgagcctgcctgtcgacgtgaccttggcagtgtttgctgtgggggcccagagcacagaaggctgggattttctttatagtaaatatcagttttctttgtccagtactgagaaaagccaaattgaatttgccctctgcagaacccaaaataaggaaaagcttcaatggctactagatgaaagctttaagggagataaaataaaaactcaggagtttccacaaattcttacactcattggcaggaacccagtaggatacccactggcctggcaatttctgaggaaaaactggaacaaacttgtacaaaagtttgaacttggctcatcttccatagcccacatggtaatgggtacaacaaatcaattctccacaagaacacggcttgaagaggtaaaaggattcttcagctctttgaaagaaaatggttctcagctccgttgtgtccaacagacaattgaaaccattgaagaaaacatcggttggatggataagaattttgataaaatcagagtgtggctgcaaagtgaaaagcttgaacgtatgtaaaaattcctcccttgccaggttcctgttatctctaatcaccaacattttgttgagtgtattttcaaactagagatggctgttttggctccaactggagatacttttttcccttcaactcattttttgactatccctgtgaaaagaatagctgttagtttttcatgaatgggctttttcatgaatgggctatcgctaccatgtgttttgttcatcacaggtgttgccctgcaacgtaaacccaagtgttgggttccctgccacagaagaataaagtaccttattcttctcattttatagtttatgcttaagcacccgtgtccaaaaccctgtaccccatgttttatcattcataaactggtttcatcagtctcctcgaaagactctgaatagtcgactactgaacaatgaacacctggatctgagactaagccggacgatgactgggttaaagctctcccggctcacccctccagacccgctgcccatccctcttccttgctccatgcccaggggctgacttgtaaaggccaagtcatcaagctttcttgccctttggatgttggtcagtggggagccggagagctggagctggggtcggaggaggtagtaggtggaggtgttcttccctgattcccttgcgggatgcctcgggctggcctcccctgagggtcttagctccgagaggggaccctcttttccacacagccttctccacctctggattttggtaactgctccctcctcatcccttcaggattagtggcctcagtgggagtctggcttttactagtcctggcggacttgtggtttctacataatgtgctcgcacttttgcaaaaaatctttttatagaaccctcctcagataattctgagtgagtgtcatctatttccctgactggtacagtatctcttctgaaaaagcagagtgcattcaagtctgtaggaaaacccttttcttagggaggtgattttttttctctctctgcttcttatttggcctactttaacaatttctnaactaaactagttattggccattttac

SEQ ID NO: 61367 - DNA, 4595 bp, Homo sapiens
catctgtggactgctaccgagcgggcgagggagcgcgcgcggccgccacaaagctcgggcgccgcggggctgcatgcggcgtacctggcccggcgcggcgactgctctccgggctggcgggggccggccgcgagccccgggggccccgaggccgcagcttgcctgcgcgctctgagccttcgcaactcgcgagcaaagtttggtggaggcaacgccaagcctgagtcctttcttcctctcgttccccaaatccgagggcagcccgcgggcgtcatgcccgcgctcctccgcagcctggggtacgcgctgaagcccgggaggcttggcgccggcgaagacccaaggaccactcttctgcgtttggagttgctccccacaaccccgggctcgtcgctttctccatcccgacccagccggggcgcggggacaacacaggtcgcggaggagcgttgccattcaagtgactgcagcagcagcggcagcgcctcggttcctgagcccaccgcaggctgaaggcattgcgcgtagtccatgcccgtagaggaagtgtgcagatgggattaacgtccacatggagatatggaagaggaccggggattggtaccgtaaccatggtcagctggggtcgtttcatctgcctggtcgtggtcaccatggcaaccttgtccctggcccggccctccttcagtttagttgaggataccacattagagccagaagagccaccaaccaaataccaaatctctcaaccagaagtgtacgtggctgcgccaggggagtcgctagaggtgcgctgcctgttgaaagatgccgccgtgatcagttggactaaggatggggtgcacttggggcccaacaataggacagtgcttattggggagtacttgcagataaagggcgccacgcctagagactccggcctctatgcttgtactgccagtaggactgtagacagtgaaacttgggtacttcatggtgaatgtcacagatgccatctcatccggagatgatgaggatgacacccgatggtgcggaagattttgtcagtgagaacagtaacaacaagagagcaccatactggaccaacacagaaaagatggaaaagcggctccatgctgtgcctgcggccaacactgtcaagtttcgctgcccagccggggggaacccaatgccaaccatgcggtggctgaaaaacgggaaggagtttaagcaggagcatcgcattggaggctacaaggtacgaaaccagcactggagcctcattatggaaagtgtggtcccatctgacaagggaaattatacctgtgtggtggagaatgaatacgggtccatcaatcacacgtaccacctggatgttgtggagcgatcgcctcaccggcccatcctccaagccggactgccggcaaatgcctccacagtggtcggaggagacgtagagtttgtctgcaaggtttacagtgatgcccagccccacatccagtggatcaagcacgtggaaaagaacggcagtaaatacgggcccgacgggctgccctacctcaaggttctcaaggttctcaaggccgccggtgttaacaccacggacaaagagattgaggttctctatattcggaatgtaacttttgaggacgctggggaatatacgtgcttggcgggtaattctattgggatatcctttcactctgcatggttgacagttctgccagcgcctggaagagaaaaggagattacagcttccccagactacctggagatagccatttactgcataggggtcttcttaatcgcctgtatggtggtaacagtcatcctgtgccgaatgaagaacacgaccaagaagccagacttcagcagccagccggctgtgcacaagctgaccaaacgtatccccctgcggagacaggtaacagtttcggctgagtccagctcctccatgaactccaacaccccgctggtgaggataacaacacgcctctcttcaacggcagacacccccatgctggcaggggtctccgagtatgaacttccagaggacccaaaatgggagtttccaagagataagctgacactgggcaagcccctgggagaaggttgctttgggcaagtggtcatggcggaagcagtgggaattgacaaagacaagcccaaggaggcggtcaccgtggccgtgaagatgttgaaagatgatgccacagagaaagacctttctgatctggtgtcagagatggagatgatgaagatgattgggaaacacaagaatatcataaatcttcttggagcctgcacacaggatgggcctctctatgtcatagttgagtatgcctctaaaggcaacctccgagaatacctccgagcccggaggccacccgggatggagtactcctatgacattaaccgtgttcctgaggagcagatgaccttcaaggacttggtgtcatgcacctaccagctggccagaggcatggagtacttggcttcccaaaaatgtattcatcgagatttagcagccagaaatgttttggtaacagaaaacaatgtgatgaaaatagcagactttggactcgccagagatatcaacaatatagactattacaaaaagaccaccaatgggcggcttccagtcaagtggatggctccagaagccctgtttgatagagtatacactcatcagagtgatgtctggtccttcggggtgttaatgtgggagatcttcactttagggggctcgccctacccagggattcccgtggaggaactttttaagctgctgaaggaaggacacagaatggataagccagccaactgcaccaacgaactgtacatgatgatgagggactgttggcatgcagtgccctcccagagaccaacgttcaagcagttggtagaagacttggatcgaattctcactctcacaaccaatgaggaatacttggacctcagccaacctctcgaacagtattcacctagttaccctgacacaagaagttcttgttcttcaggagatgattctgttttttctccagaccccatgccttacgaaccatgccttcctcagtatccacacataaacggcagtgttaaaacatgaatgactgtgtctgcctgtccccaaacaggacagcactgggaacctagctacactgagcagggagaccatgcctcccagagcttgttgtctccacttgtatatatggatcagaggagtaaataattggaaaagtaatcagcatatgtgtaaagatttatacagttgaaaacttgtaatcttccccaggaggagaagaaggtttctggagcagtggactgccacaagccaccatgtaacccctctcacctgccgtgcgtattggctgtggaccagtaggactcaaggtggacgtgcgttctgccttccttgttaattttgtaataattggagaagatttatgtcagcacacacttacagagcacaaatgcagtatataggtgctggatgtatgtaaatatattcaaattatgtataaatatatattatatatttacaaggagttattttttgtattgattttaaatggatgtcccaatgcacctagaaaattggtctctctttttttaatagctatttgctaaatgctgttcttacacataatttcttaattttcaccgagcagaggtggaaaaatacttttgctttcagggaaaatggtataacgttaatttattaataaattggtaatatacaaaacaattaatcatttatagttttttttgtaatttaagtggcatttctatgcaggcagcacagcagactagttaatctattgcttggacttaactagttatcagatcctttgaaaagagaatatttacaatatatgactaatttggggaaaatgaagttttgatttatttgtgtttaaatgctgctgtcagacgattgttcttagacctcctaaatgccccatattaaaagaactcattcataggaaggtgtttcattttggtgtgcaaccctgttcattacgtcaacgcaacgtctaactgggacttcccaaggataaatggtaccgaggtccttcttaaaagatgcctttaatccctcccttgaggacagaccttagttgaaatgatagcagaatgtgcttctctctggcagctggccttctgcttctgagttgcacattaatcagattagcctgtattctcttcagtgaattttgataatggcttccagactctttggcgttggagacgcctgttaggatcttcaagtcccatcatagaaaattgaaacacagagttgttctgctgatagttttggggatacgtccatctttttaagggattgctttcatctaattctggcaggacctcaccaaaagatccagcctcatacctacatcagacaaaatatcgccgttgttccttctgtactaaagtattgtgttttgctttggaaacacccactcactttgcaatagccgtgcaagatgaatgcagattacactgatcttatgtgttacaaaattggagaaagtatttaataaaacctgttaatttttatactgacaataaaaatgtttctacagatattaatgttaacaagaaaaaaaaaa

SEQ ID NO: 61368 - DNA, 867 bp, Homo sapiens
actagtatgctacattcccaaattttcatttggagattttattttgaatagagggaaaattatctgcttgtatagtccatggcagagccagtggaatgcagagggagaagtagggtctcacttgtccttagcagtgttctcaatccaggatacatatttgtaaacattggtgtagatgccgacgtcccctcccatgaagtgccccacctcgattccctggagcttgtctttgcagatgacagtagcaacggccacctccccaaaaattcggctgaatactttcacaaatttcacacataaggaattcctgtggctttttccttgttctgttttttggcattctcgatcagacatcacgggggcctccaggttctgccgcaagtcagggtgtcggccactgttttcttggctccagtccaaacctgagagtagacagacagtgcctggcctgacattggtggtggcgagggttaagggcttggactttgggattgagcatggcaggcttagccagcttgatgagcatgaggtcatcctgtggggcgctatgactgtagttccagtagcggacgatctgaatggggttaattgtctgttcagtaccgtctctgactctgctcttgaaatttcccagcatcactttcagatttggtaaatagcagtgagctggggccagcacccagctgggtttgatgaggacgcccacacaggggttgaagtgagacttgaggtacaccaaatagggagcagggtcttctttctgaacagatgagtcagcaaagaaaaatgtcccagcgaggacacccaaatagaagacatatttcatggtgatccagctcttcccccttagctcagggagtaagtgcc

SEQ ID NO: 61369 - DNA, 4616 bp, Homo sapiens
agccattttacttatgggaaacagtgtggcgtattctgctgagcttcgcgctggaagaagcctcttttatacatctcttcagggaagagagaagcaatgggcatgttagtatacaatgatcacagccacgcaggcctgcaagctgccttttggacaggctgttgactgccgttccaattagctgattggagaatgtggaatgcagagtgataatgctgcatatctgctatcaggcagcagcaaaggtttttgtcttgggaaggcaagctttccctgcaatattatctcagcagctccctagctgcttaccctgaaaacgagggatccaaacggagggtgttgcactctgctaacgctggtcctgtgcgtggctgtggcatatgagcggcaggtctgaaaaagcaggtgtgtgctgggacgggcactggactggaacgcaggcggacgctctcgggtttacctgcttcctgttaacagattgtgggctcccagggcatatgtctgcacgctgaggccgaggcggagaaggggcttcctgagcgtcccagtacactgacagagacacttggattggacttaatcttaaacctctggagttcaagaccttttaaaaagggctaaataaacaatctctacatgtaaaaggccactgactcctacttcctctgtatagagcaactgttgaactcagctgcctgtaggaaaactgaagactttaataacaaactctccaaggtgaaaatgaacacagcggtgggtgtgctcgcaaacgtgccgccatgtctgttacgctaacatctgtgaagagagtgcaaagttctccaaacctattggctgcagggcgtgattctcagtcaccagactcagcaaaaggttttagaagcgttcgaccaaacctacaagataaaagatcaccaactcagagccagataacagtgaatggaaactcaggaggtgccgtgagtcccatgagttactatcagaggccgttttccccctcggcatattctctcccagcctcactcaactccagcattgtcatgcagcacggcacatccctcgattccacagacacatatccccagcatgcgcagtctctggatggcaccaccagcagctctatccccctgtaccgatcctcagaggaagagaagagagtgacagtcatcaaagccccgcattacccagggatcgggcccgtggatgaatccggaatccccacagcaattagaacgacagtcgaccggcccaaggactggtacaagacgatgtttaagcaaattcacatggtgcacaagccggatgatgacacagacatgtataatactccttatacatacaatgcaggtctgtacaacccaccctacagtgctcagtcacaccctgctgcaaagacccaaacctacagacctctttccaaaagccactccgacaacagccccaatgcctttaaggatgcgtcctccccagtgcctcccccacatgttccacctccagtcccgccgcttcgaccaagagatcggtcttcaacagaaaagcatgactgggatcctccagacagaaaagtggacacaagaaaatttcggtctgagccaaggagtatttttgaatatgaacctggcaagtcatcaattcttcagcatgaaagaccagcctccttgtatcagtcctctatagacagaagcctggaaagacccatgagttctgcaagcatggccagtgacttcaggaagcggaggaagagcgagcctgcagtgggtccaccacggggcttgggagatcaaagtgcgagcaggactagcccaggccgagtggacctcccaggatcaagcaccactcttacaaagtctttcactagctcttctccttcttccccatcaagagcaaaaggtggggatgatagcaaaatatgtccatccctttgcagttactcagggctcaacggcaacccctccagtgagttagattactgtagcacttacagacagcacttggatgtccctcgggactcaccaagagccattagtttcaagaacggctggcaaatggcccggcaaaacgcagaaatctggagcagcacggaagaaaccgtctctcccaaaatcaaatcccggagctgtgacgatctcctaaacgacgactgcgatagcttcccggacccgaaagtcaagtcggaaagcatgggctccctgttatgtgaggaggactccaaggagagctgccccatggcgtgggggtccccctacgtcccggaggttcgcagtaacggcagatcaaggatcagacacaggtcagcccgcaacgccccggggttcctgaagatgtacaagaaaatgcaccgcatcaaccgcaaggacctgatgaactccgaggtgatctgctccgtgaagtccaggattctgcagtacgagagcgagcagcagcacaaggacctgctgcgcgcctggagccagtgctccacggaggaggtgccccgggacatggtgcccacacgcatctccgaattcgaaaagctgatccagaagtccaaatccatgccaaatttaggggatgacatgctgtctcccgtaaccctagaaccaccgcaaaatggcctatgtcccaagaggcggttttccattgagtatttgctggaggaagaaaatcaaagcggcccccccgctcggggccggcgaggctgccagtctaacgccctggtgcccattcacattgaagtcaccagcgatgagcagccccgagcacacgtggagttttccgacagcgaccaggacggggttgtgtccgaccacagtgactacattcacctagaggggtcatccttctgcagtgaaagtgactttgatcacttttccttcacatcctccgaaagcttttacggatccagccaccaccaccaccatcaccaccaccaccaccaccgccacctcatcagctcctgcaaaggcaggtgcccggcctcctacactcgatttaccacaatgttaaaacacgaaagagccagacacgaaaacaccgaggagcccagaaggcaagaaatggaccctggcctttctaaacttgcttttctagtcagtcctgtgcctttccggaggaaaaaaaattcggctcctaagaaacagactgaaaaggcaaaatgtaaagcatctgtgtttgaggctctggactctgcccttaaagacatctgtgaccaaattaaagctgaaaagaaaagggggagcttgccggacaacagcatcctgcaccgcctcatcagtgagctgctgccagatgttcccgagaggaactcatccctgagagcgctgaggaggagccccctgcaccagcctctccacccactgcctcccgatggtgctattcattgtccaccctaccagaatgactgcggaagaatgccccgcagttgcctctttccaaggacgtgggacacaggccaacaggcagtttgccaccaccaagaccgtgggcggtggcattccaagaccgtgagtcccctagaagttactcatccactttgactgacatggggagaagtgcaccaagggaaagaagaggaactccagaaaaagagaaattgcctgcaaaagctgtttatgattttaaggctcagacatctaaggagttgtcatttaagaaaggagatactgtctacatcctcaggaacaattgatcaaaattggtatgagggagaacaccacgggagagtgggcatcttcccgatctcatacgtagagcaactcacacctcctgagaaagcacagcctgcaagaccacctccgccagcccagcccggagaaatcggagaagctatagccaaatacaacttcaacgcagacacaaatgtggagctgtcactgagaaagggagatagagttattcttcttaaaagagttgatcaaaactggtatgaaggtaaaatcccaggaaccaacagacaaggcatcttccctgtttcctatgtggaggtcgtcaagaagaacacaaaaggtgctgaggactaccctgaccctccaataccccacagctattctagtgataggattcacagcttgagctcaaataagccacagcgtcctgtgtttactcatgaaaatattcaaggtgggggggaaccgtttcaggctctgtataactatactcccaggaatgaagatgagctggagctcagagaaagtgatgtcattgatgtcatgggaaaagtgtggatgacggctggtttgtgggggacctcaaggaaggaaccaaatttcttttgggtactttccccaggaaaactacgttcaaagaggctgtgaaattgcgctcccttccttcttgtaagaggccgcctgccaagccatgcaccttgcgtcaacgcgcctgaaacacccccgcgggcctcccgttgtcatgccttacggtttccaatgcgccgtcaccatctccacttggccaccaaaccaccagcagagtagccgccgctgctgtgagcctggggacgacatggcaggctggtccccctccgtgaaagtgtggattcctacttcctgctctaagctttgacaccgtcaaaatgtgggatcagaaagaaaaaaaatcatgatatttaaaaatggtcaaatatttgaggcaaaaaaaaa

SEQ ID NO: 61370 - DNA, 4146 bp, Homo sapiens
  misc_feature (1)...(4146): n = a,t,c or g
gagacatggcccgggcagtggctcctggaagaggaacaagtgtgggaaaagggagaggaagccggagctaaatgacaggatgcaggcgacttgagacacaaaaagagaagcgttcctctcggatccaggcattgcctcgctgctttcttttctccaagacgggctgaggattgtacagctctaggcggagttggggctcttcggatcgcttagattctcctctttgctgcatttccccccacgtcctcgttctcccgcgtctgcctgcggacccggagaagggagaatggagagggggctgccgctcctctgcgccgtgctcgccctcgtcctcgccccggccggtgcttttcgcaacgataaatgtggcgatactataaaaattgaaagccccgggtaccttacatctcctggttatcctcattcttatcacccaagtgaaaaatgcgaatggctgattcaggctccggacccataccagagaattatgatcaacttcaaccctcacttcgatttggaggacagagactgcaagtatgactacgtggaagtcttcgatggagaaaatgaaaatggacattttaggggaaagttctgtggaaagatagcccctcctcctgttgtgtcttcagggccatttctttttatcaaatttgtctctgactacgaaacacatggtgcaggattttccatacgttatgaaattttcaagagaggtcctgaatgttcccagaactacacaacacctagtggagtgataaagtcccccggattccctgaaaaatatcccaacagccttgaatgcacttatatttgtctttgcgccaaagatgtcagagattatcctgggattttgaaagctttgacctggagcctgactcaaatcctccaggggggatgttctgtcgctacgaccggctagaaatctgggatggattccctgatgttggccctcacattgggcgttactgtggacagaaaacaccaggtcgaatccgatcctcatcgggcattctctccatggttttttacaccgacagcgcgatagcaaaagaaggtttctcagcaaactacagtgtcttgcagagcagtgtctcagaagatttcaaatgtatggaagctctgggcatggaatcaggagaaattcattctgaccagatcacagcttcttcccagtatagcaccaactggtctgcagagcgctcccgcctgaactaccctgagaatgggtggactcccggagaggattcctaccgagagtggatacaggtagacttgggccttctgcgctttgtcacggctgtcgggacacagggcgccatttcaaaagaaaccaagaagaaatattatgtcaagacttacaagatcgacgttagctccaacggggaagactggatcaccataaaagaaggaaacaaacctgttctctttcagggaaacaccaaccccacagatgttgtggttgcagtattccccaaaccactgataactcgatttgtccgaatcaagcctgcaacttgggaaactggcatatctatgagatttgaagtatacggttgcaagataacagattatccttgctctggaatgttgggtatggtgtctggacttatttctgactcccagatcacatcatccaaccaaggggacagaaactggatgcctgaaaacatccgcctggtaaccagtcgctctggctgggcacttccacccgcacctcattcctacatcaatgagtggctccaaatagacctgggggaggagaagatcgtgaggggcatcatcattcagggtgggaagcaccgagagaacaaggtgttcatgaggaagttcaagatcgggtacagcaacaacggctcggactggaagatgatcatggatgacagcaaacgcaaggcgaagtcttttgagggcaacaacaactatgatacacctgagctgcggacttttccagctctctccacgcgattcatcaggatctaccccgagagagccactcatggcggactggggctcagaatggagctgctgggctgtgaagtggaagcccctacagctggaccgaccactcccaacgggaacttggtggatgaatgtgatgacgaccaggccaactgccacagtggaacaggtgatgacttccagctcacaggtggcaccactgtgctggccacagaaaagcccacggtcatagacagcaccatacaatcagagtttccaacatatggttttaactgtgaatttggctggggctctcacaagaccttctgccactgggaacatgacaatcacgtgcagctcaagtggagtgtgttgaccagcaagacgggacccattcaggatcacacaggagatggcaacttcatctattcccaagctgacgaaaatcagaagggcaaagtggctcgcctggtgagccctgtggtttattcccagaactctgcccactgcatgaccttctggtatcacatgtctgggtcccacgtcggcacactcagggtcaaactgcgctaccagaagccagaggagtacgatcagctggtctggatggccattggacaccaaggtgaccactggaaggaagggcgtgtcttgctccacaagtctctgaaactttatcaggtgattttcgagggcgaaatcggaaaaggaaaccttggtgggattgctgtggatgacattagtattaataaccacatttcacaagaagattgtgcaaaaccagcagacctggataaaaagaacccagaaattaaaattgatgaaacagggagcacgccaggatacgaaggtgaaggagaaggtgacaagaacatctccaggaagccaggcaatgtgttgaagaccttagaacccatcctcatcaccatcatagccatgagcgccctgggggtcctcctgggggctgtctgtggggtcgtgctgtactgtgcctgttggcataatgggatgtcagaaagaaacttgtctgccctggagaactataactttgaacttgtggatggtgtgaagttgaaaaaagacaaactgaatacacagagtacttattcggaggcatgaaggcagacagagatgaaaagacagtcaaaggacggaagtggaaggacgggagtgagctggggagctgttgatctttcactatacaggctgggaagtgtgttgatgaccactgagccaggcttttctcaggagcttcaatgagtatggccgacagacatggacaaggagctgtgttcaccatcggactcatgtgcagtcagcttttttcctgttggtttcatttgaataatcagatgctggtgttgagaccaagtatgattgacataatcattcatttcgacccctcctgcccctctctctctctctcctctcccctttgtggattctttttggaaactgagcgaaatccaagatgctggcaccaagcgtattccgtgtggccctttggatggacatgctacctgaaacccagtgcccagaatatactagaatcaccgcatttcagtggactcctgaagttgtacttgtgtataattgcccgcgtcgtgcataggcaaagaaggattaggctgttttctttttaaagtactgtagcctcagtactggtgtagtgtgtcagctctgtttacgaagcaatactgtccagttttcttgctgtttttccggtgttgtactaaacctcgtgcttgtgaactccatacagaaaacggtgccatccctgaacacggctggccactgggtatactgctgacaaccgcaacaacaaaaacacaaatccttggcactggctagtctatgtcctctcaagtgcctttttgtttgtactggttcattgtgttacattaacgacccactctgcttcttgctggtgaaagccctgctctttaatcaaactctggtggcccactgactaagaagaaagtttattttcgtgtgagatgccagcccctccgggcaggcaagggctctgaagatttgggcaacgtgggcttaaattgttctgctttttctgtagttcaatttcatgtttcttgnaccctttttgtataaagctgcaatattctctcttattgttcntttcatatggaatgtaatttctcgtgccgaattcctgcaggcnaatcaattaaaatccccccggcgccc

SEQ ID NO: 61371 - DNA, 920 bp, Homo sapiens
cctgctgacctccggcgctaccgttgcagactataacgacgcacctgctgatgctcagcagagcgaagtactcagagggctgaaagtcgcgttgagtaaagccgaaggtgagaagtgcccacgctgctggcactacacccaggatgtcggcaaggtggcggaacacgcaaaaatctgcggccgctgtgtcagcaacgtcgccggtgacggtgaaaaacgtaagtttgcctgatgagtcaatcgatctgttcaacagggctacgctggctgtggctggtggtagtcgtgctgattatcgatctgggcacgcaaatacctgatcctccagaactttgctctgggggatacggtcccgctgttcccgtcgcttaatctgcattatgcgcgtaactatggcgcggcgtttagtttccttgccgatagcggcggctggcagcgttggttctttgccggtattgcgattggtattagcgtgatcctggcagtgatgatgtatcgctcgaaggccacgcagaagctaaacaatatcgcttacgcgctgattattggcggcgcgctgggcaacctgttcgaccgcctgtggcacggcttcgtagtcgatatgatcgacttctacgtcggcgactggcacttcgccaccttcaaccttgccgatactgccatctgtgtcggtgcggcactgattgagctggaaggttttttgccttctagagcgaaaaaacaataataaaccctgccggatgcgatgctgacgcatcttatccggcctacagattgctgcgaaatcgtacgccggataaggccgttatgccgcatccggcaaaaatccttaaatataagagcaaacctgcattgttgaatctgtacagagcaatagccgccgtcctggtgcacgttacgcttaaacttgacgatggccc

SEQ ID NO: 61372 - DNA, 1092 bp, Homo sapiens
gtttcaggcactctgccagttgtgcgtgcatctcatcattaaaactgttcaggcgttccgggcggttgagcgttagtgtcatcacgcccttttctacatgactgaggatgaattccatcattagcgtcctttaaagtcgggcgtgcgtttttgtaagaaagcggagatgccttcatgacgatcttctgttgccgccagcaaggtgaataactgtcgctcctgggcaagtccggcttgcaaagccacttcctgcgactggcgcagcgcttgctttgccgcttgtaaggccagcggcgagtgacgtgccattttcgatgccagctgtaaggcgtattcgagggttaaatcgctggggaagacgtcgctaaccagcccggcctgctgtgcttgctgagcggtgatactttctccgctcagcaccattttgctggctaacgatttaccgacactacggattaaacgttgcgttccgcctgcgccaggcatgatgccgagagtgatttccggcaacccaaaacgcgcgttctctccggcaaccaccacatcgcacaacaatgccagttcgcaacccgccccaagcgcgtaaccattgacgggttgcgataagttggttaataaaggcccgccatcccgcccaaaaatccgggagggtgtttcgtaaaggggcccgcgagatctttttccgccatttcgttgagatcggccccagcggcaaaaaagcgtgcattaccggtaatcacacagaccgaaatgctggtatcggtagccgcagcttccagttcatttaccagttgcatcagcagggcattatttagcgcattacgtgcggcgggacggttaagggtcagcaacaatactcgttgctgacggctgacgatcagttcgctcatgccatccccttcgcgtcaaagtcaaccaccacatcgctggtcagcggcagtgcctggcaactcaacacataacctgcggccagttcatccggttccagactgtaattggtttccatcgccactttgccacgcagcacttcgcatttgcagatcgcacagacgccgcctttgcaggcatagggcagatctccgggtaccgacc

SEQ ID NO: 61373 - DNA, 2006 bp, Homo sapiens
acaggcccttagagcatcgccaggtgcagagctccacagctctctttcccaaggagtaatcagagggtgagaacgtggagcctggtggacaggtgaaagcactgggatctttctgcccagaaaggggaaagttgcacatttatatcctagagggaagcgacagcagtgcttctccctgtgctgaggtacaggagccatgtggctagaaatcctcctcacttcagtgctgggctttgccatctactggttcatctcccgggacaaagaggaaactttgccacttgaagatgggtggtgggggccaggcacgaggtccgcagccagggaggacgacagcatccgcccttttcaaggtgggaaacgtcagatgaggagatccacgacttacaccagaggatcgataagttccgtttcaccccacctttggaggacagctgcttccactatggcttcaactccaactacctgaagaaagtcatctcctactggcggaatgaatttgactggaagaagcaggtggagattctcaacagataccctcacttcaagactaagattgaagggctggacatccacttcatccacgtgaagcccccccagcttgcccgcaggccgataccccgaagcccttgctgatgggtgcacggctggcccggctctttctacgagtttttataagatcatcccactcctgactgaccccaagaaccatggcctgagcgatgagcacgtttttgaagtcatctgcccttccatccctgggctatggcttctcagaggcatcctccaagaaggggttcaattcggtgggccaccgccaggatctttttacaagttgatgttgcggcttgggcttccagggattcttacattcaaggaggggactggggggtccctggattcttgcactaatatgggcccagctgggtgcccagccacgtgaaaggccttgcactttgaacatggctttggttttaagcaacttctctaccctgaccctcctcctgggacagcgtttcgggaggtttcttggcctcactgagagggatgtggagctgctgtaccccgtcaaggagaaggtattctacagccttgatgagggagagcgggctacatgcacatccagtgcaccaagcctgacaccgtaggctctgctctgaatgactctcctgtgggtctggctgcctatattctagagaagttttccacctggaccaatacggaattccgatacctggaggatggaggcctggaaaggaagttctccctggacgacctgctgaccaatgtcatgctctactggacaacaggcaccatcatctcctcccagcgcttctacaaggagaacctgggacagggctggatgacccagaagcatgagcggatgaaggtctatgtgcccactggcttctctgccttcccttttgagctattgcacacgcctgaaaagtgggtgaggttcaagtacccaaagctcatctcctattcctacatggttcgtgggggccactttgcggcctttgaggagccggagctgctcgcccaggacatccgcaagttcctgtcggtgatggagtggcaatgacccacccctctccccccgtctgccacctccccccacaagtgccctccaggcttttcttggggaagataccccttttctgaggaatgagtttgcctccgtcccctgcccatgctgggagcccacgctcaccccctcacccctccaagctcactccccaacccccaactccgtgtggtaagcaacatggctttgatgataaacgactttactctaaaaaaaaaaaaaagggggggccgttttaaaggatccaagtttacgtccccgggcttgcaaggtaaaagtttttttatggggcccccaaaattaaattcccgggccggggtttaacaacgcggggaggggaaaaacccgggggttccccaattaaatggctttgaagaaaatccccttttcgccagggggggaaaaaaaaaaaaggcgg

SEQ ID NO: 61374 - DNA, 1923 bp, Homo sapiens
cgaaggctgaggtgggatcctcccaagttcccttagtagccagcttcggcacttccgggaggagccggaaataatttttgtgctcggcggaggctctctaggcgtgcgacccagcgactcgatagccggaagtcatccttgctgaggctggggcaaccaccgcaggtcgagacagcaggcggctcaagtggacagccgggatggcagagcgtgcggcgctggaggagctggtgaaacttcagggagagcgcgtgcgaggcctcaagcagcagaaggccagcgccgagctgatcgaggaggaggtggcgaaactcctgaaactgaaggcacagctgggtcctgatgaaagcaaacagaaatttgtgctcaaaacccccaagggcacaagagactatagtccccggcagatggcagttcgcgagaaggtgtttgacgtaatcatccgttgcttcaagcgccacggtgcagaagtcattgatacacctgtatttgaactaaaggaaacactgatgggaaagtatggggaagactccaagcttatctatgacctgaaggaccagggcggggagctcctgtcccttcgctatgacctcactgttccttttgctcggtatttggcaatgaataaactgaccaacattaaacgctaccacatagcaaaggtatatcggcgggataacccagccatgacccgtggccgataccgggaattctatcactgtggattttgacatcgctggccagtttgatcccatgaatcctgatgcagagtccctgaagatcatgtgcgagatcctgagttcacttcagataggcaacttcctggtcaaggtaaatgatcggcgcatcctagatggaatgtttgctgtctgtggtgttcctgatagcaagttccgtaccatctgctcctcagtggacaaactagataaggtgtcctgggaggaagtaaagaatgagatggtgggagagaagggccttgcaccagaagtggctgatcgcattggggactatgtccagcaacatggtggggtttccctggtggaacaactggtccaggatcctaaactatcccaaaacaagcaggccttggagggcttgggagacctgaagttgctctttgagtacctgaccctatttggcattgatgacaaaatctcctttgacctgagccttgctcgagggctggattactacactggggtgatctatgaggcagtgctgctacagaccccagcccaggagggggaagagcccctgggtgtgggcagtgtggctgctggaggacgctatgatgggctagtgggcatgttcgaccccaaagggcgcaaggtcgccatgtgtggggctcagcattggggtggagcggattttctccatcgtggaacagagactagaggctttggaggagaagatacggaccacggagacacaggtgcttgtggcatctgcacagaaaaagctggctagaggaaagactaaagcttgtctcagaactgtgggatgctgggatcaaggctgagctgctgtacaagaagaacccaaagctactgaaccagttacagtactgtgaggaggcaggcatcccactggtggctatcatcggcgagcaggaactcaaggatggggtcatcaagctccgttcagtgacgagcagggaagaggtggatgtccgaagagaagaccttgtggaggaaatcaaaaggagaacaggccagcccctctgcatctgctgaactgaacaaactatcagaggaaaggaagtgggactggcactatttgaggttaagacaaactgcatatgtacttcaattgctttgcacttttccgtttcagcggaagacctgaagagtggtcagaacagagcctttgatttttattatggttattttattgattattactggcaaaaacggccaggtacaa

SEQ ID NO: 61375 - DNA, 1209 bp, Homo sapiens; identical to SEQ ID NO: 61264
  misc_feature (1)...(1209): n = a,t,c or g

SEQ ID NO: 61376 - DNA, 2338 bp, Homo sapiens
tttcgtgctctgccagcgggaccatgctgctccgagtcgcttggaggcgggcggcagtggcggtgacagcggctccagggccgaagcccgcggcgcccactcgggggctgcgcctgcgcgttggagaccgtgctcctcagtctgcggttcccgcagatacagccgctgccccggaggtggggccagtgctgcgacctctctatatggatgtgcaagctacaactcctctggacccccgggtgcttgatgccatgctcccttacctaatcaactactatgggaacccacactcccggacacatgcttatggctgggagagtgaggcagccatggaacgtgctcgtcagcaagtagcatctctgattggagctgatcctcgtgagatcatttttactagtggtgctactgaatccaacaacatagcaattaagggggtggcccgattctacaggtcacggaaaaagcacttgatcaccacccagacagaacacaaatgtgtcttggactcctgccgttcactggaagctgagggctttcaggtcacctacctcccagtgcagaagagtgggatcattgacctaaaggaactagaggctgctatccagccagatactagcctggtgtcagtcatgactgtgaacaatgagattggagtgaagcagcctattgcagaaatagggcggatttgcagttccagaaaggtatatttccatactgatgcagcccaggctgttggaaaaatcccacttgatgtcaatgacatgaaaattgatctcatgagcattagtggtcacaaaatctacggtcccaaaggggttggtgccatctacatccgtcgccggccccgtgtgcgtgtggaggccctgcagagtggaggggggcaggagcggggtatgcggtctgggacagtgcccacacccttagtggtggggctgggggctgcgtgtgaggtggcacagcaagagatggagtatgaccacaagcgaatctcaaagttgtcagagcggctgatacagaatataatgaagagccttccagatgtggtgatgaatggggaccctaagcaccattatcccggctgtatcaacctctcctttgcatatgtggaaggggaaagtctgctgatggcactgaaggacgttgccttatcctcagggagtgcctgcacctctgcatccctggagccctcttatgtgcttagagcaattggcactgatgaggatttagcgcactcttctatcaggtttggaattggccgcttcactacagaggaggaagtggactacacagtggagaaatgcattcagcatgtgaagcgtcttcgagaaatgagccctctctgggagatggttcaggatggcattgacctcaagagcatcaagtggacccaacactagaagaatagggccctgactttgtgctggtctggcccctcctgcctcaccaacccgtgcacaaccagacaccttgttacacctagtggatgctctagattggtatagaccagttgacttcagcatcagtccacctctatgacagaaacacaagaaaactgtctttccctagcttcagttccttgggtgtggagcactccccatttcttctcgggtcttaaagtgtgtggacattttcatcccgaagccatagagacatttgctgtcatattgctgctgggcacatctgtgctcttggtgaggagagcaagaggaaccagaagaagtctctttggtcagggaccatgatgctctacatggacatttgagtcttcgtcttctgctgctgctcggctggaccagcttctttaacagcaagcataatccacttcaatgtaatattttctgtagctccaaaggctatctcttcatattgactgcagacagactgaatggacagtttcttagagggcttgtctcctttctacccttggcctctttcctttcctttgacctaatggagctagaaatatgtctgtgactccaccagttattctaataatttgttttcttgaaaattgttaatttcaagactggagaaataaactcaccttctatttacccctgtgacctttatgagaggttgagggaaaagtggaagcctgtaccttgggaattgtggagaagaccgcccactcccatcctgatttgcataaatgacctcagtgggcttttgtatctcttcatttaagacattatttgaatgcctgccaggagccagatttgttctgggtattaggaatacactggttaacaggaccaaaaaagaccctgccctcactgagttttaaattttagtggagagatggaaaataattaaacaaataaacaatgttatagattgt

SEQ ID NO: 61377 - DNA, 4357 bp, Homo sapiens
aagcggctcgggctgcggctggctcagagtgccgcggggggcgtggggcggtgctgaggagctgaagccgtggccagctcgacgccggacagtccagcgagcagcacggcgggaaccggcagccggagcagtcccggagcagaagcagcagcagcagcagcagccctcgccgttcgcggagcgcagccgagccggccatggcgttgtcgatgccgctgaatgggctgaaggaggaggacaaagagcccctcatcgagctcttcgtcaaggctggcagtgatggtgaaagcataggaaactgccccttttcccagaggctcttcatgattctttggctcaaaggagttgtatttagtgtgacgactgttgacctgaaaaggaagccagcagacctgcagaacttggctcccgggacccacccaccatttataactttcaacagtgaagtcaaaacggatgtaaataagattgaggaatttcttgaagaagtcttatgccctcccaagtacttaaagctttcaccaaaacacccagaatcaaatactgctggaatggacatctttgccaaattctctgcatatatcaagaattcaaggccagaggctaatgaagcactggagaggggtctcctgaaaaccctgcagaaactggatgaatatctgaattctcctctccctgatgaaattgatgaaaatagtatggaggacataaagttttctacacgtaaatttctggatggcaatgaaatgacattagctgattgcaacctgctgcccaaactgcatattgtcaaggtggtggccaaaaaatatcgcaactttgatattccaaaagaaatgactggcatctggagatacctaactaatgcatacagtagggacgagttcaccaatacctgtcccagtgataaggaggttgaaataggcatatagtgatgtagccaaaagacttcaccaagtaaaatcgcgtttgttaaaagaggtgtctttcatgtcttccccttaaggaatacggttttcctaacaggctactccttcctgtagagcagaaattgtattttgcacgaacatgcagttattgaagattaggatcaaggatagacaaggtatagtagttatcttaaaatatacactcctaagcagtattattttaaaatcctttaccctggctacctcccctacccgggttcccctctctttaatttggagacactccaccacaaacttttcactttagaggtagcttgccatctctcaggagccctcaccattgtgtccattcactgtgtatagatggcagaacttttgaggtgcaatgtttaattgttaaaaatagtagccacgactttatcaggcagccccaaactggtgcataatgcatggtacaagaaatatttatgtattttttggaattttgtaatatttagtaagagtatatgaaaggattgctactgtatcagaaatattgtttcaatttagtctatcctggatatgtactaacgaatattaccaccagagaagagagctttctacaaaagtcactacagattttgctatattgctttgtagatagatttttacttttgcctaaaagcatttatccttcataccaattgtaacatctgacaccatgtagaagctaaaagtttagagggagtgagcgttttctcaagaccttcctcaagcattttatctttagaagagaaactgatgggcacctgatactctgtctaaatacgtttgttatatgtgttttgccctgtgccattcatttggaactttattgcattctttattttaaaaaccttgtttttacgtaatcatagagcttgctatttgtacatctgttgagcaacactacataactgatttttagttgacttagctatagcagtacaatgattagtaatgtaaaaattaacacagaaattaacctaaggaatgaagggtgggtttgtcaaaatatcaagtaaatttttgtttctaaagtacatttaatgtagatgacctaaagaatgcgttatccatcctatataaaagaaagataaaacacaggtcaccaattttctcatttcaccccatttaccttgtatagaggattgttcattcctttgggactaagttatagttatggtgagtgtgtatttactgtagttttgcctgatctcactcattgcacttcctggagttaaattttccaacagccatgttgaggaatagcactctgcatgtttttgttttgtttttcggggttttttttaattgaagccctaaaccaggaattatttgtgttctaacaggaggatgaacttgctgaaaataaaactttgctatgtatttactcttttttaaaagacaaaagcaaaaccagactttctacgtactactccaaagactgtgattgtgactataatacatttttggtaatttttttatacctaatttgtataggaagtgctatttctcataggctgtttcttgaaattttaagtttattgctttaaaatggcagtgtttctcccactttgatatgctaacatttagtaagcactggctttatgaaagcggctttttataagtatactgcattatttgagcctatcattaattagcttagtatgaaagataaggaaaaatctccatgttgtatccatttggctcaggaagattctttgccttacctttcttagaactctttattgcttatcaaaagtttgagtacccgcttggtttttttttggtaattaaatattgtatgatttatctggttcaaggaagatgcactattcagttatctattgagaaattattttgcagtggttttagtgggtgaaaatgtcccatctgcaccagtacacaggcaggcattatcattcttcacctactttttaaatagtggcaacttgggattcattctggtgattctgaaccttgcctcatagcttaaagtataaaaaagattcaagagcagtgaggtttgttctttccagtgaatggtggactgagtggtgcgaggtggagggctaacaagaggaaagaactacattcttcagaatacagtgatgaaaattcattttgaaactcaaatattttcattttggatattctcctgtttttattaaaccagtgattacacctggccatccctctaaatgttctaggaaggcatgtctattgtgattttgatgaagacagaattatttttctctgtagaaacacagataccactttatcagggaagttagtcaaatgaaatggaaattggtaaatggacaaaagctagctagtaaaaaggacgacccagcaacatgctttaaccccattgtatgtttgtggaaagagcatagtttaacatcttgagaaatttgggacataaagttttcatggtagacagttcatgcagtatatgaattgacataatggaaataatctgattttatttttacaactaacatccattccccttcatttaaacaccttttgtgttttacttcagtgaggagattggagtctgaatggatctgttttccaagagattctgagaaatttttgtattcagcagttggaaagctctctattctagttgataaaacttcccttttttgatgtagatgcagatattctatacagttctgttgtcttttactaggactgtaaacttttgtgataaaattcaaataagattttatttcttggtaattttggctttcacaatttatctttaaatccttgagcaatctgtatacaattaagagatttctgacatttattcttacactaaatggatcaactctaggatttaggcatgttaacttctgttgtgttttgaatctctccagagttgcatgtagatagcatttatttctgtgcccttaaacccatttagaaaataactacaaagtaaaaatgtagaggaaatagaaatgtattttttcatgaacattttgatacaaatttcatcatttaatgattcaccaatttcttgcattaatttgaatttaagcatttaattcaaagagaggggagcatccattattgatacatgtgggcttttaaaaactccatcctttataaatagtcaaggtttgggccacacaaagtatatttttatcatggaaaaatttcaactcctcaagccgtaatgttgaacagaattggagtattttctttataatttcttgaacaggcaaatgaaagcttattatagaatgcatgtattttcttttatctttggaacatcagcaccagtatattgctggcagctattgtattaaaaaataaagtatattttcactatcataaaggattcttttttcccccctcatgaaaataaacaacaacttggggtaaaaaaaaaa

SEQ ID NO: 61378 - DNA, 2959 bp, Homo sapiens
tttcgtcgcaggggtgggagctgttgccgaagctgccacagcaaaagttctcccccctccccccttcccctcctctcaaggcccctagaaaggttggagctgccgccgcctgcagtcggtgaccgcgcgactcggcgcccgcccgcggaatcggatggcataagtgattaaggtggtattgaggatttctgaagcctatgaaaggtagaaactcaaccatgatttctttttcaactctacagcattcctttccttgaagtcttcgtttttaccttagtctcgggcagttatacttaagcatgaacattgacgacaaactggaaggattgtttcttaaatgtggcggcatagacgaaatgcagtcttccaggacaatggttgtaatgggtggagtgtctggccagtctactgtgtctggagagctacaggattcagtacttcaagatcgaagtatgcctcaccaggagatccttgctgcagatgaagtgttacaagaaagtgaaatgagacaacaggatatgatatcacatgatgaactcatggtccatgaggagacagtgaaaaatgatgaagagcagatggaaacacatgaaagacttcctcaaggactacagtatgcacttaatgtccctataagcgtaaagcaggaaattacttttactgatgtatctgagcaactgatgagagacaaaaaacaaatcagagagccagtagacttacagaaaaagaagaagcggaaacaacgttctcccgcaaaaatccttacaataaatgaggatggatcacttggtttgaaaacccctaaatctcacgtttgtgagcactgcaatgctgcctttagaacgaactatcacttacagagacatgtcttcattcatacaggtgaaaaaccatttcaatgtagtcaatgtgacatgcgtttcatacagaagtacctgcttcagagacatgagaagattcatactggtgaaaaaccatttcgctgtgatgaatgtggtatgagattcaaacaaaaatatcatatggaaaggcataagagaactcatagtggagaaaaaccttaccagtgtgaatactgtttacagtatttttccagaacagatcgtgtattgaaacataaacgtatgtgccatgaaaatcatgacaaaaaactaaatacatgtgccatcaaaggtggccttctgacatctgaggaagattctggcttttctacatcaccaaaagacaactcactgccaaaaaagaaaaggcagaaaacggagaaaaaatcatctggaatggacaaagagagtgctttggacaaatctgacctgaaaaaagacaaaaatgattacttgcctgtttattcttcaagtactaaagtaaaagatgagtatatggttgcagaatatgctgttgaaatgccacattcgtcagttgggggctcgcatttagaagatgcgtcaggagaaatacacccacctaagttagttcatcaaaaaaattaatagtaagagaagtctgaaacagccactggagcaaaatcaaacaatttcacctttatccacatatgaagagagcaaagtttcaaagtatgcttttgaacttgtggataaacaggctttactggactcagaaggcaatgctgacattgatcaggttgataatttgcaggaggggcccagtaaacctgtgcatagtagtactaattatgatgatgccatgcagtttttgaagaagaagcggtatcttcaagcagcaagtaacaacagcagggaatatgcgctgaatgtgggtaccatagcttctcagccttctgtaacacaagcagctgtggcaagtgtcattgatgaaagtaccacggcatccatattagagtcacaggcactgaatgtggagattaagagtaatcatgacaaaaatgttattccagatgaggtactgcagactctgttggatcattattcccacaaagctaatggacagcatgagatatccttcagtgttgcagatactgaagtgacttctagcatatcaataaattcttcagaagtaccagaggtcaccccatcagagaatgttggatcaagctcccaagcatcctcatcagataaagccaacatgttgcaggaatactccaagtttctgcagcaggctttggacagaactagccaaaatgatgcctatttgaatagcccgagccttaactttgtgactgataaccagaccctcccaaatcagccagcattctcttccatagacaagcaggtctatgccaccatgcccatcaatagctttcgatcaggaatgaattctccactaagaacaactccagataagtcccactttggactaatagttggtgattcacagcactcatttcccttttcaggtgatgagacaaaccatgcttctgccacatcaacacaggactttctggatcaagtgacttctcagaagaaagctgaggcccagcctgtccaccaagcttaccaaatgagctcctttgaacagcccttccgtgctccctatcatggatcaagagctggaatagctactcaatttagcactgccaatggacaggtgaaccttcggggaccagggacaagtgctgaattttcagaatttcccttggtgaatgtaaatgataatagagctgggatgacatcttcacctgatgccacaactggccagacttttggctaaaaaaaaaaaaaaggggaaataatactggccctttaaaacagattaatcaagaggggggttactctgtgtaaatggagtgctgtacagatttaagagcaatgcgtaataacaagttaagctgatatgaatagcaagataatccaataactgcatttcgtttggttagtcagcattctttgaactgccttacatgttgtcacctttatagaagcaatgcattacttgttttagataagacacctgctattccacccacaccaagttaaaaaaaaaa

SEQ ID NO: 61379 - DNA, 1580 bp, Homo sapiens
aattcccagacaacgacagctgatcaactacttgaattttttaaacaagttggagaagtgaagtttgtgcggatggcaggtgatgagactcagccaactcggtttgcttttgtggaatttgcagaccaaaattctgtaccaagggcccttgcttttaatggagttatgtttggagacaggccactgaaaataaatcactccaacaatgcaatagtaaaaccccctgagatgacacctcaggctgcagctaaggagttagaagaagtaatgaagcgagtacgagaagctcagtcatttatctcagcagctattgaaccagggtggctgcactcaacgagtttatgcaatgactttcttggatgtttctgaaggaggaggatgtacagagagtaggccccttgcactatatgtggtacattccacttgtgcctgattattaactgggatctttaattgttctgagcttacactgcaaagtgattttttcctcccagagtctggaaagagcaatgaaagaaaaggcggtcgatctcgttcccatactcgctcaaaatccaggtctagctcaaaatcccattctagaaggaaaagatcacaatcaaaacacaggagtagatcccataatagatcacgttcaagacagaaagacagacgtagatctaagagcccacataaaaaacgctctaaatcaagggagagacggaagtcaaggagtcgttcgcattcacgggacaagagaaaagacactcgagaaaagatcaaggaaaaggaaagagtgaaagagaaagacagggaaaaggagagagagagggaaaaggaacgtgaaaaagaaaaggaacggggtaaaaacaaagaccgggacaaggaacgggaaaaggaccgggaaaaagacaaggaaaaggacagagagagagaacgggaaaaagagcatgagaaggatcgagacaaagagaaggaaaaggaacaggacaaagaaaaggaacgagaaaaagacagatccaaagagatagatgaaaaaagaaagaaggataaaaaatccagaacaccacccaggagttacaatgcatcgcgaagatctcgtagttccagcagggaaaggcgtaggaggaggagcaggagttcttccagatcgccaagaacatcaaaaaccataaaaaggaaatcttctagatctccgtcccccaggagaaataagaaggataaaaagagagaaaaagaaagggaccacatcagtgaaagaagagagagagaacgttcaacgtctatgagaaagagttctaatgatagagatgggaaggagaagttggagaagaacagtacttcacttaaagagaaagagcacaataaagaaccagattcaagtgtgagcaaagaagtagatgacaaggatgcaccaaggactgaggaaaacaaaatacagcacaatgggaattgtcagctgaatgaagaaaacctctctaccaaaacagaagcagtataggaccgacaagtgtacctctgcactcaatgctggaatcaaatccaaagcttttaattctctcaacaagatgtaaacaggaaagaaatctagttgagcatga

SEQ ID NO: 61380 - DNA, 2120 bp, Homo sapiens
ttttttttttttaaatttaaaatgtctttattcatttacatggtatatatcaccctctacaaaaaaaaatgacacttgtctttcaatctgtcaagcttagctaaaaaattcacgtatctcttttctatatcacatattgacatgatataggatgcaagatataaatatcaatttaatagacattattaaataattttacacttagtagaatcttggataaatggttaaaattatagattgacattaagtgtgggcacaggaatattctgtgtataccaatgggtttaacagaagatgtgtttgcactgatttctggtcatcaacttgctttccgtgaatctttaaatacccaattccaaatcttccagctcctggagaagggctgtttctttctgaattttctccaactgatttttttctagctgttttccagttgctgcttgttctttcagttgttcgattgctttcagtttcttctttaggttcttgatttttttgtctatctcagggtccccagaaattgactgagagacagtgtttcgtggtgtgctctgtggggcaggagtaggtgccaaatctggactcttgtcacttcttgcttcctgctttgcagctttcttagcttcatgcttcctttgatttttaagagctgtttttgataatggcttatcgtttcctgattgtggtttcatattctgaggtggttcctcttcatgcaatttggaattggtgattggtttatttcttaaagctgggggtctataagctgttgcaactttaggttcctcattgggtacttcacttggaactgcttggtaagttattgtttttgctggaaatattccatccaaaaatggctgccaagaaacctgccataattctgcatttgatggcacatcatacttgtgcaagatagagccagtataatgccaaattttgtatccattattaacccgtaacctgggagcacatgtagctgttaaaatatgctcaccatccgggcaccaagcaaaatatgtagaatcagaagccaccggtttagaaataagtttgtagtttttcacatcccacacttccatttgtcccctcagatttgtaaaatcagatttccaaatccagctaatactaatatatgtccatgagggctatagtaggctgcattacgaggaccagttccaaagtcaaatacaggatcacatttcaagttgaaaattgtcgctttggcaggcataaaaccatatacagcacaaaactcagtagaactagaattccaaactacatcataaatggggccattttttggtaattgcactacagcactttctccatttgttgcaatgtagtgtagagtttgttctccatagtaggaagctcctgtcttgtcaacatctgtgctagctattaccaacacagcagtagcttttttattccacagcattgtaactttatctgccttaaagaaacttttattagctaaagctgcatgaggtccagcaaagttggggtactgatataatctaacaaatgaaggtgcacctttacttcctggaacatagacagccaccttgtatggttggggtccaggtgataatacaaaatcattaattttttgcaaatgcaatttatttgcaattgtgttaaaattgttgttttcaaagaagtgaacttcattgttaacattgcgggcacaaagagtttcatcttctgaccaggatggacaccaattttgcatttttttctggatgaaagatttcaaacatgtccccagttttcacatcataaagttgtaggttgggtatcccagctgtgccatctttagaagtactgtaaggctgccacgttgcccaggacagtatttttgggtgagaattccaaggcaaactgccttcaggaggtcgaaggagtgcagtagtcccttgttagtgacactgataatatttactttttctccattgccccaggcaaacaaggtcccatccttactaaagatacagactttgcaattcttcccagattcccttggaaacactgtgctttctgtaaaatgtggtggtccattcaccatgtacagtccttctgatcctcggactgtcaagagcggcgtggacggcgccatgttg

SEQ ID NO: 61381 - DNA, 6772 bp, Homo sapiens
cagctgccaggtcgagggatgtactcgaacctataattcttcacagagtattgggaaacacatgaagacagcacaccctgaccaatatgctgcatttaaaatgcagcgcaaaagtaaaaaaggtcagaaagctaacaacttaaatacaccaaataatggaaagtttgtttattttttgccatcaccggtgaacagctcaaatccattttttacatcacagaccaaagccaatgggaatcctgcttgttcggcccagttgcagcatgtctcgccacccatttttccagctcatttagcaagtgtgtcaactccattgttgtcctcaatggaaagtgtcataaatccaaatataacttctcaggataaaaatgaacaaggtggtatgttatgttcccaaatggaaaatttacctagtactgccttgccagcacaaatggaagatctaaccaaaacagttctgcctttgaatattgacagaggctcagatcctttcctttctttacctgcagaaagtagttcaatagatctcttcccttcaccagcagatagtgggactaattctgttttttcccaactggaaaataatacaaatcattattcctcacagattgaaggaaacactaattcctcctttctaaaggggggtaatggtgaaaatgcagtttttccttcacaagtgaatgttgcaaataacttcagtagcaccaatgcccaacagtctgcacctgaaaaagttaaaaaagaccgtgggcggggccaaactgggaaggaaagaaaacctaagcacaacaaaagggctaaatggcctgcaattatcagagatgggaaatttatctgtagcaggtgttacagggcttttactaatcccagatcactgggtgggcacttatccaagcgatcttactgtaaaccactggatggagccgaaattgctcaagaacttctacagagtaatggacagccttctcttcttgccagcatgattctctccacaaatgcagtaaatttgcagcagccacaacaatctaccttcaatccagaagcatgttttaaagatccatcatttctacagcttcttgctgaaaatcgctcgccagcatttttaccaaatacatttcctcgatctggtgtgactaactttaataccagtgtcagtcaagaaggtagtgaaattattatacaggctttggaaactgctggcattcccagtacatttgagggtgccgaaatgctttctcatgtttcaacaggttgtgtctctgatgcatcacaagtaaatgcaacggtgatgccaaatccaactgtaccacccctgttgcacactgtatgccatccaaacaccttgctgaccaaccagaataggacgtcaaactccaaaacttcctccattgaggaatgtagcagcttgcctgtttttccaacgaatgacttactactgaagactgttgaaaatggtttgtgctctagttcatttcctaattctggtgggccatcacaaaattttaccagtaacagttctcgtgtttctgttataagtggtcctcagaacacaagatccagtcatttaaataaaaagggaaacagtgcttctaagagaagaaagaaagttgctcctccactaattgcacctaacgcttcccaaaacttggtaacaagtgacttaacaacaatgggactcatagcaaagagtgttgaaatcccaactactaaccttcattcaaatgtaattccaacttgtgaacctcagagtttggtggaaaatctaacacagaaattaaataatgttaacaatcagttatttatgactgatgtaaaagagaatttcaaaaccagtcttgagtcccatacagtgttagcccctttaacattaaaaactgaaaatggtgattcccaaatgatggctttgaattcatgcacaacttcagtaaattctgatttgcagatttctgaagacaatgttatacaaaactttgaaaagactcttgaaattattaaaactgctatgaattctcaaatacttgaggtaaaaagtggatctcagggtgctggtgaaacttcacaaaatgctcaaataaattataacattcagcttccttcagtaaacactgtgcaaaataacaaattacccgattcttctccgcttttcctcctttataagtgtcatgccaacagagagtaacattcctcagtctgaaggtatcacataaggaggatcagatacaggagattttagaaggcttacagaaattaaaattagaaaatgacctatccactccagcatcccaatgtgtactgataaatacatcagtgacactgactcccacgcctgttaaatcaactgcagatatcacagttattcagccagtttctgaaatgataaacattcaatttaatgacaaagttaataaaccctttgtgtgtcaaaaccaaggctgtaactacagtgctatgacaaaggatgcactatttaagcactatggtaaaattcatcaatacactccagaaatgattcttgaaattaagaagaatcaattgaaatttgctccctttaaatgtgtagtacctacatgtacaaaaacatttacaagaaattctaacctccgggcacactgtcagttggtgcatcattttacaactgaagaaatggtaaagttaaaaattaaaaggccttatggaagaaaatctcagagtgaaaatgtgccggcctcacgaagtacacaagtgaaaaaacagctagctatgacagaggaaaataaaaaggaatctcagcctgctttagaattgagagcagagacccaaaatacccacagtaatgtagcagtgatcccagaaaaacaacttatagaaaaaaaaagtcctgacaaaacagaaagttctttacaagtgattacagttacttcagaacaatgtaatacaaatgcactcacaaacacacaaaccaaaggacggaagattaggaggcataaaaaagaaaaggaggagaaaaaacgaaagaagccagtttcccaatcccttgagtttccaacaagatacagtccttacagaccttatcgatgtgttcaccagggatgctttgctgcctttacgatacagcaaaatttgattctccattaccaggctgtacacaaatcagatctacctgcattttcagcagaggtcgaagaggaaagtgaagctggtaaagaaagtgaagaaactgaaactaaacaaactttgaaagaatttcgatgtcaggtaagtgactgttctcgaattttccaagcaattactggcctaatacaacactacatgaaacttcatgaaatgactcctgaagaaattgaaagtatgactgcttcagtggatgttgggaagtttccatgtgaccagttagagtgtaaatcttcatttactacatatttgaactatgttgttcatctagaggcagaccacgggattggactaagggcaagtaaaacagaagaagatggtgtatacaaatgtgattgtgaaggctgtgaccgtatatatgcaacccggtcgaatctcctccgacacatttttaataagcataatgacaaacataaggctcatttgattcgtccaagaagattaacaccaggccaggaaaatatgtcaagcaaggcaaaccaagaaaaatcaaagtctaaacatcgggggacgaagcacagcagatgtggaaaggaaggaataaaaatgcccaagaccaaacgaaagaaaaaaaataatttagaaaacaagaatgcaaagattgtgcagattgaagaaaataagccttattctctgaaacgtgggaagcatgtatattctataaaggctagaaatgatgccctgtctgagtgtacaagcagatttgtaacccagtatccatgtatgataaagggatgtacttcagttgttacaagtgaaagcaatataattagacattataagtgccataaattatctaaggcatttacatcacaacaccgaaatcttcttattgtattcaaacggtgttgcaactcacaagtaaaggaaacgtctgagcaagaaggtgctaagaatgatgtgaaagattctgacacgtgtgtatcagagagcaatgataattcaagaacaacagctacagtttcacaaaaggaagttgaaaaaaatgaataagatgaaatggatgaactaacagaattgtttattacaaaattaataaatgaagatagcacaagtgtagagacccaagctaatacttcttcaaatgtaagtaatgattttcaggaagataacctctgccagtcagaaagacaaaaagcaagtaatttgaagagagttaataaggaaaaaaatgtctcacaaaataaaaaaaggaaagttgaaaaagctgaaccagcatcagcagctgagttaagtagcgtgcgtaaagaagaagaaactgctgttgccattcaaaccattgaggagcatcctgcatcttttgactggagctcttttaagccaatgggatttgaagtatcatttctgaagtttcttgaggagtctgcagtgaagcagaagaaaaatactgacaaagaccatccgaatactggaaacaaaaaaggatcccattcaaattcaagaaaaaatattgataagactgctgtgactagtggaaatcatgtatgtccttgtaaagaaagcgaaacgtttgtacagtttgccaatccatcacagcttcagtgcagtgataatgtaaaaattgttttagacaagaatcttaaagattgcactgagcttgtcttaaagcaacttcaggaaatgaaacctaccgtcagtctgaaaaaacttgaagtacattcaaatgatccagatatgtctgttatgaaagatatcagtataggtaaagccacaggcagaggtcagtactgataattaatgtagtataaatacatcatttaccattttattttaaataggaagccatcaagcatgctagaattgtgaaactttcattatatttttttgttgttgacatgaattaacctggccaaaaacaaaaaagaaaaaaaaaacatgacatttgtcatgtaaaacttttttttatccctatgggacttgaggaacagaatcagtacttcagttattgtaaatagtgagctaaacctcaaatttctatcacccagttgcccttttcatgaactaaacaattatctgtgtgattggtatgtttcaccaggtcactgctcatgtataacagtactctttatttgtagataccttttttgtatatatttattattgtaaatcatgtgctgccaccagcagtctgtaagtctaaactattaaatgacacatttatatttggaattttaatttttaactaagcgatcaagttttttaaattgttcttttattgttttaaattaagaactttttgaactaaaaccagaaactctgccatagttcattgatttttacatgaaacatttatttacaagatgatatcaagattacttttcacaaaataggcacattatatcaacactttgctctgctttgtaaatttgccatccaggattttggggtggtattcatgtgaaattaaagcagattctctagcagtttcctatagctacagtttttttttttcattgcttctaattggatatagttactatgagtccatgaaatacaatggaaatgtgaataaagaatttactacattgaagattttaaacatttggtattaaaaaaaaatcctttgtgaatgtgatagaaaactagtagtgtggagcagtgtaaatatttgaggtggtgatttgtgaagtagcccagtattgccttaaataaaatcacatttcatttcttgttttatacatgtgatcttataaagattttttgttttgttttgttttccattttctgagatttatagattggtgtatagctttaaactgtataaagttttgtggaaagatttttttaaacatttttataaatcttaaaattgatatcatcaaagtgagcccatcttgtgtttataaaatacaagagtccttaacatttataattacatagataaaacactttctataaggaagttggatgttttgattttactgtttatagatgttagattgtacagatttgtctgtatttctcaccatatctaatgatacttttttcattagattggtcttcaagaacagtattagttataattattttggttattcagtatatagttagctcttacagtttagctttattcaccatatttatactgtggattcacagcgagaggtagaggttattccaggagagttgatgaccttcatttaaagtccaactaaaatcagtagtagaaacataagaaaacatctttgcaatatttacttttgtttctgtttgccgtaaatagtaacattgtttttttttattttgtgtttgttataaaacagttgcattcacaatattattggcctgagatattgatgatattgtgatggtatgaaaatgtgtacattccctgtgcaacatcagatttgcaggaaaaatgaagcacttactgaaatcgctggtactctgaataaataagcatggtcaaggagtgaactattttcttttggaaatttctttttaatttttattattaaagtattttatttttagggccttttgggttttattgaatagttcatttcacctgtttaagacttactaccaataagcataaaacctgacacgttaaaatccctgccctttggtgagcccactgttatttattaaaataaaagttattttatgggtgattaaaaaa

SEQ ID NO: 61382 - DNA, 2112 bp, Homo sapiens
tgaagatccacatcttccggataaaatccaggtcttttctccaatatatgtcttcctgaagatccacgtcggccagaaaatccatgtcttccagaaaatccatgtcttccagtaacctcccagtcttccagaaaatccacgtcttcccaacaatccaagtcttccggataatttgggtcttcctgaaaatctacgtcttccaaaaaagccatgtcttccagaaaatccacatcttccaatggcctccaggtcttccagactatccatgtcttccagaaaatccttggcttcccttaaatctatagcttccaaaaaatccgggtcttccaggaaatccgtgtcttccagcaagtccacgtcttccaacaaagccatgtcttccagactatccatgtcttccagaaaatccttgtcttccctcaaatccatgtcttccagaaaatccacgtcttccagaaaatatatgtcttccaactaagctacgtcttccaacaaatccatgtcttcctatatctccaggtcttccagcatctccagggcttccagcatctgctcgtcttccaacatctccacgtcttccagcatctctgtgtcttccagcatcttcatgtcttccaacaactacccagtcttccatcaactggctcaatatccatgtcttccaacgtctccagtgtgctgatcttctgacattcaggtcttccagtgtctgcaatatccagggtttccgatggcacctgtgtcaaggtcttccaacaactccgggtcttccagcgacttcaagtcttccaataatctcaaggtcttccagataatcctgagcttccagaaaatccacatcttccagacaatccatgtcttccggacaatccatgtcttccaagaagctccaagtcttccagtaaatcaagtcttccagcaaatccagtcttccagcaattactggtcttccaccaaatccagatcttccaggaaaatccacgtcttccaggaaatccatgtcttccaataatttcaaggtcttccatcaaatacagatcttccagctaatccatgtcttccagaaaaatctgtgtcttccaccaaatccaagtcttccagtaaatctagttcttccagaaaaatctagatcttccagtcaatcagtgtcttccagaaagaaatccaggtcttccagtcaatcagtgtcttccagaaagaaatccaggtcttccagtcagtcagtgtcttccagaaaaatctacgtcttccaccaaatccaggtcttccagtcaatccacatcttccgggaaaaaatccaggtcttccagccaatataggtcttcctgaagatccacgtcttccagaaaatccatgtcttccagaaaatccatgtcttccagtaacctcccagtcttccagaaaatccacgtcttcccaacaatccaagtcttccggataatttgggtcttcctgaaaatctacgtcttccaaaaaagccatgtcttccagaaaatccacatcttccaaatggcctccagggtcttccagactatccatggtcttccagaaaatccttggtcttccccttaaatcctatagggttccaaaaaatccggggtcttccagggaaatccggtggtcttccagcaagtccacgtcttccaacaaagccatgtcttccagactatccatgtcttccagaaaatccttgtcttccctcaaatccatagcttccgaaaaatccaggctttccaggaaatccgtgtcttccagcaaatccacgtcttccaacaaagccatgtcttccatcaaattaatgtcttccagcctacttgtgtcttccaacaaaggtcttccagcatctccagggcttccagcatctgctcgtcttccaacatctccacgtcttccagcatctctgtgtcttccagcatcttcatgtcttccaacaactacccagtcttccatcaactggctcaatatccatgtcttccaacgtctccagtgggctgatcttctgacattcaggccttccagtgtctgcaatatccaaggtttccgatggcacctgtgtcaaggtcttccaacaactccgggtcttccagcgacttcaagtcttccaataatctc

SEQ ID NO: 61383 - DNA, 1193 bp, Homo sapiens
ccatctttatgtctgtgtgtacctattatttagctcccactcataaatgagaacatgcagtatttgactttctgtttgtgagttaatttgttctgggaccaaactgaggttcgggctgctatttctcacggcccaataacgagatgcagatgaactggggaggaagagagttatttctgtaactggttacagggagaaggtctgaacatcatcaccagaccaactccaaattacaaagttttccagagcttatataccttctaagctatatgtctacctgtaagtgtgcattcacctaaagacataagttactaacttcttttaatctataactaaggtctgagtcctgaagaccttcctttggagcctcagtaaatttacttaatctaaatgggtccaggtgctggagtgattacccttatcttgtcttctgctaaatcactgaagtttgaggagttcctttagaccttcaataaacttgtttgtagaggcctggagagtttcttcacaacccacagtaaaacttgtttaatcctgaatgggtcctgttaagaattccttcattattctgtcatgctttaaggcccagggaaagcctaggcaaaactcttgataggcttttgttacattccagcctttgtgaaagggcactggcttttttagcttttaatatttaacttaaccactcagtcagtactgaaacagtcgttatggaggcctgcattagtgagacctggcctgccacaatcctgtgttcatgtattgaaagactgtattattaagatggcagtactacccaaagcagtctacagattcactgagagccctatcaaaattccaacagcctttttgaaaaatggaaaagcttaccatcaaactcatatggaattgtaaacgccgtgaatagccaaaacaatgcggaaaaggccaaagttggaggactgacacttcccaatttcaaaacttactataaaactacagtggtctaaacagtgggctgttggcacaagtacagatgatactaacatacagatcaatagaatagaattgaggcttcagaaataaacccatacatctatggccaactgactttcaacaaatgatgctgcaataactgaatgtacacatgcaaaaaaaaagttgaacctctatgtgatattgcgatagaaaaaaaacatatttttgggctttgg

SEQ ID NO: 61384 - DNA, 1260 bp, Homo sapiens
tccttctctggccttgcccttgccctgttccctttctggtcctgccatgtttctggccctgccctgtccatgtcctggacctgactctggccctggacctccctgtccctgccctgccataccttggcccgttccttgctctacactgaccctgccctgccttggccctgtgctaccctagccctgccctggccttctgctgaccctgatcctgccatggccctggccctgccatgtccctgccctggccctggttctgccctgcttctggccctggccttggtcctctcatgtccctggctgtgaccctgcccctggtttttctctggccatgaccctgccccggttctgtcctatccctggccctgtctcagttctgtcctagccctggcctttcacagtactttatgcttagtaagggctccatggtgtctgtgagttgaatgttgtattcatagtatctgccaaaacagaaagaaaaaaaacaaaatattttgataagaagttaaagctttgtatataatatgccttgaattgtaagtgcctgttattagttgtattacatataggtcatggttttgtacacataactccaaaccattgatactgttaaaagaatatatgaatatatgaaagaatgtataaacgtaagaatgtatcagtatctaatgacctttccaaattaatttttatttttagctctgttagatttttctcagtgtaacaaatgtttattcctatgtaattaagggcgtatttcctgtacagaatattcatattacctaattgaaaattatatgatacaaaaatataatactatttttagccaggcatggtggctcatacctgtaatcccaacattttgagaggccacgtttggagaatcatttgagtccaggagttgaccagcctgggcaacatagtgagaccttgtccttattaaataaataaataaataaataggttgggcactgtggctcatatctgtcatcccagcattttgggttgcccaatgcaggaggattgcttgagccccaggagtttgagaccagcctgggcagaatagcaagactccatctctacaaataataaaatattaaccaggtgtggtggtgtgcacctggggtaccagccacctgggaggctaaggtgggaggtttgctcgaggctgcagtgaactgtgaatgcaccactgcattccagcctaggccatagaacaggatcttgtctataaataaagaaataagtaaaaatataaat

SEQ ID NO: 61385 - DNA, 8514 bp, Homo sapiens
tttcgtcgcggcgctgcggacccgggcggctggcaaaggacgaggcggaggctgaggaaggcagcggggagacccaggctgcagcaacaaagggcagcgagcgattggccgggctgcaggcgagatttgcctgaagacctggataatctccatttttgtcatggactgttaaaacgtttgaagttccaattctggtcttgatttcccagttaaagatgttcttcacccgaatgcagtctttcctgttggtaaaataagacaaccatcaacattgcctgtttgtctgcttttgaatctcttaaggatggatgtttgtaagatgttgcttaatacagtctggaatactctgtccatttgttgaattgtaaatgactttcaaatgtgcaagttctgttaaatacaaagagaacctctatgggtaacttttgtgttgaagaagtcatttgtcaaccatggtaaaacttgcaaacccactttatacagagtggattcttgaagctatacagaaaataaaaaagcaaaagcaaaggccctctgaagagagaatctgccatgcggtcagtacttcccatgggttggataagaagacagtctctgaacagctggaactcagtgttcaggatggctcagttctcaaagtcaccaacaaaggccttgcctcctataaggacccagacaaccctgggcgcttttcatcagttaaaccaggcacttttcctaagtcagccaaggggtctagaggatcatgtaatgatctccgcaatgtggattggaataaacttttaaggagagcaattgaaggacttgaggagccgaatggctcctccctgaagaacatagagaagtatctcagaagtcaaagtgatctcacaagcaccaccaacaacccagcctttcagcagcggctgcgactgggggccaaacgcgctgtgaataatgggaggttactgaaagacggaccgcagtacagggtcaattatgggagcttagatggcaaaggggcacctcagtatcccagtgcattcccatcctcgctcccacctgtcagccttctaccccatgagaaagaccagccccgtgctgatcccattccaatatgtagcttctgtttggggactaaagaatcaaatcgtgaaaagaaaccagaagaactcctctcttgtgcagattgtggcagtagtggacacccatcctgtttgaaattttgtcctgaattaacaacaaatgtaaaggccttaaggtggcagtgcatcgaatgcaagacatgcagtgcctgtagagtccaaggcagaaatgctgataatatgcttttttgtgattcctgtgatagaggatttcatatggaatgctgtgacccaccactttccagaatgccaaaagggatgtggatttgccaagtctgcagaccaaagaaaaagggaagaaaactacttcatgagaaagctgcacaaataaaacgacgatatgcaaaacccattggacgaccgaaaaataaattaaagcaacgattgttgtctgtaaccagtgatgaaggatccatgaatgcattcacaggaagggggtcacctggtaggggtcaaaagactaaagtctgtaccacaccttcatctggtcatgctgcatctgggaaggactcaagcagcagattggctgttacagaccccactcggcctggtgccaccaccaaaatcaccaccacctccacctacatttctgcctctacacttaaagttaacaagaaaaccaaagggctcattgatggccttactaagttttttacaccatcacctgatggtcgcagatcacgaggtgaaattatagacttttcaaagcactatcgtccaaggaaaaaggtctctcagaaacagtcatgcacttctcatgtgttggctacaggtaccacacaaaagctaaaacctccaccttcttcacttccacccccaacccccatctccggtcagagccccagttcacaaaagtccagcacggccacttcttctccctctccccagagttcttccagccagtgcagtgtgccctccctgagcagccttaccactaacagccagctgaaggcactctttgatgggctttctcatactataccactcagggacagtctcgcaaaaagggacaccccgagttatgcaccacccaaacgtatgcgtcgtaaaactgaattatcttccacggcaaaatctaaagcccacttctttggcaaaagagatattagaagtcggtttatttctcactcctcctcctctagctgggggatggctagaggaagtatttttaaagcaattgctcacttcaagcgaacaactttccttaaaaagcacaggatgctaggcagattaaaatataaagtgacccctcagatggggaccccctcaccagggaaggggagcttgacagacggaaggattaaacctgatcaggatgatgatactgaaataaaaataaacatcaaacaagaaagtgcagatgtaaatgtgattggaaacaaggatgtcgttactgaagaggatttggatgtttttaagcaggcccaggaactttcttgggagaaaatagagtgtgagagtggggtggaagactgtggccggtacccttctgtgattgaatttggtaaatatgaaatccaaacctggtactcctcgccttacccacaggaatatgcaagattaccaaagctttacctgtgtgaattctgtcttaaatatatgaaaagtaaaaatattttgctaagacactccaagaagtgtggatggtttcatcctccagcaaatgaaatttaccgaaggaaagacctttcagtatttgaggttgatgggaatatgagcaaaatttattgccaaaacctttgcttgttagccaagctcttcctggaccacaaaacgttgtattatgatgtcgagccattccttttttatgtccttacaaaaaatgatgaaaagggctgtcatctggttggatacttctctaaggaaaagctttgccagcagaagtataatgtctcctgcataatgatcatgccccagcaccaaaggcaaggatttggacggtttctcattgatttcagctatttgctttctagaagagaaggccaagcagggtctcctgaaaagcctctctccgatctgggccgtctctcctacctggcatattggaagagcgtcatcttggagtatctctaccaccaccatgagaggcacatcagcatcaaggcaattagcagagcgacgggcatgtgcccacatgacattgccaccactctgcagcacctccacatgatcgacaagagagatggcagatttgtcatcattagacgggaaaagttgatattgagccacatggaaaagctgaaaacctgttccagagccaatgaacttgatccagacagtctgaggtggaccccaattttaatttctaatgctgcagtgtctgaagaagagcgagaagctgagaaagaggctgagcggctaatggaacaagctagctgctgggagaaggaggaacaagaaatcctgtcaactagagctaacagtaggcaatcacctgcaaaagtacaatcgaaaaataaatatttgcattccccggagagccggccagtcacaggggagcgagggcagctgctggagctgtctaaagagagcagtgaagaagaagaggaggaggaggacgaggaggaggaagaagaggaggaagaagaggaagaggatgaagaggaggaagaataggaagaagaagaagaagaagaagaaaatattcaaagctctcccccaagattgacgaaaccacagtcagttgccataaagagaaagaggccttttgtactaaagaagaaaaggggtcgtaaacgcaggaggatcaacagcagtgtaacaacagagaccatttcagagacgacagaagtactgaatgagccctttgacaactcagatgaagagaggccaatgccacagctggagcctacctgtgagattgaagtggaggaagatggcaggaagccagtcctgagaaaagcattccagcatcagcctgggaagaaaagacaaacagaggaagaggaaggaaaagacaatcattgcttcaagaatgctgacccttgtagaaacaatatgaatgatgattcaagtaacttgaaagaaggcagtaaagacaatcccgaacctctaaagtgcaaacaagtgtggccaaaaggaacaaagcgcggtctatctaagtggaggcaaaacaaagagaggaagaccggatttaaactgaatttgtacaccccgccagaaacacccatggagcctgacgagcaggtaacagtggaagaacagaaggagacttcagaaggaaaaaccagccccagtcccatcaggattgaggaggaggtcaaggaaactggggaagccctgttgcctcaagaggaaaacagaagggaagaaacatgtgcccctgtaagtccaaacacatcaccaggtgaaaaaccagaagatgatctcatcaaacctgaggaagaggaagaggaggaggaggaggaagaggaagaagaggaagaagaggaaggggaagaagaagaaggaggaggaaatgtagaaaaagatccagatggtgctaaaagccaagaaaaagaggaaccagaaatctccacggaaaaagaagactctgcacgtttggatgatcacgaagaggaggaggaagaggatgaagagccatcccacaacgaggaccatgatgccgatgacgaggatgacagccacatggagtctgccgaagtggagaaggaagagctgcccagagaaagcttcaaagaagtactggaaaaccaggagacttttttagaccttaatgtgcagcctggtcactcgaacccagaggtcttaatggactgtggcgtcgacctgacagcttcttgtaacagtgagcccaaggagcttgctggggaccctgaagctgtacccgaatctgacgaggagccacccccaggagaacaggcacagaagcaggaccaaaagaacagcaaggaagtcgatacagagttcaaagagggaaacccagcaaccatggaaatcgactctgagactgtccaggccgttcagtctttgacccaggagagcagcgaacaggacgacacctttcaggattgtgccgagactcaagaggcctgtagaagcctacagaactacacccgtgcagaccaaagtccacagattgccaccacgctcgacgattgccaacagtcggaccacagtagcccagtttcatccgtccactcccatcctggccagtccgtacgttctgtcaacagcccaagtgtccctgctctggaaaacagctacgcccaaatcagcccagatcaaagtgccatctcagtgccatctctgcagaacatggaaaccagtcccatgatggatgtcccatcagtttcagatcattcacagcaagtcgtagacagtggatttagtgacctgggcagtatcgagagcacaactgagaactacgaaaacccaagcagctacgattctactatgggaggcagcatctgtggaaacggctcttcacagaacagctgctcctatagcaacctcacctccagcagtctgacacagagcagctgtgctgtcacccagcagatgtccaacatcagcgggagctgcagcatgctgcagcaaaccagcatcagctcccctccgacctgcagcgtcaaggtctcctcaaggctgtgtggtggagaggcctccgagcagcagccagcagctggctcagtgcagcatggctgctaacttcaccccacccatgcagctggctgaaatccccgagacgagcaacgccaacattggcttatacgagcgaatgggtcagagtgattttggggctgggcattacccgcagccgtcagccaccttcagccttgccaaactgcagcagttaactaatacacttattgatcattcattgccttacagccattccgctgctgtgacttcctatgcaaacagtgcctctttgtccacaccattaagtaacacagggcttgttcaactttctcagtctccacactccgtccctgggggaccccaagcacaagctaccatgaccccaccccccaacctgactcctcctccaatgaatctgccgccgcctcttttgcaacggaacatggctgcatcaaatattggcatctctcacagccaaagactgcaaacccagattgccagcaagggccacatctccatgagaaccaagtcagcgtctctgtcaccagccgctgccacccatcagtcacaaatctatgggcgctcccagactgtagccatgcagggtcctgcacggactttaacgatgcaaagaggcatgaacatgagtgtgaacctgatgccagcgccagcctacaatgtcaactctgtgaacatgaacatgaacactctcaacgccatgaatgggtacagcatgtcccagccaatgatgaacagtggctaccacagcaatcatggctatatgaatcaaacgccccaataccctatgcagatgcagatgggcatgatgggcacccagccatatgcccagcagccaatgcagaccccaccccacggtaacatgatgtacacggcccccggacatcacggctacatgaacacaggcatgtccaaacagtctctcaatggctcctacatgagaaggtagacaacgtgggcagtccacaaaacctacggggcatcactattggattgatctgcacaaatacctttgaagagtacgatttcaaaaccagcaattggtgtgaatgcaaaaacatttgttggcaccatttatttaaaaaaaaaaaaagctgtatgcagcagaaagccttatacaagttgtttttctttttttcctttttcttttttttggtaccttcatttctgttacttttatataaaattctctgcaaaggaaggcctctctttggactacaatttggaggcagccacttgttgtgcctgcttctgttaaacaatgtggatatcaagcccccccaaattatctgttttaatattgaacctagagctttttttttcccttccctgtccactccatgtaaatgcctttagcatttcagttattgtatattttgtttaaggtgacacttcagcatgccgctaatgtctttgttagtgacagtgcattttgtagtactgtacaagtgttgtgctaacagtaagccatttcttaagttttttgccttgattagggtgccctaatttgagggttttaaaaaaaactatatttttgttaattataaaactgtaaagagctataaaagctattcccatttggttagtcaaaagggttttattgctaaatgtttggtgtaaagttgagacccttttccattttggtgacagatttctttggggaaaaaaggcagctttctgttttataaatgcagacttctgtttattgaatgaagcatatctcagtgtttatctgtcaggttttgaaacatttcatatatgtccaaatacttggcaggatttaaaaaaaaatagtgaatttggtgtaaagttgctattttatggaaatgcctctaactttacattttcattccatctgtagatttttctatctttataaaatattggagttattttttaaggaaaaatagaaaagtagcttgtgaatagctcaaactaagcttacaaatcgcatgtaaaaaagcaaaaaagttatttgtgtctgtttatattgcttcccttttttggaagcctttgtacctgtacagggtgacagtaagggccaagcaggagaggcgtaatccttgtataaaataggatccagcgacactattgcaccttatctgttctctttttagtcagtcacttcaaaaaaaccaaaaaccaacaaaaaaaagctgtaccttttaacataaaattaattatgatggggccatttttagcctcttgtgtcctgtcatattatgattgatagagaatgaccaatggaactgtatcatgtgtcacgcctcagaacacatacacattttgggaaaataaattatttagtgtaaattggagttatgggattttctgatttgttttgactttgggggaggggttggcaataaataagagtaatatctaataaaaccatcacatataccaaatacctatttaataaattaatttataatggattttaatgcttttcatgaaagtttattttatgcgagtgcataccttctgtatgccaatcattgtctttaaaataaagtgaaattgtttttttcttttggactttgatcttcatttgcaaagagatcccgcacaaatatccagctgcctcactcgcacagtctgtagaaacatccctccaagcctcgcaccagggtagcaaacttcctttttataaagattcataccaaaaaaagcacccaatttgggattgtatgtttgaaaaatcattttctttttaaaaagtgtgaacgttttgctctgttgtgaatgattaattgtatgttttctttagagtctaaagtttagaccc

SEQ ID NO: 61386 - DNA, 8065 bp, Homo sapiens
ttttttttttttggaatgtaaatcttttattaaaacagttgtctttccacagtagtaaagctttggcacatacagtataaaaaataatcacccaccataattataccaaattcctcttatcaactgcatactaagtgttttcaatacaattttttccgtataaaaatactgggaaaaattgataaataacaggtaagagaaagatatttctaggcaattactaggatcatttggaaaaagtgagtactgtggatatttaaaatatcacagtaacaagatcatgcttgttcctacagtattgcgggccagacacttaagtgaaagcagaagtgtttgggtgactttcctacttaaaattttggtcatatcatttcaaaacatttgcatcttggttggctgcatatgctttcctattgatcccaaaccaaatcttagaatcacttcatttaaaatactgagcggtattgaatacttcgaagcagaacaggcaatgtgcagccctcatttatgagaaaaccctcaggaaactcccagggtgatgcttggagaagctgtgagttgagctgaagctggagaacttcctccagagcaaagggcttaagaaagaaagaagaactctaagctgggtctgctaacatcactccagtttagatggatcttggcagagagacatgcttgttcctctggattggaaagatgatttactctcgggaatcttctctgtcagcctgtacatctaaaggcatgaagcactcaattgggcaattaacattagtgtttgttctctgatggtatctctgagaatactggttgtaggactggccagtagtgccttcgggactgggttcacccccaggtctgcggcagttgtcacagcgccagccccgctggcctccaaagcatgtgcaggagcaaatggcaccgagatattccttctgccactgttctcctacgtggtatgtcttcccatcatcataacacgttgcctcatgagggtcacacttgaattctccttttccgttcccaagacatgtgcagctcatcatctggccattttctccctgacggtcccacttctctccaatcttgtagttcacaccattgtcatggcaccatctagatgaatcacatctgaaatgaccacttccaaagcctaagcactggcacaacagtttaaagcctgattcagacattcgttcccactcatctccaacggcataatgggaaactgtgtaggggtcaaagcacgagtcatccgtaggttggttcaagccttcgttgacagagttgcccacggtaacaacctcttcccgaaccttatgcctctgctggtctttcagtgcctccactatgatgttgtaggtggcacctctggtgaggcctgtcagagtggcactggtagaagttccaggaaccctgaactgtaagggttcttcatcagtgccaacaggatgacatgaaatgatgtactcagaagtgtcctggaatggggcccatgagatggttgtctgagagagagcttcttgtcctacattcggcgggtatggtcttggcctatgccttatgggggtggccgttgtgggcggtgtggtccgcctaaaaccatgttcctcaaagatcatttgttgcccaacactgggttgctgaccagaagtgccaggaagctgaataccatttccagtgtcatacccagggtgggtgacgaaaggggtcttttgaactgtggaaggaacatccaagatctctggtccatgaagattggggtgtggaagggttaccagttggggaagctcgtctgtctttttccttccaatcaggggctcgctcttctgattattcttcagggcaatgacataaattgtatattcggttcccggttccaggccagtaatagtagcctctgtgacaccagggcggggccgagggaccacttctctgggaggagacccaggcttctcatacttgatgatgtagccggtaatcctggcacgtggcggctgccatgataccagcaaggaattgggtgtggtggccaggaaacgcaggttggatggtgcatcaatggcagtggaggcgtcgatgaccacaggggagctccgagcattgtcattcaaggtgtacaggtagatcttgtagtcagtgcctggttgtaaacctgtgatggtgtagcttctgacatctggcttgatggttctctggattggagtctggccattggctggaacggcatcaacttggaagccagtgatcgtctcagtcttggttctccagctaatggtgatggtggtctcagtagcatctgtcacacgagcccttcttggtgggctgacattctccagagtggtgacaactccctgagctggtctgcttgtcaaagtgtccttaagagcatagacactcacttcatatttggtggccaccataagtcctgatacaaccacggatgagctgtcaggagcaaggttgatttctttcattggtccggtcttctccttgggggtcacccgcactcgatatccagtgagctgaacattgggtggtgtccactgggcgctcaggcttgtgggtgtgacctgagtgaacttcaggtcagttggtgcaggaatagctgtggactgggttccaatcaggggctggctctccatatcatcgtgcaaggcaaccacactgactgtgtactcagaacccggtctgaggccttgcagctctgcagtgtcttcttcaccatcaggtgcagggaatagctcatggattccatcctcagggctcgagtaggtcaccctgtacctggaaacttgcccctgtgggctttcccaagcaattttgatggaatcgacatccacatcagtgaatgccagtcctttagggcgatcaatgttggttactgcagtctgaaccagaggctgactctctccgcttggattctgagcatagacactaaccacatactccactgtgggctgcaagccttcaatagtcatttctgtttgatctggacctgcagttttagtttttgttggctcctggtccatttttgggagtggtggttactctgtaaccagtaacaggggaacttgaaggcagccacttgacactaatgctgttgtcctgaacatcggtcacttgcatctgggatggtttgtcaatttctgttcggtaattaatggaaattggcttgctgcttgcggggctgtctccacggccagtgacagcatacacagtgatggtataatcaactccaggtttaaggccgctgatggtagctgtagacttgctcccaggcacagtgaactcctggacagggctatttcctcctgtttctccgtaagtgatcctgtaatatctcactgtgacagcaggagcatcccagcttgatcagtaggctggtgggggtcgcagcaacaacttccaggtccctcggaacatcagaaactgttgattgttggccaatcaataagggactttcctctctgccattaagagcaacgatgctgaccacatactctgtgcctggagtgaggttggtgagggtgatggaattccgagagtggggcaccccgatcttctcgaggtctcccacttgaagtgctcgggatgatgggcggatcctgtagccagtgatgggtgggctcgaggagcaatcccagtgcacaagtaaaagagttgggcagtaatatcaggaaaagtcaatgccagttgggggaatcaagacctgttttctgtcttcctctaagagggtgtgctctcatgttgttcgtagacactggagacactcactacatattctgtaccaggcaggagatttgttaagaccactgccattgtctgaaaggaagaaaattgacaaactctgcaacatccttccctcatttttcacaggtgagtaacgcaccaggaagttggttaaatcaatggatgggggtggagccccaggtgacacgcatggtgtctggacccaaatgttggtgaatcgcaggtcagtgggaggaggaacagctgggatgatggtatcagagatagggacactttccttgtcatccttgacagtgtaaacactgacattgtactccaggcccgggacttcaaggttatcaaaaagtgcaggagctctgatcagcatggaccacttcttccaaagaatttccctgctggccgtttgtaggggttgtggtaattctataaccagtaatgtctggggtggtgctcctctcccaggagactgtgagcactccagtgtcagggtttgcctccagatgcaagtttgttggtggagacaatggtgtcaccacttttgtttacaattgggcgcatctctttcctgtccatctctcaggacttggatggtgtagacgtattctactcctggagtcaagccggacacaacgatgcttcctgagtctgaagtcacttctcgtggtgcctctcctccctggcttggtcgtacacccagcttaaaaccaattcttggagcaggcgtccatgtgatcacaatggtggtctcagtcacctcggtgttgtaaggtggaatagagctcccaggctgcagtgtggtaaagactccagtggctttggggctctcttggttgccctttatggccacgagggatacggtgtactcagatgcaggctgcagattcctcagtgggtacttggagacagagggacccacattgtactgcctgggctgtcctcttcgggtaaggcccacggtcagtcggtatcctgttatctgggcccgaggtggagtccatctcaccaggacagtagaatcagtttcattgacaaactggaggttagtgggagcatcccagtttggttgtctgttgagcagtcagaggcttgctctccctcccatggctcactgcaaagactttgaagtaataggtgaccccaggggacagcccggtgttttctgcgaaaggtgttcctgctgagtggcagcctctgcccgtgctcgccaggcaggttgacggggatcacatccacacggtagccggtcactgcactctcaggcggtgtccacatgatggtgaccttcacgtctgtcacttccacaaactgcaggtccctgggagagggcactgtatctgagcgtggggtgccagtggtttcttgttgaatgacaacaggtgtactttcttgattttcttccacagcatagatagtgatgttatactgaacaccaggttgcaagtcactgagggtgacggagtttgcagtttcaggaaggttgagttctgtgctgctaccttctactgatggcgaatagactattctgtaccctgtgatgggagcctggggtctgctccagcgaacaacaattgaggtgtcatcaacttggtccacagtcgggtcaggtggggcatcaggcgctgttgtttgtgaagtagacaggatcaaactctgctccccatcctcagatatctgatagacatttacaatgtattttcggccaggaagcaggtccagggatgttccacagaagtggctgtgcttggaagaaccaggtactgtggctcatctccctcctcactcagctcatattccacccggaatcccgacacggtgtcggaagctgagacccaggagaccacaaagctactggctgtgatttcggtcacagattcagaagtggccacaagaggagaaaagggagtcgtctctcctgtcacgggtgttgctggtcacaggtgtgctggtgctggtggttgtgaagtcaaagcgagtcacttcttggtggccgtactgctggatgctgatgagctggccctcgtataccacaccaggcttcaggcctttgatggtgtaggagtttaagtggcctggtatggtagcttccttccaacggcctacagaatttttaggtctccacctgagaatgtacttggaaatgtgagatggctgtggtgcattccactggatggggtgggagttgggctgactcggagtctcagtgataaatacttcgacaggaccacttgagcttggataggtctgtaaaggttggcaatgccactccccaatgccacggccatagcagtagcactggtatctgacaccatgcacatacttctcccatgaatctccaatttgataaaacgtcccagtctctgaatcctggcattggtcgacgggatcacacttccacctgccccgaccctgaccgaagcatgtacagttcagcatgtgcccctcttcatgacgcttgtggaatgtgtcgttcacattgtaagtgatgtcatcaacaatgcactgatctcgaagctgcgagtaggcaatgcatgtccattccccacgaccattcccaacacacgtgcacctcatcatgtgacccatgtcatgctgcttatcccactgatctccaatgcggtacatgaccccttcattggttgtgcagatttcctcgtgggcagccatggggcagaacccaaacttctggtcggcatcatagttctgtgtggtcccacaccacttcatgttgtctcttctgccctcagaagtgcaatcagtgtaattgtggttgttgtataggaaggggaagtggcacaaggcaccattggaatttcctcctcgagtctgaaccaaaacagtgtggtctgtgcagaaagagtatttctggtcctgctcataattcgaagttgtgctgcaccaaagatgtccgtcctgtcgcccttctgtggtgcaggagtagaacgtcctgccattgtaggtgaatggtaagacacatggctctccatttgagttgccaccgtaagtctgggttacagctgtctcttggcagctgactccgttgcccaggcacgtgcaaaagcatttgcttatttccttgtgtctttcaagccaactgcatccccacagagtagaccacaccactgtctgtgacacagtggccatagggaggaggctgggggtgaggctgcggttggtaaacagctgcacgaacatcggtgaaggggccagatccgctcgatgtggtctgcacagaggtgtgcctctcacacttccactctcctcggccgttgcctgtgcagatgcactggagcaggtttcctcgattatccttcttgctccaggtgtctccaattctataggatgtccttgtgtcctgatcgttgcatctatttctagaagtgcaagtgatgcgtccgctgccttctcccaggcaagtacaatctaccatcatccagccttggtagggcttctcccacgtttctccgaccacataggaagtcccagcagcatgatcaaaacacttctcagctatgggcttgcaggtccattctccttttccattaccaagacacacacactctaacatgtaaccaccagtctcatgtggtctcctccaggtgtcaccaatcttgtaggactgacccccttcatggcagcggtttgcgatggtacagcttattctccctcgcccagccccgatgcaggtacagtcccagatcatggagtctttaggacgctcataagtgtcacccactcggtaagtgttcccagtgtacttgtcaaagcaagtctcttcagcttcaggtttactctcgcagttaaaacctcggcttcctccataacaagtacaaaccaacgcattgcctaggtaggtccgctcccactgttgatttatctgatagtgttttccattgtcataacaaccgggcttgctttgactgacagccaccggggactggggctgaaccatttgctgagcctgcctcttgctcttcgaggctcccgtggagggcaccgctgtccccaggcacaggacggccagcagcagcagcccgggccccggacccctaagcatgttgagacggtgggggagagacgcccgcaccgggaggcaagttgccaccaagtttgcttcccttcgcaacctgcgggaaaaatcccttctaatgcctcccgggggttgtcgcctccaagaaggtgggggccagagggtggggaaggggacgggtggagggacagaagggatgcagaggaccagagaagttgtggctgcaggtcccctcttcccgctcgcgcctggggttccctctcctccccctgtgcagcacagccg

SEQ ID NO: 61387 - DNA, 4827 bp, Homo sapiens
cagaaggctaatacttatatatttttggaggctaagacttgaattgcaacttagcccaaagaaatcactgtaagtagttagggttatcctgaagggaatatgttttatttatttttttgaagtctgaaatatcttggccttgaatagcatgaaattcccttattatctggaataaaaaaaaaccctaagctataagtagtgaaagtcttaggaaaatatttttgaagcatttaaaaaaaaattctgaatatgttgtgtaagaagaacattgtaattgaatatctggcagacattctatatgagtatctttatgggttttgtttttcaggcattaaaaaatatttaatcattcatgtgttgagactcattcttgagttatggatgacaaggcttctgttggaaaaatcagtgtctcttcagactcagtatctactcttaatagtgaagattttgtcttggtttccaggcaaggagatgagacaccatctacaaataatggaagtgatgatgagaaaacaggactcaagattgtagggaatggaagtgaacagcagctgcaaaaagagctagcagatgtactgatggatcctccaatggacgaccagccaggggaaaaggagcttgtgaaaaggtcacaactggatggtgaaggagatgggcctctttctaatcagctctccgcttcatccaccattaaccctgtgccattagtagggctccaaaaaccagagatgagcctaccagtgaaacctggacaaggagattctgaagcttcaagtcctttcacaccagtggccgatgaggacagcgtagttttcagtaaactgacttacttaggctgtgcctcggtaaatgctcccaggagtgaagtggaagccttaaggatgatgtccatcttaagaagccagtgtcagatttcactagatgttaccctttcagtgccgaatgtgtctgaaggaattgtgagactcttagatcctcagacaaacactgaaatagcaaactaccctatctacaaaatcctcttctgtgtcagagggcatgatggaactcctgagagtgactgttttgctttcactgaaagtcattacaatgcagagctcttcagaatacacgtcttccggtgtgaaatacaagaagctgtaagccggatactttacagttttgccactgccttccgccgttctgccaagcagaccccactttcagccactgctgcaccccagactcctgacagtgacatctttaccttctctgtgtctttagaaataaaagaagatgatggtaaaggttattttagtgcagttcccaaagataaggacagacagtgctttaaactacgccaaggaattgataagaagattgtcatctatgtgcagcaaacaactaataaagaacttgccattgaaaggtgttttggtcttctccttagtccaggaaaagatgtacgaaatagtgacatgcacttattagatttggaatctatgggcaaaagttcagatggaaagtcgtatgttattacggggagctggaatccaaaatccccacattttcaagttgtaaatgaagaaactcctaaagataaagtcctgtttatgaccacagctgtagatttggtaataacagaagtacaggagcctgttcgatttctcctggagacaaaagtccgcgtttgctcacctaatgaaagattattctggcccttcagcaaacgtagtactactgaaaatttctttttgaaactaaaacagataaagcaaagggagagaaagaataatactgacactttatatgaagttgtatgcttggaaagtgaatcagaaagagagaggaggaaaactacagccagtccttcagttcgcctgccacagtctggatcgcaaagttcagtgataccttctcctccagaagatgatgaagaggaagataatgatgaacctctcctgagtggatctggtgatgtatccaaagaatgtgcagaaaaaattcttgaaacatggggagaactgttgtcaaaatggcatctcaacttgaatgtgagaccgaagcagttgtcatccttagtaagaaacggtgttcctgaagctcttcgaggagaagtctggcagctgctagcaggctgtcataacaatgaccacctggtagagaaataccgcattcttatcacaaaggagtctccccaggacagtgctatcacccgggatattaaccgaacattcccagcccatgactactttaaggacacaggaggagatggacaagattccttatataaaatatgcaaggcttattctgtgtatgatgaagagattggttattgccagggccagtcatttcttgctgctgtgctccttctccatatgcctgaagaacaggcattcagtgttctggtcaagatcatgtttgactatgggctcagggaacttttcaagcaaaacttcgaagatttgcattgcaaattttaccagttggagcgcctcatgcaggaatacattcctgacctgtacaaccacttcctggatataagccttgaagcacacatgtatgcctcccagtggtttcttactcttttcactgcaaaattccctctctacatggtcttccatatcatcgacctgcttttatgtgagggaataagtgttatttttaatgtcgcccttggattattaaagacttcgaaagatgacctgctgttgacagactttgaaggtgccttgaagttctttagggttcagcttcctaagagataccgctcagaagaaaatgcaaaaaaactaatggaattagcctgcaacatgaagattagtcagaagaagttgaaaaaatacgagaaagaatatcacaccatgagggaacagcaggcccagcaagaagaccccatcgagcgatttgagcgggagaataggcgtctacaagaagctaacatgaggttggaacaggaaaacgatgacttagcccatgagctggtgaccagcaagattgcactacggaaggacctggataacgctgaggaaaaggcagatgctctgaataaggagctgctgatgaccaaacagaagttgattgatgcagaagaagagaaaagacggctggaagaagagtctgctcatttaaaaaaaatgtgccgtcgggaactcgacaaggcagaatctgagattaaaaaaaacagttctatcattggtgactataagcagatttgttctcagttgagtgaaagattggagaagcagcagacagccaataaggtggaaattgagaaaattcggcaaaaagtggatgactgtgagcggtgccgggaatttttcaacaaagaagggcgtgtaaaaggcataagctcaaccaaggaggttttagatgaggacacggatgaagagaaagagacgctcaagaaccagctgagagaaatggagctagaactggcacagaccaaactcccagctggtggaggccgagtgtaagatacaggactttggaacacccattttagggcttgcccttcaatgagggtgcaggcagcccaagaagacgtggtttaaccgaacactgagctccataaagacagcaaccggggttcaagggaaagagacttgctgagagcagctgccgcctcccgacaccttcagaaaacacgacaccttttgttgccttctttggccagatgtgtgattctgtgacttgtcccaggaccagaatgtacctaagtcagatccatagacgcatgttggtaggtcactggaccagagcttgtgaagcaggcaacctctggggtaagactactgatactaacaggcctgctagctcagccgacgctctggacactctagaaatcactcctcagtgtgacctcccaggcctcttccccgtgtacgtcaacacctcacccagcctaaaaggctgaagtttacatgattcagagttaggggatccttcagtctgttgattttttttctaaaccttttttttttaatatacatatatatatatatatatatatatatatatatatatatatatatatatatatatatatatatagtgggggtggggcaagggatcacaaattcaaataattcttttctgcttcaatgccagcagaaggtcccccaggtagacatggagaagcactttgttttaaataggagggtttcatagttgcatctgaagccacctggttctgttaaactgtatcgtgcaggttttgggtttggcattattcatgtttctgatcaattctatgcaactctcatagttcctgttactttttagcattagctgccaaatgacttcaaaaggctggggtgggtgacttgactgtgagactggattataacatggacaaatcttattttgcttaatgtgtttgtgtgtgtgtgtgtgtgtgtgtgtgtgtgtgtgtatgtatatatatatataaatatctttcccaatatgccccgttgacagtgtttaaattccagactaggactgctgatctgcacaatttaattatgtggttattcgagcacttaatttcactcaaggttcattgggctctgctctcctccctgccattacgggagctgtggacagagctccctcacttcaagattcctagtgtttttgcacaacaggttgtccaagtgagaaagactgagttgcgtgtctgtaaatgtctgcgcagggtgcacatgctgcgaggtctccatcctccgggcctgtccctcccagatgggctgggcctttgggccctcctcagagtatgcctgggtacaaacctcactgttcagatgggctgtaagttctcacttcaaagctatggaatggattttagcacctttaaaaaaaaaa

SEQ ID NO: 61388 - DNA, 2338 bp, Homo sapiens
  misc_feature (1)...(2338): n = a,t,c or g
ttttttttttttgtagagactggggtctcactatgttgcccacgctggtctcaaactcctgggctcaagcgatcctcccgcttcagcctcccaaggtgctgggattacaggtggagccaccgcgcccggcatcgataatctgaatctctaacgagctcccgggcgacgttgatgcagctggtaccgggaccactcttcgaaaatcatcggtttagaggttttaattctgaatccattgcgaaaactgttgggcggacagagcactactaactcctaacttttctcagaaagctgggctctgctttcgccagcaacccggtccgaagtcgcgggcatattctgtctgaaatcgtgtgcaccgaaatccccgccttgcggtggaggctggcgctaggcggcctcagcctcggcctgctgcgctcaggaacccgcgccccggctcctcggcgatccattgctctttcctctggcgccggccgcaggcctcggtcacgcccccagcggcccgttggtttccgggtcccgcggggtgcccccgcccacacgctatgccttaaattgggccaggctgaggcgctgctgctggagcggccgatccgagacgtggctccctgggcggcagaaccatgttggacttcgcgatcttcgccgttaccttcttgctggcgttggtgggagccgtgctctacctctatccggcttccagacaagctgcaggaattccagggattactccaactgaagaaaaagatggtaatcttccagatattgtgaatagtggaagtttgcatgagttcctggttaatttgcatgagagatatgggcctgtggtctccttctggtttggcaggcgcctcgtggttagtttgggcactgttgatgtactgaagcagcatatcaatcccaataagacattggacccttttgaaaccatgctgaagtcattattaaggtatcaatctggtggtggcagtgtgagtgaaaaccacatgaggaaaaaattgtatgaaaatggtgtgactgattctctgaagagtaactttgccctcctcctaaagcttccagaagaattattagataaatggctctcctacccagagacccagcaccgtgcccctcagccagcatatgcttggttttgctatgaagtctgttacacagatggtaatgggtagtacatttgaagatgatcaggaagtcattcgcttccagaagaatcatggcacagtttggtctgagattggaaaaggctttctagatgggtcacttgataaaaacatgactcggaaaaaacaatatgaagatgccctcatgcaactggagtctgttttaaggaacatcataaaagaacgaaaaggaaggaacttcagtcaacatattttcattgactccttagtacaagggaaccttaatgaccaacagatcctagaagacagtatgatattttctctggccagttgcataataactgcaaaattgtgtacctgggcaatctgttttttaaccacctctgaagaagttcaaaaaaaattatatgaagagataaaccaagtttttggaaatggtcctgttactccagagaaaattgagcagctcagatattgtcagcatgtgctttgtgaaactgttcgaactgccaaactgactccagtttctgcccagcttcaagatattgaaggaaaaattgaccgatttattattcctagagagaccctcgtcctttatgcccttggtgtggtacttcaggatcctaatacttggccatctccacacaagtttgatccagatcggtttgatgatgaattagtaatgaaaactttttcctcacttggattctcaggcacacaggagtgtccagagttgaggtttgcatatatggtgaccacagtacttcttagtgtattggtgaagagactgcacctactttctgtggagggacaggttattgaaacaaagtatgaactggtaacatcatcaagggaagaagcttggatcactgtctcaaagagatattaaaattttatacatttaaaatcattgttaaattgattgaggaaaacaaccatttaaaaaaaatctatgttgaatccttttataaaccagtatcactttgtaatataaacacctatttgtacttaattttgtaaatttggatttttatatatcatattttcttaattcattgtacacatttgacttactgcacagtatattgatcattttaatgggaaactttagctttctactttttatttttgttttttcactttctatgccattatttttgcattctttttcttagngngagctctaaaatcaatgttcttgaaaaagaaat

SEQ ID NO: 61389 - DNA, 8734 bp, Homo sapiens
ccccggagtctgtgtttctctctctgggcggaggcggcggtactggcggatggtgggttgaggcgccggcggcggctgctgcgagggacgatgagtgcctccttcgtgccgaacggggccagcctggaagattgtcactgtaacctcttctgcctggctgacttgacaggaattaagtggaaaaaatatgtatggcaaggcccaacttctgcccctattctgtttcctgtgacagaagaagaccccattttgagcagttttagtcgctgccttaaggcagatgtacttggtgttggcggcgagatcaaagacctgaaagaagagaaattgtgaatattttgggggggtgaagaccccagttttgctgaccttattcaccatgacttatcagaagaagaagatggagtgtgggagaatggactttcctatgaatgccgtactctgcttttccaaagcagttcacaatctattggaacggtgtttaatgaacaggaattttgtacgtattggcaagtggtttgtaaagccttatgaaaaagatgaaaaacctataaataaaagtgaacacttgtcctgctccttcacctttttcttgcatggagacagcaatgtttgtaccagtgtggaaattaaccaacatcaacctgtataccttctcagtgaagagcatatcacccttgctcaacagtctaatagcccatttcaagttatcttatgcccatttggactaaatggcactctcacaggacaggcattcaagatgtctgattcagctacaaaaaaattaattggtgaatggaaacagttctatcctatctcatgttgcttgaaggagatgtctgaagaaaaacaggaagatatggattgggaagatgattctttagctgcagtagaagttcttgttgctggtgtccgaatgatctacccagcatgctttgttctagtccctcagtcagacattcctactcctagccctgtgggatccactcactgttcatcttcttgcttgggtgtccaccaagtgcctgcttccacaagagatcctgctatgtcttcggttacgcttacaccacctacgtctcctgaggaagtccaaacagttgatcctcagtctgtccagaagtgggtcaaattttcttcagtatctgatggcttcaactccgatagtactagccaccatggtgggaaaatacccagaaaattagcaaatcatgtggtggatagagtttggcaagaatgcaatatgaacagagcacagaacaagaggaagtattctgcttcatcaggtggtctatgcgaagaagcgacagctgctaaagtggcatcctgggattttgttgaagccacacaaagaacaaattgcagttgtttgaggcacaaaaatctcaagtcaagaaatgctggacaacaaggacaggcaccatctttaggtcagcaacaacaaatacttcctaagcacaagaccaatgagaagcaagaaaagagtgaaaagccacagaaacgccccttgactccttttcaccatcgtgtgtctgttagtgatgatgttggcatggaccgcagattccagccagccaaagacttgtgactctctgctcccagacagtcaaagtgagattttcaaatatccggaactaatgatgtagcaaaagactcctcagatgcatggcaccgaaatggcaaattcacctcaaccacccccacttagtccctcacccttgtgatgtggttgatgaaggagtgactaaaacaccttcaactcctcagagtcaacatttttatcaaatgccaacaccagatcccttggttccttctaaaccaatggaagataggatagacagtttgtcccagtctttcccacctcaatatcaggaagctgtagaacctacagtatatgttggtacagcagtaaacttggaagaagatgaagccaatatagcctggaagtattacaagttcccaaagaaaaaagatgtagagtttttaccacctcaacttccaagtgataaattcaaggatgatccagttggaccttttggacaggaaagtgtaacatcagttacagagttaatggtgcaatgtaagaaacctttaaaagtttctgatgaattagtgcagcaatatcaaattaaaaaccagtgtctttcagcaatagcatctgatgcagaacaagaacctaaaattgatccatatgcatttgttgaaggagatgaggaattcctttttcctgataaaaaagatagacaaaatagtgagagagaagctggaaaaaaacacaaggtagaagatgggacatctagtgtaacagtgttatcacatgaagaagatgctatgtcattatttagtccctctatcaagcaagatgctccacgccctactagtcatgcccgtcctccatcaacaagtttgatttatgactcagacctggctgtctcttatactgaccttgataatctcttcaattctgatgaagatgaactaacacctggatctaaaagatcagcaaatggatcagatgataaagccagctgcaaggaatcaaagacaggaaatctggacccgttatcttgcataagcactgcagatcttcataaaatgtatcctacaccaccatcattggaacaacatattatgggattttccccaatgaatatgaataataaagaatatggtagtatggatacaacacctggaggaactgttctagaaggaaatagttctagtataggagcgcagttcaaaattgaggttgatgagggattctgtagccccaaaccttctgaaattaaagatttttcttatgtctataagcctgaaaattgtcaaattctagtgggatgttccatgtttgcacctctaaaaactctaccaagccaatatctgccccttatcaaattgccagaagagtgtatttaccgtcagagttggactgttggaaaattggaattgctttcttcagggccttcaatgccattcatcaaagagggtgatggaagtaatatggatcaagaatatggcactgcttatacacctcaaactcatacttcttgtgggatgcctcctagcagtgcacctcctagtaacagcggagcaggaattcttccttctccatccacccctcggtttccaactccaaggactccaaggactcctcggactcctcgtggagctggtggacctgctagtgctcaaggttcagtcaaatatgaaaattcagacttgtattcaccagcttctaccccatctacatgcagaccccttaattctgttgaacctgcaactgtcccttccatccctgaagcacacagtctttatgtaaacctcatcctttcagaatcagttatgaatttgtttaaagactgtaactctgatagttgttgcatctgtgtttgcaacatgaacatcaagggtgccgatgttggagtttacattccagatccaacgcaggaagcacaatataggtgtacctgtggcttcagtgctgtcatgaacagaaaatttggaaacaattcaggattattttttgaagatgaactagatatcataggacgcaatacagactgtggcaaagaagcagaaaaacgttttgaagctctcagggctacctctgctgaacatgttaatggaggactaaaggaatctgaaaaattatctgatgatttgatattattgctacaagatcagtgcactaatttattttcaccctttggagcagcagaccaagatccttttcctaaaagtggtgtaattagcaattgggtacgtgttgaagagcgtgactgttgcaatgactgctaccttgcattagaacatgggcgtcagttcatggataacatgtcaggaggaaaagttgatgaagcacttgtgaaaagttcatgcttacacccctggtccaaaagaaacgatgtgagtatgcagtgctcacaggatatacttcgaatgctcctctctcttcagccagttcttcaggatgccattcagaaaaaaagaacagtaagaccttggggtgttcagggtcctctcacttggcaacaatttcataaaatggctggccgaggctcttatggaactgatgaatccccagaaccactgccaatccccacatttttgttgggttatgattatgattatctggtgctttctccatttgctcttccttattgggagagacttatgctggaaccctatggatctcaaagagatatagcctatgttgtactgtgtccagaaaatgaagccttgttaaatggagcaaaaagcttttttagagatcttactgcaatatatgagtcctgtcgattaggtcaacatagacctgtttctcgactgttaacagatgggatcatgagagttggatctactgcatcaaagaaactatcagaaaagttggtagcagaatggttttctcaggcagctgatggtaacaatgaagcattttctaaactcaagctttatgcacaagtctgcagatatgacctaggtccttatcttgcttccctgccattggacagctctctactttcccagccaaatttagttgcccctacaagtcagtctttgattactccacctcagatgacaaatactggaaatgctaatactccatctgccaccttagcatctgcagcgagcagcactatgacagtgacttcaggtgttgccatatctacttcagttgccacagctaattcaactttgaccacagcttcaacttcatcttcatcatcctccaacttgaatagtggagtatcatcaaataaactaccttcgtttccaccctttggcagtatgaacagtaatgctgcaggatccatgtctacacaagcaaatacagttcagagtggtcagctaggagggcaacagacatcagctctacagacagctgggatttctggagaatcatcttcacttcccactcagccgcatcctgatgtgtctgaaagcacgatggatcgggataaagtgggaatccccacagatggtgattcacatgcagtcacgtatccacctgcaattgttgtttatataattgatccttttacatacgaaaatacagacgagagcactaactcttctagtgtgtggacattggggctacttcgatgctttctagaaatggtccagactcttcctcctcatatcaagagtactgtttctgtacagattattccttgtcagtacctgttgcaacctgtgaagcatgaagatagagaaatctatccccagcatttaaaatccctggctttttcggcctttacccagtgtcggaggccacttccaacatcaaccaatgtgaaaacattgactggctttggtccaggtttagccatggaaactgcccttagaagtcctgatagaccagagtgtattcgactttatgcacctccttttattctggctccagtgaaggacaaacagacagagctaggagaaacatttggagaagctggacagaaatataatgttctttttgtgggatactgtttatcacatgatcaaaggtggattcttgcatcttgcacagatctatatggagaacttttagaaacttgtatcattaacatcgatgttccaaatagggctcgtcggaaaaaaagttctgctagaaaatttggtctacagaaactttgggagtggtgcttaggacttgtacaaatgagttcattgccatggagagttgtaattggtcgtctaggaaggattggtcatggagaattgaaagattggagctgtttgctgagtcgtcgaaacttgcagtctctaagtaaaaggctcaaagacatgtgtagaatgtgtggtatatctgctgcagactcccctagcattctcagtgcttgcttggtggcaatggagccgcaaggctcttttgttattatgccagattctgtgtcaactggttctgtatttggaagaagcacgactctaaatatgcagacatctcagctaaataccccacaggatacatcatgtactcatatacttgtgtttcctacttctgcttctgtgcaagtagcttcagctacttataccactgaaaatttggatttagctttcaatcccaacaatgatggagcagatggaatgggtatctttgatttgttagacacaggagatgatcttgaccctgatatcattaatatccttcctgcttctccaactggttctcctgtacattctccaggatctcattacccccatggaggtgatgcgggcaagggtcagagtactgatcggctactatcaacagaacctcatgaggaagtacctaatattcttcagcaaccattggcccttggttactttgtatcaactgccaaagcaggtccattacctgactggttctggtcagcatgtcctcaagcacaatatcagtgtcccctttttcttaaggcctctttgcacctccacgtgccttcagtgcaatctgacgagctgcttcacagtaaacactcccacccacttgactcaaatcagacttcagatgtcctcaggtttgttttggaacagtacaatgcactctcctggctaacctgtgaccctgcaacccaggacagacgctcatgtctcccaattcattttgtggtgctgaatcagttatataactttattatgaatatgctgtgatcttcatttgatggaactgtgcaagaaaagaacaaggaaaaatggatgtttcgctgcaggattaagttacaattatcttctcagtgaaggtcatttgtgatggggtctaattcttattacttcaacaaatattgttttgacttggggggaggggctataaccctgctatttttcattgactctattgaactctttaggatgatgactgatcatacaaaacgtattataacattttcgtagcaaaattaaccttttttttttccagccacagtatttgtgaaaagtaatgagccatagtacccagtcatgttaaatgaatattaaaagcatggagaggaaacatgaggaacaatgaatttcaacatatggcttcaaaacatgaaaatgttcttgtatggattatagtatctagtattcaaaaatgcctgcatctcttctcttatttattgtaagtttttaaatgtataaattgtcttatatttcttaacctcttttataaaaattttcctagaaggtttatactgccttcttgctttaaagcctattggtctaaaatatatgtaatcgtcttaattaaaaagttgcagtagggtcgcttttagagtattatttttttgtaagggggtgggtgggacagtaaatttgtattgtctcgatgtacagtttaacggggatagagggggaataatgtccataccattgtgtgtggaggatttacagctaagctgtagttgcagagtacatgtacagtaatgaagttcactgtgtttataaattgaaaaggtaccaggtcttacagcattttatatatcacatctttacagaataacatgatggcaatatacaagtggtattgttaggtggtttaacttagaataaaatgagaattcttcagttatattttgtactatggtttagggctatgactaatatttcaggccatttccggtgaaagaaacttagttttacaagaaaaaccatttgctactgaatgcttaaactaattttagtgtttaatgttacatgcttaaatttttttcagttttaacagtggcatatttaggcatggaaatattattatgaaatttattttcaggatctgctataaggttgaaatttagcccagctctaggcattttacaaattatttttcaagcagtcattcttgattgtttgacttttttttttaaattaaagattgggaatgtatgtgagagtatgccatatgtatgggtgtgtgtgtgtgcgcgccaatccaaactgtgggtgtaaatagattctcagtgaattctggtattcagactctattccactagtgaaagaaccattttttaaacttcccttgccttttttatttatttaattttcttggtttggagatgtcagtcccaaacaccagagtctgtacttttctataacacagctcagattaaggtagggcatatgccaaggaggttctcacctccctaaagaagggacttgaattttagggactttaattcacccctccttcaatacaactttcccccttcttgtttgcacatgccaagataactgcttttatgcaggctgtacccccttgaaaaatcctttctacagtgctgctcacaaaagagcccaagttcgcctcctacctgcattgctgacttgaattcacagtcgccgagtctacctagctttcttggaagcagtctagccaaaatttctatttggtaccgttcacctaattatctacaagaacaaaatccagttgtatttaccaaaaactctacttccaggtgtttgttttagttttttttttttactgaaacttgtttttggtgaatacctctgtgccttagaattaaatatcactttccttatgaacaacataaccttccttcagattgtgtatatgaaaacattagcaagtcttgttttttctatgaagcaaacacaattggtgacaaaggttgtcaatcatttcttcaaaattataatgcagttctaatggtcagcatattttgatattaaatttaaagatcacctctctgcatttgtttttaaattatgctaatacaccacacattatgttggtatgttttgttctgtactttctttaaaaaaaaaa

SEQ ID NO: 61390 - DNA, 2950 bp, Homo sapiens
  misc_feature (1)...(2950): n = a,t,c or g
cggacgcgtggggagcatggacggtgccatggggcctcgggggctgctgttgtgcatgtacctggtatctctcctcatcctgcaggccatgcctgccctgggctcggctacaggcaggtccaagagcagcgagaagcgacaggctgtggacaccgctgtcgatggcgtgttcatccggagtttgaaagtcaactgcaaagtcacctctcgcttcgcccactatgttgtcaccagccaagtggtcaacactgccaatgaagccagggaagtggccttcgacctggaaatccccaagacagcattcatcagtgactttgccgttacagcagatggaaacgcatttatcggagacataaaggacaaggtgactgcatggaagcagtaccggaaagcagctatctcaggagagaatgccggccttgtcagggcctcggggagaactatggagcaattcaccatccacctcaccgtcaatccccagagcaaggtcacgtttcagctgacttatgaggaagtgctgaagagaaaccatatgcagtatgaaattgtcatcaaagtcaagcccaagcagctggtgcatcattttgagattgatgtggacatcttcgagccccaggggatcagcaagctggatgcccaggcctctttcctgccgaaggaactggcagcccaaactatcaagaagtccttctcaggaaaaaagggtcatgtgctgttccgtcccaccgtgagccagcagcagtcctgccccacatgctctacatccttactgaacgggcacttcaaggtgacctacgatgtcagtcgagacaagatctgcgacctcctggtggccaataaccactttgcccacttctttgccccccaaaacctgacaaacatgaacaagaacgtggtttttgtgattgacatcagtggctccatgagaggccagaaagtgaagcagaccaaggaggcactccttaaaattctgggggacatgcagccaggggactactttgacctggttctttttgggactcgagtacaatcgtggaagggctcgctggtgcaagcatctgaggccaacctacaagcagctcaagactttgtgcggggcttttccctggatgaggccacaaacctgaatggaggtttgctccggggaattgagatcttgaaccaagttcaggaaagcctcccagaactcagcaaccatgcctcaatactcatcatgttgacagatggcgatcccacagagggggtgacggaccgttcccaaatcctcaagaacgtccgcaacgccatccggggcaggttcccgctctacaacctgggtttcggccacaatgtggactttaactttctggaggtcatgtccatggagaacaacggacgggcccagagaatctacgaggaccatgatgccacccagcagctgcagggtttctacagccaggtagccaaacccctgctggtggatgtggatttgcagtacccccaggatgctgtcttggccctgacccagaaccaccataaacagtactacgaaggctcagagattgtggtggccgggcgcattgctgacaacaaacagagcagcttcaaggctgatgtgcaggcccatggggagggacaagaattcagtataacctgcctagtggatgaggaggagatgaagaaactgctccgagagcgtggccacatgctggagaaccacgtcgagcgcctctgggcctacctcaccatccaggagctgctggccaagcggatgaaggtggacagggaggtgagggccaacctgtcatcccaggccctgcggatgtcgctggactatgggtttgtgaccccactgacctccatgagcatcaggggcatggcggaccaggacggcctgaagcccaccatcgacaagccctcagaggattctccgcctttggagatgctgggacccagaaggacgttcgtgctgtcagccttgcagccttctcctactcattccagctccaatacccagcggctgccagaccgagtgaccggcgtggacacagaccctcacttcatcatccacgtgccccagaaagaggacaccctgtgcttcaacatcaatgaggagcctggtgttatcctgagcctggtacaggaccccaacacaggcttctcagtgaatggacagctcattggcaacaaggccaggagccctgggcagcatgacggcacgtacttcgggcggctgggaatcgcaaaccctgccacggactttcagttggaagtgactcctcagaacattacgctgaaccccggctttggtgggcctgtgttttcctggagggaccaagctgtgctgcggcaggacggggtggtggtgaccatcaacaagaagaggaacctggtggtgtctgtggacgacggtggcaccttttgaggttgtttttgcaccgagtgtgggaaggggagctcgggtcnaccaggacttcctggggcttctaatgtgctgggacaagtcaatcgggatgtcaagcccgggacgcaagggctgctgggggcaaatttttccaaccccaacgggttttgaaatgtctgaaaatccacccccaggctccgacccccaaaaagcccaaatgcccacgatggtggtgaggaacccgcccggcctcacggtcacccaggggtttgcaaaaagactacagcaaggacccgtggcatggggccgaggtgtcctgctggttcatttcacaacaatggggcttgaattcaccgattgtgcctacactgattatattcgtccccgacatcttctgagccctctgggccagcaacgcctgttccntgcccccgggggccaaggcagaggaggaggacgacatcctgacctgctgctgaggctgtacctccttgacctaagctggttcctttgtgtcaaagcacctcatgccttcccattaaagagaggccgtgtccaaaaaaaaaa

SEQ ID NO: 61391 - DNA, 1787 bp, Homo sapiens
ttttttttttttttgagcggttttcttaagtgtctttaatactccactcagggcagtcccctccctctactgagaggctcttggctctggccccaagagcagctggaaggccctggcctgaacttcaaccaacttgaatgtccaaggctgtgtgtgccacgctccctggctctggtacgtggtatgcaagcacctctcgggccttgggggagtttgatcccctccagccactcctgggtacagcctcctgcacgtgtgcacctggactccggacgccgcacagggatgtctaagtgtaaatgccttccattctgcccgcagcaggggccttatccgcatgtccgtctgggagtctggggcttggcctcttgccattttaagcatcctccaagcacaaggggaggacccttccacaaagtgggaatgggggaactttgcccttctttaaaggtttcaaggatcaagtttctgggatgtttcgaaaggcatagggttccaagacaaaggtttacacccatcttttcggttcttcttcaagggtgaccttctgtggaaatctttggtttctaagggttcggtaaggtgactcctccacatccctccgttgaacagctccttggccgcatgtctgaagatgtgtgccaggtgcccgtctgagctggctccatcatgacgcgtcactttgtcctccttcaagtctccaaacagagtgtcgacggcagcatctctcactgagaggtcacccttgctcccattaatttgaagcaaatttcaaccttgatgttaaacaacgcaagtcaagcgcccccgggaagccatgcaaagccagggggaagggctttccctgaagagcctcccagcttcttgtcattaaccaaggggccaccaatgaccgtggaaaaatcttctctggagacaaggttctgctgtctggcggaaataatccttcaccaaagagcccatgacctgctggggggactttggcggtgccaagaaggtgggccagtgatggggcgaccccagcaacccgctccggcgtatcggaccccagcccaggacaggcagaggtcagcatggggcagggtgcgttccctccctcactgtgctggcgaataacgacgcacgaattcttttttgactctcccaggatactaaaatccgcagctatcgtcgtatcaaatacatagtgcaccccaagacttttgaggaaaccacagagtcttctggatgcatcagttacactgaggttgaatttagcagcaaaataaggcaaagattgaggacacacagacactaacccagctttgtgctttgaggtatcacatttcttgttaaggttcagaacgcggaagaagtccttggcattttgctgggaaagttggactccttcctctgcagtcatacagctgtcacatgccaggcagtcgctcaaaaatatcttggcatcagccaacttgtggaattctcccttctgtagtcccagctactagggaggctgaggcaggagaatcacttgagcctcagaggtcaaggctgcggtgagccatacagtgagccactgcactccagcctgggtgacagtgagaccctctccattttcctgggctggactcggtgcatcggctgacacattctcttggtcatcagtttttgttttcttactacattccttgcgcgtgcagtgctcacacttcatctggagcgcggcgggcgggaggccgggcgcctcagcctcagggaagcaccgggagactgggactcctctgcccgccgcccgcggccctttg

SEQ ID NO: 61392 - DNA, 2934 bp, Homo sapiens
ttttttttttttcgtgtgggataatctattttaatgaaagtcattatatataatatttaacaaaaagaataaaggaaaaagacaaaaacaaaaatagatattccagcttaataaaaagtacaactgagcactgtgggctggaggtgggatacccacccgcagcacgcccaccctaatgtgccatctgagggcctggagaaaggacagtgggaaggagacagtaggctcagcccagagatgcccctgtcctcaggggctcaatgtagtttgaccctgacattaaaccttttatgtccttcccagtcaggaaggtggctgggtacaggggtgggggtgaggagcagagagaggtacagggcaggaaggaaaaagtagaagggtcctgaagggcaaattagggtgggtaactagggagttaaacaggagcaagaagcttctatttgtaatcccaaaatctggcatgagtagagaaggaagaggaaatggggaaggggtgatgggaaaggggagcggaggaagggaggcaatttatttatttctccctgtctcttttggatagttccactcttttatgttaatcccaatctgagacaggcccagggaggttccagtgacaaattagtggttgtgtcccagtgggacagatgctctaggaagtgaactgctgagctggcaagaaaagctggggtcctcctcagtatgacacagctcctggctcccggggagcaatgaaaaggacatcagctttggcattgatgcagtaggtgacgatgagggagaagatgaggatgccgaagcccactgtcagggtgatcaactcaagctctttgctggcgatgagaaatatccgggcacggatatctttccagcggctctcagtccatgtagagtattcagtagagctccactgactcagttcaaaggcaggagacaaggccctggctaatcgtgcagtagaacgcacacaccgggggagtcggtccgtctcattagaatgcaaagggccctggacccatgagtactcatacagatccttgttttcacttgggactttacttggatcctggcactgctctcgggtgaggttgaccactgtgccagtcaaatttgccaaggcatactgtaacaaacataaatggtgttggtggggctggaaaacagcgatgtaaatgttgaaagaggccccgtcaccccaagtaagaccttaggtccctgccctgaaggatagactggaaccatgagttgttggctttaatcaggaaccccatagagcaggcgggtaaccgtttggggatcagcctgaactgtgtcgctgaagttggttcctcctgcaagctcatacagagcacgtcccagcaccgtggccacatctgccagggccttggcagtgtcctgttaaccaaagttccaggtccctccttcaagggctcaagccattcgggatagctcacattaatgttctcagcagtgtcgtaaatactctggtaatatttgttatggaaggcaccagagtggtcagccagaacaacgccagagatgtttcgagctcgaagaaatcgctgcagggaagatggtgggagaggctgggactgatttggcctcctgaggatgacagcagggacaccagcaccactcttctccaatgtggccaggagatcctccacctggttccgtacagactcatttttctgagaaacaggatctgtgtgcatccaaagctctaatgaagttcttaaggccacctgtcccagctccacaaatgagtcaacattctctaactgcacgggaaacttgcccttctccatatcgtagaccatcctcgagctgccaatgtagtcaaaagtttccccttgaaagaagacaaacatgacattgcggggcagggtggtcacatcaggtgccttttgcaaagcttcagcagcagccagctgggtgacaaaggaagccactgcgctttcagcccctggggcccacattccagaaaaaggaacgactatccagccgggtggcagcaaccacaaccctgtcgtcaggctttaatgtcccagttgtatttataggctttagcatgctccacacattgtaatcagacagggggtcacagacgatttttgggttgatgctgaaggtgctttggatggagctgcgccgcatgccaggtggcagtgctgaatgacagccatgccatgtgtgaaaagagctgcatggcacatagtgggaaggttggtgctgagccattctgactcaggttgtgatcttgatagcactgcttgatgactttggtttcattttcatcttcaagaagaaagatggggaaactaaagtcttcataagccaaaccattgcccagcgaattccactgtatttctctgcagtgagcaaactctggcccataggaattggagtaaacaccaaacccatcatttgggcactgtacactaggagagaagcctgaggcaggactgggcttggtcaaggacactgcaagaccagcaattcggctggttctccctttcagcttctccattaaatccctggtaaaatgcttgctctccagcagaaccatgtaaggggggttggggccatcagtcaatacccactgtaggtcctcctctttctctactacgtggataacccctgtgtctccactaattgaagactggcagccaatctgatgagtggcgttgagcaggcgaacacagggagctgttttatttaaggggatatatatcttcctctccactgagtttcccctgcacaaacctgctagtaggacgcagaaagacagaaggcgaaggagaccccgacttcccgggtcagccccagagccaccccctgccgtagccatcttgcctctctgctgagcgaaagcccccgttcggctcctgtctgttagcggcctctctaggctaccactgacaccgtctctgtggc

SEQ ID NO: 61393 - DNA, 3786 bp, Homo sapiens
gtccgaattcctggtcgacgatttcgtcaaatggcggcggcggcggcggtggcctggtgttaaggggagagccaggtcctcacgacccctgggacgggccgcgctggcccgcggcagcccccccgttcgtctccccgctctgccccaccagggatacttggggttgctgggacggactctggccgcctcagcgtccgccctcaggcccgtggccgctgtccaggagctctgctctcccctccagagttaattatttatattgtaaagaattttaacagtcctggggacttccttgaaggatcattttcacttttgctcagaagaaagctctggatctatcaaataaagaagtccttcgtgtgggctacatatatagatgttttcatgaagaggagtgaaaagccagaaggatatagacaaatgaggcctaagacctttcctgccagtaactatactgtcagtagccggcaaatgttacaagaaattcgggaatcccttaggaatttatctaaaccatctgatgctgctaaggctgagcataacatgagtaaaatgtcaaccgaagatcctcgacaagtcagaaatccacccaaatttgggacgcatcataaagccttgcaggaaattcgaaactctctgcttccatttgcaaatgaaacaaattcttctcggagtacttcagaagttaatccacaaatgcttcaagacttgcaagctgctggatttgatgaggatatggttatacaagctcttcagaaaactaacaacagaagtatagaagcagcaattgaattcattagtaaaatgagttaccaagatcctcgacgagagcagatggctgcagcagctgccagacctattaatgccagcatgaaaccagggaatgtgcagcaatcagttaaccgcaaacagagctggaaaggttctaaagaatccttagttcctcagaggcatggcccgccactaggagaaagtgtggcctatcattctgagagtcccaactcacagacagatgtaggaagacctttgtctggatctggtatatcagcatttgttcaagctcaccctagcaacggacagagagtgaaccccccaccaccacctcaagtaaggagtgttactcctccaccacctccaagaggccagactccccctccaagaggtacaactccacctcccccttcatgggaaccaaactctcaaacaaagcgctattctggaaacatggaatacgcaatctcccgaatctctcctgtcccacctggggcatggcaagagggctatcctccaccacctctcaacacttcccccatgaatcctcctaatcaaggacagagaggcattagttctgttcctgttggcagacaaccaatcatcatgcagagttctagcaaatttaactttccatcagggagacctggaatgcagaatggtactggacaaactgatttcatgatacaccaaaatgttgtccctgctggcactgtgaatcggcagccaccacctccatatcctctgacagcagctaatggacaaagcccttctgctttacaaacagggggatctgctgctccttcgtcatatacaaatggaagtattcctcagtctatgatggtgccaaacagaaatagtcataacatggaactatataacattagtgtacctggactgcaaacaaattggcctcagtcatcttctgctccagcccagtcatccccgagcagtgggcatgaaatccctacatggcaacctaacataccagtgaggtcaaattcttttaataacccattaggaaatagagcaagtcactctgctaattctcagccttctgctacaacagtcactgcaattacaccagctcctattcaacagcctgtgaaaagtatgcgtgtattaaaaccagagctacagactgctttagcacctacacacccttcttggataccacagccaattcaaactgttcaacccagtccttttcctgagggaaccgcttcaaatgtgactgtgatgccacctgttgctgaagctccaaactatcaaggaccaccaccaccctacccaaaacatctgctgcaccaaaacccatctgttcctccatacgagtcaatcagtaagcctagcaaagaggatcagccaagcttgcccaaggaagatgagagtgaaaagagttatgaaaatgttgatagtggggataaagaaaagaaacagattacaacttcacctattactgttaggaaaaacaagaaagatgaagagcgaagggaatctcgtattcaaagttattctcctcaagcatttaaattctttatggagcaacatgtagaaaatgtactcaaatctcatcagcagcgtctacatcgtaaaaaacaattagagaatgaaatgatgcgggttggattatctcaagatgcccaggatcaaatgagaaagatgctttgccaaaagaatctaattacatccgtcttaaaagggctaaaatggacaagtctatgtttgtgaagataaagacactaggaataggagcatttggtgaagtctgtctagcaagaaaagtagatactaaggctttgtatgcaacaaaaactcttcgaaagaaagatgttcttcttcgaaatcaagtcgctcatgttaaggctgagagagatatcctggctgaagctgacaatgaatgggtagttcgtctatattattcattccaagataaggacaatttatactttgtaatggactacattcctgggggtgatatgatgagcctattaattagaatgggcatctttccagaaagtctggcacgattctacatagcagaacttacctgtgcagttgaaagtgttcataaaatgggttttattcatagagatattaaacctgataatattttgattgatcgtgatggtcatattaaattgactgactttggcctctgcactggcttcagatggacacacgattctaagtactatcagagtggtgaccatccacggcaagatagcatggatttcagtaatgaatggggggatccctcaagctgtcgatgtggagacagactgaagccattagagcggagagctgcacgccagcaccagcgatgtctagcacattctttggttgggactcccaattatattgcacctgaagtgttgctacgaacaggatacacacagttgtgtgattggtggagtgttggtgttattctttttgaaatgttggtgggacaacctcctttcttggcacaaacaccattagaaacacaaatgaaggttatcaactggcaaacatctcttcacattccaccacaagctaaactcagtcctgaagcttctgatcttattattaaactttgccgaggacccgaagatcgcttaggcaagaatggtgctgatgaaataaaagctcatcccattttttaaaaccaatttgacttctcccagtgacctgaagacagcaggtcggctttcaaacaattcccctaaaatcacaccaccccaacagatacatcaaattttgatccttgttgatcctgataaattatggagtgatgataacgaggaagaaaatgtaaatgacactctcaatggatggtataaaaatggaaagcatcctgaacatgcattctatgaatttaccttccgaaggttttttgatgacaatggctacccatataattatccgaagcctattgaatatgaatacattaattcacaaggctcagagcagcagtcggatgaagatgatcaaaacacaggctcagagattaaaaatcgcgatctagtatatgtt

SEQ ID NO: 61394 - DNA, 6135 bp, Homo sapiens
tttgatctgtggatgaaatgaatcatgattttcaagctcttgcattagaatctcggggaatgggagagcttttgcctaccaaaaagttttgggaacctgatgattcaacaaaagatggacaaaaaggcatatttcttggggatgatgaatggagagagactgcatggggagcttctcaccattcaatgtcccagcctattatggtacagagaagatctggacagggttttcatggaaacagtgaagtaaatgcaatactgtctccgcgatcagaaagtggaggccttggtgtgagcatggtagaatatgtattaagttcttctcctgctgataaattggattctcgatttaggaagggaaattttggcactagagatgctgaaacagatggacctgagaaaggagatcaaaaaggcaaggcttctccatttgaggaggaccaaaaacagggatcttaaacaaggagatgatgatgattctaaaataaatggcagaggtttgccaaatggaatggatgccgattgcaaagattttaatcgtactcctggaagtcgtcaagcctctccaactgaagtagttgagcgcttgggccccaatactaatccctcagaaggactggggcctcttcctaatcctacagctaataaaccacttgttgaagaattttcaaatcctgaaactcagaatctggatgccatggaacaagttggtctggaatccttacagtttgactatcctggtaatcaggtaccaatggactcttcaggagctactgtaggcctttttgactacaattcccagcagcagctctttcagaggactaatgcactaacagttcaacagttaactgcagctcaacagcagcaatatgcattagcagcagctcagcagccacatatagctggtgtattctcagcaggccttgctccagctgcatttgtgccaaatccatacattattagtgctgctcctccagggaccgatccgtatactgcagcaggattggctgcagcagctacattagcaggtccagcagtggttccacctcagtattacggcgttccatggggggtgtatccagccaacttatttcagcagcaagctgcagctgcggcaaataacacagccagtcagcaagcagcatcacaagctcagcctggacagcaacaggttctccgtgctggagcaggtcagcgtcctcttactcccaatcagggtcagcaagggcagcaagcagaatcacttgcggcagctgcagcagcaaatccaacattggcttttggtcagggtcttgctactggcatgccaggctatcaagtactagctccaactgcctattatgatcagactggtgccttagtggttggccctggagcaaggactggccttggagctccagttcggttaatggctccaacacctgttttaattagttcagcagcagcacaagctgcagcagcagcagcagctggaggaactgcaagtagccttacaggcagcacaaatggtctgtttcggccaattggcactcagccaccacagcagcagcaacagcagccaagcactaatctgcaatctaattcattttatggaagcagttcctttgactaatagctccccagagtagttcctttaattttcctccatggaccctggtcaaccctggaagtacatctcttggctttggaagtggtaactctttgggtgctgctataggctcagccctcagtggatttggttcatcagttggcagttctgcaagtagtagtgccacaaggagagagtctctatctactagctctgacttgtacaaaagatctagtagcagcctagcacccatagggcaaccattttacaatagtctgggattttcctcctctccaagtccaataggcatgcctctgccaagccaaactccaggacattcacttacgccaccgccatcactttcatcacatggatcctcatccagtttgcatttaggaggactgacaaatggtagtggtcgatatatctctgcagcacctggagcagaagcaaaatatcgaagtgcttcaagcacttccagtctatttagctccagcagccagctctttcctccttcccggcttcggtataataggtctgatattatgccttctggccgcagtagattattggaagatttcagaaacaaccgcttcccaaaccttcagcttagagacttgattggacatatagttgagttttctcaagaccagcatggttctagattcatacagcaaaaactagagagagctactccagctgagcgacagatggtatttaatgaaattctgcaagcagcctatcaattaatgactgatgtttttggcaactatgttatacagaagttttttgagtttgggagtctggatcaaaaattagccctggctactcgtattcgtggtcatgttctacccttagccttgcagatgtatggctgccgcgttattcagaaagcattagaatctatttcttctgaccagcaggtaattagtgaaatggtaaaggagctggatggtcatgtgctcaaatgtgtgaaagatcagaatggaaaccatgttgtacaaaaatgtatcgaatgtgttcagccacagtcactacagttcatcattgatgctttcaagggacaagtatttgtgctttcaactcatccttatggctgcagagtaattcagcgcatcctagagcattgcactgcagaacagaccttacctatcttagaagaactccaccaacatacagagcagttggtacaggatcagtatggcaattatgttattcagcatgtactggaacacggtcgacctgaagacaagagcaaaattgtttccgaaatcaggggaaaggttttagccctgagtcaacacaaatttgccagcaatgtagtagaaaagtgtgttactcatgcctcccgtgctgagagagctttactgattgacgaggtttgctgccagaatgatggtcctcacagtgccttatacaccatgatgaaggaccagtatgccaattacgtggttcaaaagatgattgatatggctgaacctgctcagagaaagataatcatgcacaagattcgacctcacattactactttgcgcaaatacacatacgggaagcatatactggccaagttggaaaagtattatttgaagaatagcccggacctaggacctattggaggaccaccaaatggaatgctgtaaattacaggagcaagagaaagaagataatttaaccatgtgaaaagaatttttttgtgtgtgaattatcaaaacacaactcaactatgaatcttcaatttttttttaaagcaaaactatttattgactttattcatccatttgtaaattttttaaggttcttgtgtatatttggggggggggggatgaattataaattatattcagccctgagtggagacctatcagattggattgctggcaaagcacagaatgcctgtatatgatgtaactgtatcaaaaataaaaagctgtcacatattttgtaaatttttaccttgtaaagtcacaaaaatagtttttaaaggaaaaagtacagtattcttttaataaactggctcacagtctggtaggtctacaaccccatagcacaacaggtttatagagatgtatatagaattatagtccttatttttttcctttgcgtgaaaccttttataacagattaacaatcaactgcataaatattattaatattttaaaaagagttaagttgtattttgataattcacaaactatcatgcaaataacgagtaagtagacaagaataaagtggtttgagatgaaaagaacctaacattatttacagtagatgtggttttaatacaattactgccctaaaatgtctctggcaatgtacagaaatattgtatatacttacatatgtaattgttgtaagagttaaatacaaaatcatggtgacacttccaattaagtgcactaaatgaaaagttaagtcacttattaacttttcagtttggtttgcaatgagaaagagtggaaatttgtattttgttttgcttatagaattacagacatgttgaggaagtgttgagctttattttgctttttcatagaggcagaaagtaggaaccagatagagatgaaaaggggccactgaaaagtgaatttgatagctcagcatttaagcatgattacatattcagatagctctttttgctttctataaatatatgcattgtgtgtgtagtaatagatgtaagtttacactttgaaaggaaatcttgtttcaatgtttattataaaagccttgctaatttagtagtgatgctttccttggttgtacaggtgtacatttgtaaaccttcatgctgtaaatggaatttgttttatctctttgggatacatttgcattttagtgtacatttacgtccctgccctctttgacctggcaatatagtgttgtataatgtaaatttatttctccaaatcgagagtgattttttaaaaattttttatctttatatggtttcagaagtatgaaccagctttctttttattattgtgagatcattttgttttataacatagttgttgactgttaatatggacctgctagaatttggatcactttcaattgaagtcagggtattgtgcataatagaaagtattggactgagatatttggttaccatggaggccaatgcttttttcatcttattaaatgtgatgtgacttttttctttgtacagaagagtactgtatttttgaatagcctactcccaagtaagagcaaatctgtatgataacattttttcctctggacataagacataacagtaacacgatgtacatttacaagcggccttatgtacatttcccaacaatctttttaaggcaaaattgtgaccatatgtgtataattaaaatcgtttttaatcctttgcctatgaaaatattttggaaaaaaacttgctgtgtatattcagtttctgaaagataaagaaagtgctttgtattttgttgaagtcagtattttgtataaacatttatgttgacccacttatgttcagtgctgaaaactaaaatgaacatgctattctgtcagctgaatatggaagagatctttttttactagagatctgcagaagaaacgcaatcttctgagcacaatatggaatctaaaggttttatcacttagttgttcatattatgaacctaaaaataatggcataaagtttggggatgccaggcatactttttcatgtttggtgttgagttattttacttttctaacccaacattccttggtgagaccattaaatccaaacacttgtcaccgttccttctcatagtcactctgggtcatcagcatgtcccagtcactgcagcaacgccttgtgtttgtttcatttttttaaaacccacacaaagccgctgtctcactttttcctactttaccaacctcagagtatttcggcccgtatcgaacttttgttctcagtatcagcccatggtttcaggatcaaagctgtcatgttggagattggtaatggctttcctgtctttgtacagttgaattcctagtcttccttcatccttgccctctgttggcacaggcattatctctgcaattttagaaaatgacaagtagagaatactacattgagaaactaaaccctcttcttggggtcctgatactcattcccatttgtcccagtgctgacaacccaatcttcccaatactttcaggcctgctctacaaaagtacctgttcttgtagaaattttacagtctgccattttgggtgcccaccccaatttttaccttttagtaagttggcatgaaattttggtaaaatctgaaaatcacatttcagaataaaacaattgggcaaaactacctaggctttactcttgagtgtctccttttgatagggattgtttctggaccagtttgtctaagtcctggctcttattggttcatatgaaataatggttaacttcacttctttgtatattatgtataaattagaaaatgaaaaatgtgtgaataacattgtatgaaataaacctggtcttgtgtttttctctagataaaatacccctctgtacctcaaaaaaaaaaaaaa

SEQ ID NO: 61395 - DNA, 1098 bp, Homo sapiens
gctaggaagcagactccaggatggaatttagtatgcaggatgttctgggggagagccactggaaccagcactcagggaaaggggggaagaaaggataggaaggaagcatgaaagagaatagggagaagtgaacagggatgcagagcgaatgccagtttcagccaactccaaggacagccctggagctggaatggcctttagagctgccccatggtgacagaggtggccaggcttctatacccctacgtggatcactcactgtgcttgggcaccttgggaaagggcatggctttgagcaaaaggctctctgcagctgaggcaacccctaaaagggctgacggctgaagtctgtctgctgaccactgtcccagcagctggggcttgttagtccttcctcaaagggggatccagatggcatgtcacagtgtctaccgtaaatgctcactgaatccagctgcaatgcaggaagactccctgatgtgatcatgtgtctcaccctttcaagctgaaagcaacagtacagacgatgagaccgacgatcccaggacgtatcagaaatatggttacattggaacacatgagtaccctcatttctctcatagacccagcacactccaggcagcatccaccccacaggcagaagaggactggacctgcaccatcctctgaatgccagtgcatcttgggggaaagggctccagtgttatctggaccagttccttcattttcaggtgggactcttgatccagagaggacaaagctcctcagtgagctggtgtataatccaggacagaacccaggtctcctgactcctggccttctatgccctctatcctatcatagataacattctccacagcctcacttcattccacctattctctgaaaatattccctgagagagaacagagagatttagataagagaatgaaattccagccttgactttcttctgtgcacctgatgggagggtaatgtctaatgtattatcaataacaataaaaataaagcaaataccatttattgggtgtttattaacttcaaggcacagagccaagaagtacagatgcatatctaggggtattgtgtgtgtatata

SEQ ID NO: 61396 - DNA, 8522 bp, Homo sapiens
  misc_feature (1)...(8522): n = a,t,c or g
tttttttttcagaactactaaacatttattgaatgtgtaaggtattaaaaacatttacaattttgttaataaaatgatgttttatattaatgtatgtattatgctttggaatatgctaagtcatgtagataactttacatttctttcaataactttattctttacaaaatatacaaataaattaaanaaaacaattcaacttttaaaagggattacccatatgcaagaagaaggtattgctatcacccattctaaattcccccaatgcattcatttcctgttcccttatctttcaactctagtggcaaagtaaagactgaattgaaattaagctggcactacaacatcattaccagggatagacacataaacaaagtcatttccaaataaggaatgctggatctccagagaagtgacaaagaggagtctactgagttttgcactcaggcacatccttgcctgaggaggcgtgcccaaggacctggctgagaatccacactctctgctcctgcattttgcacctctggacaaaggcctaaacttgagttatcaaaatagcgaactggatgaggtgatggtaaagactttgatcggctatcaaaaaaacaagattttggtgattcctttggcacaggatcttgtaaattccgttccttgcattgagagggtgtaatttgtttctttttagaagctgttccagtcactttaggagactttggagaattctcacaagttacttgtttgtgagcctctcttttaagggttctttccttccaagttttgacctcattggaaagatgctgattattgcttaacaattcattcttttgttttattagctgttcattttgctgctttaacttagaaatttctttttctagccttatatgttcacttttcaaaataagagcttttgtgttttgtacaatgccgctgccacctccacaagttaagggtttatttgaaggctgaggatcagtatgttctgatatcactgaggtatcttgggcctgttgacttcttctgagattttctctcaatagccttataacttccttttgatattctacagtggcttttgtagcactgatttccttttcaaattctttggcatttttcattttctctaggtctattttcccaagcttcattttgagatcttcaatttcttctttatatggcttagctcctaaagcaactttgtcctgaagtacttgaattgtctcttttgttttttcaaggcatttatttgattcatgaactttggcttgaagttttgctattatgtcattagtcacctcaagttctttctgcatctttataatcttgctttccttatgcatagcactttctttagcttcatgcagtgaattttccagctctcgaattttctctgtggttaactgtgtagctcttgatgtaacatgaggattcttattgtcttgtgtggtaggattaacctgggcaccagatgccaaggaagtcttcaatgtttggtagtttttaaatagtttttcatttttctctttcagtgatttcaggtcctgttcccactctttggatatggtagcacttctttcctcaaactctgttgattcattcattatggcaattattctgttattaaagaagttattcacttgacaaatcctatcattttctttctggatgccatttttaagcttttctatatcaaaacgagtatttaaccactcttccaaaaactgtgtcatttctttcctattacttagtacttgttgaaattcagtctttatgctagggaactcactttctgagaaatctttgagaatttcctcaatatgtagatccatattctggttcaatttgagatcccttaattctctggatggtacatcacaatcttgttgaaggtgctgtattttaattagcaattccttttgcttttccacttcatcaataaaatccatttcaaatttattgatgcattcatgttgttcttcttttatttttgtaacatagcttaacacatacttcagtttcttcatgattctgtggaattcaatttccttctccaagtcaagagacaatctattcaagcactcataatgatcatccatctctgagtatctcttcaaaagctcttttattctagagcacttttctctcaggctttccataaggtgctgttgtccatcacttagtaaccttttttcaggttttacttggtggttctgtcggtctctagctatcatttcccttaaggttgctatgaattggtccctttccattttgagagattcttttatcctccttagctcatctctttctttagctacaattcttatttcttcaaggctttcatgaagtttcttagtcaactggaagttatccatctcacacttgcatagatagtttggctcaaattgcttcttcaactgttccatttcattaatttttttatgactcatattgacatcttctttcactctaagcagttgaagttcttttttctgaagttcttggatctttttctgtaattcatcttttgatttatctaaatccttttgaatgtctgaaatttgaattgtcttttctgaaattttttctctaagtttatcaacagtttctttgtgttcttttgatagcatacgagcagtttttagttcctgttgtatttccagatctctagctttggtttcttgcaggctttccttgagttggtctctctccagtttgagtgtctcctctactcttcttagattatctctttctttcattacagatttcatttcttcaaggttttcatgaagtttctgagccaaatttaaattctctatttctaatttactcagagttaagctttggtcttttatttgtttctttagttgctccatttcagacacttttttctgtgtctcattgacatctttttttaacgtaataagttgatgttcatttgccttaagttcttgaatcttttcttgtaatttagcatttgaattttctaaatctttttgcatatttgatagtttatctgtcttctcagaaacaattcctctgagtttgtcaatagtttcctgctgctctttcagatgcatgtgagcaattcttagttcctcttgtattttcagatcctgtgcttttaaggcatcatttgagtgttctaagtccttttgcatatttgatatttcatttgttttctctgaaacaatccctcttagtttatcaatagtttcttggtgctccttcagatgcatgtgaacaatttttagctcctcttgtttttctaggtctctagttatagtttctctaaggttttccttgagctggtctctctctactttgagagtctcctccacactcctaaggtcatctctttcttttgttacagatctcatttcttcaaggttttcatgtagtatctgagtcaaccttatattctccgtttctatgttttccaggtttaacttctgggtctcaaattgctccttcaagtgttctatttcacacattttctcctgagtctcattgacagctgtcatcttaagaaactgatattctttttcttgagattctttcattttagctacaatttctttagtgttttctttcagttggtctctctctatctgaagggcctcctgtactcttttcatttcctctttttccttaatcataatttgtatttcttcttgactttcttgaagtctgttggtcaactcgagcatcttactttctatactttgtagtgctgaatccttggctttgcgatgctccttgaattgtttcagttcattcactttttcctgaacctcactaatttgttttatattaagttgttcctctttctcataaatctcttggatcttgttctgtaatttatcattgattgcttctaactgcttttgaatggttgatatttcagtttccttctctgaaagattcactcttaactcattaatagtttcctcttgttctttcaggcaacaatgagcaactttaagttcctcttcagtttccaggtgtttagctacaatttcttttatgttttctttgagctggtcactttcagattgaagaacttcttgcagcctctgtaggtcatctttctccttagctacagatttcatttcatcatgactttcttgaagtcttttggacaatccgagcatttctatttctatccttagtagtgctgaatctttgggtttgaattgctccatctcactcacgattttggtagtttcattgtctttttctttcatatttaaggactgttcttgtttgctttgagactcctggattttagccaaagtttctctaatatgttctttcagctggtcatgtttaacttcaagggcttcttttatcgttttaaggttgtctctttccttggttagagattttatctcttcctgactttcttgaaatttttcattcaacctgagcctttccatttctattcttgccagtgttgttgagtccttggttgtggactgttctgttaataactccagttcattcattgtttcctgagtctcactgacttctttcacattaggcagtaactcttgttcctcatgaagcactgggatctcttcttgtaatttggtatgggatttttctaagtcctgagtatttattatttgagctgtcttctcagatacgcttcttcttagttcatcaatagtttcttggtgttcttttaggtgaatatgagcaatttttagttcttctttggtttgtaggcctgtagcttcaatttctcttatatatcctctaaggtggtctctctctgtttcaaatgacttctgtaattcctttagaacttttctttctttggttatagatttcacttcctcataattttcattaagtttctgagccaactcaagcctctctgtttccatatgttccaatgtcaattctttgttctttaattcattctttaaattctctatttcattaatctttttctgcatctcactcatctcttcttgtacattaagaagttgttgctgtttttcttggagttgctggctcttttcctttagtttttcttcaacttctgccagtctgtcacaggtcctagaaagctctccttctttctttatggcatggttcttttcttgtgcaactatctcttgttgctttttaagttcatccccaagaagtcttaattcttcctggttttcaatggtcatttcaatattttcctttaggtcagtcttcaattgttccttttctgctataacactctctaacatttgttggagttcatttttctcctgtattaaagaaaatatcttcctttgttgctcaattatctcattatccttaacatctgcagttagtgtttgggtatttttagcttccaaatcctgttttttatctatgccaaccatcttttgctgaaattcatctttagtttctcctgtattttcctccatatgcaaattcctggaaacttcctcagaaattttcgattttagtgtattaattgtttcttgatgttgtttcagagactcaagagcatttcgtaattgttcttgagtatctatattcatgttaacagtatcgtgaatatcacttttgagttggtccctctcaatttgcaagctttcttggagttgttttagatcatctttttcttgagttaaagtttttacttcttctaaagtttgctgcagtttctcagtaatcagtgttttctccctttctacagtttgcagcggagaatctctattttctaattgttccttcagctgttccatctcatttagtctttcttgaacctcacgtgttttctcctgaagttcttgggtcttgtaagaaagctcggtcttcaaagcacccaaactcgaatcaaatttttgggcttctttagagagattaactatttcctgattcattctctcattctcctcaaggaccatcttatacttttgctcaaagtccatatgaagggttttgaaattttggaattcttgatcagtgcttttataattcgactgtgtagttgctaggtcatcttttgttttcccaatttcttcaagtaaaccttgaactctactctccttatgaactacttcagaaaacaatttatctttttctgatgttattatatggagctcttcagatttgtcttgtatctctttcctcagcctttctacttcagaaggtaaagatttcaattctgaaagcaaaatgacttcttcccgcaaagcttcattttcttcaacttctttatttagttctttctgaagatcagtaatctttccttccaattccaaattacagagcaaatcttttggaactttgccatctataagggaggtgagttttgttatctcattaaaagcagattgtaattctttctccagatcaacttgcattttcttttttgcctccaattggctttgatataactgaatatcattttccatttgcttgtatgtagttgcaagttctttcattttctccttcaactccagattttcacttctaagaaaggctgattctctcttggcatcaagggctacagtttcagcatcaaacagagtctgcttcatttgttttgggtcttcaatgctttccaatgagtatgacaagtccatttttatattttctagcttttgagagtctatgtattcctgtagcttcttaatctggtcttccttttctctaagcagctctacttttgaactgagttcattctcaagatcttgattatatacttctcgatgcttaactaaattctttaagttcgaaatttcatgaattagttgcatctcttgatcttttttagtttttctttctagagcctcaaattcatccaaatcattcttttcttttaatttcaattccatttcttctttttctgttcgtagttgttcatagtctaataccagattatcatagtcagcacgaagtgagttcaactcactttctatattctcctgatttagtagctttgttgctggattccattctatctcacttaatgtatcaagagtgttactgaaaacatcagactctgaacagacagattcatcaatttctcgtaataaatttatagaaagcttatgtgtttttgttgttatatttgttggtatattaaattgatctgcatagtttgagttcttcattttgttaattttgccaaggcaccaagtaactcttcgttttcttttagcctttaattcctgttgcaacgtgagggaagaagaggtcaccagcatccgtgttaagttttcaattttctcattctgtactttctgaagcaaatctttttcttccaaaagttgggccaattggtctttttccattgcctgagcccgcgtctctaaagaaacctcctctaattgttttttaagatccattatttcttttctataccttttcaggagagcttcatcagttgatacctcattaacataaggagtattcttcatatatttagcagtactggcaaactggagagcagtaagagtttcatcaaaagatactggagtaattgtgcagataatacgtgtctttggatttcctcccaaggaattctgaagaattcgtgttaacttgctatctcgataatttatgaaaccaccaacttgtccatcactaagtttcttgatcacttgtcccaaaataaataagcttcgatttatattacagccttccttgagccgcacacctgcagcgcctgtttgagcagctctttcactgcctgcaagatcaaccaaattcaaatgggataccttaacagatccttcacaattagaaggttcacccttctctctgctttccaaaatcatcctaaagatggtatgagaacgactgcttctttgattcatttttgtttctccataatgcctgctcttttctccctttgtaatccatttcaaagccatttctgatgtatatacaacttcttctgtgagatcagcaacatacacattcctattgacatcttctcgaataattaaaggtttcattttttgagtgccacagagtaaatctgtaatggtttcattgtatatttccatgtaagatacacgtaagagaaattccctatccaggaaaacttcttaaattttttgggaaaaatgtccatgaaattgcccctggggtataactcccaaatgatcttctgaacccatcatggtatatgtttttcctgaagccagtctgtccatagggcaaatatagtaccattgtagccttgtatggcagaatcgatgattggtgctgctattggcttcatacacatttttgggagtttcattaccatgaaggacacgatcaaaattgaaggatttacttccatcaactggataaatgacattattgtgggttttccagtaaacttgggcagtttctccaagtgattcttctctgctgttcagcggccgcactcgcacgcagacggccacggctccttcctccgccatcctatcaggctgaactggtcccaccaaaatggccaggaccctccgcggccggcacttcagggctcacaggccgccccgcctttaaattta

SEQ ID NO: 61397 - DNA, 940 bp, Homo sapiens
tgattacggaagaaccaggagtttggcgtgaccatggggaagcaaaagaaaacaaggaagtatgcgaccatgaagcgaatgcttagtctcagagatcagaggcttaaagaaaaggatagattaaaacctaaaaagaaagaaaagaaggatcccagcgcattaaaggaaagagaagttccccaacacccttcctgcttatttttccaatataatacacagctgggcccaccttaccacatcctcgttgataccaactttatcaacttttccataaaagccaaactggacttagtgcagtcaatgatggactgtctgtatgccaagtgtatcccatgtataaccgattgtgtaatggctgaaattgagaaattggggcagaagtatcgagtggctctaaggattgccaaggatccaagatttgaacgattaccatgtacacacaaagggaacctatgcagatgactgcttagtacagagagtaactcgccataagtgttacattgtggccacagttgaccgggacctgaaaagaagaatccgtaagattcctggagttcctatcatgtacatttctaaccataggtgagaaatttcccttggagaagggaatagaaatatataattgatatcaattgaaaatgaggataagtgataaggttataaaggatttgaaagaaattattgtatcaaatgtttacatagttatatttgaagaaatgagacaaagcaagagcaagagcaaaagagagagataggatttaaggaatgaggcaaacatttaaattgttagagtaagattactggaagaaatagacgtattgttttaaataaaagcagtaatttaaatcaagctaatctttttggccagaaatacctgttttgaaagatttttttttattaacacttcatctgagaaatggaaagcttatttaaaaaaaaa

SEQ ID NO: 61398 - DNA, 1595 bp, Homo sapiens
ttttttttttttgtattcattatctgtgttctcttgtatctccctgagtttctttaataacattattctgaatttttttcaggcatttcatagattttcttttcattggatctgttgctggagaattattgtgcttctttggagatgttatgtttcctttttcatatttcttgcatccttatgtgactatctgtgcctctgacataacagtcatttcttccaattttatggattggcttttatatgggaaagaccttttcttatagctctatctacagtgttcattggatatcacactttggctttgattctgggtgggtacagtggtatagtctgcatatgattccttcagctgtaattggcatgagtggtgcctgtgagtcattcagtggcttagactgcagtgtttttttttgtggttgttgagatggagtctagctctgtcaccaggctggagtgcagtggcacaatctcagctcaccgcaacctctgcctcccgggttcaagcaattctcctgcctcagcctcctgagtagctgggactataggcacgtacaaccatgcgcagctaatttttgtatttttagtagagatggggtttcactatgttggccaggctgctctcgaactcctgacctcgtgatctacccgcctcggcctctcaaagtgctgggattacaggcgtgagccaccacacttggccagactgtagttgttattggaggctgtggtgaggctttgctgaggatggggatgccaggaagtcttgtccttcagcatcagtggtagcggtggtggaccaggtgtgtcaatactagggactgtgggcagtgtttgtgggcactgatgatagcctgtctgcgtgggccaatccctgggcctccaggtggctcctttggttgctggcagtggcagcactgggccaagtgggcaggtgcaccactgggctcctgggtggtgtgcgtggcaggctgatctctagttctccaggtgacatatgcaggttctggtggtgggtaggcaggcatttcctcaggcctctcagtagtaagtgtgagcactagctctggaggcagatgagtcaatctccaggcccccagatggtacattcaggcaccagcatattcctatgcatttctagataaaagtatttttcagaaaacctgagcatatgtcctattaatacaacttaccctcatcagctctgcatgagaagaaggcgtaattccctcagtagaacagtcagaatggaatcacagacttgttttgagccagtcactggtgagggggggtaggataaaatgataagctcagaatctaaaccttagactagggaatggcaaactttttccataaagaggcaaacggtaatattttaggctttttgtgtagataacctcttttgtagtgacacagtggtgccatcgtagcctaaaaacgtatgtagacaatggataaatcaatggacttggttttattccagtaaaacttaatttatacagtcagagggccagatttggcccttggtctatagttggccaaccctgtttagagcagtcaaaatttattccctggggctgggccaactttttctt

SEQ ID NO: 61399 - DNA, 2435 bp, Homo sapiens
tttttttttcattcacacacttagcatatgcaattttaatcaaccaaaagaaaatcccaaatgtacaagtgaaaaaaatccaaactgttgacacaggcctaactaatatcagctacttttatgtacagctgtatagttcaaaaaagctatcctatatgtatatacaaaagttgtttatacacaggtctgtacataagggtctatacatttatttcctcagaacccttaggtgccacctcttggtgaggacaccaacacttcattcacatatcttacaaaaaagaaagaccatttccaggattgacaacattgtgcatcctgtattcagacaatgtacactccactcgactggttaagatccttccatcataatgcggaccacaccagatgcatgggttccaccaaacagcttcacacagagtgctccaaagtaaaagcccataaaccaacccgagatgaagcagggtcctgcccagtgtgccaccacaggtccgggcttagttgagtctgcctgccctgctcactgtcggtattccaattcatctacactgataactttggcgggcatggagggcaggggttgctgtagcacatctgagccaaaccatttggcaaggcccacaggggagctgctcctctggctggggcgatgctccagctgggagtgcatgtggggcaggcctgaccggctgggcacgttctgaggggttgtctgaacgctgacagctgctgcatgggaaccagagcctggaggatgcagaactgagcgctgtagctgctgttgcaccattgccagatgcagaggtgttccaggacgagggtttaagagagggtgactagcagcaggtaaagggtaaaagggctgacccaggatggggccagatattccctgtaaatgactcaagtccatcccaggaggaagcacaccagtttggagcaaacttggaagatgctgtggatgtactccctgggccagcatcctctgtaccaaccctgggtgaagctggtgagcaggcctaaccatagggacatgggggacaaggggaacttggtggacagggcggagaaaaggtgttgtaggaactggggatgccaaggtgggtgtttttctcccagttgctttaggtcgataatcttgttctttggtgtaacggttggcctgggacagtggggtggaacacgaagacctctgtaatgctgacagtttggaatttgtagtgggagaagagtctcgatcggcactgggtacagagctggatgacaggaggttttcttcactggccttctgagtatcctctttactgtcaccaagagctgcttttccagatgctggctcctccttgcttttctctttgctctcgtacatcttacgaatcactgaggtaggggtaaaggaaggagaaagcatgcttgtgatggaggcagcaggggcaggggaagaggaattccctcgatgcacgggtgctggtgacttggtcactcgctgttgcctgtttctgaatccatctctggttctgtccacctgtggtttgccaaaaccaggctggtagaagtttgctgcctgtacagcaaggtcatgtggcaaggccagcccttctaaagctgcctgttgcaactccagctggctcatctgctgggctgtgatggggctcatgggtttgcgcatgccttggaatggatctccgagtagctgctgtggtcctggtgtgaaaccaattggtgatggtattcttgggcgaaggtagtcagctgaggctgctcgagtttgaaacacctgtgacaagggaggagagggtgctctttggcccagtaaagatgttgtaggctccaagctccccataaggccactcagaagattggaagaagcaggtctctgaactggttgacccagaagttcctgcaggatgttcttagggacaggctggcctggaatctcagcaggggacatcaaatggctttcaaggtttcggctgactttgggctgagaaggcaaagtcccacttgccttcattgtgctcactagcttgttgaacgcagtcatgtctccgtctttcttcagttgtcgattgttggttacggcactcaaggtctcttctaggtgttctgccatgaagggagttgaattcttcacttgctggtcaaccttcaagcccttcagacctgcttctacctcctccactgaaagcacaacccctgaatgtgagctttctttaagtttttctttatttgcagaaaggctggaaagaagaggtttcaaatccactttggctttctgtagcatttctaaaatatccactttattttcagcatggtcttccaatggtataggagcaaagtaattccccgagttctgtccaggagagaggatggcttgctccagacctgcaagtctctctagctcttcatgtggtgttgacccaagactgctggatcgg

SEQ ID NO: 61400 - DNA, 1640 bp, Homo sapiens
cggacgcgtgggattcttttaatcagagttagtaatgtggacagtacaaaatcgagagagtctggggcttctctctttccctgtgatgattaccatggtctgttgtgcacacagcaccaatgaacccagcaacatgtcatacgtgaaagagacagtggacagattgctcaaaggatatgacattcgcttgcggccggacttcggagggccccccgtcgacgttgggatgcggatcgatgtcgccagcatagacatggtctccgaagtgaatatggattatacactcaccatgtatttccagcagtcttggaaagacaaaaggctttcttattctggaatcccactgaacctcaccctagacaatagggtagctgaccaactctgggtaccagacacctactttctgaatgacaagaaatcatttgtgcatggggtcacagtgaaaaatcgaatgattcgactgcatcctgatggaacagttctctatggactccgaatcacaaccacagctgcatgtatgatggatcttcgaagatatccactggatgagcagaactgcaccctggagatcgaaagttatggctataccactgatgacattgaattttactggaatggaggagaaggggcagtcactggtgttaataaaatcgaacttcctcaattttcaattgttgactacaagatggtgtctaagaaggtggagttcacaacaggagcgtatccacgactgtcactaagttttcgtctaaagagaaacattggttacttcattttgcaaacctacatgccttctacactgattacaattctgtcctgggtgtctttttggatcaactatgatgcatctgcagccagagtcgcactaggaatcacgacagtgcttacaatgacaaccatcagcacccacctcagggagaccctgccaaagatcccttatgtcaaagcgattgatatttatctgatgggttgctttgtgtttgtgttcctggctctgctggagtatgcctttgtaaattacatcttctttgggaaaggccctcagaaaaagggagctagcaaacaagaccagagtgccaatgagaagaataaactggagatgaataaagtccaggtcgacgcccacggtaacattctcctcagcaccctggaaatccggaatgagacgagtggctcggaagtgctcacgagcgtgagcgaccccaaggccaccatgtactcctatgacagcgccagcatccagtaccgcaagcccctgagcagccgcgaaggcctaagggcgcgccccggaccggcacggggtacccagcaaggggcgcatccgcaggcgtgcctccccagctcaaagtcaagatccccgacttgactgatgtgaattccatagacaagtggtcccgaatgtttttccccatcaccttttctctttttaatgtcgtctattggctttactatgtacactgaggtctgttctaatggttccatttagactactttcctcttctattgttttttaaccttacaggtccccaacagcgatactgctgtttctcgaggtaagagattcagccatccaattggttttaggtcttgcatatcagttttattactgcaccatgtttacttcaaaaagacaaaaaaaa

SEQ ID NO: 61401 - DNA, 1939 bp, Homo sapiens
ttttttttttttattttcttccggtggctggtctccggcggccccgtccccgactgggccccgtgcctccccgcccccgcgtccccccgccgcaagaccgagccgccaccatgaagaaattctttcaggagttcaaggccgacatcaagttcaagagcgcgggacccggtcagaagctcaaagagtccgtgggggaaaagacccacaaagagaagcccaaccagccagcccccaggccgccccgccagggacccaccaatgaggcacagatggcagccgctgctgccctagcccggctggagcagaagcagtcccgggcctggggccccacatcgcaggacaccatccgaaaccagggctgccttccagtgagaaaggaacttcaagccgaagccaccgtcagcgggagccccgaggccccagggaccaacgtggtatctgagcccagagaggaaggctctgcccacctggctgtgcctggcgtgtacttcacctgtccgctcactggggccaccctgaggaaggaccagcgggacgcctgcatcaaggaggccattctcttgcacttctccaccgacccagtggccgcctccatcatgaagatctacacgttcaacaaagaccaggaccgggtgaagctgggtgtggacaccattgccaagtacctggacaacatccacctgcaccccgaggaggagaagtaccggaagatcaagctgcagaacaaggtgtttcaggagcgcattaactgcctggaagggacccacgagttttttgaggccattgggttccagaaggtgttgcttcccgcccaggatcaggaggaccccgaggagttctacgtgctgagcgagaccaccttggcccagccccagagcctggagaggcacaaggaacagctgctggctgcggagcccgtgcgcgccaagctggacaggcagcgccgcgtcttccagccctcgcccctggcctcgcagttcgaactgcctggggacttcttcaacctcacagcagaggagatcaagcgggagcagaggctcaggtccgaggcggtggagcggctgagcgtgctgcggaccaaggccatgcgggagaaggaggagcagcgggggctgcgcaagtacaactacacgctgctgcgcgtgcgcctccccgatggctgcctcctgcagggcactttctacgctcgggagcggctgggggcggtgtacgggttcgtccgggaggccctgcagagcgactggctgccttttgagctgctggcctcgggagggcagaagctgtccgaggacgagaacctggccttgaacgagtgcgggctggtgccctctgccctcctgaccttctcgtgggacatggctgtgctggaggacatcaaggccgcgggggccgagccggactccatcctgaaacccgagctcctgtcagccatcgagaagctcttgtgaaataaaagcagggttggcctcagccctgtgggtctgtctcatgctctccctgttcctctccccgccaccccagggcctccaagccacctctggaaatacttggctctgccccatgggcacgggaggggcgccagccgtggagctgtggaattgggccccgtggcagagcccccatcccttgggggctgtggggatgcgcccaagcccccgagggagaggcctggggacaccaacaaatctaagccctccctagctgcttggtaactgtgtcatgaagctgccggacagacacacgtggcatctccctgggcaggagagcaggcctgcagcatgggtcccgttcccgtgtgccgtgggtggcagtggctgcacctggcactagggctgctctgtggatgtgggtgacaacggcaggaggggacgctggccttcctgcacatagacctgcagttagtaaatcataagcccaaataaacaggttgtttgaatat

SEQ ID NO: 61402 - DNA, 6204 bp, Homo sapiens
ttttttttttttaactgatgttttaaatttaagtcatttattttacaaacagagactacctattatacttaagacattgggttagatctttgccaaagacatggtttagtcatacctaatgtaatccattttttaactttccatattaatttaatttttaattcatttttctttatgcttgcttcaggggctacatctgggactgaatagcagcatatggcccaagggctggtgggttttgccactcatgctctatacttttagtcttttccagagttgagtatagcagtcacgtatcgttaatacagggtgtcactattttattacctggcagagaaacaggattaacttcctttatttaatactgataaatagaaaggctttttcaagaaaaaaaaagaaagcttacatttacaaaagtgatttatggtaatatgtgccattaacaaagacaaatactgaaatccacacaaaatcagaattaacttctacaactaaaaaaaaattacagggtaataaaactgtaggaaaagctgtatgtaaaaagaaaaaaagacaagtccctatgtagctaattacaagagaatattgtaaatacattcaaaaaagttttccaaaaatcctgcagcctcatctagaaactgatacatgttaagattcttgatctataccaaattataatgttaaaggaaatcatgaaaactgaggtatatatttgatgcattagaaactatcatttgaacactatttaaatagtttaattataaggtctaatttcaagttaaagtctgtaaacggagattagtttggattatatgacacaggagacaataaaacatgttctcaaagacatgccaatacattttcttgaaacaaaacctcagcaaatgagaattttcatactgtgcatgggaataactaaaacctttattagatatgattttccattaacaataatgtgaaaattagaattatgaattcaaaaagcagtgaagtctgaaaatttaaaaagtagactaggtattaggggattaaaggtaaaggaagacgagaatgtttctttaatactattcattatttcccctctgtacacaatgttgcatatatacaactacttcatttttattgactttatataatagtgaaatccctttaagcaacctagggtatacagttggtgtccaactttcaggggattttcgggggggagtagaaacacttgattaacagttttcacccacacacgttagacaatttttttctttttttgccaagattttagtagtaaattcataaatataggaaatactttcactccttcagtgttaaaatagaaaaccaaacagtgccaacagtagtggcttaattattggtatacaagaaaaacacaacaacaatgggttttcttaattacgcattttaaatatcaatatgtgcatttgtttttacagttataaatttttttctcacctgttttagacaacagcttgtaatagttttgaatccattaagatgttgctttcaatttgaaatattttgtgtatacatgtatataaaaaataacccaatgtatgactcatctgaccgatgtttaagatcaataacggcttatttttcaacatgcagttaggaagagagggaagcaagccaacctctctacagtatctttttgctggcttgtttttgtagtggtatcaatagtggtttttggagggaaccatgtgccttcagcctatctagtcaagatcagataccacgatcaacaagagcggtagaagagatggggaaaggggagtgggtaagtgttaaatatcaattttgtaaagtgtgcattttgtactccttctaggcacaggattaaaaacaggccaatgaggaaaaatttgttataattaggaaaaaactgcaatcaaatcaagacataatagccgaattaagttcttttaatagattgcatatatagatgtttagccatactcttagatcaactctttaagagcagaactttatatccaatttacatgctctagataccaccttttttattttttacagtaaggtctggtattcaaatacccacttgtacactgacagctttaagaaaaacaggacacagagggagttgtcatttttagcagcaatgaaataccactaacccctttttacataccgaattcaagtcactatcagaggtgagtgcaccacaaagtcaccaggtacaaaattgctagttcatttttaaattaataacttgaaattacccctgccccccaccccattacatctttttataaacagcaaacattttgctatttttaataccatagggctaggcaggcttgtttcaatatgaaagtgctaattcatttacagatttttataatcagttatgtagtgctacaataaatgtccaataatctacataggaacaatgatgaaaatgatgaagactgaataaggctatcagatgaccttatcttatttacatataaagaatagatacccaatggtgaggaagagacagaaattggacaaatactcataggtgtaaaaattacatctacctttgagttttatactgtaaatgagacattttaaatagtcctgtagcccatgcctattttttcctcagaaaaagaaaagctgccttcatgacatcccctcgtttcagatttccacagtgtcactttgaagcttcagagtcaggatcttactttcttcaaaaaataaagaaaatactcccctcctaaggtacctcccatccccccccacccccaaaatcccgctgatttcttttccagtgccaggttgcatgatcaggtcccatctcctggggttgttgtttcttttgtccatctattgattattagtttagaatagataacatgaaccagttctggaaccactactaggaggaacacaagctcttcactacaagcacacagcaggaaagaaagagataactcaattcatccctggtgctgggcctccaaaattgaaagaacttggcacaactgggagcactgaatttgtatcctccatgcttctcaatcattttggattcatgggctgctcttctttgatcagccagagttgctatgtcctgtaactgttttctttgttcttcattaagaccgtgagtcagtgcctgataccacacaggattacgattttgaatagtttgaaagatagctttaaatatctgatactcatcaacagggttatcttcatcatcaatgattgtggaatagccttccagagcagtctcttcagcatcatcttcttcccaatcttcatcatctccatcttcaccagcctgcttagccagaatctccaaatattcttgcccatcttcatcaatatcatcttcatcactccccagttcctcggtttcatcatcatcttcagcttcatcatcatcatcactgtcattctcatgttctgcatggcaggcatatgctcttttcaatccgttaaataaaaggataaaagctggcaaaatctgtccagaaacctgatttaaaccttggggtatctgttccatatcaataagagcacagagactgagaacacacatccttctgtcatgaagccccaagaaacagtcaacatcattaagccactaataaaatgatttgtaactggttcaacattattagggaagtgaagattttctaaggtatttagtaataggtatgcattataatgtaaagctgcaattgcaacttgcagacccatagttcaaagttcacttgtcttaacctctcttgtcagtctttctaaggctgcttccacgaataagggaatgcactggtcaatgccacgccctttgcactgcagaatgatgacctctaacaattttgctgcatgacactctgcatcttctcctgcaactcctgtaagaacctttttgcacatactgtatatcatttcaagatacttggtgtcagacagaagtgtgtctgtatcaactgttacataattatgaaggaggggcatcatatctgtaaagtaatcaaagccatcttgctgaaagacttcaaatacaaggggtagtagctgccacatctgtggagacacttgttgacatgtcaaactgtgcgctaaagagaagatctcctcatagaattctaagacatgctgttgtaaaacagtaccaatgacctgtaagcagattccctcaagctgttgggttatctctttatgatcttcaactacactaagaagtgtatcaattgtattcagaattcccatagcagtaactgctttgtcatcactaccttcttcatctggccccgtctggattacttggttaaatgtcattgccaaatgttgtgtcatttctactgcaataggagtaacttcttcactatattcacagatcattttctgaattacattggtaaggtcatcattttctgtttctcttataatgtgaagaagagcctgcattacaggtctgatgaatggtgtgatatattctttagctttttcttgattgctgatcaatacttgaagggcaatggcagcttccactttcacaggcatttctctatcatcaatcagacatcttcttgttagctctaaggctgtttgaaggttctgatcacttttgaacttcacttcacaaaaatagtgaagtacccagcaagcccttgctctcatgtaggcctagttcactgctggaagagaggggaatacatggattctggcaacatgtattccatctgatctttataggatctttttcttcagaagtatttcagctaaagagccaatcatatgcagggctccatctttttttcgagggtcagcatttggttctgtaagaatctggtaacaaaatcccatagtcttttgcagtacctctttcctcttactacaggctgtaaacaaaagtgtctgggcagcagtggtaggagaaatgaaatcttcaaacacatcaaacttcatgcgtatatattcgtaagggtcttcttgccaaagttcctcatcagcatctgtatagcacatcaatggaaaaataacatcttggataatgccttgtatatggggcttcagattcttccaggtgagagcatgagaaactccttgattaatataatttaatgtctgttgtaaaactcgaggagccatatattgcttctccttgtactgatataacaccttcaataaaacttgctggacaccaacagcaaatgccttcagaaatacttcagcaaattcattatactccttggaaacattgccagggcttccatatctttcaaaaagtcttgctaaaatatgtaaggcccacttcttgcatttccaccatggtaactcaggtcgatcatcttcttcaacttgaagtgtttcattaggtacatccctgttcacaacagtctttaaaatttctatccattctgtcaggttctgttggtttatcagttccagtggtagtgtatactgaacaagagcatagaagatcttgaatatctgtttctggatgaggacagactgatcagactggtcagaaagaagctggataaaacgatcctttagaactggcagaaaatgctgcattgctgctaccaatggactccgctcctctggttttttatactcataatttttcacaagctgataaaggcaaagaagaattcctagccaacaagcactgttatcggactgaagataaaagccaattttgtccacaatggcagtccagcggcttggataatcatgtttgatgatgtgatgaatgcatgtagtaagctgtaccctgatgagctcaggagaatggataatggcttctacaatattttctcgaatacaatggcgatcttcttctggaatagtataaggggatatatcccctggtgctgtttctcgatcaggccaatactgtgttatcatatttttcagatagataacacctgcctgtctcacaggtaaatccagctgttccgacatagtaatctggagcagtgttgagacaaaattcagagacttgtgtgcttcattgagctggcgctccgcggcctcacgcagggctgggtccatggtgccccgcagggcctcgataatggtgttggggtccatcgcagcgcggactcggtcaaacccggggctcgggtgctactgggccaggaatagcgccactcactgcgcacatggacccgccgcgctccgcagcggcaaccggcgcgaaaggaaagagcg

SEQ ID NO: 61403 - DNA, 945 bp, Homo sapiens
ttttttttttttatttacaaaatatatactgaatactatacatctggccccatcaccatggaaacaactccaaagcctgcctggggatttgtgcccaagcccagcccaggagggctagagaaagcaaaggtgtctaccagccgccgccatcccagaaggaaagcctcttcccatgagtgcctgtgggtgggcggtgagctcaacacccacaaagggcagaaggcctgggggcagtgaggtgatggtgagggcatgggaagcagatgctgctgagggtgggtggagggagaaatggagacccagcacccagcagggggagccaggtgacagcaggggaagcagatggcagggccccaggcagtccaggaccccaggctctgaagggtggggcaagggggtcaggtcacgtcttgacatccagcagtggcatccgcttgtgctggtagccactctgccagccatgtaccaccttggggtctcccatgtcagagagcagctcctgctcagcctcatgcagttcctcagctgggtcatagctgtacatggggagcaggtgatggcgcagccggtccacccgctttttcttctgtacatacattaccacagccaccaccaccccgaccagggtgatgaggaagaagggccccaacacatagcccaccatggagtcgctgttggcctggggggcattgggcacagtggtgttactcatgacatcagcagccggagggctgggtggtcagcatgggcagtggcgcttcgggagggcgcctccactgggctccctcccgccgctgcagccccgacaggaacgccctcggttggctcccgggccccggaaaagccgtcaggcgcgtgatcaaaggacccggggaaatgggccgggcctcagcacccggacgcagccaatccggtagcggaaagccggtggcctggagatttctg

SEQ ID NO: 61404 - DNA, 4326 bp, Homo sapiens
tccaggctctgcgtgataagctgtggatcttcctggttcagtctttctatgctgttcgtcacacagaaagctggaagctgatgagcacagatgatcaacagaaaatccaagcagctgcatttgacaaaggtgatgatcgaagacttggcaaaaagcctatattcagtagctcgcagcaaaggaaacaagtttctgactctggtgatataaaaatcaaatcttggaggggaaataacaagaaagagtgttggagttatctctctactaataaaaagatgaaatctgatggattaggagcatctggacattcgtcaagtaccaatagaaatagtataaataaaactctgaagcaagatgatgtaaaggaaaaagatggtacaaaaatagcatctaagattacaaaagaactaaaaactgggggaaaaaatgtttctggaaagcccaaaactgtaacaaaatccaaaacagaaaatggtgataaggcacggttggaaaacatgtcacctagacaagttgtagaaagatcagcaacagcagcagcagcagcaactggacagaagaatttactaaatggaaaaggagtgagaaatcaggaagggcaaatttcaggtgccagacccaaggtactcacaggaaacttaaatgtgcaagccaaagcaaagcctttgaagaaagctacagggaaggattcaccatgcctcagcatcgcaggaccctccagcagatccacagattcaagtatggaattctcaatttccactgaatgtctggatgaaccgaaagaaaatggatcaacagaagaagaaaagccttctggacataaactatccttttgtgattctccaggacagatgatgaaaaacagtgtagatagtgtcaaaaattccactgtagccataaaatctcgacctgtttcaagagttaccaatggaacttccaataaaaaaagtattcatgaacaagacactaatgtaaataacagtgtactaaagaaagtcagtggcaaaggatgtagtgagccagtaccacaggcaattttgaagaaaagaggaactagcaatggatgtactgcagctcagcagaggacaaagagtaccccatctaatcttactaaaactcaaggatcccaaggagagtcaccaaactcagtaaaatcttcagtctcttcaaggcagtctgatgaaaatgtggcaaagttggaccacaatacaactacagagaaacaagcacctaagagaaaaatggtcaagcaagtacacacagctttgcctaaggttaatgcaaaaatagtggcaatgcctaaaaatctaaatcagtcaaagaaaggtgaaactttgaataataaagattcaaaacagaaaatgcctcctggacaggttatatcaaaaactcagccttcctcccaaagacctttaaaacatgaaacatctactgtccaaaaaagtatgtttcatgatgtgcgtgataataacaacaaggacagtgtttctgaacagaagcctcacaaacctctcattaatcttgcatctgaaataagtgatgcagaagcactccagtcatcctgcaggcctggacccacaaaagccattaaacgatcaagaaaaagagaagttggcgttagaatgccaaaatatttcaaagctggataaatcattaaaacacgaactggaatcaaaacagatttgtttagataaaagtgaaacaaaatttcccaatcacaaagaaacagatgattgcgatgcagctaacatatgttgtcattctgttgggagtgataatgtaaattcaaaattttatagcaccacagccctaaaatacatggtttcaaatccaaatgaaaactccttgaactctaatccagtttgtgatttagactcaacaagtgcagggcaaatccatttgatatcagatagggagaaccaagtagggagaaaagatacaaacaaacaatcaagtattaaatgtgtggaagatgtttcactgtgtaatcctgaaaggacaaatggtaccttaaattctgctcaagaagacaaaaaatcgaaagttcctgtggaaggactgacaattcctagtaagttgtcagatgaatctgctatggatgaagacaaacatgctacagcagactcagatgtatcttccaagtgtttttcgggacagctatcagaaaaaaattctcctaaaaatatggaaacatcagaatctccagagagccatgaaactccagaaactccatttgtgggtcactggaatttgagtactggtgttctgcatcagcgagagagtcctgaatctgacactggcagtgctaccacctcctccgatgacataaagcccagatctgaagactatgatgctggagggtctcaggatgatgatgggtcaaatgacagaggtatctctaaatgtggcactatgctgtgccatgattttcttggaagaagtagcagtgataccagtactcctgaagaattaaaaatttatgatagtaatttaagaattgaagtaaaaatgaaaaagcaaagtagtaatgatcttttccaagttaattcaacgagtgatgatgaaatccctaggaaaaggccagaaatttggtctcgatctgcaatagttcactctagggaaagagaaaatattccacgaggcagtgtccagtttgctcaggaaatagatcaggtatcttcttcagcagatgaaacagaagatgaaagatctgaagctgaaaacgttgcagaaaatttctctatatctaacccagctcctcagcagtttcagggaataattaatttagcttttgaagatgcaactgaaaatgaatgtcgtgaattttctgcaaataaaaagtttaaaaggtcagttttactttcagtcgatgaatgtgaagagctgggatcagatgaaggagaagtccatactccctttcaggcttctgtagattctttttcaccttctgatgtttttgatggcatttctcatgaacatcatggaaggacctgctattccagattctcacgagaaagtgaagataatattttagaatgtaaacaaaataaaggcaatagtgtatgtaaaaatgaaagcactgtcttggatcttagtagcattgactcttcaagaaaaaataaacagagtgtttcagccacagaaaaaaagaacacaatagacgtcctatccagtagaagcagacagcttcttcgagaagataaaaaagtaaacaatggaagcaatgtggaaaatgacattcagcaacgcagcaaattcttggatagtgatgtaaaatctcaagaaagaccatgtcacttggatcttcatcaaagagaacccaattctgacataccaaagaacagctctacaaaatctctagactcctttcggagtcaagttctgcctcaggaaggtccagtgaaagagagccattctacaactactgaaaaagctaatattgctttatctgcaggagacatagatgattgtgacacactggcacaaacccgcatgtatgaccatcggccttcaaaaaccctgtctccaatatatgagatggatgtaatagaagcatttgagcagaaagtggaatcagaaacacatgttacagatatggatttttaagatgaccaacattttgcaaaacaagattggacactactaaagcaactgctctctgaacaggattcaaacttagatgttacaaattccgttcctgaagacttaagtttagcacagtatctaatcaatcagacactacttttagcacgagatagctcaaaacctcagggtataacacatattgacactttgaacagatggagtgaactaacatctccacttgattcctcagcgagcatcaccatggctagtttttcctctgaagattgttcgcctcaaggcgagtggacaattctggaactggaaactcagcattaagtgttaacattttggaaaaatttatgccactcctttattttttgatgcctatattatatccaaatgataattgcattagccggatataaactttctttaatattgagtctttccaatttaatgaggtaaacatagtttatttattaatatatcacatatagaaaaatgtttttctaaagtttttgagcatgttttctctaattattagagaaattagaagacttataaggaaaccctagcttcagttttcctttcctagctgatgatttgttcacttaatcattattcaagaatttaaaatgtgaatgcagaagtagatcagtccctttactttttgctctgcatagggtaacatagtaatttaacaataaaaacttaccgtgcttgtgtccattaaaaaaaaaa

SEQ ID NO: 61405 - DNA, 6328 bp, Homo sapiens
  misc_feature (1)...(6328): n = a,t,c or g
gcggccgccggcctcctaggagcgctgcacctggtgatgaccctcgtagtggctgcggcgcgggccgagaaggaagcattcgttcagtcagagagcataatagaagtactgcgttttgatgatggagggctactacagaccgagacaacacttggactcagttcatatcagcagaaaagtatatctctctaccgggggaattgcaggcccatacgatttgagccaccaatgctggatttccatgaacaaccagttggaatgccaaaaatggaaaaagtctacttacataatcctagttctgaataaacgattactttagtatcaatatttgctacaacatcacattttcatgcatcattttttcaaaataggaaaattcttccaggaggaaatacatcatttgatgtaagtttttccttgcaagagtagtaggaaatgtagaaaatactttatttattaatacatctaatcatggggtatttacttacccaggtatttggtgttggagttccaaatccatatcgattgaggccgttccttggggccagagtcactgtgaatagcagtttctcacctataataaacatccacaatcctcacagtgagcctttacaggttgtagaaatgtactctagtggaggagaccttcacctagaactcccaacgggtcaacaaggaggtaccagaaaactgtgggaaattcctccttatgaaaccaagggagtgatgagagccagtttttcatctagagaagcagataatcacacagccttcataagaataaagactaatgcttcagacagcacagagtttatcattcttcctgttgaggttgaagttacaacagctcctggaatttattcctcaactgaaatgttagattttggtacactaagaacacaagatctaccaaaagttttaaaccttcatttattaaattcaggaacaaaagatgtaccaataacaagtgttcgacctacaccacaaaaatgatgctataacggtacactttaaaccaattacattaaaagcatcaggaaagtaaatacaccaaggttgcaagcattagttttgatgcatcgaaggcaaaaaagccatctcagttttctgggaaaataacagttaaagcaaaggaaaagagttattctaaacttgaaataccatatcaagcagaagttttagatggttatttgggatttgatcatgctgcaacattatttcacatccgagacagccctgctgatcctgtggaaaggccaatttaccttactaacactttcagttttgcgatcctcattcacgatgtgttgctaccagaagaagccaaaacaatgtttaaagttcacaacttcagcaaaccagtcttaattcttcctaatgaatcaggatacatttttaccctgctttttatgccttccacatcatccatgcacattgataacaacattttacttattaccaatgcttctaaatttcatttacccgtgcgggtatacacaggctttttagattactttgtattgccccccaaaatagaggaacgtttcatagattttggagtactgagtgctacagaagcaagtaatattttatttgcaattataaacagcaatccaattgagttggctataaaaagttggcatatcataggagacggttgtatcaatagaacttgtagctgtggacagaggcaatagaactacaataatttcaagcctgccagagtgtgaaaaatcctcttcatcagatcaatcatcggtaacattagcttcaggctatttttgcagtcttcagagtcaaacttactgcaaaaaaattaggaggggattcatgatggagccatccagatcacaacagactatgagatcctgacaatccctgtgaaaggctgtgattgcagtaggctcactgacctgctcccctaagcacgtggttcttccaccttcctttccagggaaaatagttcatcaaagtttaaatattatgaattccttctcacagaaggtaaaaatacagcaaatacgatctttgtcagaagatgtgcgattttactataaacgattacggggcaataaggaagacttggagccaggaaaaaaatcaaagattgcaaacatttattttgatcctggactacagtgtggggatcattgctatgttggcttgccttttctatccaaatctgaacccaaagtgcagcctggtgtagccatgcaggaagatatgtgggatgctgactgggatttgcatcaaagcctgttcaagggatggacaggaataaaggaaaattcaggtcatagattgagtgctatatttgaagtaaatacagaccttcaaaaaaatataatatcaaaaatcactgctgagctctcctggccttccatacttagctcaccccggcacttgaaatttccacttactaatacaaactgctcctcaggaagaagagattactttagaaaatccttgcaggatgttcctgtctatgttcagtttattcctctggctttatattccaacccttcagtgtttgtagataagttagtatcaaggtttaacttgagtaaggtggcaaagatagatttgagaacactagaatttcaagtcttcagaaacagtgctcatccactgcagagttcaacaggatttatggagggccctctctccacatttaattttaaacctaattttaaaacctggagaaaagaaatctgtcaaagtaaaagtttactccagttcacaacagaactgtttcttcacttatcatagtcagaaataacctgactgtgatggatgctgtgatggtccaaggacaaggaacaactgagaacttgagggtggcaggcaagcttccaggtccaggaagctccttacgctttaaaatcacggaagcattgttaaaagattgtacagatagtttaaaactaagagaaccaaatttcacattgaaaagaacatttaaggtagagaatacaggacaacttcaaattcacatagaaaccattgaaatcagtggatactcatgtgaaggatatggctttaaagttgttaattgtcaagagtttactctaagtgccaatgcttctagagatataatcatattgtttactcctgattttacagcttctagagttattcgggaactgaagtttataacaaccagtggctctgagtttgtatttatattgaatgcatcccttccttaccatatgttagcaacctgtgcagaagccctacccagacctaactgggaactggctctgtatatcatcatctcaggaataatgagtgcactgtttcttttggtcattggaacagccctatttggaagctcaaggaatatgggagccatttcgaaggcggctatccctttgaggcctcgaacccgcccttcgatgtgggaaggccatttgatctcaggagaatcgttggtatttcatctgaaggaaacttgaacacactcagctgtgaccccggtcacagtagggggttctgtggagcaggcggatcatcatcccgacccagtgccgggagtcataagcagtgaggcccatcgggtcacccacacagcagccacagcaatagaaactcagctgacgtggatgacgtcagagcctataacagtggacgaacctctagcatgacttctgctcaagcagcttcttcacagcctgctaacaaaacacgcccccttgtcttagattccaacacaggggctcaaggtcattctgcgggcagaaagtccaaaggggcaaagcagagccagcacggcagccagcaccatgcccacagcccgctggagcagcaccctcagcctcctctgccaccgccagtgcctcagccccaggagccgcagcctgaaaggctgtctcccgcccccctcgcacacccttcccacccagaacgtgccagcagcgcgaggcacagttccgaggactcggacatcaccagtctcatagaagccatggacaaagacttcgaccaccatgactccccagccctagaagtgtttacagagcagcctccatcgccattgccaaaaagcaaagggaaaggaaaacctcttcagcgcaaggtgaaaccacctaagaagcaagaggaaaaggagaagaagggaaagggaaagccacaggaagatgagctgaaggactctttggctgatgatgatagctcctccaccaccacagagacctccaaccctgacacagaaccgctcctcaaggaggatacagaaaagcaaaagggaaaacaagccatgcctgaaaaacatgaaagtgaaatgtctcaagtgaagcaaaaaagcaaaaaactcttaaatattaagaaagaaatcccaacagatgtgaaacccagttcattagaactaccatatactccccctttggaaagtaagcaacgtagaaatctcccaagcaagattcctcttccaactgcaatgacaagtggatccaaatcacgaaatgcccagaaaacaaaaggtacaagtaagttagtggataacagaccacctgccctagcaaaattcctcccgaatagtcaagaattaggcaacaccagtagctcagagggtgaaaaagactctcctccaccggagtgggattccgttccagttcacaaacctggcagctctactgatagtctttataaactttctctgcaaaccctcaacgcagacattttcttaaaacaacgccagacctcaccgacacctgcttccccgtctcccccagctgccccctgcccctttgtggcccggggcagctacagcagcatcgtcaacagcagctccagcagtgaccctaaaataaaacagccaaatggaagcaaacacaagttgacaaaggcagcctcgctcccgggcaagaacggcaaccccacttttgctgcagtcacggctggctacgacaagagcccaggtgggaatggctttgctaaagtttcttcaaacaaaacaggtttctccagcagccttggcatttcacacgctcctgttgacagcgatggctcagacagctcgggtttgtggagtcccgtcagcaacccaagcagccctgacttcactcccctcaattcgttctccgcctttggaaactcttttaatctaactggtgaagttttcagcaaactcggattatctcgatcgtgcaatcaggcctcacagaggagctggaacgagtttaatagtggcccttcatacctttgggagtcgccagcgacagatcccagtccttcctggccagccagttccggctccccgacccacacagccacatcggtcctcggtaacaccagcggcctgtggtccaccactccattcagcagctccatttggtccagcaaccttagcagcgcccttcccttcaccactccagcaaacacgctggcaagcatcggcctcatgggcacagaaaactcccctgctcctcacgctccctccacctccagtccagctgacgacttgggacagacctacaacccgtggcggatatggagccccacgattggaagaagaagctcggacccttggtctaattcgcactttcctcacgagaattaaattaagcaaaaaacaaacaaacatagtgggccctcgtctagatcatgatgtgccagtttctgagacatctttttaaggctcttactgcagctcccctccccaccctcctcttctttgcaaaacagacccaagcagggcaggctcagaccactcgcttctttcagatctttcttgcaattatgataacatgagatttgctgttgtgcttttagagaaaagtctggactcagccacaaactctaataagacctgtacatctgagaacctttcccgttactgcgttttcaccacctgtcttccccatgctttatttatctgtatgaacacagatttgacattacagctaaggaaataatttgagttgattcagaaatcctggcatgtgacaattttgttaaattaccaagtttggtttttaataatttctcaatattatgcgccaagatctaattttaaaactgtatgaggactttgtgctgaaaatagagtatttttttaaagtaaggctgtcttggtttaaaagcagattacagaaatgtaagtcaacttaagaacagtgaatgaatgtaaaaacattcagttgagaccatatgcattttctgtgctgtttgtacttgaggtatgtaacatttgtatacctgaacttattttaaagatgaactgaaatgcacatagccaagtcttgagatacaagattgaatgtgtatttcttaaaaatacaactttgtgttgtactttgaaataaatgatgcttttttcanaaaaaaaaaa

SEQ ID NO: 61406 - DNA, 1991 bp, Homo sapiens
tccgggtttctcatattggtcaggctggtcttgaactcctgacctcaggtgatctgcccacctcggcctcccaaagtgttgggattacaggcgtgagctaccgcgcccggcagggttgtttcttaaaggtaaataagctccctaaatttgtctgtaaattggaagtaactccagtgaaaatgccaacaggaatttttttttggcttgacaaactaaggctaaaattaatatagaaatgagcatacaataataggaacactatgaaaaagaagagtaatgagaggtgggaccaagtctataagatattaaagggtaagtctctccggcccggtttccctcggtgtgctactgtgcgcgcgatccagcaccatggggaagcgggacaatcgggtggcctatatgaacccaatagcaatggcgagatcaaggggtccaatccagtcttcagggccaacaatacaggattatctgaatcgaccaaggcctacctgggaagaagtaaaagagcaactagaaaaggaaaagaaaggctccaaggctttggctgaatttgaagaaaaaatgaatgagaactggaagaaagaactggaaaaacacagagagaaattgttaagtggaagtgagagctcatccaaaaaaagacagagaaagaaaaaagaaaagaagaaatcttggtaggtattcatcttcttctttcatcaagctctgattcttccagcagttcttctgattctgaagatgaggataagaaacaaggaaaacggagaaagaaaaagaagaaccgttcacataaatcttctgaaagctccatgtcagaaactgaatcagacagtaaggatagtttaaaaaagaaaaagaagtcaaaagatggaactgagaaagaaaaggatattaaaggactcagcaaaaagagaaagatgtattctgaagataaacctttatcatctgagtccttgtcagaatcagagtatattgaggaggtgcgagcaaaaaagaagaaaagcagtgaagaacgagaaaaagcaacagaaaaaacaaaaaagaaaaagaagcataagaaacacagtaagaagaagaaaaagaaggctgctagttcaagtcctgactcaccataacattaagaaaaatcaggattcccttataaagaaagtgcaatgtctgaggaaatttcaactgtgaaaactacaacatatttactaaaatgcatgaattttcttgtttttggaattattcctggactattcagtagccactcagatgccactgtgtgaaagggccataaatgttgcctgctgcttgaacatctatttttttctcttccagtgcttgataactctgggagataatacactgcagtcgtactagtggttaagatatttgggaataaaattaatacttttgactagaagcgtctaaggataaaccaacagaaattgaatctggatacatctttaagatgtaatcagaaatgaccagatgactctagttagaatttttgaaggagggattacattaatatttcaaaacccttactctgtagataagtgtattttaattttttcccctcgtatacttttatttacctggggaaggagcttttagggttggggggtggtttgctatctctttagctagcagaatagtgtgcctttgatcctcacacatcctgtattatggacacagtagccatgcttcacggggaggtcagagctggctaccagcagtcttgccctttactgagcttagtgtcatctttggatgctgtcatatgctgctttgagtgaaccagagaaacagccatttgcagcatgagaaagccccaaaagctctgggatttacctccactttagtaataatgaatattttttagcattagaatgtgttatgtcatttgaattaattttgactacactttggcttgggagaggaattattttaaatagacattggtactttttgaacttgatagctaaagattctaaaatgcatgt

SEQ ID NO: 61407 - DNA, 341 bp, Homo sapiens
ggcacgagcccaccatggcgctgtgtcctgccgacaagaccaacgtcgtaggccgactggggtaaggtagttgcgcacgctggcgaggatggtgcggaggccctggacaggatgttactgctcttccccaacaccaggacctacttcccgcacttcgacctgagtcacggctctgcccagggtaagggtcacggatggaatgagggcgacgcgctgaccaacgccgtgttgcacgaggactacgtgcccaacgcgctgtacgacctgagcgacctgcactcgcatcatgcttcaggaggaccaggacatcttcaagcgactactgcactgactgctggcga

SEQ ID NO: 61408 - DNA, 1931 bp, Homo sapiens
ctttttttttttgttagttgtttttgtttttaatttgtctccaataagcaatgtcttctgccccatccagcatgggaagtgggtcccacgtgaagggggccccaccaccccactttgggaagctgaaggctagagacttcgggagccccccccggctcaagactcccccctacgctgggttgtgggttatattcagaggcccgacacccacactggggtaggttaggtattgggtttacttaggccacaggccccccgggggcagggagacagagtggggggcccgaagctccctgtctctggaagaagttaaaaagttcttggggtaggccctgggccccgtggggggcagttatgagatgaagggaggttactccttaagcccaggagtggttaagagacagtggggctggtagagatgcctgtttaaagccttggcctctaggaggtgttagagatttgctggggttgggggcccagggttgctgggacccccagtttttggggaagggagctgtaagagattgggggatgttctgagctccccagacaagaactgctggttaagagggggccaggcccggttggggctcagctgtccctgaggagctcggcatcccgcctgggagatgcagctgtcactggggtttctccctctctgttgtcctggcctcgtccttggcaggtggcggggacttcttgggggaagctgaagtgctggggttggggacccccgcccccgactgggcatctatgctggcgtgcctccttgcggacaaggtcctccagctccttcttccatccaaggagctcagcaagggccaggcagccctggtcgcattcacccagccaggccacgtccctgcaaggaggtacccatgaccaggaggaggtccaccttcaggaagtctgactgcatacaggagaagaaacgcgctgggaggctctcaccaaaaaagacgattatcaggcttcaccaggctctgacagtcttcacacttgggcgtcacctcagagaagatcttctctttcatccagcttagcgggtattcgtgccggcagctggcgctgacgcagtgtgatgtgtagaagggtgccgtgcgcctccaacaaagtcctcctgttccagccccggctattcgctcccaggtaacctaatgttccctccttttaacaaccgcaggagtagcccccctttgtccctttcaagcaagccgcatgaaattattgaacagatggttggccttgaaactgccccaggataagagttcccttggcgagggcgaagaagggttccggatgtttcttgaaaatagctgatctccaaagaatggcctctgggttagggaaagatggtcacttctctaggttgttcaataagaggccggtggatggagaagcgaaaagtcggggatgcctgcggatgtggagattccagctcccaccaaacagatgactctgcgacagcgttcgctctgcatgtaccgggccaccccttccaaggtcagctcgtccagcagacgctccttctggctgcccaggctgagcgtctgggagaataagttccgcaggaagtccatgtctgcttctccaccagcggctcctccctcagagtctgaatctgagtcctggaaggggtggggtggagtggccaggcccgagaggtgggattagggagggaggagagggggtgataccaggtttggggaaaaggctgtggcaggaaggtggcctgaggaagtgcggggtggtggagagactgcactggggctagctccagggctctgggacaggctgccggggttggagtcctggccatgcccgtccccaggagcaagacctcatgtgagtggctttgctttgcttttcttttttgagacagtgtctcgctctgttgcccaggctggagtgcactggtgcagtcacagctt

SEQ ID NO: 61409 - DNA, 5217 bp, Homo sapiens
aactgtgttctatgtggatccagcattacaactgataagggtatttatggcacaatgaaaaattcatctttcccagaatgatatgaagatcaatgatgcagactgatggttttgatgaagctgggcatttataactagattcattaaggaatacaaagaaaatacttaaagggatcaataatggtgtcttctggttgcagaatgcgaagtctgtggtttatcattgtaatcagcttcttaccaaatacagaaggtttcagcagagcagctttaccatttgggctggtgaggcgagaattatcctgtgaaggttattctatagatctgcgatgcccgggcagtgatgtcatcatgattgagagcgctaactatggtcggacggatgacaagatttgtgatgctgacccatttcagatggagaatacagactgctacctccccgatgccttcaaaattatgactcaaaggtgcaacaatcgaacacagtgtatagtagttactgggtcagatgtgtttcctgatccatgtcctggaacatacaaataccttgaagtccaatatgaatgtgtcccttacatttttgtgtgtcctgggaccttgaaagcaattgtggactcaccatgtatatatgaagctgaacaaaaggcgggtgcttggtgcaaggaccctcttcaggctgcagataaaatttatttcatgccctggactccctatcgtaccgatactttaatagaatatgcttctttagaagatttccaaaatagtcgccaaacaacaacatataaacttccaaatcgagtagatggtactggatttgtggtgtatgatggtgctgtcttctttaacaaagaaagaacgaggaatattgtgaaatttgacttgaggactagaattaagagtggcgaggccataattaactatgccaactaccatgatacctcaccatacagatggggaggaaagactgatatcgacctagcagttgatgaaaatggtttatgggtcatttacgccactgaacagaacaatggaatgatagttattagccagctgaatccatacactcttcgatttgaagcaacgtgggagactgtatacgacaaacgtgccgcatcaaatgcttttatgatatgcggagtcctctatgtggttaggtcagtttatcaagacaatgaaagtgaaacaggcaagaactcaattgattacatttataatacccgattaaaccgaggagaatatgtagatgttcccttccccaaccagtatcagtatattgctgcagtggattacaatccaagagataaccaactttacgtgtggaacaataacttcattttacgatattctctggagtttggtccacctgatcctgcccaagtgcctaccacagctgtgacaataacttcttcagctgagctgttcaaaaccataatatcaaccacaagcactacttcacagaaaggccccatgagcacaactgtagctggatcacaggaaggaagcaaagggacaaaaccacctccagcagtttctacaaccaaaattccacctataacaaatatttttcccctgccagagagattctgtgaagcattagactccaaggggataaagtggcctcagacacaaaggggaatgatggttgaacgaccatgccctaagggaacaagaggaactgcctcatatctctgcatgatttccactggaacatggaaccctaagggccccgatcttagcaactgtacctcacactgggtgaatcagctggctcagaagatcagaagcggagaaaatgctgctagtcttgccaatgaactggctaaacataccaaagggccagtgtttgctggggatgtaagttcttcagtgagattgatggagcagttggtggacatccttgatgcacagctgcaggaactgaaacctagtgaaaaagattcagctggacggagttataacaaggcaattgttgacacagtggacaaccttctgagacctgaagctttggaatcatggaaacatatgaattcttctgaacaagcacatactgcaacaatgttactcgatacattggaagaaggagcttttgtcctagctgacaatcttttagaaccaacaagggtctcaatgcccacagaaaatattgtcctggaagttgccgtactcagtacagaaggacagatccaagactttaaatttcctctgggcatcaaaggagcaggcagctcaatccaactgtccgcaaataccgtcaaacagaacagcaggaatgggcttgcaaagttggtgttcatcatttaccggagcctgggacagttccttagtacagaaaatgcaaccattaaactgggtgctgattttattggtcgtaatagcaccattgcagtgaactctcacgtcatttcagtttcaatcaataaagagtccagccgagtatacctgactgatcctgtgctttttaccctgccacacattgatcctgacaattatttcaatgcaaactgctccttctggaactactcagagagaactatgatgggatattggtctacccagggctgcaagctggttgacactaataaaactcgaacaacgtgtgcatgcagccacctaaccaattttgcaattctcatggcccacagggaaattgcatataaagatggcgttcatgaattacttcttacagtcatcacctgggtgggaattgtcatttcccttgtttgcctggctatctgcatcttcaccttctgctttttccgtggcctacagagtgaccgaaatactattcacaagaacctttgtatcaaccttttcattgctgaatttattttcctaataggcattgataagacaaaatatgcgattgcatgcccaatatttgcaggacttctacactttttctttttggcagcttttgcttggatgtgcctagaaggtgtgcagctctacctaatgttagttgaagtttttgaaagtgaatattcaaggaaaaaatattactatgttgctggttacttgtttcctgccacagtggttggagtttcagctgctattgactataagagctatggaacagaaaaagcttgctggcttcatgttgataactactttatatggagcttcattggacctgttaccttcattattctgctaaatattatcttcttggtgatcacattgtgcaaaatggtgaagcattcaaacactttgaaaccagattctagcaggttggaaaacattaagtcttgggtgcttggcgctttcgctcttctgtgtcttcttggcctcacctggtcctttgggttgctttttattaatgaggagactattgtgatggcatatctcttcactatatttaatgctttccagggagtgttcattttcatctttcactgtgctctcccaaaaggaaaggtacgaaaaagaattatggcaaagtgccttcaagacacctccatactgcctgtggaggccctccccaacctgagagtccccccacagttcagtgaaggcatcaaccaccagaaccagtgctcgctattcctctggcacacagagtcgtataagaagaatgtggaatgatactgtgagaaaacaatcagaatcttcttttatctcaggtgacatcaatagcacttcaacacttaatcaaggacattcactgaacaatgccagggatacaagtgccatggatactctaccgctaaatggtaattttaacaacagctactcgctgcacaagggtgactataatgacagcgtgcaagttgtggactgtggactaagtctgaatgatactgcttttgagaaaatgatcatttcagaattagtgcacaacaacttacggggcagcagcaagactcacaacctcgagctcacgctaccagtcaaacctgtgattggaggtagcagcagtgaagatgatgctattgtggcagatgcttcatctttaatgcacagcgacaacccagggctggagctccatcacaaagaactcgaggcaccacttattcctcagcggactcactcccttctgtaccaaccccagaagaaagtgaagtccgagggaactgacagctatgtctcccaactgacagcagaggctgaagatcacctacagtcccccaacagagactctctttatacaagcatgcccaatcttagagactctccctatccggagagcagccctgacatggaagaagacctctctccctccaggaggagtgagaatgaggacatttactataaaagcatgccaaatcttggagctggccatcagcttcagatgtgctaccagatcagcaggggcaatagtgatggttatataatccccattaacaaagaagggtgtattccagaaggagatgttagagaaggacaaatgcagctggttacaagtctttaatcatacagctaaggaattccaagggccacatgcgagtattaataaataaagacaccattggcctgacgcagctccctcaaactctgcttgaagagatgactcttgacctgtggttctctggtgtaaaaaagatgactgaaccttgcagttctgtgaatttttataaaacatacaaaaactttgtatatacacagagtatactaaagtgaattatttgttacaaagaaaagagatgccagccaggtattttaagattctgctgctgtttagagaaattgtgaaacaagcaaaacaaaactttccagccattttactgcagcagtctgtgaactaaatttgtaaatatggctgcaccatttttgtaggcctgcattgtattatatacaagacgtaggctttaaaatcctgtgggacaaatttactgtaccttactattcctgacaagacttggaaaagcaggagagatattctgcatcagtttgcagttcactgcaaatcttttacattaaggcaaagattgaaaacatgcttaaccactagcaatcaagccacaggccttatttcatatgtttcctcaactgtacaatgaactattctcatgaaaaatggctaaagaaattatattttgttctattgctagggtaaaataaatacatttgtgtccaactgaaatataattgtcattaaaataattttaaagagtgaagaaaatattgtgaaaagctcttgggtgcacatggtatgaaaagatttttcttacactttgtcatggtaagtgctactcattgtcacttcttttccactgtata

SEQ ID NO: 61410 - DNA, 1612 bp, Homo sapiens
  misc_feature (1)...(1612): n = a,t,c or g
aggaggcgggcgggcgcggttctttccggaaggattgaatctcctttagccccgcccgcctccgtagctgcctgaagtagtgcagggtcagcccgcaagttgcaggtcatggcgctggctgctcgactgtggcgccttctgcctttccgacgtggagccgccccggggtctcgtctccctgcggggacttcgggcagccgcgggcattgcggcccctgtcgattccgcggcttcgaggtaatgggaaacccaggaactttcaaaagaggccttttactctcagctttgtcgtatttgggttttgaaacttaccaggttatctctcaggctgctgtggttcatgccacagccaaagttgaagaaatacttgaacaagcagactacctgtatgaaagcggagaaacagaaaaactttatcagttgctaacccaatacaaggaaagtgaagatgcagagttactgtggcgtttggcacgggcatcacgtgatgtagctcagcttagcagaacctcagaagaggagaaaaagctattggtgtatgaagccctagagtatgcaaaaagagcactagaaaaatgaatcaagttttgcatctcataagtggtatgcaatctgccttagtgatgttggagattatgaaggcatcaaggctaaaattgcaaatgcatatatcatcaaggagcattttgagaaagcaattgaactgaaccctaaagatgctacttcaattcaccttatgggtatttggtgctatacatttgccgaaatgccttggtatcaaagaagaattgcctaaaatgcctgtttgcaactccctccctagttcccaccctatgagaaggccttaggctaactttcacagggcagaacaagtggatccaaacttctacagcaaaaacttacttcttttaggaaagacatacttgaaactacacaacaaaaagcttgctgctttctggctaatgaaagccaaggactatccagcacacacagaggaggataaacagatacagacagaagctgctcagttgcttacaagtttcagtgagaagaattgagaacttttcagagaagatttatgaaatagctaataaacattgccttttcttttaattctaaacttaatatatgaactataactgttctacggctttttaaatgttgtgaccatttaaccgtgtaaatataaaatattctaggcttcttcacaaataatagggtaaaataaataatcgccataagagtggtagaaataaatctccatggctcaggcaaagagattattttgcatcctggataccagcaatgcaaaatggtatgagatttctaaggattgatcacattgggatgggagatcaagcaaagaaatatttgtagaggaggggaaatggatctataggggatatacagggggatggattttcaaattggattgattctaagttgaaatcttgaagagaaggtgtggtgacagtggttaggatgttgtgggttcctgacataaagtagttaaatgatatatcttggagctaacctgtgaaataaaaaactaagtaaggagatgatgtattgcgnccgctctagagtattcaacctaacaaagagtgacttt

SEQ ID NO: 61411 - DNA, 2057 bp, Homo sapiens
tttttcagagacaaggcttttattcactgtatgccttggcatctcctctcacaccagaaagtttaaaagaaaaaacacagcgacaaggattcacttgggccattttggaacccatttatattgtgggtgttactctgggcttcatctagccccatactagcctctgagactgcctcagaccgtctgaacattcatggccttcccttgggcccaaatgtagctgtcccagtgtaaaaggagtcatagtctggagtgtaagacccagggatcttacaaaaagcctccttggtccttaggctctgggtagtaggaaaaccaggttgtgtttgtacccctagtcaaaaactttgatggcaattctcaaaaacacgtttcggatgggtgctgagtggtggggtagagtctcccctgggacagatgctgctcagagacttcctggggcaatttggctctgctgtcagggaggaagatctcatctggggatgtgcccgggatccccgccgggcgaatggactcccagttgccacccccggggaacacgttaagcattgtttcccctgcccccaggaatgaaggtcttgcccatctcccaaatcaacactccttaaaaaggacttccaactggcaaaaaatcccctcggcccctcggtgacccggtagcacttctcaagccgtgcactcggccttgctggtggggttgctcagggcaaagatgatagggcgctcgtggaaggaggccatgtccctcagaatctgctccgtgaaggctcctgcgatggcagcaacacctatgatggctgtgggcttcaccagcctcaccacctcctccagggagttgacttcaggatggtcttgggcaaacatctccttttcatggttcaggtggctcctccccttgacaatgagccctttagagtccaccatccagatctttcttgtggcctctgccttcggtacaccttctttctctagggccatgacaaggaggtgggcaatgcccatagctgcctcgcctgcaccttggaaaacaaacacgtgattggaaagcttgttgttggtgattcgcagagcagccaagatccctgccacagcaacggaggctgtgccttggatgtcatcattgaacatgcagtacttgttacggtatttgttgagcaggcggaaggcattggcattggcgaagtcttcaaattggatgaggcaatttattccaaacttgtctgtcacagcctgcatgaactcatccagcaagtcatcgtatgccttcccgtgcacgcgctggtgtttcaggccgatgtacagagggtctctgagcagctcctcattgttggtgccgacgtccagcagcacagggaggcactgctgcgggttcacccctccgcatgccgtgtacagggccagcttgcccacagggatgcccatgccgtagcagcccaggtctcccaggcccaggatgcgctccccatcagtcaccaccacggccttaatattgtcttctggccaagaattcagcattgttgcaagatgacctttgtcatgaatggtgatgaacagtccacggggcctgcggaaagtcaggccatagtgctgacaggctagccccacggtaggcgtgtacacgattggcatgaacttctccacgtccgaagtcagcactcggtagaagagcttctcgttacggtcttggagtgtcatgagaatgatgtacttgtccaggtcactctgctgccgctcgtaatatctcatgattcggaggagctggacgtcctggctcagaaagcagggcgggattaggccgtggattccaagctgcagcctttcttcaagggtaaaggccatccccttgttgagatgagggttcctggtgacatcgtatccgcgcttcttcaggggcacagggcgcgccgggccaggcttggagtggcagccttgggcgggcgcggtgggtgtccagcgcgggagggcgccgcaggcccggcccggccagggagccagccgcgtgcctgtccccagcgcggcacccatggtccttggcagacctcggtcctctccttccg

SEQ ID NO: 61412 - DNA, 1126 bp, Homo sapiens
ggcacgagccacggtccaggctggacacaaccaaaggcggaggacccgtggcccacgaagctcatctttgaactgtccccgccttctcccgccttgacttgtgaccctaggccctttggggcgcctctgacccagctagccagatcccggacccaaaccatgttccctgtgaaggtgaaagtggagaaatcagagctggagatggccaaagcccggaaccaactggatgctgtcttgcagtgtctgctggagaagagtcacatggacagggagcgtctggatgaggaagctgggaaaacaccctcagacacccacaataaggactgctccatcgcagccactggcaaaaggccatctgcccgcttcccccaccagcggaggaagaagaggagggagatggatgatgggctggctgagggagggccgcagcgatccaacacatatgtgatcaagctgttcgaccggagcgtggacttggcccagttcagcgagaacacgccactgtacccaatctgccgcgcctggatgcgcaacagcccctctgtgcgcgagcgtgaatgctctcccagctcacccctgcccccgctgcctgaggatgaggagggcttcagaggtaaccaacagcaagagtcgttgatgtgtacaagcttgcccgccaacccacacccccgggggccaaccgaagaatgcctgcagattcccgcatcccatctccacttgcagccttgaggatgcagggcaccccttgacggtggagcccttttgagcccgagccctcaccctccacactcatctatcgcaacatgcagcgctggaaacgcatccgccagaggtggaaggaggcctctcatcggaaccagcttcgttactcagaaagcatgaagatcctacgagagatgtacgaacgacagtgatgttcccaggtccccccacaccagtaaacatcccccagctccaaaaaaaaaaaaagggggggcccttttaaggggaccaatttttattcccgggggttgggaaggtaaaattttttttttggggccccaaaattaaattccggggccgggtttttaaaacgggggggggggaaaaacccgggggttccccaatttaatccctttgggaaaaa

SEQ ID NO: 61413 - DNA, 1965 bp, Homo sapiens
tcatgggaagcctatttgcaggaattggttctgacttggagaaaaaaaaacacaacttcttgaaaaggtaaaatagcttaaagcatttaatatctaaacaaatcaatctgttaatagtagtcacaaaatatgcttaatatagaaacccacattcatgtttttaagaaaaaagtgtaaattgtattccacctcaaaacataaattaacccgcttaaagaatcttcagcggtcaaagtcatggtgaattttaaacaacttcagagtaaaataacaagtactttatactgctttatatctaaaaaatgcttacaacttctcataaaaatagtttgaagcaactattttttcttttattttttaacagacacgttcaacattacgggcaacatttttaaaaccttaagctttacagactttcaaacattcaaatactggggtccctttcctttgatgtggtttattcagctagaaaagaaaacatggtagacaacttaatacattttcaccaaatttgaaagtagtacaaaaattttaggactctaccgaactacacatcgtacctaatgtatcattaaaaatagaagacagtattttcttcagcaaataaaacagcatactaatatgctgctaatgcataccttttaatgtgtactgtcattcataaattatttacaactgctactgtgtgaagagaactagaatgtaaattttctgcaaaactggaaaaaaagcaatacaaaatttgtgaaagcctgtgttttatactatacaaaagtcagtttttctcttcaaataccagatattgtatgcagtgatattttggacacattatagtaattcttgaggatgttttagtgctggaggtaagtttacaggcctcgattcttcatcaaggagtactagatcttctatttcactgcctctgtatttccttttacatatttttaccaccacctttttcttgagaaataacttcaatgcttctcttgatgcaactgcttttgcattttctttgctttttccacagccagtgcccaaatacacagacttgcacctcaattcacaaacaatactttcttgagagctcttattttgaggcagatctgccaattcttttagtgggacaaaaaatacatccagtgttgctttcagagcctcaatagctgcatttaggagctctccatgattcacattgggactaaagccaccaacagctaccaacttccatgccaccgttttatatagtctattgaaaaaaggttgcttctgtttcacatcttcattggttaacttgcaagagaatttgacagaactctcacttgactgtgaagtacttttagaaggcaactgtgaggtgctagtctgagaactactcttagaagccaactgggacacacttgctaaggaagtgcttttggaaaccagagatccactggtctgggagctgctcttggaagctagtagtgatgcagctacctgggaagtgctcttggaagttagcagcgatgtatttgttgaagagctgctcttgggagtcagtaaggatgtgcctgatgaggaactgtttttagcaactgatgatgaaacacttgcctctgaactagttttggaagttaacccacttgaagctgtctctgaactaggtttggaagacaatagtggcaattctacctctgagcttcctgaggagcccaacaagggcacctcgatctctgagctgctttgagaagctgaggctgaagagccttccaaagcactctttttaggtgatccactttgttgtctagaatcagtggattgggtcatgtgactattcacactggatttcagcaaggaaacaaatgatgcagaaccgtgtttatctggagcttctgcttcagaagctttcccagatcctgccgttgttacctgagaggaaacgctgctgctgctttggctggaaacagatcgatctctgtgccgaat

SEQ ID NO: 61414 - DNA, 5276 bp, Homo sapiens
tttcgtggttgttgtagtaaccggggaagcagccgtcggcggctgccctgagccttcctggggaaggaggagggaggtaggcgcagagcgcggtccacgcctgctcgccccgaaccatgggaagatgagacaggtaaacgcctgcgcccgcgcgcttccctaccctagggaggagcattcccgggtccgggctggcgcctgcagcaggacttcccgctcagagcccgggagtagctgttggcttccgggcgcgccgcgttgaatcgcggctgcggggtcgtcccgtccttcccggggggagcatctgcggacctacgtgggattggggtgagctgggggtggggctgagaagcaaattcctttcgggagaggagtctccttatgaatctgtgccatccaaattgcttgatccagtgaatctgctaggaaaggtctctgaggcccccgtctgctgactgcatgacaaaccctaaaggaaatgccaatcgtgatggcccgggacctggaggaaacagcatcatcctcagaggatgaggaggtcataagtcaagaggatcatccatgcatcatgtggactggaggctgcaggagaattccagttttggtattccatgccgacgctattcttacaaaggacaacaatattagagtaattggagaacgttatcatttgtcttataagattgtacgaacggacagtcgcctagtacgcagcattctgacagcccatggatttcatgaagttcacccaagcagcactgactataacctaatgtggacaggatcccacctgaagcccttcttactgcgcaccctctctgaagcacaaaaagttaatcactttcccaggtcttatgaacttacccggaaggaccgactgtacaaaaacattattcgaatgcagcatacacatggattcaaggcttttcacatcctcccccagaccttcctcctgccagctgagtacgcggaattttgtaattcatattcgaaggaccggggaccttggatagtaaaaccagtggcatcttcaagggggcgggggcgtctacctgatcaacaatccaaaccagatctccctggaagagaacattttggtctcccgttacattaacaaccccctgctcatagatgatttcaagtttgacgtgcgcctctatgtgctcgtgacttcctatgatcctcttgtcatctatctctatgaagaaggattggctaggtttgcaactgtgcgatatgatcaaggagccaagaacattcggaaccagttcatgcatctgacaaactacagtgtcaacaagaaaagtggagattacgtcagttgtgacgatccagaagtggaggattatggaaacaaatggagcatgagtgctatgcttaggtacctgaaacaagaaggcagagatacaaccgcattgatggcccatgtagaagacctgatcattaagactataatctctgctgaactagctattgctactgcctgtaaaacctttgttcctcatcgcagcagttgttttgaactctatggctttgacgtgctcatagattctactctgaagccatggttgttggaagtgaatctctctccttctttggcctgtgatgcgcctctggacctaaagattaaagccagtatgatttcagatatgttcactgttgtaggatttgtgtgccaagatcctgcccagcgggcatcaactcggccaatttatcccacctttgagtcttccaggcgaaaccctttccagaaacctcagcgttgccgtccactctctgccagtgatgcggaaatgaaaaacctcgtgggctcagcccgggagaaagggccagggaagttgggtggttctgtgcttggtctgtcaatggaggagatcaaagttttacgaagggtgaaggaggagaatgatcggcgaggtggatttattcgcatatttcctacatctgagacatgggaaatatatgggtcctacctcgagcataagacctcaatgaactatatgctggcaacacgcctcttccaggacagaatgactgctgatggagcgccagaattgaagatatagagtctgaattcaaaggccaagctgcatgctgcactttacgagaggaagctcctgtctctggaggtgcgaaaacgtagacgacggagtagcagattgagggcaatgaggccaaaatacccagtgattacccaaccagctgaaatgaatgttaaaactgagacagagagtgaagaggaggaagaagtcgcattagataatgaagatgaagaacaggaggcttcccaggaggagtctgcaggatttcttagagaaaatcaagccaaatatacaccctcattgacagctttggtagaaaatacacccaaagaaaattccatgaaagttcgtgaatggaataataaaggtggacactgctgcaaacttgagactcaggagctagagcctaaatttaacctgatgcagattcttcaagataatggcaatcttagcaaaatgcaggcccgaatagcattctctgcctatctccagcatgttcaaatttcgcctgatgaaagacagtggcggtcagacgttcagtgccagttgggctgccaaagaggatgaacagatggagctggttgttcgtttcctcaagcgagcatcaaataacctccagcattcactgaggatggtattacccagtcgacgattggcacttctggaacgcacaagaatcctggcccaccagctgggtgactttatcattgtatacaacaaggaaacagaacaaatggctgaaaagaaatcaaagaagaaagttgaggaagaagaggaagatggggtgaatatggaaaactttcaggagttcatcagacaagcaagtgaggctgaactggaggaggtgttgactttttatacccaaaagaacaagtctgctagtgtcttcctggggactcactctaaaatttctaagaacaacaacaattattctgatagtggggcaaaaggtgatcaccctgagactataatggaagaagtgaaaataaagccacctaaacagcaacagacgacagaaattcattctgataaattatctcgatttaccacttcagcagaaaaagaggcaaaattagtttatagcaattcctcctctggtcctactgctactctgcagaaaattcccaacacccatttgtcatctgttacaacctctgacctctctccagggccttgccaccattcttctttatctcaaattccttcagctatccccagcatgcctcaccagccaacaattttactgaacacagtctctgccagtgcttctccctgcctacatcccggggcacagaacatcccaagccctactggcctgccacgctgtcgatcaggaagtcacaccattggtcccttttcttccttccaaagtgctgcacacatctatagccagaaactgtctcgtccctcttcagcaaaggcaggatcgtgctatctaaacaagcatcattcaggaatagccaaaacacaaaaagagggagaagatgcttctttatatagcaaacggtacaaccaaagtatggttacagctgaacttcagcggctagctgagaagcaggcagcgagacagtattctccatccagccacatcaacctcctcacccaacaggtaacaaacctgaatttggcaactggcatcataaacagaagcagtgcttcagctcccccaaccctccgacccatcatcagtcctagtggcccgacatggtctacacagtcagacccccaagctcccgagaatcactccagctctcctggaagcaggagcctgcagacagggggatttgcctgggaaggagaagtagaaaacaacgtgtacagccaggctacaggggtggtcccccagcacaagtatcaccccacagcaggcagctatcagcttcaatttgccctgcagcaacttgaacaacaaaaacttcagtcccggcagctcctggaccagagtcgagcccggcaccaggcaatctttggcagccagacactacctaactccaatttatggacaatgaataatggtgcaggttgtagaatttccagtgccacagctagtggccagaagccaaccactctgccacaaaaagtggtaccacctccaagttcttgcgcctccctggttcccaaacccccacccaaccacgaacaagtgctcagaagggcaacatcccagaaagcttccaaagggtcctccgcggaagggcagctgaatggactccagagcagccttaaccctgcagcctttgtgcccatcaccagctctacagatcctgctcacactaaaattatgaaccacaaacacacagagaaacaacctgttcaccactcctgggtgcatgattgagggtgaagcatccaccagcacttcaaggggtccatagtattttttttttttgctgcctcaaagtccccaaagccttcgagcagaagtggcagtagatggttgccaatcagccaatgcagactttcactgggacaacaagaaagcagatcttctgggttttgatggaacttggcagtggggacattcagctgatgcattatataccccgtcagagcacacttgtatcttttaaccttcccctttgcccccatgcccccccaaactgccttaggtccttcctctgtccctttacctgctgctgcacagagatgatataaaagaggctctttggctatttgcattttgcttcctcttcttttccagattacagtatgaagctttattttctttgtacaagcttaaaatttcaacatcatcatccgcccaaagttgttcctcccttttcggaggatctagggggaaagaggagcattcatcacaagtttcctagagagaggagacaaatcggtgtgccattgacaacatgagccagggtaaaggcaccctttggaattactgatttcaaagattaataaagtaattctatttttattttcttttttttccctttactaatttcccaacaatcaatattcacaaacaggactgaagtagaaccagttttttattttactttgtggctgtgcaattttttaaacattttagaaatgtgagctgtaaagagatgttttatttttacatttcatttcagcagatggtgggtccaggctattcccaaaggcagctcctgcacctggggagcgggcatgtgcagatgtctccgttatcagccctcgacaggcaggctcactcacagcgtgggcctccagtggcttgagccctgtatccagttgcat

SEQ ID NO: 61415 - DNA, 3274 bp, Homo sapiens
agcgggaatcgatagcatactcagtgtcgtggaattcgtgacttctgacagctctctccatggaaggaggcggcggccgcgatgagccttcagcctgccgggcaggggacgtgaacatggatgaccctaagaaggaagacattcttcttttggccgatgaaaaatttgacttcgatctttcattgtcttcttcgagtgcaaatgaagatgatgaagtcttcttcggaccctttggacataaagaaagatgtattgctgccagcttggaattaaataatccggttcccgaacagcctccgttgcccacatctgagagtccctttgcctggagccctctggccggggagaagttcgtggaggtgtacaaagaagctcacttactggctttacacattgagagcagcagccggaaccaggcagcccaagctgccaagcctgaagaccctcggagccagggcgtggaaagattcatacaggagtcaaaattttaaaattaacctctttgagaaagaaaaggaaatgaagaaaagccccacgtctcttaaaagggagacatactacctgtcagacagccccttgctggggccccctgtgggtgagcctcggctcttggcctcctccccggccctgcccagctctggtgcccaggcccgcctcacccgggcgccggggcctccgcactctgctcatgctttgcccagggaatcatgcactgctcatgctgcaagtcaggcagcgactcagaggaagcccgggaccaaattgctgctgcctcgagcggcctctgttagaggaagaggcatccctggggctgcggagaagcccaagaaagagattccagctagtccttccaggacaaaaatcccagctgagaaggaatcccaccgggatgttctccctgacaaacctgccccgggtgctgtcaatgtgccggccgccggaagccacttgggccagggcaagcgggcgatccctgttcccaaacaagttggggctgaagaagaccctgttaaaagcacccggctcttacagcaattctgcaaaggaagtcctcctcgggggcttgtttggagcggggcatccagtgcgtgcactccccaaccagtggccaaagctaaatcaagtgaatttgcaagtattcctgcaaattagctccccggcctctgtccaaacatcagcaagtccaggcagaatgggacccgccatgctgcggccagctctgcctgcaggccctgtgggggcatcctcctggcaggccaagcgggtcgatgtttctgagctggcagcggagcagctcacggcacccccctcagcatcccccacccaaccccagactccggaaggtggcggccagtggctgaactccagttgcgcttggtcagaatcttctcaattgaataagactagaagtatcagacggcgagattcctgtctaaattccaagacaaaggttatgcctactcctacaaatcaatttaaaattcctaagttttctattggtgactccccggacagctcaacaccaaagctttcgcgggcacagcggccgcagtcgtgcacgtcagttggcagggtcactgtccacagcaccccggttagacgctcatctgggccagcaccacaaagcctgctgagcgcacggcgtgtgtcagccttgcccacacccgccagccggcgctgctctggccttccaccgatgacccccaaaacgatgcccagggccgtgggctctcccctgtgtgtgccagctcggagacgttcctctgagccccgcaagaactctgcaatgagaactgaaccaacaagggagagcaacagaaagacagattccaggctggtggatgtgtcccctgacaggggttctcctccttcccgtgtgcctcaggcacttaacttttctccagaggaaagcgattctactttctccaaaagtactgccacagaagtagctcgggaggaagccaagccgggtggagatgcagcccctagtgaggctcttcttgtagatatcaaactggaaccactcgcggtcactccagatgctgcaagccagcccctcattgaccttcctctcatcgacttctgcgataccccagaagcacacgtggctgtaggatctgaaagcaggcctctgatcgacctcatgacaaacactccagacatgaataaaaatgtggccaaaccttcaccggtggtgggacagctcatagacctgagctcccctctgatccagctgagccctgaggctgacaaggagaacgtggattccccactcctcaagttctaagccgaaccaaatcctttgccttgaaagaacagccctaaagtggttttcaaccctcagaaacaagctttaggctggtcgcagtggcttacacttgtaaccctagaacttgggaggctgaggtgggcggattacttgagcccaggagttcgggaccagcctgggaaatatagtgaaactcctgtccctacaaaaaatacaaaaattagccgggtgtggtagtgcatgcctgtagtcccagctacttgggaggctgaagtgggaggatggcctgagctcaaggagatgcaggctgcagtagggctgtgattgtgccactgcactcaagcctgggcaccaatgtgagaacctgtcttggaaaaaaaaaaaaaagaaacatgttttagtagaagttttatttgaaaaagaaaaataagcataaatatattcccagtgcctgccgagggtcgcctgcagcgactggggccaccacggaccacccaaggcctctgcttcccgccgccaccctcctcgctgccattctctgggctggaatgtgaagcctcagtcactctaaatgaagaattttcttttgaatgttttgtatgtaaaatagcaagtggctatttttaaagttaagtttgtataaatagttagatattctagatttacattaaattgtaaaataaatggacttattgaagcatatcttgatttttaagcttatcttgattttcaaacatgcatagctatttttatcactctaatcagtaaggctactatctagactcgaatgctttcatacaagtgattttcaaaaattagtcaataaaaattgatgtcagtgcagggcccaggcccgcccccagatacactagtttctaggtctggggccagcctagtaattgttactaggcacacaggtgatgctgactcgatggcctgagacacaccccttgagaagaagctgctctggggagacgagggtatgagtggaaagaggatgggcga

SEQ ID NO: 61416 - DNA, 6223 bp, Homo sapiens
ttttttttttttaaaaaatttacccattttattgatgcattgcaattgctctacattttaccatattatgtagaaaatactgaaaatacaagctactttgtaaaaccaaagacaaacattgaatccaaagataaactatgttttacacaatggacccttttcccatagttagtattaaattttaaatatctatttcttttgttaaaatgattattttacatactcccctaaggtacatctggcattacaaacataggctcagtaattctcaaaaactatctgtttctaggagggcttgttgtaaaaggaaagcgcacaaccaaaaaaagggagaaagcaaaaaaagttttaaatcggcacacaataactagcatatcaaatacatttaataaagtagggaattcccattgcaatatcaaggattcaaagcagaaatactaacattacatataatgtacatataatgtactgctacatgtagtgagattatttttcaagctgaattgaaacccccccttatataaagtttagcaacaaacaaccatgtagacatgctgccccatttatcagttaaaaaaaaaaaaatcaaaataggaagcaggctcgggccactcctgtcactgagaggcaatttcatttcctatcctaaaacaaaccatctcaactagtgaatttttgcataataatgctgaacaaaacacacattactgtgcttgcctggctaagggcagtcaagcttagcccctctagtggaggacaatggatgagcaatcacaaaagcaggctcagaatggccagaactgtttgaaatggagttcttattcctggggttggtatttcagctgagcactgaaaataatatcacctcctgggagctattaaaaactctggagtgaccaagtgtccctatgagcccagagtggctacactgaacccttctccgcttcttctctcacccggaaaggaagaagttggaaatgccaagttctgagagaggacttaaagccttaagctggtttgaggtcaggtcactgtgacccaggccagctgctcactaaattcaccaggcttcctcccttcctgtcagggcccacagggctaaccccagggacagaatctaaagccacagtgagcacatacatacacattcagcagacacaggtggatttttatgctggaaaatcggaaatgccagtttgcagactaagactgaaaaatctctagtttttaaagccacacactgctaggcaagtgactaaggtaacaatacaagctcttggtattatccttttctgtggagtttagactcctatcttaagtggtatctgcttattggactggggtgcaggaatgggatttggttttctttcctgcatctcatttcttacaaaaacaacaaatcttgtcccttacagaaaaaagacaaggaacaaaaaatttgtcctttagaaactagacctgtgttccaacaagaaaatcagaatgtgcttggcaaaaaggagacacaaagatcacacatgttgaccagaaaactgtatgacactagtgacagaaattatacaaactgcttggctatcttgaccaatatagtgctgaaaacacaactcaatataatgattttaaaaaataaagaaaacacaacatgttcctggtaggctgtacggactacctgccccatcttggaagcccttactccttacaatgaagaaactccaaatactttgacagctcctcggtgttcaacctggtacagagctggctgaccaggctccatgaaatctcccatctccatcctgcacctccttgacaccatctctatctacacagaaccagtcctaaaattatatctcaaatatatcattttcaattcagatggaacacacctgtattttaggattaatcttctttccccaaatcctttatgggcaggaatgtccccatccccagtaccttctacttgacccagatccatgcaggagctgagagtacaaggacaatttcacagcttgaagggccccaagactatacaagctgttaaaaaagaaacctcaaaagcctcaatgactcaacaggctttggttccttctctatattcttcaccagctaagaaacctttctgtgagttccttgtcaccagcggcaccacaaaacttctcctcatagtatggggacatggtaagcaatacaacaggctctttggtataaacacatctgttaacatgtttttttcaacaagcaaatattttactaggaatgtcaactatgtgcaggaaggactgccccatgggaaaaggaaaaaaaaattcattctaaaagtgattgcacatactttaaaagaatgcatatttaatattggcttgactcctctcacctgcttcctgaattctcacagaagcaaggtagcaacgcacagtgagagagccacatggggaaaatgcttctgtgagaactcagccgagaatccaaaatggaaaggggtagaggtggtggtaaaggagaaaagctgctgtttttatttttcaatgttggcagggaaactgagaacaatgcattacacaatacagctactaatcctgttctgataaatcccggtgaacaacttagggtccacgggggcttgctggtccatcctaaggcaagctcactgtaaactctattaaccactacattatcatataaggcactacaataagggaaggaggaagaaagggaaggaagagacacacactgaaaaactcctcaccagacacacctgtgcaaaacaattccaagggtctcctctccttgcaggcaatgcccctgctcattcagcactacagtaatatgctctaatataattgcaattagttcacatacattccaacaagtatcagttcattttggtttaaatacaatggagacatcaatccatctccgggataacactggaggatcacatacacactaagtacacaattcaagtgtaatcactacacatttgattacaaataacattttgggttagcaggaaaaattgcttgttatatttttctaatcaatatgtacatatttaattatgtaaaatattaaaacaccaccattacaaaacttctaaaatatttttaaattcagtaataaatttttaaaatattttttgcaattcctacatgcccttattatataagtcttaataagagagcattcaatttgctgctggcatacaaaggaagctactttgaagtataaaagctatacccaagaaatgttcttatctggtttcaggtttttttagctttctccccaaacaaatcacataaaacagaagggagagatgagcaaaacagaggtgtattactgaaaattcatactaatctttaggcaaagctcatcaatgccagtatctcataatagacagagattttgcatataataaaaccaccaccaccatgtaataataaccaccttaatggctttttcgataaaaaaatttaagctgaatcagagagagaaagacttttaaaaaataatttaaaaaagaattcatggtgcttcatttaaaaagaatacttggtgttttcacgcagatatggattctctcacattaagttaccagcaaatggtgagctgccttttaaacactactttataacaaacacaggagcaattgagagaatctcaatagtaacacagagtaatacgtaaccagttttgcaaaaataacaattgcccattaagtataatatgacattaaaacaaaactgaaactctgtaagtttaaatgtccaataaacaaaagggagattgtgtaagccgcttttaaaataaaataggcaagtctgagtttataaacaaacaaaaagtaatttttttttttttgtcatcagatttcaactccttctatcagcatttttcctgaccagcaatcacaataacacaaaatgaaataaagaggggcttcacttgtttttaaaagcatttatagaaatcaagtcagagagacaaaatatttttcagagggtaacttcagaacaatctctcttccttggtaactgcagaagatgggcatctgaactcttccaagtaccaaaattactgtcacaaaaataatgaatttaaaaatagggcaaactttgagaagactacaacaatgcagtcaacactgagacaggttcccccagagaaaaaccttctgcttcagtgggcccctgcagaacaagttgctggctaagaaatttcaagagggtaaaggaggatctctccatagcccaatattaagaacgcagggccaggagaaggtagccatgattcctcctccctcatgctcaccaactataagtaggaatactggctgatcttggtaggactcagcgggtatccagtgtaaattgttgagcctcgggaagacccaatgtaggattgggtggcaaactggtgttggtactgagcaggggccacgctggcagaagtgaggaggctgggcccaacactgacagggacctggtgcaccaaagtgctagggtgagtggtataggctgcagcatgccttgaggaaccctgtggggagaaaagatgagcaatggagctggttgagcccagtgcagcagcagaagtcggggcagcatacgtatacagatgagcctggcttggcaggtgagcaggggccggggcaaggtgtgggtgccctgtcgagtgtagcgggctgccatgctggaaggtgtagggggcttgggagagaggggccacaaacgcctgctgcctgcggggggctgggttgctgcttctctcctgtgaggttggagccgccgatgactgctggttctggctaagattgagtggttgtgctgcactggtccccccgcgttgagctcgataccctgtgggggtgatacagcatccagatgactgcccactcactgaagcgactggcttagtcttattgctcaggagacctgaggcctgggttgctacagtgcagtcaccaagctgagttttcagtggaggcacaatgatagtgcgggtgccagtgccatctgccacaactctgccaggcccctccaaaacggatccactattgcctcggagagcactcagggtatcagtggaataagggctgctcaaagaagagtcagagtctggagaatcattgacagtgacataactgatgacattagaccttggcttcagtccagagctactgggcttgtatttgttgtcctcttcctcatcagtgtcacttcggatagtgatgacactcacaggagggctgggagtatctggaatgatgatgggctgatgctgatcttggacagggaccaaggaattataagaagatgtggtgcggaggggactgctcccaaccagagaatagacttgggaaggcagaacatctagagaggacttggaagagactggagctgactgctttattcctcttcgaagggagggaactggattgttgttgtctgacaacatgggcaacaccaacattcagaggctgagcagtggccaatgtcacatggttagtcagcaaggatggctgctgcatgatagtgctgtactggttgccatgagagtgggcattcctccagtcagctagctgctgtccactccccatggcctctggaatcattgctgtgggctggacagaattgtgtagagctaccccaggcaactgttgccaagttgaaggcaggagaatttgctgagtccctccaggccacgcctgcagtacagcggcagtctgttcaaccagcgccggccggccggctgcgcagctcagagtaaagggcaccgcatactgcggtgtgatggtggctacttgagggtggagagttgctaccattagtggtgtacagcttccctgcgtgagaactcctgactgaatctgtagtggctgagcagctggtgcctggggtacaatcggtacagcattatccatcctcacagggaatccagaatgctttgttgttgcttgtagtccagtttgaaacgcaggtggacatactataaatgtctgttggaatggatctgtctgagtgcaaatctgggtggttccaggctgcaaggaaacaccctgctgggcaactccaggaactggtgcagcagatgatgggtacaaagctgactggtagtttagtagtgagacatctgaattagccagagaaagagtagcagctgctgcagtagaactggaagctagaacactggctgattgctatgtggaaaatccaaaaggtgagtcatt

SEQ ID NO: 61417 - DNA, 4318 bp, Homo sapiens
agtcgacgatttcgtcggccgtggccgctcggggcgcagcggtagttttgtgtgtgtgtacagcgggggacgcgcgctgccggctcctgggctggcgacagattgtgcaggaatgcgaggaatgcaccaggggcagagtccacacagtccgccgcggctgccctagcgccttccctccccagctctcgccgcgcagccagaggtcaccggagcatcttcggagctggaggaatgccagctcctgagcaggcctcattggtggaggaggggcaaccacagacccgccaggaagctgcctccactggcccaggcatggaacccgagaccacagccaccactattctagcatccgtgaaggagcaggagcttcagtttcagcgactcacccgagaactggaagtggaaaggcagattgttgccagtcagctagaaagatgtaggcttggagcagaatcaccaagcatcgccagcaccagctcaactgagaagtcatttccttggagatcaacagacgtgccaaatactggtgtaagcaaacctagagtttctgacgctgtccagcccaacaactatctcatcaggacagagccagaacaaggaaccctctattcaccagaacagacatctctccatgaaagtgagggatcattgggtaactcaagaagttcaacacaaatgaattcttattccgacagtggataccaggaagcagggagtttccacaacagccagaacgtgagcaaggcagacaacagacagcagcattcattcataggatcaactaacaaccatgtggtgaggaattcaagagctgaaggacaaacactgggtttcagccatcagtagccaatcgggccatgagaagagttagttcagttccatctagagcacagtctccttcttatgttatcagcacaggcgtgtctccttcaagggggtctctgagaacttctctgggtagaggatttggctctccgtcagtgaccgacccccgacctctgaaccccagtgcatattcctccaccacattacctgctgcacgggcagcctctccgtactcacagagacccgcctccccaacagctatacggcggattgggtcagtcacctcccggcagacctccaatcccaacggaccaacccctcaataccaaaccaccgccagagtggggtccccactgaccctgacggatgcacagactcgagtagcttccccatcccaaggccaggtggggtcgtcgtcccccaaacgctcagggatgaccgccgtaccacagcatctgggaccttcactgcaaaggactgttcatgacatggagcaattcggacagcagcagtatgacatttatgagaggatggttccacccaggccagacagcctgacaggcttacggagttcctatgctagtcagcatagtcagcttgggcaagaccttcgttctgccgtgtctcccgacttgcacattactcctatatatgaggggaggacctattacagcccagtgtaccgcagcccaaaccatggaactgtggagctccaaggatcgcagacggcgttgtatcgcacaggttcagtaggtattggaaatctacaaaggacatccagccaacgaagtacccttacataccaaagaaataattatgctctgaacacaacagctacctacgcggagccctacaggcctatacaataccgagtgcaagagtgcaattataacaggcttcagcatgcagtgccggctgatgatggcaccacaagatccccatcaatagacagcattcagaaggaccccagggagtttgcctggcgtgatcctgagttgcctgaggtcattcacatgcttcagcaccagttcccatctgttcaggcaaatgcagcggcctacctgcagcacctgtgctttggtgacaacaaagtgaagatggaggtgtgtaggttagggggaatcaagcatctggttgaccttctggaccacagagttttggaagttcagaagaatgcttgtggtgcccttcgaaacctcgtttttggcaagtctacagatgaaaataaaatagcaatgaagaatgttggtggggatacctgccttgttgccgactgttgagaaaaatctatttgatgcagaagtaagggagcttgttacaggagttctttggaatttatcctcatgtgatgcctgtaaaaaatgacaatccattccgaaaatgctctcctcaacccttaaacaaaaacactgtgattggttccccacattcctgggaatggaaataactccttccttttgatggatgaatccataaaattaaattttcagacttcactagttcctgcgtaacacggacaggttgccctaaggaacctcagctctgcgggggaagaagctcggaagcaaatgcggtcctgcgaggggctggtagactcactgttgtatgtgatcccacacgtgtgtgaacacatccgattacgacagcaagacgggtggagaactgcgtgtgcaccctgaggaacctgtcctatcggctggagctggaggtgccccaggcccggttactgggactgaacgaattggatgacttactaggaaaagagtctcccagcaaagactctgagccaaagttgctgggggaagaagaagaaaaagaaaaagaggactccgcaagaagatcaatgggatggagttggtcctatcccaggactgtcgaagtcccccaaaggggttgagatgctgtggcacccatcggtggtaaaaccatatctgactcttctagcagaaagttccaacccagccaccttggaaggctctgcagggtctctccagaacctctctgctagcaactggaagtttgcagcatatatccggggcggccgtccgaaaagaaaaggggctccccatccttgtggagcttctgagaaaggataacgatagagttgtttcttccgtggcaacagccttgaggaatatggcactagatgttcgcaacaaggagctcataggcgaatacgccatgcgagacctggtcaaccggctccccggcggcaatggccccagtgtcttgtctgatgagaccatggcagccatctgctgtgctctgcacgaggtcaccagcaaaaacatggagaacgcaaaagccctggccgactcaggaggcatagagaagctggtgaacataaccaaaggcaggggcgacagatcatctctgaaagtggtgaaggcagcagcccaggtcttgaatacattatggcaatatcgggacctccggagcatttataaaaaggatgggtggaatcagaaccattttattacacctgtgtcgacattggagcgagaccgattcaaatcacatccttccttgtctaccaccaaccaacagatgtcacccatcattcagtcagtcggcagcacctcttcctcaccagcactgttaggaatcagagaccctcgctctgaatacgataggacccagccacctatgcagtattacaatagccaaggggatgccacacataaaggcctgtaccctggctccagcaaaccttcaccaatttacatcagttcctattcctcaccagcaagagaacaaaatagacggctacagcatcaacagctgtattatagtcaagatgactccaacagaaagaactttgatgcatacagattgtatttgcagtctcctcatagctatgaagatccttattttgatgaccgagttcactttccagcttctactgattactcaacacagtatggactgaaatcgaccacaaattatgtagacttttattccactaaacgaccttcttatagagcagaacagtacccagggtccccagactcatgggtgtacgatcaagatgcccaacagaggaactctttctttctaaccttgttcagattgaggtgaaaagtccatcttgctgatttcatgattgaaatgtgaaagtgaagtggaaggaatgaatgaagtgtgttttttttttttcttttttgaggaattatcagggaagtgaggaaatgtttgggagaggactttctaagctctatttaggtgttagatctaattacttatagattctgtagtctggtgaaggtgtgggtgacgtgatgagaggtttgagaaatgggtgaaatgaaatgggggatatgtaggtcaaatcaaattaaagatgatttttttaatgtgaataaagttatgttctgataagtttgtacagaaaaaataaaatggatgcccatgttttattgctattactaaatgtcaagattgtatgctattatgtcttgtaaatttcttttgttggtgtaaatatggaaatgcc

SEQ ID NO: 61418 - DNA, 2197 bp, Homo sapiens
tgtaatgtagggggaggcgggggaggcttcaaacatccgtgtcttcaagaggcgcaggcgggtgaattcggactgtgactctgtgttaccctccaacttcctcctggggggcaatatctttgatcccctgaacctgaatagcctcctggatgaggaagtgagccgcactctcaacgcggagacccctaagtcatccccccttccggccaaagggcgagatccggtggagatcctcatccccaaagatattactgacccgctcagtctcaatacttgcactgatgagggccatgtagttcttgcttcgccactcaagactggtcggaagcggcatagacaccggggacagcaccaccagcagcagcaggcagccggagggagtgagagtcaccccgtgccgcccacagcccctctcacccccttactccacggggagggcgcctcacagcagccgcggcacaggggccagaaccgggatgccccccaaccctatgaactcaacacagccatcaactgcagggatgaagtggtgtctccccttccatctgctctgcagggtccctcaggctccctatcagcccctccagctgcctcagttatctctgcacccccatcttcctcctcccgacatcgcaaacgtcgcaggacttccagcaagtcggaggcaggggctaggggtggaggccagggttccaaggaaaagggccgagggagttggggaggccgccaccaccaccaccacccactgcctgcagcaggcttcaaaaagcaacagcgcaagttccagtatgggaattattgcaaatactatgggtaccgcaatccttcctgtgaggatgggcgccttcgggtgttgaagcctgagtggtttcggggccgggacgtcctagatctgggctgcaatgtgggccatctgaccctgagcattgcctgcaagtggggcccgtcccgcatggtgggcctggatatcgattcccggctcatccattctgcccgccaaaacatccgacactacctttccgaggagctgcgtctcccaccccagactttggaaggggacccgggggcagagggtgaggaagggaccaccaccgttcgaaagaggagctgcttcccagcctcgctgactgccagccggggtcccatcgctgccccccaagtgcccttggatggagcggacacatcagtcttccccaacaatgttgtcttcgtcacgggtaattatgtgctggatcgagatgacctggtggaggcccaaacacctgagtatgatgtggtgctctgcctcagcctcaccaagtgggtgcatctgaactggggagacgagggcctgaagcgcatgtttcgccggatctaccggcacctacgccctgggggcatcctggtcctagagccccaaccctggtcgtcgtatggcaagagaaagactcttacagaaacgatctacaagaactactaccgaatccaattgaagccagagcagttcagttcctacctgacatccccagacgtgggcttctccagctatgagcttgtggccacaccccacaacacctctaaaggcttccagcgtcctgtgtacctgttccacaaggcccgatcccccagccactaagtggccccctaaacagaaagtgtgaagaggctgccctcgctgctcataaggacctgggggaagaggaaagtgtcccaaggtctttcctttctgactccaaaaatagtttcctttcttggatctgcaaagaaagcttttcttccgtcgctgcctcagcctcctccctatgcctctggcacctgcgcagcaaggctggctgtgctggagtcaccatcatcttcctctcccccagcctcccaggctggatggcatggactgtttgctgacctctgttctcttagggcatgggaggtgggaggatatcaaattctctagccctttcctcctattctcccaaggagagagattcccatttctcctcggccattgtacctagctcttgtccctagctgcatttcagtggaccatggatagagggactgagggttagacggggaagactggcagggaggcacgcaggtactgtgaaaatccttccctttgccctcccccagtgggagagggggttgggttttcaatgtgagaacagcacaataaacttgatgtctagggcagtggcccccacccctgtcaaaaaaaaaa

SEQ ID NO: 61419 - DNA, 4434 bp, Homo sapiens
acagagacatttattgtatttgttttttggtggcaaaaagggaaaatggcgaacgactcccctgcaaaaagtctggtggacatcgacctctcctccctgcgggatcctgctgggatttttgagctggtggaagtggttggaaatggcacctatggacaagtctataagggtcgacatgttaaaacgggtcagttggcagccatcaaagttatggatgtcactgaggatgaagaggaagaaatcaaactggagataaatatgctaaagaaatactctcatcacagaaacattgcaacatattatggtgctttcatcaaaaagagccctccaggacatgatgaccaactctggcttgttatggagttctgtggggctgggtccattacagaccttgtgaagaacaccaaagggaacacactcaaagaagactggatcgcttacatctccagagaaatcctgaggggactggcacatcttcacattcatcatgtgattcaccgggatatcaagggccagaatgtgttgctgactgagaatgcagaggtgaaacttgttgactttggtgtgagtgctcagctggacaggactgtggggcggagaaatacgttcataggcactccctactggatggctcctgaggtcatcgcctgtgatgagaacccagatgccacctatgattacagaagtgatctttggtcttgtggcattacagccattgagatggcagaaggtgctccccctctctgtgacatgcatccaatgagagcactgtttctcattcccagaaaccctcctccccggctgaagtcaaaaaaatggtcgaagaagttttttagttttatagaagggtgcctggtgaagaattacatgcagcggccctctacagagcagcttttgaaacatccttttataagggatcagccaaatgaaaggcaagttagaatccagcttaaggatcatatagatcgtaccaggaagaagagaggcgagaaagatgaaactgagtatgagtacagtgggagtgaggaagaagaggaggaagtgcctgaacaggaaggagagccaagttccattgtgaacgtgcctggtgagtctactcttcgccgagatttcctgagactgcagcaggagaacaaggaacgttccgaggctcttcggagacaacagttactacaggagcaacagctccgggagcaggaagaatataaaaggcaactgctggcagagagacagaagcggattgagcagcagaaagaacagaggcgacggctagaagagcaacaaaggagagagcgggaagctagaaggcagcaggaacgtgaacagcgaaggagagaacaagaagaaaagaggcgtctagaggagttggagagaaggcgcaaagaagaagaggagaggagacgggcagaagaagaaaagaggagagttgaaagagaacaggagtatatcaggcgacagctagaagaggagcagcggcacttggaagtccttcagcagcagctgctccaggagcaggccatgttactgcatgaccataggaggccgcacccgcagcactcgcagcagccgccaccaccgcagcaggaaaggagcaagccaagctttcatgctcccgagcccaaagcccactacgagcctgctgaccgagcgcgagaggtggaagatagatttaggaaaactaaccacagctcccctgaagcccagtctaagcagacaggcagagtattggagccaccagtgccttcccgatcagagtctttttccaatggcaactccgagtctgtgcatcccgccctgcagagaccagcggagccacaggttcctgtgagaacaacatctcgctcccctgttctgtcccgtcgagattccccactgcagggcagtgggcagcagaatagccaggcaggacagagaaactccaccagcagtattgagcccaggcttctgtgggagagagtggagaagctggtgcccagacctggcagtggcagctcctcagggtccagcaactcaggatcccagcccgggtctcaccctgggtctcagagtggctccggggaacgcttcagagtgagatcatcatccaagtctgaaggctctccatctcagcgcctggaaaatgcagtgaaaaaacctgaagataaaaaggaagttttcagacccctcaagcctgctggcgaagtggatctgaccgcactggccaaagagcttcgagcagtggaagatgtacggccacctcacaaagtaacggactactcctcatccagtgaggagtcggggacgacggatgaggaggacgacgatgtggagcaggaaggggctgacgagtccacctcaggaccagaggacaccagagcagcgtcatctctgaatttgagcaatggtgaaacggaatctgtgaaaaccatgattgtccatgatgatgtagaaagtgagccggccatgaccccatccaaggagggcactctaatcgtccgccagactcagtccgctagtagcacactccagaaacacaaatcttcctcctcctttacaccttttatagaccccagattactacagatttctccatctagcggaacaacagtgacatctgtggtgggattttcctgtgatgggatgagaccagaagccataaggcaagatcctacccggaaaggctcagtggtcaatgtgaatcctaccaacactaggccacagagtgacaccccggagattcgtaaatacaagaagaggtttaactctgagattctgtgtgctgccttatggggagtgaatttgctagtgggtacagagagtggcctgatgctgctggacagaagtggccaagggaaggtctatcctcttatcaaccgaagacgatttcaacaaatggacgtacttgagggcttgaatgtcttggtgacaatatctggcaaaaaggataagttacgtgtctactattttgtcctggttaagaaataaaatacttcacaatgatccagaagttgagaagaagcagggatggacaaccgtaggggatttggaagggatgtgtacattataaagttgtaaaatatgaaagaatcaaatttctggtgattgctttgaagagttctgtggaagtctatgcgtaggcaccaaagccatatcacaaatttatggcctttaagtcatttggagaattggtacataagccattactggtggatctcactgttgaggaaggccagaggttgaaagtgatctatggatcctgtgctggattccatgctgttgatgtggattcaggatcagtctatgacatttatctaccaacacatatccagtgtagcatcaaaccccatgcaatcatcatcctccccaatacagatggaatggagcttctggtgtgctatgaagatgagggggtttatgtaaacacatatggaaggatcaccaaggatgtagttctacagtggggagagatgcctacatcagtagcatatattcgatccaatcagacaatgggctggggagagaaggccatagagatccgatctgtggaaactggtcacttggatggtgtgttcatgcacaaaagggctcaaagactaaaattcttgtgtgaacgcaatgacaaggtgttctttgcctctgttcggtctggtggcagcagtcaggtttatttcatgaccttaggcaggacttctcttctgagctggtagaagcagtgtgatccagggattactggcctccagagtcttcaagatcctgagaacttggaattccttgtaactggagctcggagctgcaccgagggcaaccaggacagctgtgtgtgcagacctcatgtgttgggttctctcccctccttcctgttcctcttatataccagtttatccccattctttttttttttcttactccaaaataaatcaaggctgcaatgcagctggggctgttcaaattctaccatcaggtgctataagtgtttgggattgagcatcatactggaaagcaaacacctttcctccagctccagaattccttgtctctgaatgactctgtcttgtgggtgtctgacagtggcgacgatgaacatgccgttggttttattggcagtgggcacaaggaggtgagaagtggtggtaaaaggagcggagtgctgaagcagagagcagatttaatatagtaacattaacagtgtatttaattgacatttcttttttgtaatgtgacgatatgtggacaaagaagaagatgcaggtttaagaagttaatatttataaaatgtgaaagacacagttactaggataacttttttgtgggtggggcttgggagatggggtggggtgggttaaggggccccattttgtttctttggatttggggtgggggtcctggccaagaactcagtcatttttctgtgtaccaggttgcctaaatcatgtgcagatggttctaaaaaaaaaa

SEQ ID NO: 61420 - DNA, 4378 bp, Homo sapiens
gttcctgcagatagagtctgcctcccctgcccccttctcttctggattcctcgctgcccaccctcattctcccgggggaagcctcgcaacgaagggccggagccgcctttctgctcccggaatgcttcacctgtccgcagctccgcccgccccacccccggaagtgacggcgaccgcgcggccctgcctttgttccgttgggcgtcgcggcgacggcgggaagatggcggcggcgggagccctggaacggagcttcgtggagctaagcggagctgagcgcgaaaggccgaggcactttcgggaattcacagtctgcagcattgggactgcaaatgccgtggctggcgccgtaaaatacagtgaaagcgcgggaggcttttactacgtggagagtggcaagttgttctccgtaaccagaaacaggttcattcattggaagacctctggagatacattggagctgatggaggagtcactggacataaatctgttgaataatgccattcgcctaaaattccaaaattgcagtgttttacctggaggggtttatgtctctgagactcagaatcgtgtgataatcttgatgttaaccaatcaaacagtgcacaggttacttttaccacacccctcccggatgtataggagtgagttggtagttgacagtcagatgcagtcaatattcactgacattggaaaagttgatttcacagatccttgcaactatcagttaattccagcagtacctggaatatctcctaattccaccgcctctacagcctggctcagcagtgatggggaggccctgtttgccttaccatgtgcttctgggggaatctttgttcttaagctacctccttatgacatacctggtatggtgtcagtcgtggaactgaaacagagttcagtaatgcaacgattgcttacaggctggatgccaacagctatcaggggtgaccagtcgccttcagatcgtcccctcagtcttgctgttcattgtgtggagcatgatgccttcatctttgctttgtgtcaggatcataaactacgaatgtggtcttacaaggagcaaatgtgcctaatggtagctgacatgctggagtatgtccctgtgaagaaagaccttcggcttactgctggaactggacacaaattacggcttgcttattcccccaccatgggactctacctggggatattcaatgcatgcaccaaaacgaggacagttctgcattttccagttggtgagcactgagagtaatcgctatagtctcgatcatatttcttcactgttcacttctcaggagacactgattgactttgccttaacttccacggatatctgggccctgtggcatgatgctgagaaccaaacagtagtgaaatacatcaactttgaacataatgttgcaggtcagtggaatccagtttttatgcagcctctgccagaggaagagattgtcatcagagatgatcaagaccccagagagatgtatctgcaaagtctttttacaccaggacaattcacaaatgaagctttatgtaaggctttacagattttctgccgaggaactgagaggaatttggatctttcctggagtgaactgaagaaagaagttactttagctgttgaaaatgagcttcaaggaagtgtaacagagtatgaattctcccaggaggagtttcgaaatttacaacaagaattctggtgcaagttctatgcctgttgtcttcagtatcaagaagccctctctcaccctcttgccctacatttgaatccacacacaaacatggtgtgcctgctgaaaaaagggtacctgtctttccttattccctcatccttagtggatcatttgtatctcctgccttatgagaaccttttgacagaagatgagacaaccatatctgatgatgtggatatcgctcgggatgtcatatgtcttataaaatgcctccggctgattgaagagtcagtaactgtggatatgtcagttataatggaaatgagttgttataacctacagtctccggaaaaggctgcagagcagattctggaagatatgatcactattgatgtagaaaatgtgatggaggatatttgtagtaaactgcaagagattaggaacccaatccatgcaattggactacttatacgggaaatggattatgaaacagaagtggaaatggaaaagggattcaatccagctcagcctttgaatattcgaatgaatcttacccagctctatggtagtaacacagcagggtatattgtgtgcagaggggtgcataaaatcgccagtactcgtttcctgatctgcagagatcttttgatcttacagcagctgttaatgaggcttggagatgctgtgatttggggaactggtcagctctttcaagctcagcaagacctactacatcgaacagctcccctactcttatcttattacctcattaaatggggaagtgagtgcttggcaactgatgttccacttgacacactggagtctaatctccaacacttatcagtactggaattaacagactctggtgctttaatggcaaataggtttgtatctagtcctcagactattgtggagttattcttccaagaagttgcaagaaaacacattatatctcacctcttctctcagccaaaggcacctctgagccaaactggattgaattggcctgaaatgattactgcaattaccagttatttattgcagcttttatggcctagcaatcctggttgtctctttctagaatgtttgatgggaaattgccaatatgtacaattgcaggattatattcaactgctacatccctggtgtcaagtcaatgttggttcctgtcgatttatgctgggaaggtgttacctagttacaggagaaggacagaaggctctggaatgtttttgtcaggcagcatctgaagtaggcaaagaggaattcttggatcgcttgattcgctcagaggatggggagatcgtgtctacccccaggctgcagtattatgacaaggttttacgactactagatgtcattggtttgcctgaactggttattcagttggctacatcagccataactgaagcaagtgatgactgggaaaagtcaggctactcttaaggacatgtattttcaaacatcatttgggatttggggtcacaatagccaagcatatggaagcctttaaccccaaattcctgattccagcaggcaattagattgtttacggcagttggtggtagttctttgtgaacgctcacagctacaggatcttgtagagtttccctatgtgaatctgcataatgaggttgtgggaataattgagtcacgtgctagagctgtggaccttatgactcacaattactatgaacttctgtatgcctttcacatctatcgccacaattaccgcaaggctggcacagtgatgtttgagtatggaatgcggcttggcagagaagttcgaactctccggggacttgagaaacaaggcaactgttatctggctgctctcaattgtttacgacttattcgtccagaatatgcgtggattgtgcagccagtgtctggtgcagtgtatgatcgccctggagcatcccctaagaggaatcatgatggagaatgcacagctgcccccacaaatcgacaaattgaaatcctggaactggaagatctggagaaagagtgttccttggctcgcatccgcctcactttggctcagcatgatccatcagcggttgcagttgctggaagttcatcagcagaggaaatggtcactctcttggttcaggcgggcctctttgacactgccatatcactctgtcagacttttaagcttcccttaacgccagtctttgaagggcttgccttcaaatgcatcaaattgcaatttggaggagaggcagcacaagcagaagcctgggcctggctagcagccaatcagctctcatctgtcatcactactaaggagtctagtgctacagatgaagcatggcgactattatccacttacctggagaggtacaaagtccagaataacttgtatcaccactgtgtaatcaacaagctcttgtctcatggagtgcctctgcctaattggcttataaacagttacaagaaggttgatgctgctgaattgcttcgcttatacttaaactatgaccttttagacttaactccctatcaggtgatcagaatatgtggatgctgaattggtgaaaagacatcactacttatcaatcgacgtaccaatggccgctacagtcccagtgcagagacttacgtactcctctattgatcaacttaaccaaactttgggaaagaactgtgccatcagtacccacattccactggcccaaaaaatcctttactttttt

SEQ ID NO: 61421 - DNA, 3925 bp, Homo sapiens
  misc_feature (1)...(3925): n = a,t,c or g
gggtttgttgacagcggaggcggcggcggctgcaggctccgagccgtaggagccggatcgggggaggggccgggcccaggagcctcagccccgccggcagccctaagggcaaggcagtggctctgccaatgatcctgtgagtattcaggaatcactgttgcccctggggatccttgtcctggagtggcccacctgcttgcccccagcatggcgtccgacactcccgagtcgctgatggccctctgtactgacttctgcttgcgcaacctggatggcaccctgggctacctgctggacaaggagaccctgcggctacatccggacatcttcttgcccagcgagatctggtgaccggctcgtcaatgagtatgtggagctggtgaacgctgcctgtaacttcggagccacacgaagagcttcttcaaccctctttttcgggacccccgcaagcaacccgcctcacggcggatccaccttccgtgaggaccctggtgcaggacccaggaccctggaggccatccgcaagcaggacctgggtggagcttgtacctgactaacttgcgagaagctgtccgccaagagcctgcagacactgaggagcttcagccacaccctgggtgttccttgagcctttttcggctgttacaaacattttnttattgaggaaggagaacccaggggggcttttgaagatgagtacctcttcaaccccacctgccaggtgctggttaaggatttcaccttcgagggcttcagccgcctccgcttcactgaaattgggccgcatgattgattgggtccctgtggagtccgctgctgcggccgcttaactccctggctgccttggacctctcaggcattcagacgagcgacgccgccgttcctcacccagtggaaagacagcctgggtgtccctcgtccttctacaacatggacctgtccgacgaccacatccggggtcatcgtgcagctgcacaagctgcgacacctggacatctcccgagaccgcctctccagctactacaagttcaagctgactcgggaggtgctgagcctctttgtgcagaagctggggaacctaatgtccctggacatctctgggccacatgatcctagagaactgcagcatctccaagattgggaagagggaagcggggcagaccagcattcgagccttccaagaggcagcatcatacctttccggggttttgaaggagggccgctgcagtttcctcggggttttttgaggaattttttgtggccgcctcacgcacattccagcctacaaagtaagtggtgacaaaaacgaagagcaggtgctgaatgccatcgaggcctacacggagcaccggcctgagatcacctcgcgggccatcaacttgctttttgacatcgcccgcatcgagcgttgcaaccagctgctgcgggccctgaagctggtcatcacggccctcaagtgccacaaatatgacaggaacattcaagtgacaggcagcgccgctctcttctacctaacaaattccgagtaccgctcagagcagagtgtgaagctgcgccggcaggttatccaggtggtgctgaatggcatggaatcctaccaggaggtgacggtgcagcggaactgctgcctgacgctctgcaacttcagcatccccgaggagctggaattccagtaccgccgggtcaacgagctcctgctcagcatcctcaaccccacgcggcaggacgagtctatccagcggatcgccgtgcacctgtgcaatgccctggtctgccaggtagacaacgaccacaaggaggccgtgggcaagatgggctttgtcgtgaccatgctgaagctgactcagaagaagctgctggacaagacatgtgaccaggtcatggagttctcctgggagtgccctgtggaacatcacagatgaaactcctgacaactgcgagatgttcctcaatttcaacggcatgaagctcttcctggactgcctgaatgaattcccagagaagcaggaactgcataggaatatgctaggacttttggggaatgtggcagaagtgaaggagctgaggcctcaactaatgacttcccagttcatcagcgtcttcagcaacctgttggagagcaaggccgatgggatcgaggtttcctacaatgcctgcggcgtcctctcccacatcatgtttgatggacccgaggcctggggcgtctgtgagccccagcgtgaggaggtggaggaacgcatgtgggctgccatccagagctgggacataaactctcggagaaacatcaattacaggtcatttgaaccaattctccgcctccttccccagggaatctctcctgtcagccagcactgggcaacctgggccctgtataacctcgtgtctgtctacccggacaagtactgccctctgctgatcaaagaaggggggatgccccttctgagggacataattaagatggcgaccgcacggcaggagaccaaggaaatggcccgcaaggtgattgagcactgcagtaactttaaagaggagaacatggacacgtctagatagaggcctccgtccccatggccgccaccgctctggaccacaggcggggaggaagcatgctcaagcagcccagcgggcgggccccttccgagggagcctcccacggagtgaagagacatgggggacttttgcacaaccgacgcttttccttaatggtagggagatatatatatattatatatatatattttttttttggttaggaagtgtgaagttttgtgtgtatgatttctgtgcaaaaacaaaagcaacactcctgagtccttgcagcttccttggccattctcaaacccactcagccttcatcgctgacacacacactcctaccccaaccagactaaatgcctataacgctgtgagtgtccagtccttgtccaggaaactcagatcccggcctggcttcctttcatgagaggagcaggccttggacagcgtatcgagcatcctgacccactgcccctgcctgagaacgccatctcggctcccgggcacagctgatggggtttggggattagaacttaccccactgggtctcccaaaagccttggtgctcccggctgtgggccatctggggcaggaaagtgagccattcctaggctgaggtccaggcagccctgcccctgaagaccctctaggagcagggcacccagtggccctgctgctgtccagccaggcctgcctgaggccacgctgctatggaggctgcctcctagtctcccaccaggtcccaggctgtggaaagccccagcccagggatggtcagaactcgggggcagattccactgccccttctgccaaacacatccagaacctgccctcagccctggaagctagcatcttctggggccaggggcttgcttcctcgctccatagccctcaactgcccaggcgctcccaccagcagaactgagcctgcctcctcctcccagcctgccccgctgcccagaggaccccacgcctctcagaggcagaggtcccatgccagcctttgacccacaacggccacacagccgcctccagaccagcactcggactgccctgcagtggccgcttgggcctccctgggcggtcccgccctgccctaggctttaccttggaagcctgagaggcgccggctctcttgctcctccatcgatggacactgcattgcttctcatcggacacttgtggagcgcaggggcctggggagcagcgctaaccctggaggcagcctttgggtgatggctttttcttcccttttcctcccgcgggcctgttttcaggtgttcctagcatttctgcctccaggaggacggcaggggtgagcagctttgggagagacacctggcctttttctcctggagcctctccctcccggccctgggaagtgggcgca

SEQ ID NO: 61422 - DNA, 7030 bp, Homo sapiens
gggcggccgttcccgcggccccctcgcgctttgcccaggctccccctgcgaggccggaggcaggatggaagatggactgtggatttcgaggagtgtctgaaggacttcgccccgcttcagggcagctttggaagaagtagaaggtgatgtggccagaaattgggaacctaaaacttgaataagcttgtgaaactttgtattgccaatgattgatactggaaaagccttttgtgttgcaaataaacagttcatgaatggggattcgagacctgggcttcagtattctaggtaatgatgcttgtcgttgagaccaagtttgccccaagttttctggacagtctttcaaggaaatgataaattttttcacacaatcctgtttgaccaaactcagagatcaattaagggcacagcttcagaactttgttaaagaagatcttagaaaattcaaagatgccaagaagcaattcgaaaaagtcagtgaagaaaaagaaaatgcgttagtaaaaaatgcccaagtacaaagaaacaaacaacatgaagttgaagaagccaccaacattctgacagcaacaagaaaatgtttccgacacatagccctcgattatgtgcttcagattaatgttcttcaatcaaaaaggagatcagaaatcctaaaatcaatgttgtcatttatgtatgcccatttggccttctttcatcaaggatatgatctgtttagtgaacttggaccctacatgaaggatcttggtgcacagttggatcgactggttgtggatgcagcaaaggagaaaagagaaatggagcaaaaacattccaccattcaacaaaaggatttctccagtgatgattctaagttagaatataacgtagatgctgcaaatggcatagttatggaaggatatctgttcaaacgagccagcaatgccttcaaaacttggaacaggcgctggttttcaatacagaataatcagttggtttaccagaaaaaatttaaggataatccgactgtggtagttgaagacctcaggctttgcacagtgaaacattgtgaagacatagagcgacgattctgctttgaggtggtctcgccaacaaaaagttgcatgctccaggcagattccgaaaagctgcgccaggcatggattaaggctgttcagaccagtatttgctactgcttatagagagaaggatgatgaatcagagaagctggataagaaatcatctccatccacaggaagcctagattctggaaatgagtccaaagagaaattattgaaaggagaaagtgcgcttcagcgggtccagtgtatccctggcaatgccagctgttgtgactgtggcctggcagatccacggtgggccagcatcaacctgggcatcaccttgtgtatcgagtgctccggaattcaccggagccttggggttcatttttcaaaagtacgatctttaactttagacacctgggagccagaacttttaaagcttatgtgtgagttggggaatgatgttataaatcgagtttatgaagctaatgtggaaaaaatgggaataaagaaaccccaaccaggacaaagacaggagaaggaggcatatatcagagcaaaatatgtggagaggaaatttgtggataaaatattcctataatcattatcacctccctgagcagcaaaaaaaagtttgtctctaaaagttctgaagaaaagaggctgagcatttctaaatttggccccaggggaccaagtcagagcatctgcccaaagttcagtcagaagtaatgacagtggaattcagcagagctctgatgatggaagagaatctttaccctccacggtgtcagccaatagtttatatgagcctgaaggagaaaggcaagattcttctatgtttcttgactcgaaacatcttaatccaggacttcagctttatagggcgtcatatgaaaaaaaccttcctaaaatggctgaggctttggctcatggtgcagacgtgaactgggccaattcagaggaaaacaaagcgacaccacttattcaggctgtattagggggctctttggtgacgtgtgagttcctcctacagaatggtgctaatgtcaaccaaagagatgtccaagggcggggaccattgcaccatgccaccgtcttagggcacacagggcaggtatgtttattcctaaaacgaggtgccaatcaacatgccactgatgaagaagggaaagaccctttgagcatagctgtggaagcagccaatgctgatatagtcaccttgttacgtttagcaagaatgaatgaagagatgcgggaatcagaaggactttatggacagccaggtgatgaaacttatcaggacatatttcgtgatttttcccaaatggcatccaataatccagagaaactaaatcgtttccagcaagattcacagaaattctgaatttttttaaaaatgggaaaatatgcccatctggtgaccccctaatgtatacagctaaaaattcacaatttttttactgctttaattctacttaattttggtagatattgaatggcttggaaaagaggtacccattcatatatttataaattaggggagtagttatctagtagtaggagaggaacctagtttaggacctcttttatttaaaaaagcctatttaaagggctaatttctggtagacagaagttcagtctagatttaggccatctctagggttacaagatgataggaggttagaccaaaagtgattcttttgccaatgggtggtggcattgatttttttcctccatgcatcttgcccaggatcactcagtcaagcatgtcttcatcaagtggaagccaactgtcctgcctgcctcaagaatatgtgttttctttagcttccctgaggatttttggtggttcagaaataggtgtgtgtgttgatgtgtttttggtaacctagctttcatacacataatatatgatttattagaactagagaatgtgttttccccgtttgttcataaatgcggtcggttatactttttaggtgacaggttattgtccagtactttaaagtaagtatgtataaaggctgtacaggtagaccataattcagtcccttagatttattttatgcagcaaaaaaaagctcttttttttttttaatcacaaaaaaaaaccccagttcaaaatgtgtagttcttcattgttgggttgattccccaaaaccttgacagatgtatcgatggaataaaagtatgttttaaaggttacttgaatgtcacaaaattatgccttcatcaaaactttaaaggaaaaatcaatttataaaatcatgtaggccatttttatatttgaaatttgtccttttaaagatagttttgctgttgctcctagtgaaagaaaaatctctgtacaaaggagaaaaagaaccccacttattcttagttaatactaaaatatatagcaataaattgctgtttattttttctacatctattttgtgtacttgtacacagtgtacattcttttaaattatatcgtgtatatagctttagtattcggttacatgattcacagacccctgaattccaaaatattatggataaacattaccatttatatgctacaaattagtctgattccatctttgaaaatgtcttaaagtataaaataattaatttgctttttttttttttttcccgagatggcgtcttgctgtgtcacccaggctggagtgcagtggcacgatctcagctcactgcagcctcctcctcttgggttcaagcaattctcctgcctcagcctcccgagtagctgggactacaggcacccgccaccattccgagctaatttctatatttttagtaaagacgggtttcaccattttggccaggttggtctcgaactcctgacctcaggtgatcagcctgctttagcctcccagagtgctgggattacaggcgtgagccaccgcacccagcctaatttgccttttgattccttcccattgttgtcaacaattaagtctattcttcttttagaaattatatgtaaatgatattattgatactctttctaaataagaggttttaaaatatataaaaactttatgatccaattatagataaattttctaacatttcccagtcactagggttttataagttgattaaacatcaaatcagaatctagccaagcaggaattatattgaaataagttcacattacagaaaaggttcccataatttggcccaaactgccatgcatgtaatgccttatttagtaatggtcactgtatgttagataaggataaaaatatatttgtgaattacttctgaggaaatgcctaacttcccacagcattgtatttaattataacaataacgaggaacattaaatctttatctttgctgtttcacctcaaagtcatagatcatctggctttttaggcaccttcactaaaggcaaaaatctgatttgtagtttttattagcatgtaccttgaaattatttgaccaagaagctcaaagaaaagaagtacgttaaagaaaaagaaaaaacctcacttttcctttatagtgtcccttcctgttttaattcctaaagatcctgacttttatctgaggaagtctaggtagttttccttttggatctggccattggtgcgtgtttcattcagatcacctctggaatctctgtggttgtgaaggcaattccttatgagactcttgcctcctgtggcttacgtgatgaattgttaatatggcagtaattaattagtatctacttaaatttagtggtcagaaatgtatttgaagtgccttaaagatgatcatggttcagaatatcttcagagaaagcaaaatctttaatattgcagggagcctagcaatacaagtacacatttctgtggcttgatttcttgaatatgctgagacccaatttggactacatttggcagaaatcatggagtaaacagcaaggctttaaattaaattaatagttacaaggtaggttggctcttaggtgaatttagccatgtcaactaatagcttttatatggtatgtaacaaatctgaattatgttatgctgtgaattattcagtgcattataagaaatcttagttaatcatgcttttgggcttcattagtcaatgtgattggccttttattttctttccataacttatctgctattattagtttcttattccttattattaatctgttagctcattatcattagcttactaacttgaaagttagattaatatcaaaataagaatagcagcactatgaagagttaataaaatgcaatttcatgttagagctagaataaaagtaattgagcagtcatttgcaaatgcttcattataacatttatgtgcttaagatttctaaggttttaaaaagttacctttaatacaatccttagaaactcagaaatttcctgatattcattagattatggtgtttgcctaatttataccggttttcactgtatattttaatgaactttgattggttacttttccagacatacagatttaatttggaatatgaactttggttcttcatgagtgcattttgaaaaagaaaaaaagtacacattcagaatctggccaatttaagtttgtattttaaaaatattttatgcatgttaagtatggtcgcagtaaatgaaattgtgtttaagactaaatttactaccgttttgaacagacattcccagatcattcttatattgtcagataacacttgtgtataatatcactttggatcatggacatgagctggaaaaatgatgtatttttgtagattgtatgtccagaatgactttagaaccgcatgatacggtggaaggagcactggactagtcgtcactaccctttttggattcagggctcctcacaattaaaatgagtgtaatgaaacaaggtgaaaatatagaagcatccctttgtatactgttttgctacttacagtgtacttggcattgctttatctcactggattctcatggtaggatttctgagatcttaatctaagctccaaagttgtctacttttttgatcctagggtgctccttttgttttacagagcagggtcacttgatttgctagctggtggcagaattggcaccattacccaggtctgactgaccaccagtcagaggcactttatttgtatcatgaaatgatttgaaatcattgtaaagcagcgaagtctgataatgaatgccagctttccttgtgctttgataacaaagactccaaatattctggagaacctggataaaagtttgaagggctagattgggatttgaagacaaaattgtaggaaatcttacatttttgcaataacaaacattaatgaaagcaaaacattataaaagtaattttaattcaccacatacttatcaatttcttgatgcttccaaatgacatctacagatatggttttgtggacatctttttctgtttacataaatttatccacttaaaatgtgataatgtggagacaaagcaagatttgattacataaacttttctctgcattggtcttttcactatcttatttgctaacttttcttatttttcttcaacctccccaccctccattttttggatattaaacagggaaagcttgctacattataaagattgttggcaccatttattttacacaaaggctaaaggttaacttttggaaatgatgagctacttttatatatgtgtttactcatgctttgtgatatttctggatcattccagtcataaagacttattacatgtactatttcttgctacctgtgaaaaggtatattttaaagaatgtataaccaacagtccatttactttttattagtatgtagaggatttgtatctaattcatgaatgtagttttacagtagtttgtcattgtaaatggagcaaagtacattatcttctaaaatgtacattatgtaagaattgtaaatatacttaagtaatttgtatgccaaaaaattacaataagtcaataaagatctcacctctgaaaaaaaaaa

SEQ ID NO: 61423 - DNA, 3734 bp, Homo sapiens
ggtaaaagccagttacttttattataatgaatgagaaatactatgactggagaagaggtttcacgtgactagattattcttggttcacacactatggtatcaaaattaattatggaaaaaaaaacccacattggattacccacatttttattgagttttgactgatgatagggaaacatttacaaaggagtaaatgttacgtaacttctcacggtatgtaagttagaagctgggcagcaaacatggttaccaagagtcgtctagttcttcatgagaaaagcctgttaaactttcgactttgtcactaggatggcagcggtgtccaacataggggagccttcttgggaccatcttttttgagctcttgtctgccggactcctgggtcttgctcctgctggatgattttcaatgtatttctctaaaggattttcactgtgaggcagatttgtgcttttatttcttgattactcatttctaattcattttccaatttctaattccttttttattttaatcttcagtggattcttcaatcatctttaccctttcctgatacagtttttctagttctcttcgttccctttctaaaacttcttgtaggttactctgccttctttcttctctctgccttcgttctttcacttgctgttcccgtattttttcttcttccttttgttcttcaatttgtttctgatctacacttgggtgctgatatgagaggggcacagcagctgcagcagcgtccacatgagacatatccccggcaggagaaagcccgcccatttccaactgccttggcatgttccctgcagattcaaaagatgattcaaactcctcattatccttaaaagctagcttgtccacatctgaaaattcacttttgtcttgaagttcagtttgtcttcgataaagacccactttctgctccggagggctggagacaggagggatggagaggctgtgcctagactcagtgggtgatggtaggggcattctgtcaggacaaggactgggggaagcaatgtgtgatctgcccagaccttccagatacatttcactttcgaggcttctttttgcttttggaaggggtgtggaagagaggcgtctggaggaagtgcccccgcggagcctcgaggctgcactgcctgtcagtgcttccacgacgtcattcctttcttcaagtgtgcccacttgaggctgctcagagacaactctgtcctctccaaaaatatgtctttccggggaactggaagtaatgtttttgaaggcttccagcaagtgcagagatggtgggctctttgctgctagtgggcttttggcagagtttttaatgactctccgatggtaacttctgaaagccttttccaagcgttcggcctcttgctgaagctctttgacccttgccttagtattggctacaaactcaaggtcagaatcaggggaactaccctccacccatgcagttggataatttgtgatccttgatgcaaccatacgtgcctagaacgttttcctgtttaaaaggattgttcaagaaatcccccacttaacctcacccattgccaaggcaccacattgcccatttaattaatcccattgaacagaacgaacggatcacagactgcctttggattgcagtacacttcattctcctagggctgtctgagtttgcttcagttgcaattttaaatcggcaacctgagtagttaaactctttacagaagctttgtaacctagaatctgggccttcagctgtgcagaatgctcaatttcgtcttgcagttgtttgtgcagagcttgcctgcagctttcgaactcctcatgctcaaccactatagccttttcggctttccgtagttctttctgaaagactgcaagttcaggagccggctgagctaggcggtttaggagacgcaggttttcatttctactctcttccagttgttgtttaagtaatttattttgtgccagaagctccagtttctcttcttttagtagtgaataatcactcatctctttaaccttttcattcagcatatggttttgttttgttattgccaaagactgggctttgacagactctaattcaagctcaagttctttcacacgatttacagattgattgagttcctccttttttgaattaatagctatgagctcctcttgcaaatggaacagctttttctttattcttcctttcatcttcaatcagtcgattagttctaatgatgtagtcatccttcagttcaagttgatactttagaagttcattcttgagctttcggtcataggtctcctcaaaactctttatattctgctcctgtctcctaagtgcctcagttatgcttttatgtttttcttcctggagcttctggttcaattcaaaagcttcaactctttgcttcagctctgcttctcttcctcttagcaaatccatatcttttagtaaaagttgcctttgagcataaatttcttttgtttcaatctcttggtgcttgtgaattctttcaagggtactcttttcccgaagaacgagagcttcagattttgcttgacaagctttttcaaaatcattctggaacatggttaactccttttcatactttttttttgcttccattttaatttttgctatctcggtatctttaaaaaacttcaacttttgacacatttctgcccgaagttgctcttctatttctctcttatactcatttagctttatttctaaagattcgaacttgatacgctgagggtaagcatctgcaaactgatcatcaataagctgaagcttctcagccagagaatctctgttaaatgtcgaacttgtctgagtttccatattacaactctctttagcttgatgatattctgccaattcttttaaaaaaatgcataagaaaacctttttgattttctttatcagatcctgaaaccagtgatttgtagagactggagtaggggttgatttaatgaagttgtaataagatcctgcataggtaataccttttcttttgccaaaccactttctggaaagaaaacagaaagtgaatattcatagccacatctttgtaagtgatctgccactaaagagttagaggcgcctattaagagggagctcccttctactgaaatggaccgaggctgcagttctccactcaatacagggtgcatcaactcatgaattagctggtttcgaagttgtgtcttgagtgtatccagtataccccgatccttaaacgtctggtatagctttttgcgcagttcatcttgactcaacacatcagccacggtaaacatgttggactgcgccatcatcaggcgtcagctccctccggagcccgcctcgctcgccccgccgcggcccgagtttagtgcccagcccgggcggtggggccaagacgagggggaatccctgccctcagaaccctgcctctgtcccgagggttcgggaggaacaaaggtgctgaacgttctctgcctcgcactcccaactaggttttctagcaaacacgcgagcttcctttcttcgcggttctgaggcaagggcgaggacccaggcacgactcaaaggcggctggagggcggggacccagacactagggactgaaggcagcgaggcaggaccgcctcacagccagtccggcaacttccggaaacctgctaaatatagccttcccgagctgaagaactacggagcatgagcttggttgcccagcaccggccggaaacgaaa

SEQ ID NO: 61424 - DNA, 1480 bp, Homo sapiens
gcggccgcagtactgggaggcttccggcggtggcgccagggccagaagcaacaaggccgtcagagtgcatcgtccaggccccatctggggggcgtggatagcgggacttccaaacacagcgcctctgctacacagtaccgttaggtcctgggtcccaagctggccgtgctaagttcctcagctgaagttgtggccaggacccagtcttgtttccccttttcgtcacatgtgtgggtggagggaaatgccaaaccacagcaaaagcaagttgatgccgaagtgaaacacgcagctttattaagacaggggcggtagaagaaggtctccatgctgaacagattacattatggagcccgggagcctgcgcctgggtccccgcccatagagctgcctctggaggttctgggaaatgggccgcagatgcatgaagttgcagaagccacctcgggtacattcccgtgcacagcctgcccgttgaaccagcggttactgagttcagccacggcccgctctccatcctcctccctccggaacttgacatagacgttgcccacgaggtggtccccaaggttgtcgcacacattcatctcttcaatctccccatacttctcctgcagttctgtgaacacctcctgtggaagacggggaggaactcagctgagctcccacaagaaaccccatctgcccctaccaaccctcacctcgaagaagctatcatagtgctcctgcacctccacgtcactcacatgacctggggtgggggcgggcagggtggaatcagagtgtagcctactgggggctgttcaccttgcccccaggcctggtcccttactcacagtgtgatccgtctgcagtttgggctgtgttctgtggattccggtacaggttgagcagcactatggtctgcacagaatttaaaaggggcggggcctgagctcagagggcagggctgcatgaacagagagtgaggcatgaaggttgggggtggaaccttacaccccagcctaagcatcatgagtgcatcggcgatcctttgcccctaagaaaccagaaaagggatggaggggactggcaaggatgaacagcgggatggaagggactggcaaagatgaacagccgccgtgtgtagcctgtacgcatgggggcgcgaccaagttcccgggaaaacggcacgaagaccggtgggaggagcctgcagaaaggtccaatgagaaaaaaagccgggcggtggggagggactcaggaacccggaataggcgggacatggtgacgacggccccagaaggggaagggccagggagccgttaacccccgaggctccgtgccgggtctcacctggctgaatgtcggcttgttgtgaagccgggagcaccggtccccgtgccggcagaccccgatcttaaagtaaaaagagcagttaaccttgtccttctcagtcccgaatatcgaagctaaatattcagccatttttacccaagcc

SEQ ID NO: 61425 - DNA, 1038 bp, Homo sapiens
ggaagtcacagctgctgagggaccactctgctcccccgcctaagccatgcacctctgtgggagcaatgggctgctgacccagacagaccccaaggagcaacaaaggcagctgaagaagcagaagaaccgggcagccgcccagcgaagccggcagaagcacacagacaaggcagacgccctgcaccagcagcacgagtctctggaaaaagacaacctcgccctgcggaaggagatccagtccctgcaggccgagctggcgtggtggagccggaccctgcacgtgcatgagcgcctgtgccccatggattgtgcctcctgctcagctccagggctcctgggctgctgggaccaggctgaggggctcctgggccctggcccacagggacaacatggctgccgggagcagctggagctgttccagaccccgggttcctgttacccagctcagccgctctctccaggtccacagcctcatgattctcccagcctcctccagtgccccctgccctcactgtcccttggccccgctgtggttgctgaacctcctgtccagctgtcccccagccctctcctgtttgcctcgcacactggttccagcctgcaggggtcttcctctaagctcagtgccctccagcccagcctcacggcccaaactgcccctccacagcccctcgagctggagcatcccaccagagggaagctggggtcctctcccgacaacccttcctctgccctggggcttgcacgtctgcagagcagggagcacaaacctgctctctcagcagccacttggcaagggctggttgtggatcccagccctcaccctctcctggcctttcctctgctctcctctgctcaagtccacttctaacctggtcttcggagctgggttggcccccttttttgggctcaggaagcagccttagcacacgggccctctcctccctcaataatgggggctgccctgcgtggctgaccagctggcccaagatttcacagtcgaaaaaggaagcccccactggatgccttcccactgtg

SEQ ID NO: 61426 - DNA, 1830 bp, Homo sapiens
  misc_feature (1)...(1830): n = a,t,c or g
gtctgtccttcactcctccattgtctgccgccactgctgctgctgctgctgctgccgctgctgctgcacgaatcgccgcagcccccagccttgcgcgtcgtcgctacctcctcggacagaaattttatgaataagcatcagaagccagtgctaacaggccagcggttcaaaactcggaaaagggatgaaaaagagaaattcgaacccacagtcttcagggatacacttgtccaggggcttaatgaggctggtgatgaccttgaagctgtagccaaatttctggactctacaggctcaagattagattatcgtcgctatgcaagacacactcttcgatatcctgggtggctggcagtatgcttgcccctggaggaacgcgccatagatgatggtgacaagaccaaagatgaccaaccactgtgttgttttcagcaaatgaagatcatgaaaccatccgaaactatgctcaggtcttcaataaactcatcaggagatataagtatttgggagaaggcattttgaagatgaaatgaaaaagcttctcctcttccttaaagcctttttnccgaaacagagcagacaaagttggccgatgctgtcggggattctgctgggcaatggcaccctgcccgccaccatcctcaccagtctcttcaccgacagcttaatcaaagaaggcattgcggcctcatttgctgtcaagcttttcaaagcatggatggcagaaaaagatgccaactctgttacctcgtctttgagaaaagccaacttagacaagaggctgcttgaactctttccagttaacagacagagtgtggatcattttgctaaatacttcactgacgcaggtcttaaggagctttccgacttcctccgagtccagcagtccctgggcaccaggaaggaactgcagaaggagctccaggagcgtctttctcaggaatgcccgatcaaggaggtggtgctttatgtcaaagaagaaatgaagaggaatgatcttccagaaacagcagtgattggtcttctgtggacatgtataatgaacgctgttgagtggaacaagaaggaagaacttgttgcagagcaggctctgaagcacctgaagcaatatgctcccctgctggccgtgttcagctcccaaggccagtcagagctgatcctcctccagaaggttcaggaatactgctacgacaacatccatttcatgaaagcctttcagaagattgtggttctcttttataaagctgatgttctgagcgaagaagcaatactgaaatggtataaggaagcacatgttgctaaaggcaaaagtgtttttcttgaccagatgaagaaatttgttgagtggttacaaaatgcagaagaagaatccgaatcggaaggtgaggaaaattaaatggctcaacaagcacaatacctaggttaccacacaccactttttgattgggaatgctgaaccatttgagaagagaaacttggcttctgttttcgcaaaggaaaaaaaaaataggataggcttcccttgtgcagagggagaaatggttttgtttttgttttgtttttaaatggagccctgaggcatcagctattatacttgggactctacctctcactcactatatgctaacttaaagccattcaacaaggagtcaagtagatctgaaattaaatactcaacagactcctccttttttagctgtatttttcaggtactgtgtggtgaccgccccactggtgtctattacaggccactttggtagttgtgtatctgctcatgtatgtgatttgacaaaccagttttttaaaataaatggctttttaaaaaaaaaa

SEQ ID NO: 61427 - DNA, 1673 bp, Homo sapiens
accggtgggcgggtgggcgggtcacgcagccggcgcgccttgccattgcccgcgccggtggaggcgggcgtgctcacgtctgccggcccctctggggtcgtttggcagcggatagaggacacgaccaagatggcggcggtgtctggcttggtgcggagaccccttcgggagggtctccgggctgctgaagagggcgctttcactggaccgcgccggctgcgctgcaggtgaacagttccgtgatgctataaatcagggtatggatgaggagctggaaagagatgagaaggtatttctgcttggagaagaagttgcccagtatgatggggcatacaaggttagtcgagggctgtggaagaaatatggagactagaggattatttgacactcccatatcagagatgggctttgcttgggaattgcttgtaggtgcagctattggctggggtttgcggcccattttgttgaatttatggaccttcaatttctccatggcaagccatttgaccaggttataaactcagctgccaagacctactacatgttctggttggccttcagcctgtgcctatagtcttcagggggcccaattggtgcttcagcaggtgaagctgcacagcactcacagtggtttgctgcctggtatgggcattgcccaggcttaaaggtggtcagtccctggaattcagaggatgccttagggacttattaatccagccattcggtataacaatccagtggtggtgctagagaatgaattgatgtatggggttcctttgattttcccccccggaagcccagtcaaaagattttcatgattcctattggaaaagccaaaatagaaaggcaaggaacacatataactgtggtttcccattcaagacctgtgggcccactgccttagaagcctgccagccagtgcctatctaaagaaggagtcgaatgctgaggtgataaatatgcgtacccattagacccaatggacatggaaacccatagaagcccagtgtcatgaagacaaaattcatcttgtaactgtgggaaggaggctggccacagtttgggagtaggagcttgaaatctgtgccaggatcatgggaaggtcctgcgttcaattttcctggatgctcctgctgttcgtgtcactggtgctgatgtccctatgccttatgcaaagattctagaggacaactctatacctcaggtcaaagacatcatatttgcaataaagaaaacattaaatatttagtttggacttgaatatcaagtcgttgaaatttatttgaaatacttgctggcactgcacctggatttgtactgcaagacctgactattcataaaggaaaacgatttctaaagcaacagcaggtatttttgtacagggaagtttaaatgtgtttgtgtatggaaaactctccactctcctcccctagatgccatgcttccttttgtctgttacggttgccatgttctttgaataacaaattatatcacattttatcctctctcaccacaaggacaaagtatggatgtggcagagtcctgatgaaagatgtatccaaacaagataacttatatgtataaaattaaagcatataatatacgtttactgttagtttgttttgataaggaataaaggaatttctaacatgaaaaaaaaaaataaaaaaaaa

SEQ ID NO: 61428 - DNA, 3662 bp, Homo sapiens
  misc_feature (1)...(3662): n = a,t,c or g
tttcgtggagaaacccggcccccagaagattgtgggtgtagtggccacagccttacaggcaggcaggggtggttggtgtcaacaggggggccaacagggtaccagagccaagaccctcggcctcctcccccgccgccttcctgcagatctgcttggctttgaggaagagtggcagtactgcctcactgcataagggatgggatcagagaacagtgctttaaagagctatacactgagagaaccaccatttaccttaccctctggacttgctgtttatcccgctgtactgcaagatggcaaatttgcttcagtttttgtgtataagagagaaaatgaagacaaggttaataaagctgccaaggtaccataatagcatttgaagacacttcgtcacccttgcttgctaagatttttatcttgtactgtggaagcggatggcattcatcttgtcactgagcgagtacagcccctggaagtggctttggaaacattgtcttctgcagaggtctgtgctgggatctatgacatattgctggctcttatcttccttcatgacagaggacacctaacacacaataatgtctgtttatcatctgtgtttgtgagtgaagatggacactggaagctaggaggaatggaaactgtttgtaaagtttctcaggccacaccagagtttctgaggagtattcagtcaataagagacccagcatctatccctcctgaagagatgtctccagaattcacaactctcccagagtgtcatggacatgcccgggatgccttttcatttggaacattggtggaaagtttgctcacaatcttaaatgaacaggtttcagcggatgttctctccagctttcaacagaccttgcactcaactttgctgaatcccattccaaaatggcggccagcgctctgcaccttactatctcatgacttcttcagaaatgattttctggaagttgtgaatttcttgaaaagtttaacattgaagagtgaagaggagaaaacggaattctttaaatttctgctggacagagtcagctgcttgtcagaggaattgatagcttcaaggttggtgcctcttctgcttaatcagttggtgtttgcagagccagtggctgtttaagagttttcttccttatctgcttggccccaaaaaagatcatgcgcagggagaaactccttgcttgctctcaccagccctgttccagtcacgggtgatccccgtgcttctccagttgtttgaagttcatgaagagcatgtgcggatggtgctgctgtctcacatcgaggcctacgtgggagcactttcactcagggagcagctgaagaaagttcatcttggccacaggttttactggggcctgcgtgatnactagcgattccattgtggcaattactctgcatagcctagcagtgctggtctctctgcttggaccagaggtggttgtgggaggagaacgaaccaagatcttcaaacgcactgcccccaagttttactaaaaaatactgacctttctctagaaggcgatccattttctcagcctattaaatttcccataaatggactctcagatgtaaaaaatacttcggaggacagtgaaaacttcccatcaagttctaaaaagtctgaggagtggcctgactggagtggacctgagggagcctgaaaatcaaactgtcaacataccagatttggccctagagaacctttgtgatgatgtcaagtcccagtgcactaccttggatgtggaagagtcatcttgggatgactgcgagcccagcagcttagatactaaagtaaacccaggaggtggaatcactgctacaaaacctgttacctcaggggagcagaagcctattcctgctttgctttcactcactgaagagtctatgccttggaaatcaagcttaccccaaaagattagccttgtacaaaggggggatgacgcagaccaaatcgagccgccaaaagtgtcatcacaagaaaggccccttaaggttccatcagaacttggtttaggagaggaattcaccattcaagtaaaaaagaagccagtaaaagatcctgagatggattggtttgctgatatgatcccagaaattaagccttctgctgcttttcttatattacctgaactgaggacagaaatggtcccaaaaaaggatgatgtctccccagtgatgcagttttcctcaaaatttgctgcagcagaaattactgagggagaggctgaaggctgggaagaagaaggggagctgaactgggaagataataactggtgacaatagatgtgagttaaactttaggaaaaaggattccctttttttaaaaaaaatcaatacctcaaaagcaggctttgggacaagaaaaccccaaagtggcctgcttttcccatcccaggagctcattatccagtctgtgccaactgaagtaggagactgactgtgagtgctggctaaaagccctgggtggtgaggctcacagtactggtttccagggaggaagagcctttgtgcatttgactgaggccagtttctatggaagagccaagtaggcttgagggagagggtccgaatttacctgcctttttccccgggacaattccgggaagtaaagaaaatgtaattccaagcctggttagccttaattttgtgcccattcttttctttaacataagagtaagctctattatgaaatacaacttttaaaaaattttagcctataaattatataaatgattttaaattgctgaggtttccttaggcagcttatttatttgtttacagttagactatctgagtaaatggttctttgtggacctaggcagttcctgactgttccacatgtagtacattgtaccaaagttcttaataagaatattccccacaatcctgttctctaaatgtcaaataaagattattttcactagattcaactttacaaaatttgttttatatctgttagaaaatgtacagacataagtattttcagttgacaaagcatcaaacccagttctgcctagtgataagtttcaccctagagtatgtatgtaacgttttagcttatccatcctttcttggagcgcctccatttccattgaaagccaggctggagcaggacccttttggagtagtgactcagttgcttccaaagcccctgctattgtatgcagcgctgacctgtactcttcttcccaggggaactcctgacgagctctttttgcataaggctgtaaagatgacctctttgcttcttctacagtcacattagcaaagggttcccagaaaatacctttttcctgtttcacacgttccactttggcagcttcagtttcatctacaaacccagtcttctccagaaaggatacaactttgttcttagtttcttcagaactgagacactgtggaactatctcttcatgatttgttccctcagcgaactgagtaaacgcctccaaggtatgttgttctagcagccaactcctgtcagctagcagtaaggcaaacatacaggacaggttgggcagaattctgtcctggatagcttcaggtataaaaagttttcataaagaagatacaaaatccaacattgcctaacgaacatagtcaggaagctctaatttaagtagcgaggtctgcaaagttacctcgtgccg

SEQ ID NO: 61429 - DNA, 4178 bp, Homo sapiens
ttttttttttccgctcagatattttatttgtgtttgtctttttctttttttggtggggggaaggggacaggttggaagggagacagaaaaacaaaatcaaagaggagaaaaaaaacatgactcttcccaccctccaccacccctggccccaggcctgagtcaatgagggtgaggatgagcacacacagcgggcgaacagcaataacttaggggaggagcgccaggagaacacagagtgactgctggactccacagctgaggaggctgcctgtctagaggtccgaagggctgggcctggggtaagtgagcaaactgaggaaggtgggtgaaaagagaggactaggggactggagaaacttcactgagtcgtgggagataaagtgctcaatgctctagatttgggctggaagggctggagtcagctacctccaggggggcagggcccgggactggcgggtgcgtgacctccgcccggctagagtccctggcagtggctggcgggaggcagggggccctagctggcgctggctgcgtggtagtagccgggggattcgggtgggccgttcaccccgaagcaggccccagctggccagtgtgtggatggcccacgggggcaagtgggatgctaaaccctggctggcccgtgccagacgccagttccagcccttgcacaggacccagacccttgccaacagagctaatgggtgttgggtggtgcggggattacgccgccggggcccagggacgggcaggcggctgcggaagccatccttgttggttttggggtacagtgcaaacagaccccggtcccccacagccccacagccctgcagggcccggaaggccatgggtgacaggcgcagcagaacccgcaaccagagtcgagatatgccccggcgcacccgggggccctgctgccgcacccatctgccccccgctgccatagccaccagaggtagagctaggcctggccaagctaagagccaggcagctccaaggcccaggggaacacccatgaggcctcggcgccagctcaggcccaggacggcccccagtgcggtaccctgggccaggagtaggaaaagactggagggcaggtgcagggctgtacaaaggagcaggtaggaggcccccagacccaccagccccacctcaagggccagcagcgctgcctgcaggccacccccaccctgggctgccagcaatggaagcagcagcagcagcaggaggggcaggaggccagaggaggaccccactgcaaaggagaggccggccaggaggccatgggacaggagtccagggagctggctggcagggcagggcctcaggtgtgttggagggggttcaggagggatgtcgggggaaggacaaccatctccaggatccctaggggtcccaatcggagccccctcttcctcttcttcctcctcctcagggacgggagtcagtgctgggccctggacccagccaagctcaaactcctcatccagaagactctcatcctccttcccccacaagctccacgtcccagcctcctcctggccaacaatgctcctctcctggggtacaagggagggcaccctaagctcctctatctcctcaggcagaccccaaacttcctcatcaaccaggctcccatgtttttgtggactgggactaggggctcctgattcttcccccagaatcctctgctgcttgggctccaaagtggccccttcctttcccagaatccttctctctccaactgcttcctcctcctcgccaagcattctttggtccaggactgcctcctggccaggtgagcagggctgctgttctataggggtgcctgtgttgggtgggcccagagccccaggaatggggagtggaaggcccggggggcgctggcctgcacgtactttgaggctcttgggctgctggcgaacctgggccgcatgcttctgccgcaactcttgctcacgccgcttgttgtactccagctggttgcccagctccgtctggtgctgcaggcgggtgagctcagcccgcgtgcgctgcagcgccttggagctgccgcagctccagctcccgcgtggcctcgtgctgccgaagcagcagtgcacactccaagtccttctgggtctgcttcttgttcaggtcctcccgcagcaggtcctggtccaggctgtgccgagccagcaacatcttgcgcttgtactggcgacactgcagctcaaagtactggcgctgccgccgcagcagccctgcttcctcctccgcctggcactgctggagctgctccttctgccgcagcagccactcggccttctcccgcttgggagtgctggggttctcctggagctcctccttcagctgttccttgcgaagtttgtaggtccgcttctgtgcctccagcagggcagccagctccttcttctgctgcccaaggatgtgctgctggaacttccgctcctcggcctgggcagctcgtgcctccttctcacctatggcctggtgccgccgggccagcttttctgcctctgccccaaagccagcccgctgcgcctcaagctcccgctgcagccgtgcactgtgctcctcccgttcacccctcagccgtgactccagggccagcagctgcttctggtgctgtcgtcgcatccgcttatagccgctcagctgctcccgcagcgcagagtcctgctcatgctcctggatctgacggctgaccagggaggcggttcggatggtggcaaagtggtctcggttacggcagtaggcccggcggcgggcggaagaggtggtggaagtgggagctggggctgcaggcggctggagagggctgggggttatctctggctggtaggggtcatcatataggttgtcagagcccggcagccggtggataatggagctgtgagaggtgactgtgtgctccccctcctgcatcatggccatctcccgggcttcagggccttcttcctcctcctcctcttcctcctcctcctcctcctcttcctcgttgtctgaggcatctgctaggctgttgacggagctgctctggctggaggcgctgatggacatgctgggcactgagtggctactctcgaggctggtcagagtcccggcccggtgcatgtagggctcggcctcctcttcctcctctggggcctcggcaccagggccgttgggtgcctcttggaacaggatcttcttcatcttgcggtactgcaggttgtccagctcccgcacggcatccttggtcctctggatcaggtccatgatgactgtgggtggccgctcccggagcacaaagcggtgcttcaggagaacctctgaggttggtctgtcttgagggattttctgaagacaggagtcgacaaaattccggaagtactcagaccagtgtcctgactggagcacgggggattcgttctgtgcaatgtggtataaggcactcatcgcattcatgttaaagagcggtggtttccgttcagccagctcgatgcaggttatccccaaggaccagacgtccactttgccatcgtactgcccctcatccatggccaggatcacctcgggtgccatccagtatggggtgcccaccgaagaagttggcaggtgccatgatggacgcagaaccaaagtcccctagcttcactaaccctggctctgacagcaggatgtttccagccttcacatccctatggatcatgttgtgggagtgcagatatgccaggccctgaagcgccccgtgggtcacagctgcgatctctacctcctgaaggggtttcttgtgcacttctagaaggtcagaagctgagcccaggcaatactccattaccagccaagccgtgtgctccctcaggtaacagccccggtactgaatggtgttgggatgccggagcttctgtaagaaccgcacctccttgatgatgtcttgccatttctcattggactgcttcccactgtaggacatcttcttgatggccaccacctcactattccggacatcccgggcaaagtatacggctccaaagctgccatggccaatttcccggaggtcagagaagagcttttctgggtcatccttgaagaagagctcagccacatctgggtccttcaggctcccggcccggcccccagctggcatggtggcccctgggggccctgagagtggggcctggccccaactgttt

SEQ ID NO: 61430 - DNA, 3235 bp, Homo sapiens
  misc_feature (1)...(3235): n = a,t,c or g
ggggcacagctgtgtttggctgcagggccaagagcgctgtcaagaagacccacacgcccccctccagcagctgaattcctgcagctcagcagccgccgccagagcaggacgaaccgccaatcgcaaggcacctctgagaacttcaggatgcagatgtctccagccctcacctgcctagtcctgggcctggcccttgtcttttggtgaagggtctgctgtgaaccatcccccatcctacgtgggccaactggcctcaagacttcggggtgaggggtgtttcagcaggttggcgcaggcttcccaaggaccgcaacgtggtttttcttcacccttatggggttggccttcggtgtttgggccatgcttccagcttgaacaacaggaggagaaacccagcagcagattcaagcagctatgggattcaagattgatgacaagggcatggcccccgccctccggcatctgtacaaggagctcatggggccatgggaacaaggatgagattcagcaccacagacgcgatctttcgtccagcgggatcttgaagcttggtccagggcttcatgcccgacattcttcaggctgttccggagcacggtcaagcaagtggacttttcagaggtggagagagccagattcatcatcaatgactgggtgaagacacacacaaaaggtatgatcagcaacttgcttgggaaaggagccgtggaccagctgacacggctggtgctggtgaatgccctctacttcaacggccagtggaagactcccttccccgactccagcacccaccgccgcctcttccacaaatcagacggcagcactgtctctgtgcccatgatggctcagaccaacaagttcaactatactgagttcaccacgcccgatggccattactacgacatcctggaactgccctaccacgggggcaccctcagcatgttcattgctgccccttatgaaaaagaggtgcctctctctgccctcaccaacattctggagtggcccagcttcattcagccactgggaaagggcaacattgacccagggttgccccgcctcctggggttttgcccaagttctccctgggggactttaagttcggaccttcagggaaggcccctaggaggaacctnggggaatgaccgacatgtttcagaacaagtttcaggctgacttcacgagtcttttcagaaccaagagcctctccacgtcgcgcaggccctggcaagaaaagtgaagatcgaaggtgaacgagagtgggcaacggtggcctcctcatccacagctggtcataagtctcagcccgcatggccccccgaggagatcatcatggacagacccttcctctttgtggtccggcacaaccccacaggaacagtccttttcatgggccaagtgatggaaccctgaccctggggaaagacgccttcatctgggacaaaactggagatgcatcgggaaagaagaaactccgaagaaaagaattttagtgttaatgactctttctgaaggaagagaagacatttgccttttgttaaaagatggtaaaccagatctgtctccaagaccttggcctctccttggaggacctttaggtcaaactccctagtctccacctgagaccctgggagagaagtttgaagcacaactcccttaaggtctccaaaccagacggtgacgcctgcgggaccatctggggcacctgcttccacccgtctctctgcccactcgggtctgcagacctggttcccactgaggccctttgcaggatggaactacggggcttacaggagcttttgtgtgcctggtagaaactatttctgttccagtcacattgccatcactcttgtactgcctgccaccgcggaggaggctggtgacaggccaaaggccagtggaagaaacaccctttcatctcagagtccactgtggcactggccacccctccccagtacaggggtgctgcaggtggcagagtgaatgtcccccatcatgtggcccaactctcctggcctggccatctccctccccagaaacagtgtgcatgggttattttggagtgtaggtgacttgtttactcattgaagcagatttctgcttccttttatttttataggaatagaggaagaaatgtcagatgcgtgcccagctcttcaccccccaatctcttggtggggaggggtgtacctaaatatttatcatatccttgcccttgagtgcttgttagagagaaagagaactactaaggaaaataatattatttaaactcgctcctagtgtttctttgtggtctgtgtcaccgtatctcaggaagtccagccacttgactggcacacacccctccggacatccagcgtgacggagcccacactgccaccttgtggccgcctgagaccctcgcgccccccgcgccccccgcgcccctctttttccccttgatggaaattgaccatacaatttcatcctccttcaggggatcaaaaggacggagtggggggacagagactcagatgaggacagagtggtttccaatgtgttcaatagatttaggagcagaaatgcaaggggctgcatgacctaccaggacagaactttccccaattacagggtgactcacagccgcattggtgactcacttcaatgtgtcatttccggctgctgtgtgtgagcagtggacacgtgaggggggggtgggtgagagagacaggcagctcggattcaactaccttagataatatttctgaaaacctaccagccagagggtagggcacaaagatggatgtaatgcactttgggaggccaaggcgggaggattgcttgagcccaggagttcaagaccagcctgggcaacataccaagacccccgtctctttaaaaatatatatattttaaatatacttaaatatatatttctaatatctttaaatatatatatatattttaaagaccaatttatgggagaattgcacacagatgtgaaatgaatgtaatctaatagaagcctaatcagcccaccatgttctccactgaaaaatcctctttctttgggggttttctttctttcttttttgattttgcactggacggtgacgtcagccatgtacaggatccacaggggtggtgtcaaatgctattgaaattgtgttgaattgtatgctttttcacttttgataaataaacatgtaaaaatgtttcaaaaaaataataaaataaataaatacgaaaaaaaaaa

SEQ ID NO: 61431 - DNA, 2189 bp, Homo sapiens
ctcccaggtgcgcgcttcgctcccggagccgcggaactcggcggccgccatggcgtccaacatggaccgggagatgatcctggcggattttcaggcatgtactggcattgaaaacattgacgaagctattacattgcttgaacaaaataattgggacttagtggcagctatcaatggtgtaataccacaggaaaatggcattctacaaagtgaatatggaggtgagaccataccaggacctgcatttaatcccagcaagtcatccagcttcagctccctactccctccttcctcccttccagcgtttcgacctgtaatgcccacccagggcagattgtaggaaagggcaacctcggatgctggatttcagggttgaatacagagacagaaatgttgatgtggtacttgaagacacctgtactgttggagagattaaacagattctagaaaatgaacttcagatacctgtgtccaaaatgctgttaaaaggctggaagacgggagatgtggaagacagtacggtcctaaaatctctacacttgccaaaaaacaacagtctttatgtccttacaccagatttgccaccaccttcatcatctagtcatgctggtgccctgcaggagtcattaaatcaaaacttcatgctgatcatcacccaccgagaagtccagcgggagtacaacctgaacttctcaggaagcagtactattcaagaggtaaagagaaatgtgtatgaccttacaagtatccccgttcgccaccaattatgggagggctggccaacttctgctacagacgactcaatgtgtcttgctgaatcagggctctcttatccctgccatcgacttacagtgggaagaagatcttcacctgcacagacccgggaacagtcggaagaacaaatcaccgatgttcatatggttagtgatagcgatggagatgactttgaagatgctacagaatttggggtggatgatggagaagtatttggcatggcgtcatctgccttgagaaaatctccaatgatgccagaaaacgcagaaaatgaaggagatgccttattacaatttacagcagagttttcttcaagatatggtgattgccatcctgtattttttattggctcattagaagctgcttttcaagaggccttctatgtgaaagcccgagatagaaagcttcttgctatctacctccaccatgatgaaagtgtgttaaccaacgtgttctgctcacaaatgctttgtgctgaatccattgtttcttatctgagtcaaaattttataacctgggcttgggatctgacaaaggactccaacagagcaagatttctcactatgtgcaatagacactttggcagtgttgtggcacaaaccattcggactcaaaaaacggatcagtttccgcttttcctgattattatgggaaagcgatcatctaatgaagtgttgaatgtgatacaagggaacacaacagtagatgagttaatgatgagactcatggctgcaatggagatcttcacagcccaacaacaggaagatataaaggacgaggatgaacgtgaagccagagaaaatgtgaagagagagcaagatgaggcctatcgcctttcacttgaggctgacagagcaaagagggaagctcacgagagagagatggcagaacagtttcgtttggagcagattcgcaaagaacaagaagaggaacgtgaggccatccggctgtccttagagcaagccctgcctcctgagccttaggaagaaaatgctgagcctgtgagcaaactgcggatccggacccccagtggcgagttcttggagcgggggttcctggccagcaacaagctccagattgtctttgattttgtagcttccaagaggattttccatgggatgagtacaagttactgagcacctttccttaggagagacgtaactcaactggacccaaataaatccattattgggaggtaaagttgttcccttcaagaaacccttttcccttggaagccaaaagagtaaacacgggcccagcggtggaacccaccctttcttggccaagccagcaagctgcggtcggaagaagggttcttcgccaacccaccccccggctgttctcattcaattcatggtcccacttctgcttcttgcaaaatggctggaaaaagtaataataaatatagctactta

SEQ ID NO: 61432 - DNA, 3446 bp, Homo sapiens
acccaactgaattcccgggtcgacgatttcgtggcggaattccagaagagaaaataatccctgtctagatgcagaggacttggttcctattccagtgctcctccggtagcagggaggcgacagaaggtgtccaactatccattaccaagaagaaatctattcgtttgagcctgagacactctttgaggtaaaaaattagaatgaaagaacctttggatggtgaatgtggcaaagcagtggtaccacagcaggagcttctggacaaaattaaagaagaaccagacaatgctcaagagtatggatgtgtccaacagccaaaaactcaagaaagtaaattgaaaattggtggtgtgtcttcagttaatgagagacctattgcccagcagttgaacccaggctttcagctttcttttgcatcatctggcccaagtgtgttgcttccttcagttccagctgttgctattaaggttttttgttctggttgtaaaaaaatgctttataagggccaaactgcatatcataagacaggatctactcagctcttctgctccacacgatgcatcaccagacattcttcacctgcctgcctgccacctcctcccaagaaaacctgcacaaactgctcgaaagacattttaaatcctaaggatgtgatcacaactcgctttgagaattcctatcctagcaaagatttctgcagccaatcatgcttgtcatcttatgagctaaagaaaaaacctgttgttaccatatataccaaaagcatttcaactaagtgcagtatgtgtcagaagaatgctgatactcgatttgaagttaaatatcaaaatgtggtacatggtctttgtagtgatgcctgtttttcaaaatttcactctacaaacaacctcaccatgaactgttgtgagaactgtgggagctattgctatagtagctctggtccttgccaatcccagaaggtttttagttcaacaagtgtcacggcatacaagcagaattctgcccaaattcctccatatgccctggggaagtcattgaggccctcagctgaaatgattgagactacaaatgattcaggaaaaacagagcttttctgctctattaattgcttatctgcttacagagttaagactgttacttcttcaggtgtccaggtttcatgtcatagttgtaaaacctcagcaatccctcagtatcacctagccatgtcaaatggaactatatacagcttctgcagctccagttgtgtggttgctttccagaatgtatttagcaagccaaaaggaacaaacctcttcggtcggtgccgctgttctcagggcctaagtggttgttaagcccgccctcctccagggtcagcagtgtcaatagggaggaggtaacacctctgccgtttcccccagctccatccgtggctctgctgcagccagcctccaacctcttggtgaacaatcccagcaagttgctttaacccatacagttgttaaactcaagtgtcagcactgtaaccatctatttgccacaaaaccagaacttcttttttacaagggtaaaatgtttctgttttgtggcaagaattgctctgatgaatacaagaagaaaaataaagttgtggcaatgtgtgactactgtaaactgcagaaaattataaaggagactgtgcgattctcaggggttgataagccattctgtagtgaagtttgcaaattcctctctgcccgtgactttggagaacgatggggaaactactgtaagatgtgcagctactgttcacagacatccccaaatttggtaaaaaaatcgatgggagggcaagtaagaagagttttgttgtgaagattgtatgtccaaattaacagttctgttttatcagatggccaagtgtgatggttgtaaacgacagggtaaactaagcgagtccataaagtggcgaggcaacattaaacatttctgtaacctattttgtgtcttggagttttgtcatcagcaaattatgaatgactgtcttccacaaaataaagtaaatatttctaaagcaaaaactgctgtgacggagctcccttctgcaaggacagatacaacaccagttataaccagtgtgatgtcattggcaaaaatacctgctaccttatctacagggaacactaacagtgttttaaaaggtgcagttactaaagaggcagcaaagatcattcaagatgaaagtacacaggaagatgctatgaaatttccatcttcccaatcttcccagccttccaggcttttaaagaacaaaggcatatcatgcaaacccgtcacacagaccaaggccacttcttgcaaaccacatacacagcacaaagaatgtcagacagatttacctatgcctaatgaaaaaaatgatgcagaacttgattctccaccttcaaagaaaaaaagattaggttttttccagacttatgatacagaatatttaaaagttggttttattatctgtcctggatcaaaagaaagttcaccaaggccacagtgtgtcatttgtggagagatcttatccagtgaaaacatgaagccagcaaatctttctcatcatttgaagacaaaacattcagaattagaaaacaaaccagtagatttttttgaacaaaaatctttagaaatggaatgtcaaaatagttctttaaaaaagtgtttactagttgaaaagtcacttgtgaaagcttcttatttaattgctttccaaactgctgcaagcaagaagccattctccattgctgaagaattaattaaaccatatttagtagaaatgtgttcagaagttttgggttcaagtgctggagacaaaatgaaaactattccactttctaatgttacaattcaacacaggattgatgaactatctgcagacattgaagaccagctgattcaaaaggtcagagagtcaaagtggtttgcccttcagatagatgagtcatcagaaatctcaaatatcacacttcttttgtgctatattcgtttcattgattatgattgtcgtgatgtaaaagaagaattattattttgcattgaaatgcctactcaaataactggctttgaaatatttgaactaataaataaatatattgatagtaaatctctgaattggaaacattgtgttggtctctgtaccgatggggctgcaagcatgactggcaggtattctggtttaaaagcaaaaattcaagaagttgccatgaatacagcggcatttacacattgttttattcaccgtgaacgtttagtggcagaaaagttgtctccatgtttacataaaattcttttgcagtcagcacaaattttaagttttataaagagcaatgcattaaattcacgtatgttaacaattttgtgtgaagagatgggatctgagcatgtgagtttaccgcttcatgctgaagtacgttggatatcaagagggagaatgttaa

SEQ ID NO: 61433 - DNA, 2531 bp, Homo sapiens
aatgaaattgaaaaacaattgaatgccatcagagataatatcaaaattggagaagatcgtgctgctagacttgacaggaaaatggaagaacagcaggtcagacttaatgaggcagaacaaaagtacaaggatattcaagacaaactagaaaagattagtgaagagacaaatgcacgagcaccagaatgtatggcattgaaagcagatgttgttgctaagaaaagggcctataatgaagctgaggttttatataaccgatccttaaacgaatataaagcattaaagaaagatgatgagcagctttgtaaacgaattgaagagctgaaaaaaagtactgaccaatctttggaacctgaacggttggaaagacaaaaaaaaatatcttggttaaaagagagagtaaaggcctttcaaaatcaagaaaattcagtcaatcaagagatcgaacagtttcagcaagccatagaaaaggacaaagaagaacatggcaaaattaagagagaagaattagatgtgaagcatgcactgagctacaatcaggggcaactgaaagaattgaaagatagtaaaactgatcgactcaaaagatttggccctaatgttccagctcttcttgaagccatagatgatgcttatagacaaggacattttacctataaacctgtaggccctttaggagcttgcattcatcttcgggacccagaacttgctttggctattgaatcttgcttaaaagggcttctgcaggcctattgttgccataatcatgctgatgaaagggtccttcaggcactcatgaaaaggttttatttaccatggacctcacggccaccgataatagtttctgagtgtcggaatgagatatatgatgtaagacacagagctgcttatcatccagactttccaacagttctgacagctttagaaatagataatgcggttgcggcaaatagcctaattgacatgagaggcatagagacagtgctactaatcaaaaataattctgtagctcgtgcagtaatgcagtcccaaaagccacccaaaaattgtagagaagcttttactgctgatggtgatcaagtttttgcaggacgttattattcatctgaaaatacaagacctaagttcctaagcagagatgtggattctgaaataagtgacttggagaatgaggttgaaaataagacggcccagatattaaatcttcagcaacatttatctgcccttgaaaaagatattaaacacaatgaggaacttcttaaaaggtgccaactacattataaagaactaaagatgaaaataagaaaaaatatttctgaaattcgggaacttgagaacatagaagaacaccagtctgtagatattgcaactttggaagatgaagctcaggaaaataaaagcaaaatgaaaatggttgaggaacatatggagcaacaaaaagaaaatatggagcatcttaaaagtctgaaaatagaagcagaaaataagtatgatgcaattaaattcaaaattaatcaactatcggagctagcagacccacttaaggatgaattaaaccttgctgattctgaagtggataaccaaaaacgagggaaacgacattatgaagaaaaacaaaaagaacacttggataccttaaataaaaagaaacgagaactggatatgaaagagaaagaactagaggagaaaatgtcacaagcaagacaaatctgcccagagcgtatagaagtagaaaaatctgcatcaattctggacaaagaaattaatcgattaaggcagaagatacaggcagaacatgctagtcatggagatcgagaggaaataatgaggcagtaccaagaagcaagagagacctatcttgatctggatagtaaagtgaggactttaaaaaagtttattaaattactgggagaaatcatggagcacagattcaagacatatcaacaatttagaaggtgtttgactttacgatgcaaattatactttgacaacttactatctcagcgggcctattgtggaaaaatgaattttgaccacaagaatgaaactctaagtatatcagttcagcctggagaaggaaataaagctgctttcaatgacatgagagccttgtctggaggtgaacgttctttctccacagtgtgttttattctttccctgtggtccatcgcagaatctcctttcagatgcctggatgaatttgatgtctacatggatatggttaataggagaattgccatggacttgatactgaagatggcagattcccagcgttttagacagtttatcttgctcacacctcaaagcatgagttcacttccatccagtaaactgataagaattctccgaatgactgatcctgaaagaggacaaactacattgcctttcagacctgtgactcaagaagaagatgatgaccaaaggtgatttgtaacttaacatgccttgtcctgatgttgaaggatttgtgaagggaaaaaaaattctggactctttgatataataaaatgagactggaggcattctgaaaa

SEQ ID NO: 61434 - DNA, 2161 bp, Homo sapiens
agcgtagtctacactgctgtttattcaaacaatcccctattaatgaatatttggattgactctaatctgcttttaaaaaataaccatggatacaatttgtacttaatacctggaagttaaaaaaactggcactgtcattctcttgatcactctcctgatcctctgacttcttgaattcccatttcctcaactgtaaaacaaggaattttaatatgacttacctatccgggttaaataaaattgcaattcaaaaagtattcccatatatgttaagaaaaactgaaatagccactaaaatgcattcaaaataaataaattatataattatcactacacagattcaccatacaactcatttctacttaagagattcatatagacacaatgacaaaatagattgtgtccacagaaagatcgagagtgaaatttccagaaactatcttagatgaaataattgaagaattcaggttaaatatttattgaacaaatgcagagtaaatgaactaagggctgttataaccttaagttacaacaaacaacttcaaatattcagagggctgtcacacagagaatgaaagacttgctcagtatttctccaaagggcagaacttgagccaagggataaatataagcaaccaatgggctgcaggatagttgtacaaagtgtatcatgtatcttcatagcttctttgcccatataatgcattccacacttaagtttctccttctaaaaggcgacagcacaagttaatatgtctcataaatgtcttaaataagttgcattttcatggcaagccctccactgccagcaatggatatactcacactattggaaaaaatctaaagttaacaaactggtttagtatggaaatggtctatttgttcctcagctatgtttctgtatcttacattagtggctctcaggaggtggggggtgaaaagagagcatgttctccaaagagggtgaatcataatccccagtgattcagatactgtgcctggggacaatctttcttcaagtccaaatgaatcattataattatcaaccaatggtacatataagagtacggcatgtgctgggacagagaaaagacagttgacaaacactattctacatgaaacaggaaatcttattttatgagtcactagaaaactaactgtaatactgacaggctccatccagattattaaatactacaaaatgagaactgtttcaacaactattcagcataacgtttatggacaaaatgtatatagtatatcttatattctatatgtattttatcacatagtaaggaatgctgaggtgcttaagccatccaataaattgaaaatacaaactttacatttctacgtttgtcagtatacaggattctgaagatgaatcttgaactcagagtgataaatcagttttcaaggaaagccacataatccgtcagtctggctaactgctgttcattgggtattgggggaactggagcaggctctgataagggaataaacttgttaaaggaaacatccagggcccctgcaactggctttctgggcagaaccattcttgtggtggaatcagcttgccatccttgttctaatatgcctttcacagcctcttctacaggaagtccaacaaaggctgcaaaatcatcggcgatgattgaagtatacgcttgagagaccagggcaaaggcgcgtctccttgttgcatctctaagtgcttccataattggctggaccgtctcagaccactggtgagcgttgatggttgtatagatcccagggaaatctctctgccagattctttgtcctactgaccaaattcccccaagttcagaatttgcagattttatagcaggtggtattcttttccaaagatatcttgcattattcatgtcattatggagcaaatataaagctagaagctgaccatacactgggggtgtagcaattcctccaggggctattataagaaacaaattcgacagattcctgaagcattctgattctgcccattacatcaagcgtcctcgagctcctggttctcgcactgatccagcaactttttgaaactaaaggcgctttccgccatcaccgccactggcatcttcgcggccggcctcgccgctgcaccgtccggacaaacaaaaaccagcccacgcgtccg

SEQ ID NO: 61435 - DNA, 2293 bp, Homo sapiens
gtgatcatagctcactgtcaactttgaacacttgggctcaagctatcctccctcagcctcccaaggtgggaggtacagatctgggcataggaaccaatcagaaacaatcgcttcagcaatcaagaccattgttcatcatggaggaacccatggatacctctgagcctctatctgcattaccattcactgggcagcagtcttttgagccaagtggcaaatttggacagtatccatcgatgcagatgaaccacatccaggcactggggaagtggaggacatagaacagctcaatcagtgtttgatccaacacttccatctcattaagacaagtttgatttttctttgctttttatttcatggaatacatgagaatctcttaactgttggagtttccaaggaggcatacctcatgacttcagttaatggaaagaacaaaactaaaatgctgtatggccaaagccacaaagggaaggatccgcaatttacattcttggagctatcatctgtactgtactgttgtgatctactgattggcattggcatagtagtaggggtcaagtgacagaatccgtgccagcagtctccaggttcagaagcaattcaagaccctgatgatagctctccagcaaccaacacatggtgattgtgccaacttgttgctcagttataatgcagggccagtgattggtttaagtgaagaccatggttgagatcatttgtctttggtctaatagaatttgagtctagtagaatttgagtctccagggaaagagctacttgaccaaattaaactagtagcaggtagagcatgaatgacagcatattataccatcaagatgttcttagagcagtgtatggatggatcgattgtactgccatcagttgtgactgacgttgtattcaaggagaaagagaaacttgtttagaaagcactttgaaagtttttttgagtacgggggtgccctgtatcaccccgttatggttgaactttctccttcaaaattaccagacttggcagcagtggcaaattattgggctaaaagacttaatcagacatattctgggttcaaggctcctaatataatacctggtgcaaacattatacttccactcattcagatggttgcatcctgccaggcatccagtgggactgggaatatggacacttgaacattaaacatcctgaagaattttggaatgacaggttacaagtgaacataatcagttctctatattaaaaaaaaaaaaaagatttgggcatagattgggctcacataatctttagagagattttttcatttttgtgaaagtacagaaattcttaactgcttatgaaatgctgattgttaaacagcatccacagctattttgtgttgtttccctgaccccaccctgaagaaaagaaaaattatggcatattgaaaacagcagtatgatgtaagagaaaagatcacaaattccttgagggtgggtcttttccatactcataagcctatttataatattcagagtaatttattgacacatattaatattccctcctatcccattaattgccaaatcatcaaacatttattgagcatctactctgtgtagggtgtaagcagtactggggacttacagtgataaaagacatagttttagccttaagtgatgtactgtttcactgaaaagatggaattttagaaacccagttatttatggaatttttttttttggttttcctttttttttttggcagtggagtcttgctctttaaatagagcaaggctagtctggaactcctgggctcatgtggtcctcccgccttagctttcagtgtagctgggactacaggtgtgaacacagcttggaaatctcttaaccatgggagttaagtctcaaaattctggtgatacaagtggttgaaacttaaaactgtatttaaaaaataggattcgtgaatttgagatagttcataagtctgcaaaaggctgtataaatacatattttacatttactattattaattttgtagtaaatttgagtacagcactctctttatctgtggaaacttcagactctcccctattactttaatttcagtgagacattattaaatataagtgggcttacacatttgttttgctttactgacaaataatacacaacttggaggcttttttttcctttctattcttcctctaaatgttcaacacttttctgattttgtgatttgaggttgtttaatagcttcctgaggctccattgagaccgtatatacgtgacacttaacagtctagccttcctcggg

SEQ ID NO: 61436 - DNA, 1378 bp, Homo sapiens
gtcgggcctcctccagtaagaagcgtgggcgagtagtggtgtcgccagtggcaactgaagggagtaatggagataaaacaaaagcgaaggcgaagttaaagcactccacgagttccctcggattaaacgccggagagagcgtgaatttgcctcggggacgcctctccaggaatgtcggattgcacatcctattgtaaaatgtacttactgcagatcagaatttcaacaagagagcaaaactaacacaattttgtaagaagtgtgctcaaaatgtgaagcaatttggggacggccaagcctttttcagtactgtaacataatttcagcattttttggtaccaagtgtcagcgttgcacaaattcagaaaaaaagtatggaccacctcagacctgtgaacagtgcaaacagcaatgtgcttttgatcggaaggaggaaggaagaagaaaggttgatggaaagttattatgctggctctgtactttatcgtacaaaagagttttacagaagacgaaagaacaaaggaagagcctgggatcttcacattcaaattcatcttcttcatctcttactgagaaagaccagcatcatccaaaacatcatcaccaccatcatcaccatcaccatcgtcacagcagtagccatcacaaaatcagcaatctaagtccagaagaagagcagggactgtggaaacagagccataaatcctctgcaacaattcagaatgaaactccaaagaaaaagcccaaattggaatctaagccatctaatggagataggtgtatgtaatgtgtgccattagtaaggtaatttgccagttgcatccatttctgtcagtagctctataaatcagtcagcagatagtgggggaacagacaattttgtccttataagtcaactgaaagaagaagtgatgtcacttaagcgtctcttacagcagagagaccagaccattttagaaaaagataaaaagttaactgaactaaaggcagactttcagtaccaagagtcaaatttgagaacaaaaatgaacagtatggaaaaagcccacaaagaaactgtggaacaacttcaggccaaaaacagagaactactcaaacaggtcgcagcattatcaaagggtaaaaaatttgacaaaagtggaagcatactaacatctccttgagaaagtcatttgtttagcatttcttcttacaatgtaaatttggggaaaaaaaattctgtgaagcccttaaattctgtgtagtagaaaaatatttttgcacaccaaatgaattggtgtgtttcctgttcacttttgtaattgatatacagcattttttaagttgtaaaacattcaaataaaacttcaactggtttgaagtaactttttaattaaaa

SEQ ID NO: 61437 - DNA, 6430 bp, Homo sapiens
  misc_feature (1)...(6430): n = a,t,c or g
ttgcgaagatgatgatatggccaagccaaggaagggaacctacagtgaagagtacaggtgtctctgatctacatatccaagaactgcaagaaaaatgtccagatgggcatcagatacctagtccagtccttggcaaaagtctgggctttggaaaccaagggcaagaggcgatgacaactaatctatagtaattaaaactcccacccccctattaagactccaccctcccacatcccccaagcgtgattttgcacaacaagttaaataaaagtaaactgttttattaaaagatacagcaaaggtacagatacagagatacatacaaagatacagatatatatatatatttacatatatatacagtcttgctgttttcatgtgcactatatttagcagcacattatttaatcaggcggcattttaatggggttgttttgacacttggcattattaagatacaactatagccccgtggaaatttcaacgtttgaattccacttctccgacttttaatagtagcaaagaggggaaggagaagggaatggagtaccaaggctgagcattaggttaaacacaagaatttaaaagggccaaggtagcaaagggaaggaaaaataattaaaattaaaggctatctgacaaacaacccagagaaacagtaagaaaccatcattaagggcaatgggctatgtacccaagatgctcacatcaacctacaatgaccttttccaatccagttcttgtgttgaacctgaggatctgccctctccgatcaatccctccacccgataaatttgctaccaccaaaatctagagctatagagccttgaaagcaaaatcgggaagctaaatagttgtaccttggactaccttcccacaagtgcagggagggcccaatgttgggtagggatgtgataacactgttctctgcaattcgatgcttttcactttgtggcttggttccacaaagtgaattgcatcgagttactgtcaaatgagaagctgcgggttgtttcatctgtcgtctaacccggccctgccgtttaacccggccctctgagggcaaattgctgctgaaaacattatcatcatctttgttttcttcaccatttttctccacaggaacccattctccataaacactatccgcttcttttttccgatgttgagatccagatgatacagggaattcttttgttaatgttacctggctttttggtggagttggttttgctgcagcaatattcagattgaaaaaaataggtttgggttcactgagtttaaagggatgatgataaaaaggaggttcttcttcctcttcatccgaaacatgaggtttattcactattacatcatcatcttctttactctgtgcgatctgtttacatttctcagttagttcttctatagtagctcctcctgactttttagcaactttctcttctatagtaggtggaggtgcaggctttaggtttggtggtaaagggacaccagccttagcacacatggcagctgcattagctttggctatttcaagtaattgagccttatccaaatctgtcagacgtttgggtgatctgcctcgttcagaagacctggatcttttacgacggatgggagatctgctaaaccttcttcttaagggtgttcttgatcgccttaatctgactggtgagatactgaagcttcgtcttcttaccacagaccttgatcttctccggcggcttggggtgcggctccgacggctaggggtgcggctccggcggctgggggtgcggctgcggcggctgggggtgcggctgcggcggctgggggtgcggctgcggcggctgggggtgcggctgcggcggcttggggaaatgctaaagctccttcttctacccacagatctagaccttcgtcgacgacttggagtatgactccgactccgacgacttggggttcgacttcgagctctaactgtctttcggttatccctggagcttgatctttttctttttctttccctagacttggatctgtgctttggagatcttttgcgcttctcttttgatacagatcttcttcctctagactttgatcttgatctgctgcttctcctcctgcggtcttggaacgtgaccgtgaancgtgtctgaagagcgatgagacttggacttagatgatctctttcttgccctagaacgagattcactggtaagcttgcgtgatttgtgttcagaagatttggaacgcttacttcgagatcttaatgaagagtctcttttcttctctttctcccccttatcacggttcttatttttcttgcttttttcgtgagtgtccttaacttttacaaaaatttcactaaccacctttttcccccgaagaaagacccggaagctctttcctggcatactactttacaaccggggctggaataaagattctgtaccggtccaaaatcacttgcaagtaaaaggcccttcaaaggccagctctaaggcttgtaagacggttccatgtcctttaggaagtaacggtctcactaaatctgcttcattaatatcctcaatattgggcagaaatcctgaattcaggcagtgtctctttaggagggggggagtacttctttttctcctccactactttctttaagactgaatcagagctgctagtgtctgttacctctcttttcagggtaatggttcttctgtatccttactaacaaggttattattagatggtaaatcaagatgaatatctttagcaggcaaaggcccttcaatgtcagcttcactaccaccactaggactggtggaaattaccatgtcatgttcagtatcttgagtagttaaagataaatcaacatcatatttattaactaaactgagagtagatgctgtggtaaattcaatacccttactagttcctgttgcatcaggttccagagcaaaaggaccagtagaagatagagtttctcctgcatcagcttcactaacaccagggtaggtatccaatactgtgcactgtttagtctcactggtgggcaaaattttctcttcaccaatttccccaacaggactagtaccagcagcacacactgtattatgttccatctctttagcaattaaatgattatttatattaaggtctatatttataccatgttcactttcgtaaaagtcacctttcaggtgttcctcagcatgtggttcttcacctgaatgcaatgcaatctcctgcatgccaatctctggagcaagattttgatcaccagaggatagattaattcctttcataacatgtgatgacatgatactagattccagtatcattggtgtggactctatagccacctcagttggtattacttgagtctgctctgagactgtgacagcaggctctgaaactgtcacagtcgattcctggacagaaacagatggttctgaaacaatcatagaaggttgaaggactgacaccgctggttccagaacaggcacagaaggctccagcgcagaaacaactggcacaggaatggtaacatagtctggctcagccacaacaggaggctccgggacagtcacaaccgaaggctctaggacagttacagtcgaagactccaggacagtcacagtcgaagactccaggacggtcacagccgaagactccaggacagccatagctgaagactctggggcagccatggctggcggctccagaatgctctctgccagcactggagtagttactgctggaaccaacaaggatgtagatacttctgaggcaacatgtcctgaggctctcatggaatcaaatgtttctgctgtctctgacataacaggaggctctgatgctaacacagttggttcagctgacatggcgggagtttcagataccatacaagtcactggtctctctggaacaacttcatgttcttctgctactactgcagactctacaggtgttaacgtaattgaagattctggctctggtggtggttctggaacagtcacagcagcctctgatactaaaactgagggatctgatgctgacactgaataatcagtaggcactgctgaaggctccgaaatctcactttgactcacaggaggctcaggctgcgatacagactcttcagatggtaatgatggcacctctgtaggccaagtattttcagctgttaatgctgactgctcagtgggcaatgctggaccctctggtggttcctcaggaggcaatggtggtgtcattggtggctcctcaggtggcaacggtggcattgttgggggctcttcaggaggcaaaggtggcaccatatatgcctctgtatatgtgtcagtgtaagaatcggtgtaagaatcagcagccatagacatcattgaacgatcagcagtataagatgacatcatagatcggtcagctgcagagtacgatgacatcatagaccggtcagcagcagagtatgacgacatcatagaccggtcagcacccatggacatcatagatcgatcagccattggggacatcatggagcgttcataagctgacatcatggagcgttcataagctgacatcatagagcgctcagccataggggacatcatagagcgctcgtaggctgacatcatagagcgctcgtaggctgacatcatagagcgttcagccataggggacatcatagaccgctcataagacatcatagagcgttcgtaagatgacatcatggaacgttctgcagcataggacatcatcatagaacgtctagatgctaacatcaggggtctaggtgctaacctatatggcctgggtgctattctataggacctgggtgctatcctgtagggtctaggtgacatcctatagggatcaggagttagtctgtagggatcatggcctaatctataagggtcttgtcctaacctgtaagcatcatgacctaatctataggggtcatggcccaacctatagggatcctgagctaacctgtaaggatcctgagctaacctatagggatcaggagattttgaacccaacatagcagagtcttgggtactagacgctaacatctgggcatccatggtaccagacgctaacatctgagcatccatggtgccagaagctaacatttgagagtccatagtgccagatgctaacatctgggaatccattgagctagttgccaacatctgggagtccatggtgctggttgctaacatctgagaatccatggtgctggttgctaacatctgggagtccatggagctggttgctaacatctgggagtccatggagctggttgctaacatctgggagtccatggagctggttgctaacatctgggagtccatggaactggttgctaacatctgggagtccatagtgctagttgctaacatctgggagtccatggagctagttgctaacatctgggagtccatggagctagttgctaacatctgggagtccatggtgctagacgctaacatctgggagtccatggtgttggatgctagcatctgggagtccatggtgttggacgctagcatttgggagtccatggtattggatgctaatatatgggtctccatggtgttagaagctaatatatgggattctggggccatcaagggatccactcctactgttacagaagtctcccccactaatgtagtaggcagctcctgtgctaccgtattataggattccagcgctgtcgtcgagggcacctccagggactgcgacacggtcatcgttgacagctccgatgttgtcaccacagactgaacagagatctccagcgccacagttgccacaggctgcccaggcaactctggcgccccaggctgccctggcaactccagcacccctgttgccagaggctgccccaaaagctccagtgctccagctgccccagactgccccgagaactccagtgccccagctgccatgagcggcccaggcaactctagtgccccagttgccacaggctgccccgacaactccagtgccctagttgccgaaggcagccccggcaactctggcaccccagtcaccgaaggctgccccggcaactccagcgctgtcgttgccactggctgtcctggcaactccagcaccatcgttgcctcaggctgccccagcaaccctgttgccgttgtcacctcaggatgcccaggatgttccaccgttgtcatccccacaggctgctccaactctgtcgtcgtcacaggttgttcggtcaactccattgctactgttaccgcaggctgctctggcaactctactgctgctgtcaccaaaggcagccctggcaactcctgtgccatcacaggtggctctggtacctcctgtggtggctccaaccccatggatggtgctggaagccctggcaattcctgcgacaactgtggcactggtgtcacagagggccctggcaactcagacgaaa

SEQ ID NO: 61438 - DNA, 2473 bp, Homo sapiens
cccacgcgtccgcaaggagctaaggccttcagtgtccccttccttacccaggtttctcacagaatggattcccagcgggaacttgcagaggaactgcggctttaccaatccacccttcttcaggatggtctaaaagatctcctggatgagaaaaaattcatcgattgcaccctaaaagcaggtgacaaaagtcttccttgccacagattgattttgtcagcttgtagtccttacttccgtgagtactttttatctgaaattgatgaggcgaaaaaaaaggaggtagtgctagacaatgtggatcctgctatacttgatttaatcatcaaatacctgtactctgccagtattgatctcaatgacggaaatgtgcaagatatttttgcattggccagccgctttcagatcccctcagtgtttactgtctgcgtttcttatcttcagaaaagacttgctcctggtaaactgtctagccatcctaagattaggacttcttcttgactgcccgagactcgccatttctggcccgtgaatttgcgtctgatcgctttgtacagatttgtaaggaagaggactttatgcaactggtctccacaggaactgatctcagtcatttcaaatgacagcctaaatgtagaaaaaggaagaagcagtatttgagggcagtgatgaaatgggtgcggaacagacaaggaaaacagggttaaaaacctttagtggaagtgtttggattgtatccgttttcgccttatgacagaaaaatattttaaggatcatgttgagaaagatgatataattaaaagcaacccagacctccagaaaaaaatcaaagttctaaaagatgctttcgcaggcaaactcccagaacctagcaaaaatgccgcgaagactggggctggtgaggtgaatggtgatgttggtgatgaagatttacttcctggttacctgaatgacattcccaggcatggaatgtttgtaaaagacctcatcctcttggttaatgacacagcagcagtggcttatgaccccacggaaaatgaatgctaccttactgcactggctgagcagattcccagaaatcattccagcattgttacccagcaaaatcagatatatgtggtaggaggactatatgtggatgaagaaaataaggatcaacctctacagtcatacttcttccagctcgatagcatagcatctgaatgggttggacttccacctctgccttcagccaggtgtctcttcggtctgggagaggtggatgataaaatctatgtagttgcaggcaaagaccttcaaacagaggcttcgctggattcagtattatgctatgatcctgtggctgcaaaatggaacgaagtaaaaaaactccctatcaaagtctatggccataatgtgatttcacataaagggatgatatattgtctaggaggaaagacagatgacaaaaaatgtacaaacagggtgtttatcttcaaccccaaaaaaggagattggaaagatctggctccaatgaaaattcctcgttccatgtttggagtagcagtccataaaggcaaaattgtgattgcaggaggtgtcactgaagatggtctttcagcttcagttgaagcttttgaccttacaacaaataaatgggatgtaatgaccgaatttccccaagaaagaagctccatcagtttggtcagcctggctggatctctgtatgcaattggtggttttgctatgattcaactggagtctaaagaatttgcacccactgaagtcaatgacatatggaagtatgaagatgataaaaaagaatgggctgggatgttgaaggaaatacgttatgcttcaggagctagttgcctagcaacacgtttaaatctcttcaaactgtctaaactgtgaacaaggtgacaaaacataatagattgggaggtggtttgtttggtgaatggggctttaatttattctgttttttaaaagcttgtacagacactcatgtagaaattattcaagaagttattgtctaagagatgagcagtaggtaagaaaacctcagtcattgactcttcaatgtaatgatcagagtttaaaaccattttctaataataaattaaatcttcagttgaacaaattattttgtgaatctgtttcactcaatggattgtaaagaaggctcctaaatttgagttgtttgctaatcatttcatttgcatcattagggtatccttaaactgattttctattacaattggaagtggagaatatgtgcatctacactaaaaaaatgtttaagatatcaaaaacctctcctcgtgcttcaaaatgacaggaatcctgtgcattatactaagaattacatgccataagatgactgacttcagaaatcctacttcagaagtgtaataaatggatgaggaaatcgtttgatggggaaaagtctcttgtaagtaaaagtagtcaaattcaaatggcaaaaaaaaaa

SEQ ID NO: 61439 - DNA, 1894 bp, Homo sapiens
  misc_feature (1)...(1894): n = a,t,c or g
cctcctgagagttcgccggcccgggcccaatgggnttgttccaaggggtcatgcagaaatacagcagcagcttgttcaagacctcccagctggcgcctgcggaccccttgataaaggccatcaaggatggcgactgaagaggccttgaagaccatgatcaaggaagggaagaatctcgcagagcccaacaaggagggctggctgccgctgcacgaggccgcatactatggccaggtgggctgcctgaaagtcctgcagcgagcgtacccaagggaccatcgaccagcgcaccctgcaggaggaaacaagccgtttactttggcaacgtgcagggggcancttggactgtctcctgtcactgctccaagcaggggcagagccggacatctccaacaaatcccgagagacaccgctctacaaagcctgtgagcgcaagaacgcggaggccgtgaagattcttggtgcagcacaacgcagacaccaaccaccgctgcaaccgcggctggaccgctctgcacgagtctgtgtctcgcaatgacctggaggtcatgcagatcctggtgagcggaggagccaaggtggaatccaagaatgcctacggcacacccttgttcgtggccgcccagagtggacagttggaggccttgaggttcttagccaagtacggggctgacatcaacacgcaggccagcgacaacgcgtctgccctctacgaggcctgcaagaatgagcatgaggaggtggtggagtttctgctgtcacagggtgccgacgccaacaagaccaacaaggacggcttgctcccgctgcacatcgcctccaagaagggcaactacaggatcgtgcagatgctgctgccggtgaccagccgcacgcgcatacgccgtagcggcgtcagtccgctgcacctggcggccgagcgcaaccacgacgaggtgctggaggcgctgctgagcgcgcgcttcgacgtgaacacgccgctggcgcccgagcgcgcgcgcctctacgaagaccggcgcagctccgcgctgtacttcgcggtggtcaacaacaacgtgtacgccaccgagctgctgctgcaacacggcgccgaccccaaccgcgacgtcatcagccccttgctcgtggccatccgccacggctgcctgcgcacaatgcagctgctgctggaccacggcgcgaacatcgacgcctatatcgccacgcaccccaccgccttccccgccaccatcatgttcgccatgaagtgcctgtcgctgctcaagttcctcatggacctgggctgcgacggcgagccctgcttctcatgcctctacggcaacggcccgcacccgccggccccgcagccctccagcaggttcaacgacgcgcccgcggccgacaaggagcccagcgtggtgcagttctgtgagttcgtatctgccccagaggtgagccgctgggcggggcccatcatcgatgtcctcctggactacgtgggcaacgtgcagctctgctcgcggctgaaggaacacatcgacagctttgaggactgggccgtcatcaaggagaagaaccacttgttctggaaaactcaccacttgacttcagagctttctctccaaagactaagatgaagacgtggcccaaggtagggggtagggggagcctgggtcttggagggctttgttaagtattaatataataaatgttacacatgtgaaaaaaaaaaaaaagggggggccgttttaaagaatcaagttttatttccgggggctggcaaggtaaaattttttttttggggcccccaaaatcaatttccgggcccgggttttaacaacgtcgggaggggaaaaccccgggggttccccatttaattcgcttggagcaaaannnnnnnnggtggannattcag

SEQ ID NO: 61440 - DNA, 2699 bp, Homo sapiens
  misc_feature (1)...(2699): n = a,t,c or g
gttttctccacatggaaacttattggcgcttgcctcacgagacagaaccgtgagactctggattcctgataagagaggaaaattctcagaatttaaagctcatacagctccagttcgaagtggagacttttcacctgatggccagtttctagctacagcttctgaagacaaatccataatagtatggagcatgtatcgccagcgcttcctgtattccttggatcgacatacacactgggtacgctgtgcccaatttncacccgatggaagactaattgtgtcatgtagtgaggataaaactattaaaatttgggataccacaaataagcaatgtgttaataacttctcagattccgttggatttgcaaattttgtggactttaaccctagtggtacatgcatagcttcagcaggttctgatcaaactgtgaaagtctgggatgtaagagtgaacaaattactacagcattaccaagttcacagcggtggagttaattgcatatcattccatccttcgggtaactatctcatcacagcttcttcagatggtacccttaagattctggacctcttaaaaggaaggctcatctatacacttcaaggacatacgggacctgtctttactgtttcattttcaaaaggtggagagctatttgcatcaggaggtgcagacacacaggtcttattatggaggactaactttgatgaattgcattgtaaaggtcttaccaaaagaaatctcaaaagattacattttgattcaccaccacatcttcttgatatctacccaagaacaccacatccccatgaggaaaaagttgagactgtagaagatttttttcttcatcttttgagattaatccaaagcttgaggtaatcgatttgcagatctctactccccctgttatggatatcctttcttttgattctaccacaacaacagaaaccagtggtaggactctgccagacaagggtgaagaggcctgtggatatttcttgaacccttccttaatgtcaccagaatgtttgccaacaaccacgaaaaagaaaacagaagacatgagtgacctcccctgtgaaagtcaaaggagcatacctctcgctgtgactgatgctttagagcatattatggaacaactcaatgttttgacacagactgtttcaatcttggagcagcgactgactttgacagaggataagctgaaagactgccttgaaaatcagcaaaagcttttcagtgctgtccaacagaaaagctgaataaaaaattcattttcatttgttgggcagaggcccaataaatgaacaaatgtacatacactcaggaaggtagtacaagatactccatacaacacaaccatgtgctatttatcatggcatttcttaaaagggtgagcaacagaacaaaaggcagaaaaggcatacctaaggactaatttaaacacatatcaatgtgaaggactaatttaaattactatcatttatgattgcagtaataaagtgataagcattcaagcaactctgtattttccccatattattttaaatgtccattttcatttataggccaaatcctgccaggaaagtaaccagatctctggatttcactgttaagtcatttcagattgaccatattcagacagtcatggggtgaaataattcacttacctccaaaatagcatcctatatgccaataatgagttattgatctgactagttgtatgtctttctgttcaaaatagaaattatcctttcttactaatgccttgaaagaatgaacaaataaaaattcccagaccacagaatttccacagcaagaatacacttattttaattaacaatagcacagatatagcatagggcagtgggttttttagttaatttatggcgtactttgtttatccattggccaacctgaaggaaatgaaactcacctatctttctatcacagatgaatgtgctagatgaatgatttgggttgtatctgatcatggttcacaaaaattatgttagtgtgttttcagtatgctaaaaagtcagagtgatacaaaagtgatatttaaaaatatacacacatgtatgtacacatgcttcagaaatattgttgcttagggtgatttgggcagctaaatagtaagtactttttaaaatttttgcatcatcatcttcctatttaatgaattgtgatttaaaacaaaatgaaaataagccaggtattctaaaagatcctggatacaaattaagaattttgctttattttaaaccaaattgagattaaattgaagaaaagcaagcaaattaatttcagcttgattatcaacctgtatcaagaacaaaaatgggaggaggtgtccacatttatggtgtgtataggtaacatggggaaaatgctattctgtgttttggaaaagaagaaatagtgccgtcctatttatttctatatttagaaatttttctcaaagaaatttcaattgtatctatgagatgggtttctaagtatcttattgtgtgttataagtgccttttaatatcatactaagtgtgagcttctggacattttcaagagcttacaaaaactaagtggcattgtatttttataaccccattgagaagactaagtaagaaatgaaatgtcctatcaattttattttgtcatgcttcaaacaataaagacatttctgctttaaaagaaaaaaaaa

SEQ ID NO: 61441 - DNA, 1529 bp, Homo sapiens
ctgtattgtgcaaatccactgaatatgtttgttagttccagtactattttggttgagtctgtgattttctacacagaaggtcatgtcgtctacaaacaaatgtaattttacttctttctttctgatttggatgagtttgatttcttttgctatttaattgctctggctaggacaggcagtattgattgaatagaaggggtgagagcattcttgcatcatgtgagatcgtacaggaaagcattccattttccctgcttggttatttactcatttgtcatttcatggatgttctttctattgttgaggtaaatttccttttctattttgtttaggatttctatgatgactggattttgaattttgtggaacgctttttctccatctactaaggtgatgtggttttaatctttcattctgttctagtggtatataacattgatttgcttgaatatgttgaaccatccttgcatcccagaaataactggcacttgaatatctacatttttttaatatcctcttgaatacagttttctaggacaagggatcttcaagaagttctggaaaaatacatattatgagaaaattgtgcatgaatttcacaatttttgcaccaaaataaactagtgctagtctgttataacatgtctgaacaggctctagtttgatgccctcaaaaggataagacatgagtataaaaagagactccatcaaagcaatataaattctgatgaaattgaaacaagaagaaacattaaatttatgatgagaccagatgcagtggctcaggcctgtaatcccagcattttcagaggctgagacaggtgggccacatgagcccaggtattcaagaccagcctgggaaacgtggggaaatccccttttctacaaaaaatacaaaaattagctgggcatggtggcacatacctgccgtctcagttattgtgaagtctgtgcagggaggatggcatgaacctgggaggtcaagattgcagtgagctatgatcatgccactgcactccagcatgggtgatggagagagatactgtcttaaaaaaagaatacttgtggtaacgtttgggtagaggaataatgaaatcattgatgctttataaaaaggttatggggacaatgcccaaaagaaataaacagtttgtaaacggataacttattttgagttagggcaagacaatgttgacagtgatgcatgaagcagcaggcagaccttccacatcatttttacagaaaaaaaaattaatcttgttcatgctgcaatgaagaggactgacagcaaacagcagaaacatagtcagaatttagagaacagcctggttaacatggtgaaacaccatctctagtaaaaatacaaaaattagctcagcatggtggcatgcgcctgtaatcccagctactcaggaggctgaggcaggggaatctcttgaacccaggaggtggaggatgcagtgaactgagatggcaacattacactctagcctgagcaacaagagcaaaactccatctcaaaaaaaaaa

SEQ ID NO: 61442 - DNA, 1719 bp, Homo sapiens
tttttttttatgggaaaggaaacaatttattatatttgaggaaaatcattaaaatacatgtaatatgtttccaattcactgatttaaaggcatatagatttaatttttaaatacactttcaaagctgttacgcacagttccatagtccaggtggtcaatttcttcctctcaaagttagaaaacacttgaaggacacgggattcaaaaaaacctttattaatttttaacactttctttttccttccttaggatcttgttttggtctagcagatcgagcaaactgaaccaccatgggttttccaaaaaagcacatatccattagcttcctttaagggcttttgctgctgctttttcattaggaagtccaatgaaagcttgtcctttcatacgaccttctttcatcaaacgtatatcaaacatgatccgctgtgtttctgatgaaaagtcaacatatcttccaaaaatatatttaaggtccttttcttgaacatgtttagctaaattctttacataaattctacagtttggttcacccggttcataacttctgaaaactgaaagtgtttccatttcttctctagaaattctgcccttttccaattcccttctagaaatacattgtgaaggcatttcatcagagtcttctttaatctcctctgtgatgtccaaattaggtttggggaagatttttccaaatcctatattggatgcatcaacttcagtagcaggtaaatcatgatttttttcctcacaattttgttccttttctaaatctttcttaaatgcagctggcatgtcggtagatatatggaattcaattcttttgttacctacaggttgtggttggtcaaatacatctgaaggtaacagcgctggatgtaaactgctgtgtgaaggacacaaaggtgtattcaacatatcctttatttttctcttttttctcacatggcgctgctttattgttttaggtcttttgggctgaagatttgctagttccattaatttgttcattctctgtcggtcctcatcatcagtgctttcatattctgattcttcactagataattcctcatcctcgtctggcaaaggaggttcctcaggtggctgaggagatgtgggtggaagaggtgcatgcaatggcatatagtcttcatacatgggaggtcgcgcagtaattggtccaaaaggtgtgggcaaattcattttattcataagatgaaggacctgtacatagaacttaggcacgcttgccaaggcatttacaatgtttgctaggattgtgctggaaggtggtgggtacatatacttgaggcatgaatttaaaggaaaagtcagcccatggtttggtgcaattccattttctactgttaaataaccaagttcttttttttctttttccttccttaggatcttgttttggtctagcagatcgagcaaactgaaccaccatgggttttccaaaaagcacatatccattagcttcctttaaggcttttgctgctgctttttcattaggaagtccaatgaaagcttgtcctttcatacgaccttctttcatcaaacgtatatcaaacatgatccgctgtgtttctgatgaaaagtcaacatatcttccaaaaatatatttaaggtccttttcttgaacatgtttagctaaattctttacataaattctacagtttggttcacccggttcataacttctgaaaactgaaagtg

SEQ ID NO: 61443 - DNA, 5769 bp, Homo sapiens
tttcgtcaggaatttcccttcaaggtagcaggagatgaacgcgtgctgctccaggattttacagaactgattctgcagcaaagacaaatgttgcctgtatttgccagatagtataaacaggagcaaaagttgcacagctaaaccaggggctcattcccaggacagacatgcagttatggattccgaaagacaagtcaaggacactgatgacattgaaagtcctaaacgcagtatccgagacagtggctacatcgactgctgggattccgagcgcagcgactccctctctcctcctcgccacggcagagatgattccttcgacagcctggattcctttggctctcgctctcggcagacgccttcaccagatgtagtcctcaggggaagcagcgatgggagaggaagcgactctgaatccgacttgcctcatcggaagctgccagatgtgaagaaggatgacatgtctgcacggcggacttcccatggtgagccgaaatcagcagtgccttttaaccagtacctcccgaacaaaagcaatcagacggcctacgtccccgcgcctctgagaaagaagaaagcagagagagaggaataccgcaagagctggagtaccgccacctcccccgctgggttggggaagaaggcccttcaagattacggtccgagaacttcctgtgtctgaatgacgcagagagcaccagcatgtttgacatgcggtgtgaggaggaggccgcggtgcagccgcacagcagggcccgccaggagcagctgcagctgataaataaccagctgagggaagaggacgacaaatggcaagatgacctggctcgttggaagagtcgtaaaagaagtgtttctcaggacttaatcaagaaagaggaagaaaggaaaaaaatggagaagttactggctggagaagatgggacaagtgaacgaaggaaaagcatcaaaacctacagagaaattgttcaagaaaaagagcggagagagagagagctgcatgaagcatataagaacgctcggtcccaggaggaggcagaggggatccttcaacagtacattgagaggttcaccatcagtgaggctgttctcgaacgcttggagatgccaaaaattctggaaagaagtcattcaacagagccaaatttatcctccttcctgaatgaccccaatcccatgaaatacctgcggcaacagtcactgcctccacccaaattcactgccactgttgaaaccaccattgctcgtgccagtgttctggataccagcatgtcagcaggcagtgggtctccaagcaaaactgtcactcccaaagcagtgcctatgctgacacccaagccttactcccagcccaaaaattctcaagatgttctgaagacctttaaggtagacgggaaagtcagtgtgaatggagagacggttcatagagaggaggagaaggaaagagagtgtcccacggtggcacctgcccactccttaaccaaatcccagatgtttgaaggtgtggccagagtgcacgggtctccactggagctgaaacaagacaacggtagcatcgagatcaacataaagaagccaaactctgttccccaagagctcgcagcaaccactgagaaaacggaaccgaatagtcaagaggacaagaatgatggtggaaaatcaagaaaagggaatatagaacttgcctcatcagaaccacagcattttacaacaactgtgactcgatgcagcccgaccgtggcctttgtggaatttccctccagcccccagctgaagaatgatgtgtcggaagaaaaagaccagaagaaaccagaaaatgaaatgagtggaaaggtggagttggtgctgtcacaaaaggtggtaaagccaaaatctccagaacccgaagcaacgctgacatttccatttctggacaaaatgcctgaagccaaccaactacatttgccaaatctcaattctcaagtggattctccaagcagtgagaagtcacctgttacgacaccttttaagttctgggcatgggacccagaagaggagcgcaggcgacaggaaaaatggcaacaggaacaggaacgtttgctccaggagagataccaagaaggagcaggacaagcctgaaagaagagttgggaaaaggcccaaaaggaggtggaagaggaagaacgcagatactatgaggaggagccttagattatttgaagaccctgtggttccatttactgtttcttcaagttccgctgaccagctgtctacctcttcctccatgactgaaggcagtgggacaatgaataagatagacctgggaaactgtcaagatgaaaaacaagacagaagatggaagaaatcattccagggagatgacagtgacttattgctgaagactagggaaagtgatcgactggaggagaagggcagcctaactgaaggggccttggctcattctgggaaccctgtatcaaaaggagtccatgaagaccatcagctggataccgaggctggggccccacactgtggaacaaacccacagcttgctcaggatccatcccagaatcagcagacatcaaatccaacgcacagttcagaagatgtgaagccaaaaaccctcccgctggataaaagcattaaccatcagatcgagtctcccagtgaaaggcggaagtctataagtggaaagaagctgtgctcttcctgtgggcttcctttgggtaaaggagctgcaatgatcatcgagaccctcaatctctattttcacatccagtgtttcaggtgtgggaatttgtaaaggccagcttggagatgcagtgagtgggacggatgttaggattcgaaatggtctcctgaactgtaatgattgctacatgcgatccagaagtgccgggcagcctacaacattgtgacacggctttcaagcttccggatcactcaccatttctttactgagagtgtcccctggcaactgcttaacaaaatcccaagctcaggggcttctcagcatttacctaatttctgaaaggctcttctgaaaggtggtatctgttctttcgtagcacagtgtttatgtttttcctgtttattgttttggttttttttttttttggctttggcacagtatacacaaaagaatatggggttgtaatgatcctgaatagctcaaaaaaggttttagcatggtcaaacaggcttatggtttaaaatgtgttattctcttctttgggaattagctaaatgatgcaataaacctgttttgttttagaatgtctaggaattaaacactttatgtttacagaattgagctgcagaaagtgcaagacatgccaatttgagacacacggtcttctaagactgaaggataaatttaatgcatttcagaaactaaacatcacagcaagctctatctctgagctataatttgtttttaatgcaaagacactagtttgataatatatactgtaatcctgaaacatttgtgttacttacctttggaggtagaaattataccaataaattattgcaccgttagtattagattctgtgtaccttggaagttatgtcattaatataggctggttcatcaaataaagcaaaaccttgcaatatcagctagatttacactccgggacgttgcccaaaggtaggaagaaagcagagggaaatatttcagtcatcatttccaaagtcattatcaaaatctgtgaggaagtttaatcttccaaagagtcaatgtcagacatcaggcctctgttgcctgcttctctcgaggcactagattaggagtcttcaataagagacttaacatgaggtatatggaagatgaggcaccgagataagttcatcattaggtgtgagcactgctcacccttgctggcaagttctccttaagggcctgaagcacaggtgtccaaagaaaagcgttaagtccatcttaatagaatctatgtggtatatgatgtggtcagcccctggtctgtgatcagcaagaacctacagcacagattatgccctgcccacttcaatgaatacctactctcctccattctccatcactttttttgctatcaagaactccggaccttgcccatggagaagtttagagaggaactcttgtggagagctggtttattttctgccctgtgcgacgagtttcagctggccaagaaaggagtcaagttattaaaaagcatcacaatgtagatctccaggctggttttttgttttttgttgttaagactggggaaagggggactatttattctgccttaaatcaatggcaaataagtcaagatgacattttgtgaatgtagactatggatacactcctaatagattgatgtagtcataaaagggggtcaagtagatgtttttctgttatgtaagcaataatttttccgtgtcttattgagtatggctagcgattatttattacatgctagatgggttctttgcatgtgggttccatataggtgcagaaatttcctcagccactggagggatttcgaccatatttgtcatttggatgagctgttattagattgaaatctacacatcatttcattaaaaattgtgccttagaaaaacgcaaagctgtttgcacatgggcgataaattatggatgcagtacattgaaggagagatgaagtcacttccccaagtttccaagacttctcatggaggtgtttgctgttttacaggaaaaaataaaaataaaaaaagaaaaaaagaaaaaattaaaaagaaaaattgttttgaaaatgtacagatcaagtccaatattttgattatccacctgcatgttttattaaatattttgataatgtggatgtttacactttgcatgatattagcagagtaccactagtaatgcacaaacatgtacaatatggtcattcataaccgatttttatagaatactttttacatgtgcaactccatccgttatgtaaggattacatgaatattgcacattcccttctggtttcacaaacccatttatacatatttcttagtgaggctcattgtacatgtattgaagctagaatcgagtcaagaaaaataaagccccattctccaactgcaaaatgtgctttcccataatgaacactagtcaccagcacagaataatctccaacattttctaaattctaattgccaactgtttctatttatatttgatttatatttcatttggagtctgttacatggcagcttaggcagactagatcttgttttttccaatgcagcataatgagtatgatctatttcttttcaaataatctttgagatcccaggaaaaaaaaaatgctctgctccattgagctataatgtaaatgtgtttgtttaaaaaacaggtgaggcaagtgagtgatttattgttcctgaggaagtatatctgattttttttctcatactccaaaagctagtccctactctttaataaaaataatgggtaactttttgtttttcactagcgaacttccatgacatttcctttctatgtagggggattaatgcaatacatattatagttatctatacacagtgtaagatttaacaaactgaaatgatccacctcatatgtgagtccgtccaaaagatgttactgctctgggtgggccagtgttctatatcggttatactaactttcatttaaagtatttattctaaaatgcctctgagaaacagtaaaaaataaaaacaacaagttgtctaaaatgcaacagcttttatagtaaatgtacatttataaataaaatactcaaatcaaaaaaaaaa

SEQ ID NO: 61444 - DNA, 2477 bp, Homo sapiens
  misc_feature (1)...(2477): n = a,t,c or g
ttttttttttttgggataaatttttcttttatttccatactcttttgtgacatgtgtgggcacaagtattccaatctcacagggatgttaaaacccacactcgaagggtgtccagtgtgcttaggaaatgtgggtttgcgcaatcacaggccaagcctgggggtcctcggggaagctactcctccaggtcacctgccaggtggatgcacttccttgggcaatgggtgaccctcccaggacaaggggaaccagcagggactcgatggcaccacacagcagccacctgttctgacaatgtgacacagaccaactaatgccagagcccaggagaagccacagcagagctgcctgggttggtgtcagagcaacaggcagaagtgactgtgccgcccgtgggctgtcatccaccggtggctactgtgtcattctggaaaaactatgatgccatgagactctgagaaaccgaatcactgcagagacaaactcataaaaattaaaaccaatccataaaattgtatctagaaactctgtccctggtgccaataagcagcaaagtcaacaaagagtaaaaactaaaacttcaacacattattaaaaagcaaaactggactcaactacaatcacttctggttaatccactagtgaacccaaaagtgacttaaaagtaaaaatcattattagcaagagattaagaacataacttcattgagaggtcaatgttaagagaacagttcattaaaagtttctgtttaaaaagaaaaggaaaggcccaaatagccatttcaaggcagagcaggtgaaaggcctggaacactcctgtgcgctcactgtcggctgctgaacagggagcccaaggccagcaggatggagggtgtgaccgagggcttggaggaggtggtgtactggatgacatactctgggtagacctggtgtttctcaaagatcacaaagatggaggggtcggacacactgttcacgcagctatcatagaaggcgttgctccagccctccttggccggcggacggacaaaggaggcattgcccctgacgaactcgcccaccagcacccgggccaggaacatcgtgtgggtctgcgtgtcggatttgctgtagtggtgggaatatgcagcatctcgggcaaagtagctccccttgccgtaggaagtgccatgaacaccacagacccgccagtcaaagttctgctggcagatggcgtccacaaaaatggcgctggtgccgtggaacagctgccgctcgtccacggccttccctccgttctgcttctgcatctgtcctttttgccactggtagacttcccagagggccaggttctgtactcgctcaatcttctgaacaaagtaaaaaggcagcgtgcggttaaagaggttccagaccttctgatactcttccgaggaagaactaagggtgatcttctgaaagcctgggtctggcagggcagaggagtcccaatagtctgggatgctcttcgggcctggaaacttggtattgcaggtttgcatggtcgtcacatcctggggagacacgtatttgggtctgcggcaaacctttttagttgtgccatagaccaggtttttctgaacgaaggctttgaaatctaactcgtagttgtgctttccggcctggaacttcaaggtggctgcctggccgtcagaccccggtgtacagtaggccaggtaggccttctccacgtcgctactgctgacagtggtcacagggtgcaccgtgccctgtcttccatattcctgccaagaaccaaactcatcactccagtaccaaatccagtcagtggtgaggatgaagtgtggaggtttggtgacagaggaggccgtggagaggcggcgagcctgggtagcaccgtaagtcatggcgttaaagttcagacaatgagagtgaaaggtactggctgactcagagcacaggatcctttctattttgggattgcaatatgcctcttcaataagttccatgttgtccaaatcctcccatttgcctctatccaagaattgccatcgatacggcaaatggaaatgaactctatggcacttatcttgaaagctacaacttttccggatatggtacaaacagatctgatcaccctcctcctggctaagagtgtttggggacacagaacctgaactgtcttttctttcagaagtcccctgtgggacaaaaagaggaggcactctgctgggggcagagctcttattcttgatgtcatgtgcatttctataaatggtaggcagcctgctcaccaggtctgagctcatacccaacttctccaatttttccagattctcagaattagagaaatcatgggatctcttacagctagtgccaaacttgcattccccctgtaaaaaatactggcagatatggagcatgatgcactgcttttgaaaggcacaagagccgtgacgaaatcgtcgacccggnnnttccgggccggttccgaacgg

SEQ ID NO: 61445 - DNA, 4287 bp, Homo sapiens
cgctgctcctgctctgctacctgaatgttgtaccatctttgggtaggcagacttccctgacgacatcagtgatacccaaagctgagcagagcgtggcttacaaagactttatttattttactgtctttgaaggaaacgttcgcaacgtttcctgaaagtcctcggttgaagtattttatgcctcctcagcccttgtgttgtccaatttgggaagccagttgtttccatcctgagttccagaagtaggcattccccgtgtacaaaaaaagggtgggaaggaatgaggaaacatcttcacaccaggcagggacacaaataggtacatgtggaaatttccaaggcattatgggtttacagagatgattatttcatcagacattccatctctgtatctgcagtgatagtacgcgcctggattactcacaaatacaggggcagagactggaatgttaaatgggaggaaaacttgctccatgctgtagcaaagaattataccctcctgcagaccatcccgccttttgaacgccctttcaaagatcatcaagtgtgccttgagtggaacatgggttatatttggaaccttcgggcaaacaggattccacagtgtcctctggaaaatgatgtggttgccctgcttggctttccttatgcctccagtggagaaaacacaggcattgtcaagaagttcccgaggtttcggaaccgagagctggaggccactcgacgccagaggatggattacccagtgtttactgtttcattgtggctttatttactccattattgcaaggccaacctctgtgggattctgtactttgttgactctaatgagatgtacggcacaccttctgtatttcttacggaagagggctatttgcatattcagatgcatcttgtcaaaggggaagaccttgctgtaaaaactaaattcatcatacctttgaaggagtggtttcgactggatatctcttttaacggaggccagatagtagtaaccactagcattggacaggatttgaaaagctaccacaatcagaccattagcttccgggaggatttccattataatgacacagctgggtacttcattattggagggagcaggtatgtggctggcattgaagggttttttggacccctgaagtactatcgccttcgcagtctgcaccccgcccagatttttaatcccctccttgagaagcaacttgctgaacaaatcaagttatattatgaaaggtgtgctgaggttcaagaaatagtatctgtgtatgcatctgcagcaaagcacgggggcgagagacaagaagcatgccacctccacaactcctacctggacctccagcgcaggtatgggagaccctcgatgtgcagagccttcccctgggagaaggagctgaaagacaaacaccccagcttgttccaggcattgctggagatggatctgctgaccgtgccaaggaaccaaaatgaatctgtatcagaaatcggtgggaagatatttgagaaggctgtaaagagactctctagcattgatggtcttcaccaaattagctctatcgtcccctttctgacggattccagctgctgtggataccataaagcatcctactaccttgcagtcttttatgagactggattaaatgttcctcgggatcagctgcagggcatgttgtatagtttggttggaggccaggggagtgagaggctgtcttcaatgaatcttgggtataaacactaccagggtattgacaactaccccctggactgggaactgtcgtatgcctactacagcaacattgccaccaagacaccccttgaccagcacacactgcaaggagatcaggcatatgttgaaacaattagactaaaagatgatgaaatactcaaggtacaaaccaaagaagatggagatgtctttatgtggttgaagcatgaagctacccgaggcaatgcagcagctcagcaacgattggcccagatgctgttctgggggcagcaaggtgtggccaagaatcccgaagcagcaattgagtggtacgccaagggcgccctggagacggaggatcctgcgttaatctatgactatgccattgtgctattcaagggtcaaggagtaaaaaagaacagacggcttgccttagagctgatgaagaaagcagcttccaagggattgcatcaggcagtcaatggcctgggatggtattaccacaaattcaagaaaaattacgcccaaagcagcaaagtactggttaaaagcaggaagaaattggggaacccagatgcgtcatacaatcttggagtcctgcatttggatggcatcttccctggagttcctggaaggaatcaaactttagctggtgaatatttccataaggctgcgcaaggtggacacatggaagggaccttgtggtgttctctctactatatcacaggcaacctggagacattccctagagatcctgagaaagctgttgtatgggcaaaacatgtagctgagaaaaatggctacttgggccatgtcatccgcaaaggcctcaatgcctacctggaaggttcatggcatgaagctttgctgtattatgttttagcagcagaaactggaattgaagtgtcacagacaaatttagcacacatctgtgaggagaggccagacctggccaggagatacttgggtgttaactgtgtttggagatactataatttctctgtttttcaaatcgatgctccttcctttgcatatttgaagatgggagacctttactactatggccaccaaaaccagtcacaagacctggagttgtctgtgcagatgtacgcccaagccgccctggatggagactcccagggattttttaacctggccctgctaatcgaggaaggtacgataatcccacaccatatcttggatttcttggaaattgactcaactctccattctaataacatctccattctccaggaactgtacgaaaggtgctggagccacagtaacgaggagtccttcagcccctgctccttggcctggctttacctgcacttgcggcttctctggggtgctatcctgcactcagccctgatctactttctgggaacctttctgctatccatattgatcgcctggactgtgcagtatttccagtctgtctcagcaagcgatccccctccaagaccatcccaggcctccccagacactgccacgtccactgcaagtccagctgtgactccagctgcagatgcctctgaccaagaccagcccacagtaactaataacccggagccacgtgggtgaactgtgcactccagttctctccagatgagagagaatcttttcaacagctggtattgggaagctggggccagggcatgatcctgataaacaccttaaatgtcttgtcaactggatgcaaattttgcaattggtgtcattttttttaaagtcaaattacaaggaagtacccagatcaggcagtggtaataccaaaggtcatcaaacacatacaaggaacatcttgatcatagggcatgtggggaagtttactgggccatcacagacttttgttctagtgattgtatgtattaggagtcatagcatgccctacggcagatctggattcttatacactaagatgtgtcttaagaatcacagtgcgtgcttcatccctttattgaagaacagaaaattatgactactctacaaggtggataatattttggtacctgtgcttgccacagccctgttcctcaaagctgaattgatagatttctctttgacttccaagacctagcagttataaggcaccttgaaataaattgtttgtgcctggaaatgcagggagggcaatagctttgtaaattggtttacatttttctccttgaatttttctagggtcctagtgcttccgaatcatttaatggcattgtcggatatcttttacatttcaattgcaatccatgaaattacatttagaagattcttagtacttaactgtagtcttctccatgaattacacgttagaatagactggcagcaactgaatatgcagcaagtaagcctctagcttctagcttatagtttcatccctacccctcatgcctgcgtgagtctgtacagggatatgtgtgtgtgtgtgtgtgtgtgtgtgttagagaggaagaggaagagcagaatgtctgtatactacatgctgctaaggtagtgaataaatcagtaatgcaatattgtgggtccaaactactctttgcactactttatttacagtagtaaataaaattatttttatacaattg

SEQ ID NO: 61446 - DNA, 1608 bp, Homo sapiens
ggcggaagccgtacaaagtggctgaagcccccagcagagaacaaggccgaggagaaccgctatgtggtccggctaagtgagagcaacctggtcatctgaggggcggtctagtctaaggacactgcggccctgccctgggaggttccgaaggcttcctggaggaggtggagctgcagctgggactgtgaggaccgagaagcaatggcccagcagacgagacagcaaagaccaaggcctggaggtgggagcgtccgccccagtgaggaggcaggtggccggcgggcactgtgtacaggagcaggctgagccccacccctggccctgctgccatgttgctcccctgaaggatgccccgacccccgtgcctgccctggctggatcctaggagcccacgggattctctgtatcatcagaggctgggcttggcagaggggaggggcctgtgcccgtcacccctggccccattccttggtaattagccacacccttgcctctgtacagggccctagagcagatgtgcgtccccctcctcttccagcaggtctataaagggaaggggtagcagaaagtcctgggctaggagagtgagtccctgggttctaatcttgggcacatctgtggccatcgctgggtccatttttctgactgtgaagtaaggagagacgtctcagtacccagggcctcttcagctctttgtaggttctgggctgggttgtgggggactggggagctgggctctaccatccctcccattagtagctttatccagccccgtttttgctgcttccagggcctctgccttcaaggcccccatggggctgtccatccatggctctgcctacggaaggggcttaatgcatgtgcctgcccctcccccagctgtttttaatgaaactgaaaaaatagacttgatcccggcaggactgtgatacagagccctagcctgcccagccagccccaagatctcaggagctttagggagaagacttggtggggctggagcacaccttgggcctcagtggtttctgtgtccctgtggtgccagtgcttctgggcagtgcaggcggctgccaggcccagccctgacttccactctggctcagcaacctggttatttatgtggggccgtgcaggcatgggcccactgcctgtccatcctgtttctcttatttattgaaactcaccattgccctatccttgtgtctccacccccttccatgtgttgaataataaaaggtgggaaagtgctgtcacgaggagctccttttctctgtgcccttcccagcttatccgcctgttccacttgtacctgtccagccctgccctgtgttgggcaccgtgacaggctgccctcccctcacagttcctgcacctcagcagccagggaagcagggcccagaggagacccatcaactcatctggttctcaccaaagcccctagctagaggcagggctgtcccacagaaatagtgtgagccacatatgttactttaaattttctgacagtcacatttcaaaaagtaaaaagaagcaggtgaacttaatttttttttaacccagtctatccaaaatattttcatttcaatataaaatcagtataaaaagtga

SEQ ID NO: 61447 - DNA, 2410 bp, Homo sapiens
ggcacgagccgtaggctccttcagggctgagccatcctgcgtgtcttgcgctcggtggaaatgcccagccgagggacgcgaccagaggacagctctgtgctgatccccaccgacaattcgaccccacacaaggaggatctaagcagcaagattaaagaacaaaaaattgtggtggatgaactttctaaccttaagaagaataggaaagtatataggcaacaacagaacagcaatatattctttcttgcagaccgaacagaaatgctgtctgagagcaagaatatattggatgaactgaaaaaagaataccaagaaatagaaaacttagacaagaccaaaatcaagaaatagtcaacctgatttcacataacaatgtgtggcatttgttgttctgtaaacttttctgctgagcatttcagtcaagatttaaaagaggacttactatataatcttaaacagcggggacccaatagtagtaaacaattgttaaagtctgatgttaactaccagtgtttattttctgctcacgtcctacacttgaggggtgttttgactacccagcctgtggaagatgaaagaggcaatgtgtttctatggaatggagaaatttttagtggaataaaggttgaagctgaagagaatgacactcaaattttgtttaattatctttcctcctgtaagaatgaatctgagattttgtcactcttctcagaagtacaaggtccctggtcatttatatattatcaagcatctagtcattatttatggtttggtagggatttttttggtcgccgtagcttgctttggcattttagtaatttgggcaagagtttctgcctctcttcagttggcacccaaacatctggattggcaaatcagtggcaagaagttccagcatctggacttttcagaattgatcttaagtctactgtcatttccagatgcattattttacaactgtatccttggaaatatatttctagggagaatattattgaagaaaatgttaatagcctgagtcaaatttcagcagacttaccagcatttgtatcagcggtagcaaatgaagccaaactgtatcttgaaaaacctgttgttcctttaaatatgatgttgccacaagctgcattggagactcattgcagtaatatttccaatgtgccacctacaagagagatacttcaagtctttcttactgatgtacacatgaaaggaagtaattcagcagttcattgatgtcctgagtgtagcagtcaagaaacgtgtcttgtgtttacctagggatgaaaacctgacagcaaatgaagttttgaaaacgtgtgataggaaagcaaatgttgcaatcctgttttctgggggcattgattccatggttattgcaacccttgctgaccgtcatattcctttagatgaaccaattgatcttcttaatgtagctttcatagctgaagaaaagaccatgccaactacctttaacagagaagggaataaacagaaaaataaatgtgaaataccttcagaagaattctctaaagatgttgctgctgctgctgctgacagtcctaataaacatgtcagtgtaccagatcgaatcacaggaagggcgggactaaaggaactacaagctgttagcccttcccgaatttggaattttgttgaaattaatgtttctatggaagaactgcagaaattaagaagaactcgaatatgtcacttaattcggccattggatacagttttggatgatagcattggctgtgcagtctggtttgcttctagaggaattggttggttagtggcccaggaaggagtgaaatcctatcagagcaatgcaaaggtagttctcactggaattggtgcagatgagcaacttgcaggttattctcgtcatcgtgtccgctttcagtcgcatgggctggaaggattgaataaggaaataatgatggaactgggtcgaatttcttctagaaatcttggtcgtgatgacagagttattggtgatcatggaaaagaagcaagatttcctttcctggatgaaaatgttgtctcctttctaaattctctgccgatttgggaaaaagcaaacttgactttaccccgaggaattggtgaaaaattacttttacgccttgcagctgtggaacttggtcttacagcctctgctcttctgcccaaacgggccatgcagtttggatcaagaattgcaaaaatggaaaaaattaatgaaaaggcatctgataaatgtggacggctccaaatcatgtccttagaaaatctttctattgaaaaggagactaaattgtaatgtgattcacaatgtaacaatataaaaataagtttttatataattatataaaagtaagatactctgctgctttactattgtataatatagtatttttaaagttca

SEQ ID NO: 61448 - DNA, 2102 bp, Homo sapiens
ccttcccggggcttgggaatgttctgagcccagcttcctgtcgaagaccgccatcttgctcctacgactcctggtcaccgtggtcccgggcccttctctgaaaaggggcatccccagcccggagcgtgatggaccaatgcgagggcctgagcccgagggtgcggacagtaaaccgtttattactgtgtggacacagacaccgtggtgcatgacagacagtttcaacaccatgagcgctggggacggagctgtgcctggacagctctgcggtgtgtggtggcgccacgctgggccggctgtcaccgccagctgaggcgctaacagcgtcacctgggagaaaacctggaaaccgtctaatgaagcaggtgacttaggggcgtctctagaaacccaaagaaatgtaccttaaataagcaaatataaaacacaaaaaagacgagcagacctggtgttccgtgtcaggcagaatctaaaaaaacccaggagttgcacttggtttcctcactgtcatgtgtgatcacaggtcaggacgtttcacagcagcgcgcccaggctcctgtgcgtgctctggtgcactggagtctggggctggctgggcttctggctgtcctctgtcgccggatgggctcgacgaatcagcgcagcgaggccggccccttacgtggtgctgatcccactcagctcctgcctgatggcgtcgatgatctcctccttcaccttgtggagctctctcaccacctcctctaggatctcctgcttcatccggtccaagtcgaaggcatccagggccatgtcattcacgctcccagcaggcttcatcctagagtgaggctgcgactgaagggggctcttagcttcggggctctttgccacagacggggttctggacagaatcgaggacacaggcttctccaccgagttgctccgctcccagggcttccggccagcctctgaggagttaggtggctggctggctgctcgggtccccggagagggggaggtactaggatcttccatttggctttcatcttccttcttctcggctggcttgtctgactgggaggctgcttttctcctcttggccagcagtttgttcatttcctccatgaggcctcctccgccacccccgctgcttgcccggttggcatcggactttgaggtcccactgggactggagcctccagatgcgtcttctggccgttggactcttctcagcttggcccccagctaatggcaagcggccagtcctgaacatggaagctctcgtcgtggctggaccccctgggcttcctccggctggcaagtgggggtgggggaggtggggtaagccccagtgggtggaggtgggactgggggtggggggggcggtggaggcccactacatgagacgggggcgctggctgcagatgaaggatgtcctggtgggaggatgggccctgtggccgaggttcttctttctagagattcctgacgctgctgctggtgctgctccatcacttgtcttctctggatgtccatctcatcaggagaggggccattctgcacctgacgctggctggaggggcctccttcttgggaattcatgatgttcagggcaaacagcattgcattggagaacgtggttgcctcttctttacttgcaaagtttaagccgtagacctggcgggcatctcgccactggtggaaggttggcgtggcctgattgtacttcagccctttcacgattgaataattgatcacaacctgctgatcctgcaacttgactccaacgactctgaaggtgttgctggcagtgttgtggtagatgttgatccggctgaatccctgctggccaggtttgattggtacccatttcttactggtgtcatcgtagaccatcacggaagcccgggcttggcagatactctgttcacttgtggccatggctgaaaagtggcagcacagggaaccctgaggaggcgagtcctgtactcccaccagcctatgttgatcagaggaccacagaccctctgaagacagcaaaatgattaatatagcctacttaaaaccaaacaggaaaaggaagctgaaccagagacgaactcgtcgacccaggaattcag

SEQ ID NO: 61449 - DNA, 4791 bp, Homo sapiens
ccaacgggaatgctgtagcacaagctccagtaacaaattgttgctacttagccactggaagcaaagatcaaaccattcgaatctggagctgttctagaggccgaggggtgatgattttgaaattgccctttctgaagagaagaggagggggtatagacccaactgttaaagagcgcctttggttgacactccattggcccagcaatcaaccaacacagctggtatctagctgttttggaggtgaactgttgcaatgggatctcactcaatcttggagacggaaatacaccctcttcagtgcctcatcagaagggcaaaatcattcaagaattgtgtttaatttatgtcctttacaaacagaggatgacaaacagctgttactttctacatcaatggatagagatgtaaaatgttgggacatagccaccttggagtgcagctggacccttccttcccttggtgggtttgcatacagcctggctttctcttctgtggacataggctctttggccataggtgttggggatggcatgatccgtgtatggaatacactctccataaagaacaactatgatgtgaaaaatttttggcaaggcgtgaagtccaaggttacagcgctgtgctggcacccaaccaaggaaggttgcttagcttttggaactgatgatggaaaagtgggattgtatgacacctactccaacaagcctccacagatttctagcacatatcataagaagactgtatatacgttagcctgggggccaccagtaccccccatgtcacttggaggagaaggagacagaccttcccttgctttatacagctgtggaggagaagggattgtcttacagcataatccctggaagcttagtggagaagcctttgacatcaacaaactcatcagggacaccaattcaatcaaatacaaattgcctgtacacacagagataagttggaaagcagatggcaaaatcatggctcttggcaatgaagatggatcaatagaaatatttcagaattcccaacctgaaactgatctgtactatccaacagcatcacaagcttgtgaataccattagctggcatcatgagccatggcagcccagcccagaaattgagctatctgaatgccctctggctcccaacaatgcagtccatttacgtgccacaacctgaaaaactgtccataaaaagcagcccctgagtctcccagtgacccattacagagcccctaccggacccctcctcaggggcatacggcccaagattacccagtgtgggcgtgggagccccacattcattgatgggaagggctggtattttgctttcctattgatgggtacagcccagggtgttgggattgcttttccggggaaggaggcccctgttgcaattttccgagggacatcaaggtcgactgctttgtgtggcatggtctcctttggatccagactgcatctattcaggggtcagatgacttttgtgtgcacaagtggctcacttccatgcaagatcattcccggcctcctcaaggcaaaaaaagtattgaattggagaaaaaacggctctctcaacctaaggcaaagcccaaaaagaagaaaaagcccaccttgagaactcctgtaaagctggaatcgattgatggaaatgaagaagaaagcatgaaggagaactcaggacctgttgagaatggtgtgtcagaccaagaaggggaggagcaagcacgggagccggaattaccctgtggccttgctccagcggtttctagagaaccagttatctgcactccagtttcctcaggctttgaaaagtcaaaagtcaccattaataacaaagtcattttactgaaaaaggagccaccaaaagagaagccagaaaccttaatcaagaagagaaaagctcgttccttgcttcccctgagtacaagcctggaccacagatccaaagaggagcttcatcaggactgtttggtactagcaactgcaaagcactccagagagctgaatgaagatgtgtctgctgatgttgaggaaagatttcatctggggcttttcacagacagggctaccctgtatagaatgattgatattgaaggaaaaggtcacttagaaaatggccaccctgagttatttcaccagcttatgctttggaaaggggatctcaaaggtgttctccagactgcagcagaaagaggggagctgacagacaaccttgtggctatggcaccagcagctggctaccatgtgtggctatgggctgtggaagcttttgccaaacagctgtgttttcaggatcagtatgtcaaggctgcttctcacctactttccatccacaaagtgtatgaagcggtggagctgctcaagtcaaaccatttttacagggaagctattgcgattgccaaggcccggctgcgcccggaggacccagtcctgaaggacttgtacctcagctggggaaccgtcctagaaagagatggccactatgctgtagctgccaaatgctatttaggggccacttgtgcttatgatgcagccaaagttttggccaaaaagggggatgcggcatcacttagaacggctgcagagttggctgccatcgtaggagaggatgagttgtctgcttccctggctctcagatgtgcccaagagctgcttctggccaacaactgggtgggagcccaggaagccctgcagctgcatgaaagtctacagggtcagagattggtgttttgccttctggagctactgtccaggcatctggaggaaaagcagctttcagagggcaaaagctcctcctcttaccacacttggaacacgggcaccgaagggcctttcgtggagagggtgactgcagtgtggaagagcatcttcagccttgacacccctgagcagtatcaggaagcctttcagaagctgcagaacatcaagtacccatctgctacaaataacacacctgccaaacagctcctgcttcacatttgccatgacttgaccctggcagtgctgagccaacagatggcctcctgggacgaggctgtgcaggcgctccttcgggcggtggtccggagctatgactcagggagcttcaccatcatgcaggaagtgtactcagcctttctccctgatggctgtgaccacctaagagacaagttgggggaccatcaatcccctgccacaccagctttcaaaagtttggaggccttttttctttatgggcgtctgtatgaattctggtggtctctctccagaccttgcccaaattccagtgtctgggtaagggctggtcacagaacactctctgttgagccaagccagcagttagacactgccagcactgaagaaacggaccctgaaacttctcagccagagccaaacaggccttcagaactagacttgagactcacagaagaaggggagcgaatgctgagtacttttaaggagctcttttcagaaaagcatgccagtctccaaaactcacagagaactgttgctgaagtccaagagaccttggcagaaatgatccgacaacaccaaaagagtcaactctgtaaatccacagcaaatggtcctgataagaatgaaccggaagtagaagcagagcagcccctctgcagttctcagagccagtgtaaagaagaaaaaaatgagccactttctctgcctgagttaaccaaaaggcttaccgaggcaaatcagagaatggcaaaatttcctgagagcattaaggcctggcccttcccagatgtgctggagtgctgcctcgtcctgcttctcatcaggtcccactttcctggctgtctggcccaggaaatgcagcagcaggcccaagagctccttcagaaatacggcaacacgaaaacttacagaagacactgccagaccttctgtatgtgaattttcacacaccttgaagaaactgccaaattgaaaatgtttgacatctttcacctctgcagttatgcctcaccagacattcactctggtccctagatgtttttgcagtaatccaaaagaatacaaacaaggattaagtttgaatcaaccctgcctacccatagacaacggtggatctgactttagactcaattgtggtctcctactggagggaagatcatgaaaagcccacagtagttattcagaactaacacctgcagagtgttggtcatctctacagccttaggcaggtttcacccaaagaggagaaacttctgtcgtcacccaaagtgttacatgcttaaaacacaagctacctttgtaaatacttcatctgatcagaagtgtgtcatgcttgtttgagatggagttgctgcattttaggactattgatacctttttttaattgtttttataatatttaatttgaaagaaggagacccttctctctctactctttcatagactgaagtttgaatatgaaataggccttaaccatcatgttgactctcctgtcagaattttaggttggaaatttggttttattctttcatgtaattgcttatttgaacagatcacttactaaagctttagaagaagtgattcaaatgtgtgttttcccttcagttttataacaaatggattgatggcagtcaaatagctcaggaataaattactgtttcaatggttcttaaactttcttggatcataggatccttttgagaatcagattaaagccaaagatactctttggagaaaaatgcatattcctaattttgcatagatgacctttggattattggactctgactattgggaccctaaatactatttaattataaatctttcttttctcctc

SEQ ID NO: 61450 - DNA, 4079 bp, Homo sapiens
accggatggagttccgggtcgacccacgcgtccgggctgcagcagcgcattctggggcatggttcggcgggggcgcggagggctcggttcggagggggccgggagcccgggcgccctggagtgaggaggaccgggagctggctctggaggctgcggaggcgacgccggagagaacgaagcctcggctgggagcggatctttcgaagatggtttggctgccttggagatttggagatctgatgccacgatgaggactcacacacggggggctcccagtgtgtttttcatatatttgctttgctttgtgtcagcctacatcaccgacgagaacccagaagttatgattcccttcaccaatgccaactacgacagccatcccatgctgtacttctccagggcagaagtggcggagctgcagctcagggctgccagctcgcacgagcacattgcagcccgcctcacggaggctgtgcacacgatgctgtccagccccttggaatacctccctccctgggatcccaaggactacagtgcccgctggaatgaaatttttggaaacaacttgggtgccttggcaatgttctgtgtgctgtatcctgagaacattgaagcccgagacatggccaaagactacatggagaggatggcagcgcagcctagttggttggtgaaagatgctccttgggatgaggtcccgcttgctcactccctggttggttttgccactgcttatgacttcttgtacaaccacctgagcaagacacaacaggagaagtttcttgaagtgattgccaatgcctcagggtatatgtttgtaaccttaatactaggcgcggatggcgattcaaatacctgcacaatcatcagcccaccaactgtatggctttgctcacgggaagcctagtcctgatgaatcaaggatatcttcaagaagcctacttatggaccaaacaagttctgaccatcatggagaaatctctggtcttgctcggggaggtgacggatggctccctctatgaaggagttgcgtatggcagctacaccactagatcactcttccaatacatgtttctcgtccagaggcacttcaacatcaaccactttggccatccgtggcttaaacaacactttgcatttatgtatagaaccatcctgccagggtttcaaaggactgtggctattgcggactcaaattacaactggttttatggtccagaaagccaattagtgttccttgataaatttgtcatgcgtaatggcagtggtaactggctagctgaccaaatcagaaggaaccgtgtggtggaaggtccaggaacaccatccaaagggcagcgctggtgcactctgcacacagaatttctctggtatgatggcagcttgaaatcggttcctcctccagactttggcacccctacactgcattattttgaagactggggtgtcgtgacttatggaagtgcactacctgcagaaatcaatagatctttcctttccttcaagtctggaaaactggggggacgtgcaatatatgacattgtccacagaaacaaatacaaagattggatcaaaggatggagaaattttaatgcagggcatgaacatcctgatcaaaactcatttacttttgctcccaatggtgtgcctttcattactgaggctctgtacgggccaaagtacaccttcttcaacaatgttttgatgttttccccagctgtgtcaaagagctgcttttctccctgggtgggtcaggtcacagaagactgctcatcaaaatggtctaaatacaagcatgacctggcagctagttgtcaggggagggtggttgcagcagaggagaaaaatggggtggttttcatccgaggagaaggtgtgggagcttataacccccagctcaacctgaagaatgttcagaggaatctcatcctcctacatccacagctgcttctccttgtagaccaaatacacctgggagaggagagtcccttggagacagcagcgagcttcttccataatgtggatgttccttttgaggagactgtggtagatggtgtccatggggctttcatcaggcagagagatggtctctataaaatgtactggatggacgatactggctacagcgagaaagcaacctttgcctcagtgacatatcctcggggctatccctacaacgggacaaactatgtgaatgtcaccatgcacctccgaagtcccatcaccagggcagcttacctcttcatagggccatctatagatgttcagagcttcactgtccacggagactctcagcaactggatgtgttcatagccaccagcaaacatgcctacgccacatacctgtggacaggtgaggccacaggacagtctgcctttgcacaggtcattgctgatcgtcacaaaattctgtttgaccggaattcagccatcaagagcagcattgtccctgaggtgaaggactatgctgctattgtggaacagaacttgcagcattttaaaccagtgtttcagctgctggagaagcagatactgtcccgagtccggaacacagctagctttaggaagactgctgaacgcctgctgagattttcagataagagacagactgaggaggccattgacaggatttttgccatatcacagcaacagcagcagcaaagcaagtcaaagaaaaaccgaagggcaggcaaacgctataaatttgtggatgctgtccctgatatttttgcacagattgaagtcaatgagaaaaagattagacagaaagctcagattttggcacagaaagaactacccatagatgaagatgaagaaatgaaagaccttttagattttgcagatgtaacatacgagaaacataaaaatgggggcttgattaaaggccggtttggacaggcacggatggtgacaactacacacagcagggccccatcactgtctgcttcctataccaggttgttcctgattctgaacattgctattttctttgtcatgttggcaatgcaactgacttatttccagagggcccagagcctacatggccaaagatgtctttatgcagttcttctcatagatagctgtattttattatggttgtactcttcttgttcccaatcacagtgttagcactgaagctataaattacctggtcattttgtgatcacaagagtctatgcaaaaaaaaaaatttctttaccccagattatcagatttttttccctcagattcattttaacaaattaagggaagatattttgacacaagaaagcaggaacgtggagaaattggagcaggaaaagaaattatcaaagcaatagaaatagcttggtggtcctatggtgtttttggaagtatttggcattgctaattgagcagtccatatagtactacttttagaagaaacaaaaagtctgttttttaaagtaatgttttttcttatgagaaaaaggtttagatagaattgggttttattaatattaatttaatgctattagcaatttccatatactatattgtggaaaagactgaagaatacaattctgagaaatacaaaaaaattttaatggtatactcatgttgaaagataaatgttgctaagtcctggtatgatggtgtgagcttccttggggaagtacttcttgagttatgtaactaacaggatgttttactacagatctggatggctattcagataacatggcaaaaaatgatagcagaagatcattaaaaacttaaaatatattttattagaaaacatttatctatgaatgaatatttccttgatgctggtctctgcacacatatgcttggttacttgcatgcattcattggttgttcaataagtgagatgattacagataacttaatactgtattttccttatatggaaaaccgttatagacccaataacaactaaacctttcaaaagaaaatattttctattatgaatgttgattttcataccaaagaagatggagagtctaaaatttggatatgattcttatgtttttttaatagaaaaccttcttcaagtttattttcctaaataaacatcataattgtgaattttaaaaaaaaaa

SEQ ID NO: 61451 - DNA, 2276 bp, Homo sapiens
taattgggagaatactccagccataagatctgcatgcatagcatagcactggcttctctggactttgcacacctccaggagaagaacccagaaaattgatcagttctaaaaaaccatgccccacttgttggtgactttcagggatgtggccattgacttctctcaggaggaatgggaatgcctggaccctgctcagagggacttgtacagggatgtgatgttggagaactacagcaacctgatctcattggacttggaatccagttgtgtgaccaaaaagttatctccagaaaaggaaatttatgaaatggaatcactccagtgggagaatatggggaaacgtatcaaccatcacctttcaatacaatggtcttggagacaatatggagtgcaaaggcaacttagagggtcaagtaagcaagtcagaagggctttacatgtgtgtcaaaattacctgtgaagaaaaggccactgaaagtcattcaacctcttctacttttcatcggataattcctaccaaggaaaaattgtcaaatgtaaggaatgcagacaaggtttcagctacctgtcatgccttattcaacatgaggaaaatcataatatataaaaatgctctgaagttaataaacacaggaatacctttagcaaaaagccaagctatatttaacatcagagaattcagactgggtgagaaaccttatgagtgtatggaatgtggaaaggcctttggtcgtacttctgatctcattcaacatcagaaaattcatactaatgaaaaaccttatcagtgtaacgcatgtgggaaagcttttattcgtggttcacagctcactgaacatcagagagttcatacaggagagaaaccatatgattgtaagaaatgtggaaaagcctttagttattgttcacaatatactcttcatcagagaattcatagtggtgaaaaaccctatgaatgtaaggattgtgggaaggcctttattcttggctctcaacttacttaccatcagagaattcatagtggtgagaaaccttatgagtgtaaggaatgtggaaaggcctttattcttggttcacaccttacataccatcagagagttcatactggtgaaaagccttacatatgtaaagaatgtgggaaagcctttttatgtgcctcccaactgaatgaacatcagagaattcatacaggagagaaaccctatgaatgtaaagaatgcgggaagaccttttttcgtggctcacaacttacttaccacctgagagttcattcaggtgagagaccttataaatgcaaagaatgtgggaaagcctttatttctaattctaatcttattcaacatcaaagaattcataccggagagaagccctacaaatgtaaggaatgtggaaaggcctttatttgtggcaaacaacttagtgaacatcagagaattcatacaggtgagaaaccctttgaatgtaaggaatgtggaaaggcctttattcgtgttgcatatcttactcaacatgagaaaattcatggtgagaaacattatgaatgtaaggaatgtgggaagacctttgtacgtgctacacaacttacatatcatcaaagaattcatacaggtgaaaagccctacaaatgtaaggaatgtgacaaggcctttatttatggctcacaatacttagtgaacatcagagaattcacagaggtgaaaaaccttatgaatgtaaacagtgtggaaggcttttattcgtggctcacaccttacgaacatctgagaactcatactggagagaaaccctatgaatgtaaggaatgtgggagggcctttagtcgtggctcagaacatactctgcatcaaaggatccatactggtgagaaaccctatacatgtgtccagtgtggtaaagactttagatgtccttcacaacttactcaacatacaaggcttcataattgagaaagccttgaatgtgattaaatttaagaaaatcttcatctatttcatatctataatgaatgtagaacatcttgcttctgctcagaactgctcattcttagaaggcctacttaacatggatgcagaataatttcagaaaccccttaaataattccttaacatctctataaacgctagaatataatgctgaattatatcctttattaagcatcatctccatttcaccatatcctaactgaaaccctatatatttcttgtgtgttcttttctatttgtaaatactgtaattgtattacatgactaaattatattaatactataattccccgg

SEQ ID NO: 61452 - DNA, 795 bp, Homo sapiens
taatctatgaaatttcggttttaaaaaatgtgttaagtctttgtttttggcctatcaggtggtttataaagaagaatgttgaatgagctattgagaaggctgtgtatcccgatgttgttgaggagtgttctctataccttcattagaaattattgtttttgactgccttttagtcctctgttcccttactaatatcatcttgttttattattattacagaaagtggggtattgaaatatcctactataattatattgctctattcaactttgttagtatttgctttatatatttgaaaccccaatttgagacacacacacgcacaaatacacacatggataaacaaatttgtcataggtttccatgaattaatctatatattgtttaatgtccttcttttttgaagttttaacttaaagtacattttataaaatatgacagcttttgactttaacaatgtagcttgtgtaatattattttgacctcttctgctctcattttgttagtatttacatgaaatttctacttggtcttgccactttcagtcttttcttatcattagatctcagctgactcttgtaaaaaggcaagttgagtcttgatttttaaaattttttaatgagcctttttagaagtatgtctcttgattggaaagataattatatttaaatagttttctgaaagagaaaaacttactgttaataaaataattgtttcgcttcttgtatctccgtgtcttaatttctcctttataagttttttttataaatgtgttgacatgctttgagctttttt

SEQ ID NO: 61453 - DNA, 4570 bp, Homo sapiens
  misc_feature (1)...(4570): n = a,t,c or g
ttttttttttttgctacaatttgtgctttaatagtcatttgttcctttattggttcaagggtcagtgttggtgtggtcactgctgagtccactgtgcccagaagacagggtccacagcaggcactccataaatacatgttgcaggactgccctcactggctcactctgtggagtgagggacctaatgggccccatttacctattgcctctgaaagttaaagggcaggaacaaggtggagggccactgccctctggcctggcatggcccagaggcagcttggggttagctcaaggcagctaagcaggtccagcccaagaactaagtcaagtgggccgaggaggctctgagagtggccggggcccngcgtacaattccctggcatggggtgagaacgggggctgttctggacgcacattccatctcatgcgagctgctggggcccaagttccatgtagggttgctggcagctgcacataatgggtccccaaggaagtgaggacactatctgctccacctccccccactagtacttctgaaggtgggtcgcacttgctgggtctgcctcccagcattgctgcatcacttggtacagagaatcaaggcaatactcaggctggggcaggcgccgaccctggggcccagaaagtgggtaaggtcaaaagggtcaatgtggcggtatggtggggcaccccgtgtcagcagttcccacagcagcacaccaaatgaccacacatcagacttggtggtaaatctataggtctgcaggctctccagcgccatccacttcacaggtaggcgagcgtggcgatgctgttgaacactatagtactccctgtccaggatgtcgcgggccaaaccaaagtcagccaccttgactgtgaatgactcgtccagcatgcagttccgcgcagccaggtccctgtgcacaaacttctgctctgccaggtactccatgccgcgggctacctgcaggccaaagctgatgaggtccttcacggtggggttccgctgaggtgagcggatgaactggagcaggtcaccgtggcacatatagggcagcagcacatggggcaggccctcaggtggcaacatgataccaatgagagccagcacattcgggtggttcaggccacgcatgagcagcccctctcgcaggaaggcctccacctgctgcatctctgtgatgcgacttagtgacttgatggcacattggattcgattctgggcctggtctatgtattctccgtggtagacaactccaaagtggcctcagccaatgactcggtcactgtgggtgaccacccgctcatggggaatcagcaacatccttgacctcaagccaagagcgcagagtccaggtcccttagctggatggactctttccgcagcagtggcacacaggattcatcttcactatcggagaaggatgctccatggacacaagtggtggaatccagaccatcaatggcagggagtgcaaggccacttctgtagtcagagcccgagtacagaataggcaggggtgtggctccagcagtctggtccagggatgccaggtcattcaggttgggaggaagaactagctgcttcctccgccaccagtagctgaagaccagtgcagtcgccagtgcagccacaagcagcagcaaaggcagcaggataccaaggagcgtgctctgtgggaccccatctggccctggccgcaccactctacccaggatatgacattcaccatctacgcagacctgcaatggggcaccatcctggccaagctgcagggatgggggcagggggcagacaaccatgtccccccggaactcgtgctggcagctctcaccacccacggtcacgttgatacccacacagtcagccacagcgcccagcccaatatactcaaacttaatggcatgctcctcaggcttcagtggaactaggttggcactgggtggatggggtgggggtaggaagcgaaagccaggcagtgtaaagccagcagctccatcccctcgggcactcagattccctgccacccatccctgggggtctcggaccacatattcaggaaggcggcacagctgctgctctggaagctgcctctcacacctgctttccactgccctaagcccgtcatggaatgacagcactaagtgccatgctgaagttagatgctggccacagatggtgatgtgggagttgatgtagccacagttggggctgatgcttagcacgacagggtcttctctgtactggaaggtccaggaaccaggtacctgggcaccccccacctgcaggctaagggggacactggccaccgtggccccagggggtgtggcacataaaagctgcccctcactgacccgtgctagcagacactcagtcccattgaccagcacagcccggctggtgcctacagacagactctggccttcaagagtgagacaggtgcctcctgcccgtgggccaaagaggggttgcactgctatcagcactggctccatgaaagagaagcctctcagcacggaggtgccgtctacccggaagtgcttgcccggtggcatgttagtcacggtgaggctgacgttggtaggccccactgcctgggtgcccaagggctccagttcacactcaaactcctctacaaagtctttccggggcactggtctgagttttgagctgtccttgggcagtggccggcagggactttggcccacagtgacctgatgggttccctcaggcaccagaccagaagggtgaaggtagaagttggagccacacagggtcagccttgtactgccccttagaggtccactgtgggggtggaactcagtaagcttaggtgggcagtggtcctgttgccaggagccaggacactccttctgctggccgcacatgttcccacaccagccacagcccatgaaatgccatgcccttaggcaacgcccacaggtcaggaagtggcggcagccagggcctcggataggtacctggaaaacctggtccccagaggcaaagagtaggtggtccccaagacgactgacatcccgctgcacgggctgcccactgtcacccagtgagaagttggacacatacagcaagtagtttagtgacctgaccagctccacctgcaggatacgcccatccattgtgcccatgtgtgccactgtgacgttgtcaaggcgtgtcacatacaatgcagtgacctgtactggtcccaacagcccattgaataggtccacacgtgagaagctgctactgaccagcagagggaagtggcggcagctggtgttggggctgagggcttccaggccaggcgggttggggcaaaaactgggcgactggaagaagtcgaggcctcgccggaggcctggatggactggggattcacaacagcgctccacaccctcatcaattagtgtgtccagcaggtcaatggggaaggcacagacgacagagttggggcccacgccaggaccaccatccttgccagtcacaaagaccccaaatagtacttcctggccctcggcgatgctcagctcagtggcaagttgggcacccactggagcggagtgggccacctgcagcacagggtagggctgtccgccttctggggccccccggcgcctgcgttttggagcaaatctgcagtcgaggaccagctcccgatagtcacccaactctggctcagtggcgctaagccgtgccaggcgtgtgtgcagggcactaggatcatctgtcacgctggccggctgtacagtcaggaagtatacgaaggctcccgtgtggaagctgtgcacgtattcaatactgtaggagacaagatgcttgggcagcactgacaacgccacaaagcccggtgcgaatcccgaggcgtcagccttgagacgcctgatagacactgagcgtgggctgaagctgccagccacggctgcgtccagtgaggatgccacgtagaaataggaggcctggccttgctcaaccacagttacacgggtgcccaatgggctggccacacagtcggggcagtcatcgggccggttatggtgggctgagaagaggcaggctggcgctgccagatgcacggctgtcccttggggctctaggtcatgcaggaagcagcggccctgcaggctggagccacaactgaccagcgcaggcagcgcgggatccagcaccagcacctttgtgtctgtgtcaccgggagggccgtggggtcctgggccacaggctgcacacgtctggcagccagggtctccagcagggcccgtggccaggctctggacagacttcaggtcaggcccaagcacatgcaggcgattgcgtatggctacaaacacagcactctcatttctgtcgccctcgtaggtcaccatggcctgtaccaggcctccggcggagaagctgggcaccacgtacttcacgtcaaagtcgcgagaggccgcgtagggggtgcgcgggcactgccagtcctcgcccgccgcgggcttggcaggcaacagcagcagcaacaggaaggactgaggcagcggcgggaggagctccatcgaggcgagctgggaccctagaggatcc

SEQ ID NO: 61454 - DNA, 2150 bp, Homo sapiens
gggggccccaaaaaaaaaattatttttttccatccccggggaggtaagtttgatcctttagaacggccgccccttttttttttttttatcaacacattcactaagatctaatttgtctttttctgacttatgctcatgttttatcttcttttctttttcaaaggtttttctttccatcttctcaatgtccttttctttaatttgagatcgcttctcaggtttttctttactttcctttatatgcttttcttgtttttcaatgtctatttccttttccactaaatgaagccctatagattcctcaatggcactcatacccaaagaagtaaattctgagtctttatctgtgggtatgttttctctctcttcttttagatcttttattttttcctccctaaaagatttctcgctttcctttttaatcttgtctcgttcctctttaaagttcctctcttttgacacatgcttttccttggttgatttatcatctttgatgtttttttccaatttaaaaaagcttttcagacccgaaggccatttaatacagtaaatcttacttgggtagtttagcaaacattttttaaaacccacatccaacagattggttagtattagatacacagatttggtttcaaagctgaaatacccctggtggaataaatcttctcatgaaattcagttatattatgccacaaaacagggacacttatctattgacaacttaaatattaactcagtggggctacctgggtgatataaataggggaaaaaaccagtgggtcatgggatttagggagtgaggaaggactatggacaccagccttaccttggacttggggacccgcaaaggatgttaaaaatctatcctagaatttaaaacaggaaaaatgtccaatattccactccccattcggcccaaaccatcccccaaggaatacacccccaccccacccccacatgaggtttactaaccagctgctacagatgttactatgtcactaattaacaatgatcacagaaaatgtgtcataccagagtttttgttatcatacacaatgcattagtggctgcaggaatcttcctccaaaagctaccgtcagaaggcaaactgacaaatgtccatgccgctggtccaagaaaccacagctaagagccatgaggcattcatttgtacattgagctctctctggcatgctccccactctagttagaggggctggggtatggagagaccgtcccagccgggcgctgcagcctcctactcctgggcctccttgcgggtcaacttgtagatctcagtgggtccgtccacatgggtgatagtggtggtgagctggagttcttccccactatggacacccagatcgccattggactggtcttctccatagtttttatgggatggtgcatacaagaacatcagagcaaagacatacagattccacatcccatagatgcctgtgaaaaaggcactgttcacttggactgtgatgccgccccatttccaatggccttccgttacctgactaacgatgaagaagatgacagtcatggcagcgcaggccaaggtgataagcatgaggaacttgaacctaaaaattagcccctcatagtgtagccgccggactttgctcatagctggcaggctggactgcttcccactgatgttccgaaacacctgaaataccatgaagcatagaaacaggaagtagaggcagaggcagattccagccacgatgatgaaggccatggccagctctgttccaatgtctgtagtccagatactgtagaagggattcgtgagttgtacccctctctcacacatgtcaaatatgaagaggcagaaggagccaacggcaatgggtccgacttgcttccaataccctgcgatgtggttccgctcgtgctgatccatcatgtgctcgccacagaagatgatccagaaggacagaagcatcgcatagaagatgccctgtcggatgtcaccaaacagcagcatccaggtccagtcaaacccgatggaaaaccattccactgggatattgataaaggtcatggaaatcccaagggcaaagatgactttttccagaagcactgggggtcgggacatcatggtgatcctcctccaataccacaccataatgatgaag

SEQ ID NO: 61455 - DNA, 947 bp, Homo sapiens
attctatcccggtccacagtttaggaaccatggacaaaagtccaaggaccagaggcatggagttttcattagaaggttctgaattcatctaatggctggttatttttacagatgccaagtttacaaaacatacaagtgcacagacaggtgtgggaggtagctcgaaatatacagagtgttcgcaacactagagacgtcttctggctgccatcaggggactcggaggtagggtaggcttggtgaggcccgtggcttgtgtccgtggcacagcctcctgcaaaggggctgccctgctcccctgttcccatggtgccaggccgtgctccccaggtgcctccggggtgctgaagatcttttcatagtactcgatcagcagttcagtgaacatgttcaggggcacaagggcactcagggaggagaccccctgggatggccagatcaaattcagcccgaagacacaggccaggttagagctgttcattttgttgaagatgctctcccgggacaccgcatgcaggaagcccatgaggtagcggaggacgacgtagttgtgctctgggaggctccgtaagatctggcggcagccagtgacacgcaggctgctctccacacctggaagggcatggggctccctgctgagctccagaggggccaggggcagcgaggtgatcccgagaatctgctcgtaggcctggaaggtcagaagcggctggggcagctctcgcaggaaggtcttcaggatcacggcagggatgtgaatgtccccgtagtcgtcaaagttcacgggcttcccttggttgtagagcctctggatctcgcggacggtctgcacgctggcggatctccggaacaggccctcggtgcgcaggcctttctctctcaggtacgtcactgtgaacctcagcacaggggggatgagttcgccttgatttttgtctttgaggtat

SEQ ID NO: 61456 - DNA, 1688 bp, Homo sapiens
caatttctgaatagcaactggaatattcaaccaacaatggtcatggtcagttttgtattttttccttaacttatatacttcattctttccaactattttaaagctaaatcttttttaaaaaagttttaaaaataagtcacaggcaaatcatgaagagttgggtttatttcaacagtaaatctgaaactcttgccttaagcaagagtactacagtaattatatcaggaatagacaatttcctacactgtcaaatatataaaagttccttttgcactttcttcaacactgatcaacaagcagattcagtccacatttgctttgatctaactactgagttaacccaagcttcttcttcagagactctggcatctcgggtggaggagggcgaggaagtctgaagtagaccttcacggagtcatagataaaccactgtagtgcagtcagggtaccaatcatgatgatacgggcaaacagtcccttccatacacctttaaatccaagtctcttgaggaccagagaagcactgctacctttttctttattcaacacagataccccaggaattcaggcaggggtgagaaaacaattggcacaaaagactcgagctatggtaacctgctaccaaatggttacaaccaggctgctctggcttttgaacattcaactgcgggggcctatggaacccacaaaacttgtacagtggcttcaaacagtacgttcaaagcagggcgaacttcatcatggtgtatggtatctgtctcatccagagaggagcaacccccttgtagaatgcttttaggccttcttccttatacattttgggagctgcatccctcaaagtgttggcataacctggctgggtttgaattcgaaccttagcagcttccataggagccagggcaatgtcagcaaagaattcagcactggcagaggcagccaaatatagtgatgtgcgccagagataagtattctcctctccaagcatattgctatacaagactttaaagacttcataaaagccaaacttgcagagtccctgcatggagtagccaaggaaagtcggagcccatcctttagccaaaccacgaacaccatcctctttaagtgtaactgagaatccgttaaatatgcccttgtacttttgggggtccacctgcatacggcatttcactaaatccaggggaaccacagcagtgtgtgtcagaccacaacttaagaccccaccaaagccacacagtgcataatacttcgcggagccaaattcacaactgtactcttccacggcggcggctgccaggttgcgagggcggcggggctggcccgtgggccctggggagctgctgcggaggtccccgagaccatcgtgcaccagctgcagatgtggcgtgttgaaggggttcgcccgcgccaggtgcgccacggacgagaacatctttctaggggaggagggagcgacggttagaggacaggcaaggcgccggttagcgttaccggcgccctggaaccccaaccggggccttttccttcccgtctccacgcccttgaagaggtcacggcggccttcgaaagaggctgctcccggctgggcccaccgccaaagcagcggccccacaggagctctgggctccgctccccacacccgccacaggagaaggcccggccacactcactccctaagatggcgatca

SEQ ID NO: 61457 - DNA, 1858 bp, Homo sapiens
tttcgtgtccgtggcggctgcacgagcagttcctgtgggcagtgggctcaggggcctgcaacggaccctacctcttgtagtgattctcggggccacgggcaccggcaaatccacgctggcgttgcagctaggccagcggctcggcggtgagatcgtcagcgctgactccatgcaggtctatgaaggcctagacatcatcaccaacaaggtttctgcccaagagcagagaatctgccggcaccacatgatcagctttgtggatcctcttgtgaccaattacacagtggtggacttcagaaatagagcaactgctctgattgaagatatatttgcccgagacaaaattcctattgttgtgggaggaaccaattattacattgaatctctgctctggaaagttcttgtcaataccaagccccaggagatgggcactgagaaagtgattgaccgaaaagtggagcttgaaaaggaggatggtcttgtacttcacaaacgcctaagccaggtggacccagaaatggctgccaagctgcatccacatgacaaacgcaaagtggccaggagcttgcaagtttttgaagaaacaggaatctctcatagtgaatttctccatcgtcaacatacggaagaaggtggtggtccccttggaggtcctctgaagttctctaacccttgcatcctttggcttcatgctgaccagttctagatgagcgcttggataagagggtggatgacatgcttgctgctgggctcttggaggaactaagagattttcacagacgctataatcagaagaatgtttcggaaaatagccaggactatcaacatggtatcttccaatcaattggcttcaaggaatttcacgagtacctgatcactgagggaaaatgcacactggagactagtaaccagcttctaaagaaaggtattgaggctctgaaacaagtaactaagagatatgcccggaaacaaaaccgatgggttaaaaaccgttttttgagcagacctggtcccattgtcccccctgtctatggcttagaggtatctgatgtctcgaagtgggaagagtctgttcttgaacctgctcttgaaatcgtgcaaagtttcatccagggccacaagcctacagccactccaataaagatgccatacaatgaagctgagaacaagagaagttatcacctgtgtgacctctgtgatcgaatcatcattggggatcgcgaatgggcagcgcacataaaatccaaatcccacttgaaccaactgaagaaaagaagaagattggactcagatgctgtcaacaccatagaaagtcagagtgtttccccagaccataacaaagaacctaaagagaagggatccccagggcagaatgatcaagagctgaaatgcagcgtttaagagacatgtccagtggcctttggaaaggtggtggggatccagttcaggagggaggggtatgtttgtctcccagtctgggcaaaggagtgctatgcggaattctctgcatagcagaaaagctcccaccattttcttttgatgtggttttaaagtctcacgttctctataatagaaacagcaggtcttgtcagctccttgtgtggctgatgtgtctggaaatgatgtagttcaggaaagcatttttttttctttgaaccttaaaggttctattattaaaagcagcacagattccacatttttatacatgaggatcttctttgtggtgaataccaggattgactgcatccctttaaagaagttttatgtccctgactctggctaaaattatctaatttccagatgcttttgtagatgactgaagtatttgtgagccacatattgggagttctagatttga

SEQ ID NO: 61458 - DNA, 4403 bp, Homo sapiens
  misc_feature (1)...(4403): n = a,t,c or g
cgggcatggtggtgtttgcctgtggtcccagctacttgggaggctgaagcaggacgatcgggtgagctgaggcagtcgaggctgcagtcctcgagtgggctcaggagaagcgtaagctgagcgtgttgcatattcacggagtctacaccaaccctagtggcattgtccttcatccggctggatatcagaacgtgctcaggaacactgaagtcatgagagaaattcagaaactctacgaaaacaagtcatttcttttcctgggctgtggctggactgtggatgacaccactttccaggcccttttcttggaggctgtcaagcataaatctgacctagaacatttcatgctggttcggagaggagacgtagatgagttcaaaaagcttcgagaaaacatgctggacaaggggattaaagtcatctcctatggagatgactatgccgatcttccagaatatttcaagcgactgacatgtgagatctccacaaggggtacatcagcagggatggtgagagaaggtcagctaaatggctcatctgcagcacacagtgaaataagaggctgtagtacatgagcgagctagagaaatcaccaccgtttagaccaagctgtaaggccctactacagacagtgtttaacaagtaaacttacaagaacccaacacaattcccagaaagtaacaatagccagaggttgaagggcggggtagaagaggggggaatgttgcaagcgtaatccttcataccaccctggttcttggatattctgccgcctgttcaagttcaagaataaaagcgaacagcaggaccccaaatgcagctccccaaccccactcccccaggcctagacatgccttgtgtcccacacagcacacccaatgtgatacttcccactgacccggctgcagctctgcatgaaggactcggggtcctggatgcccatgggaatcactgtgggctcttgttgcagttttgtacttctattacttggttttttcaattaagcttaatggcttttttaaaaacatgacttgaagctctagttttctaggaccttttacagtgttacagtatttttacataactaagcctgtatttaaaagcttgtttcatttacgttgccaggaccctggctctacttttagagctcattgtaagaaactctaacttgcatcaaggtactaataagcttaattttaataacccaaagtttaaaggttccgatctttctccttggggtggagtgatctcattctcaggacaaccgtttacttacctgattcctcggagcattatcaacttctgctctgttgtcctgaccatacatatgtcctagaactacagttaagtgtgttgtggaattttagttttgaatcctgtataagagaactccaagacctaaaaggcaatttatttatgaaatttattttcttatataaattacttatttctctgggcagacagccttcaccttattgcactaatagcacatctgtaatatcaagctacaggacaagtcttaacaagaggtttgtgttcttcaatgtagcacttgtctaccaggcactgtagaggggagtgatgaggaaaagccaggactgcttaggaggtgaaggatgggaggggagggggtcatcatacatccttctgacaattggtttcctcccaggaaggggaacatgcagagcttacttctggattctgggagtgggaagagttgggaggccaagaagcccaatgcaacgctgcagctgagctccttttatttctgagggaagcaaggactcatcttttgctcatttgtaacaaatcactccagcctagctgatgctttggggtaaacaatggagtaggagtcatcatcagaattagaattagcagcaattaacaggcaatacactgccacagtgaggcgggtgtcatccaggtcctggggacctgcaggctgtgtatcctagggagaggtgccattcaagacctggcgctggctctggaagagtctcttaacctaatgcagctgggactcattaggctcagacggctcttgaccacactaattattagcaaagctctggtgttgggttccaaccattggtcaaagctgtaataagactgagtctgtaggcagagtgaagggggtgcctgagtaggaagggggaggcccgctgggagagggtcagtgggcagtgattgtaacatgattaggccttccttgcagatggcggctgtgctgaacggggagtggggttggaaggagccacaagccccctcactctgcctttgtactacactgaagacaggttgctcacatactctaaagcacattcttgatacaggaagaagggcttgtggggaaagcggcgatttggtattgggcaagagccacgttaagccttcatgagggcagccaccacagccttggcattgaggctgcgtaggtcacagtaggtctggccggtgcccacaaagacgatgggtttgcttgtgatgtacgtcatagaaatagcagctcccaccttgtcatcaatggtatcaaatttggtaagaacaatgccatcaatgagccgaggtgtctgagccatagaatggtcagccaaggctctgttgaacttgaccagctggtccacggcttcattgcctactaaggcttctcctacaaacagcaccaaatcaggtgtattgacagtaatgagtttggccagggcagtcatcagaggggcattgtcttgcatgcggcctgccgtgtccaccagcaccacgtcaaagccttggttacgtgcaaaagcaatggcttccatggcaatgccagcagcatccttgccatagcccttttcaaacaactgcaccatggtgcggccaccatgcttctctggagggtgtagggcactcaaacgccgggtgtgtgtacgcagctgctccacggccccagcacgaaatgtatcacaggcagcaatgaggacactgaagccattctctaacaaccagaaggaaatcttggcaagattagtagatttccccactccattaacgccgcagaaggtgacgacataagggcgcttggcgacgctgggcatccatgatgtcccggagcatgtctacacggacgctgtggctgcacgaatctgcaccagggactcctgtagggcttgctttactgtggaagtcaccgtgctgaacgtccccatcaccttcccttccaacttgttggcaacagattcacagagctggacggcaatgtctgcagccacgttcttagcaatgagatgatcacgcatcttgtccagcacagattccatgtcttcacgactcaagctctttgaacccacaaggcccttcagcataccaaacatgccacccagtgttcccttggtcgcactaggtttggtagagttttgagcagccccttcgtcatcagagctgctgcagtccagatcctgaagctgccccccagacccagtccctcgaatcaggttgatgtcctcagacaaggcagcctcaggggttccattggtggtgggagtactggaatccaacacttctttgttagcacagccacccagttcccacacccggggtgcttttttgcccttctcctttggagcatctgacttcgtggacttgttggacttctccatacccctcccatgcttctgaatgaactcctcgcgcttcctgcggatcagctcctctttggaaagttctacctcgttctcaggacccactggaagacctgacttttctgcagggactggtttgctggtagccaaaggaccatcagaaccttccttcttggcccccttttttttgctattctttgctttttccttgggcttttccccccgtgtctcaatcatggacctcacaggtttcttggccttttcagaatcttcaaatttcttcatggtagtgggagcacggatcttactgctctcctctgcttcacgaaggagccgcaggaagtcattttggaaatcaaaagtgcccatttaataaactttaaagccactttgctgttggatctctgtgcggtacttgtcccgaaacagccgatgcacgtcatctatcaatttgtctacatatgtcagtgtcaggatcttctgaaaaccaaccacaaacaccagctcaaactggttgtccagtttatacttgagtgtgagtgcctcatgggtgaaagaaggttgttacctcnccccgttcctgcagcagcacggaacgaatcaacgcgttaacgggtccggtgcatgagtcgctaacgccctggaagcaccagagcacaagcccgcccttggagaaaatggtgaagaaagtcgagcatggcggcagcggcagaggagctggggccggcgccgggaattcaggccgcgttcgccgccgcttcctgctgcgccaagcgcgggacacgt

SEQ ID NO: 61459 - DNA, 7027 bp, Homo sapiens
gggcggccgttcccgcggccccctcgcgctttgcccaggctccccctgcgaggccggaggcaggatggaagatggactgtggatttcgaggagtgtctgaaggacttcgccccgcttcagggcagctttggaagaagtagaaggtgatgtggcagaattggaactaaaacttgaataagcttgtgaaactttgtattgccaatgattgatactggaaaagccttttgtgttgcaaataaacagttcatgaatgggattcgagaccctggctcagaattcttaataatgatgcttgtcgttgagaccaagtttgccccaagttttctggacagtcttcaagaaatgataaattttcacacaatcctgtttgaccaaactcagagatcaattaagggcacagctttcagaactttgttaaagaagatcttagaaaattcaaagatgccaagaagcaattcgaaaatagtcagtgaaagagaaagaaaattgcgttagtaaaaaatgccccagtacccagtagaccagccagcttggagttgtagaaaccccccaacattctgacagcaacaagaaaatgtttccgacacatagccctcgattatgtgcttcagattaatgttcttcaatcaaaaaggagatcagaaatcctaaaatcaatgttgtcatttatgtatgcccatttggccttctttcatcaaggatatgatctgtttagtgaacttggaccctacatgaaggatcttggtgcacagttggatcgactggttggggatgcagcaaaggagaaaagagaaatggagcaaaaacattccaccattcaacaaaaggatttctccagggatgattctaaattaaaatataacgtagatgctgcaaatggcatagttatggaaggatatctgttcaaacgagccagcaatgccttcaaaacttggaacaggcgctggttttcaatacaaaataatcaggtggtttaccagaaaaaatttaaggataatccgactgtggtagttgaagacctcaggctttgcacagtgaaacattgtgaagacatagagcgacgattctgctttgaggtggtctcgccaacaaaaagttgtatgctccaggcagattccgaaaagctgcgccaggcatggattaaggctgttcagaccagtatttgctactgcttatagagagaaggatgatgaatcagagaagctggataagaaatcatctccatccacaggaagcctagattctggaaatgagtccaaagagaaattattgaaaggagaaagtgcgcttcagcgggtccagtgtatccctggcaatgccagctgttgtgactgtggcctggcagatccacggtgggccagcatcaacctgggcatcaccttgtgtatcgagtgctccggaattcaccggagccttggggttcatttttcaaaagtacgatctttaactttagacacctgggagccagaacttttaaagcttatgtgtgagttggggaatgatgttataaatcgagtttatgaagctaatgtggaaaaaatgggaataaagaaaccccaaccaggacaaagacaggagaaggaggcatatatcagagcaaaatatgtggagaggaaatttgtggataaaatattcctataatcattatcacctccctgagcagcaaaaaaaagtttgtctctaaaagttctgaagaaaagaggctgagcatttctaaatttggccccaggggaccaagtcagagcatctgcccaaagttcagtcagaagtaatgacagtggaattcagcagagctctgatgatggaagagaatctttaccctccacggtgtcagccaatagtttatatgagcctgaaggagaaaggcaagattcttctatgtttcttgactcgaaacatcttaatccaggacttcagctttatagggcgtcatatgaaaaaaaccttcctaaaatggctgaggctttggctcatggtgcagacgtgaactgggccaattcagaggaaaacaaagcgacaccacttattcaggctgtattagggggctctttggtgacgtgtgagttcctcctacagaatggtgctaatgtcaaccaaagagatgtccaagggcggggaccattgcaccatgccaccgtcttagggcacacagggcaggtatgtttattcctaaaacgaggtgccaatcaacatgccactgatgaagaagggaaagaccctttgagcatagctgtggaagcagccaatgctgatatagtcaccttgttacgtttagcaagaatgaatgaagagatgcgggaatcagaaggactttatggacagccaggtgatgaaacttatcaggacatatttcgtgatttttcccaaatggcatccaataatccagagaaactaaatcgtttccagcaagattcacagaaattctgaatttttttaaaaatgggaaaatatgcccatctggtgaccccctaatgtatacagctaaaaattcacaatttttttactgctttaattctacttaattttggtagatattgaatggcttggaaaagaggtacccattcatatatttataaattaggggagtagttatctagtagtaggagaggaacctagtttaggacctcttttatttaaaaaagcctatttaaagggctaatttctggtagacagaagttcagtctagatttaggccatctctagggttacaagatgataggaggttagaccaaaagtgattcttttgccaatgggtggtggcattgatttttttcctccatgcatcttgcccaggatcactcagtcaagcatgtcttcatcaagtggaagccaactgtcctgcctgcctcaagaatatgtgttttctttagcttccctgaggatttttggtggttcagaaataggtgtgtgtgttgatgtgtttttggtaacctagctttcatacacataatatatgatttattagaactagagaatgtgttttccccgtttgttcataaatgcggtcggttatactttttaggtgacaggttattgtccagtactttaaagtaagtatgtataaaggctgtacaggtagaccataattcagtcccttagatttattttatgcagcaaaaaaaagctcttttttttttttaatcacaaaaaaaaaccccagttcaaaatgtgtagttcttcattgttgggttgattccccaaaaccttgacagatgtatcgatggaataaaagtatgttttaaaggttacttgaatgtcacaaaattatgccttcatcaaaactttaaaggaaaaatcaatttataaaatcatgtaggccatttttatatttgaaatttgtccttttaaagatagttttgctgttgctcctagtgaaagaaaaatctctgtacaaaggagaaaaagaaccccacttattcttagttaatactaaaatatatagcaataaattgctgtttattttttctacatctattttgtgtacttgtacacagtgtacattcttttaaattatatcgtgtatatagctttagtattcggttacatgattcacagacccctgaattccaaaatattatggataaacattaccatttatatgctacaaattagtctgattccatctttgaaaatgtcttaaagtataaaataattaatttgctttttttttttttttcccgagatggcgtcttgctgtgtcacccaggctggagtgcagtggcacgatctcagctcactgcagcctcctcctcttgggttcaagcaattctcctgcctcagcctcccgagtagctgggactacaggcacccgccaccattccgagctaatttctatatttttagtaaagacgggtttcaccattttggccaggttggtctcgaactcctgacctcaggtgatcagcctgctttagcctcccagagtgctgggattacaggcgtgagccaccgcacccagcctaatttgccttttgattccttcccattgttgtcaacaattaagtctattcttcttttagaaattatatgtaaatgatattattgatactctttctaaataagaggttttaaaatatataaaaactttatgatccaattatagataaattttctaacatttcccagtcactagggttttataagttgattaaacatcaaatcagaatctagccaagcaggaattatattgaaataagttcacattacagaaaaggttcccataatttggcccaaactgccatgcatgtaatgccttatttagtaatggtcactgtatgttagataaggataaaaatatatttgtgaattacttctgaggaaatgcctaacttcccacagcattgtatttaattataacaataacgaggaacattaaatctttatctttgctgtttcacctcaaagtcatagatcatctggctttttaggcaccttcactaaaggcaaaaatctgatttgtagtttttattagcatgtaccttgaaattatttgaccaagaagctcaaagaaaagaagtacgttaaagaaaaagaaaaaacctcacttttcctttatagtgtcccttcctgttttaattcctaaagatcctgacttttatctgaggaagtctaggtagttttccttttggatctggccattggtgcgtgtttcattcagatcacctctggaatctctgtggttgtgaaggcaattccttatgagactcttgcctcctgtggcttacgtgatgaattgttaatatggcagtaattaattagtatctacttaaatttagtggtcagaaatgtatttgaagtgccttaaagatgatcatggttcagaatatcttcagagaaagcaaaatctttaatattgcagggagcctagcaatacaagtacacatttctgtggcttgatttcttgaatatgctgagacccaatttggactacatttggcagaaatcatggagtaaacagcaaggctttaaattaaattaatagttacaaggtaggttggctcttaggtgaatttagccatgtcaactaatagcttttatatggtatgtaacaaatctgaattatgttatgctgtgaattattcagtgcattataagaaatcttagttaatcatgcttttgggcttcattagtcaatgtgattggccttttattttctttccataacttatctgctattattagtttcttattccttattattaatctgttagctcattatcattagcttactaacttgaaagttagattaatatcaaaataagaatagcagcactatgaagagttaataaaatgcaatttcatgttagagctagaataaaagtaattgagcagtcatttgcaaatgcttcattataacatttatgtgcttaagatttctaaggttttaaaaagttacctttaatacaatccttagaaactcagaaatttcctgatattcattagattatggtgtttgcctaatttataccggttttcactgtatattttaatgaactttgattggttacttttccagacatacagatttaatttggaatatgaactttggttcttcatgagtgcattttgaaaaagaaaaaaagtacacattcagaatctggccaatttaagtttgtattttaaaaatattttatgcatgttaagtatggtcgcagtaaatgaaattgtgtttaagactaaatttactaccgttttgaacagacattcccagatcattcttatattgtcagataacacttgtgtataatatcactttggatcatggacatgagctggaaaaatgatgtatttttgtagattgtatgtccagaatgactttagaaccgcatgatacggtggaaggagcactggactagtcgtcactaccctttttggattcagggctcctcacaattaaaatgagtgtaatgaaacaaggtgaaaatatagaagcatccctttgtatactgttttgctacttacagtgtacttggcattgctttatctcactggattctcatggtaggatttctgagatcttaatctaagctccaaagttgtctacttttttgatcctagggtgctccttttgttttacagagcagggtcacttgatttgctagctggtggcagaattggcaccattacccaggtctgactgaccaccagtcagaggcactttatttgtatcatgaaatgatttgaaatcattgtaaagcagcgaagtctgataatgaatgccagctttccttgtgctttgataacaaagactccaaatattctggagaacctggataaaagtttgaagggctagattgggatttgaagacaaaattgtaggaaatcttacatttttgcaataacaaacattaatgaaagcaaaacattataaaagtaattttaattcaccacatacttatcaatttcttgatgcttccaaatgacatctacagatatggttttgtggacatctttttctgtttacataaatttatccacttaaaatgtgataatgtggagacaaagcaagatttgattacataaacttttctctgcattggtcttttcactatcttatttgctaacttttcttatttttcttcaacctccccaccctccattttttggatattaaacagggaaagcttgctacattataaagattgttggcaccatttattttacacaaaggctaaaggttaacttttggaaatgatgagctacttttatatatgtgtttactcatgctttgtgatatttctggatcattccagtcataaagacttattacatgtactatttcttgctacctgtgaaaaggtatattttaaagaatgtataaccaacagtccatttactttttattagtatgtagaggatttgtatctaattcatgaatgtagttttacagtagtttgtcattgtaaatggagcaaagtacattatcttctaaaatgtacattatgtaagaattgtaaatatacttaagtaatttgtatgccaaaaaattacaataagtcaataaagatctcacctctgaaaaaaaaaa

SEQ ID NO: 61460 - DNA, 3844 bp, Homo sapiens
  misc_feature (1)...(3844): n = a,t,c or g
aaaaacggaccctcattaacagaagcactggaaaacgctggaattttctatgaagcacaatacaaagaagtaaaagtggtggctaatgcatataaaacctttgctaaccgagtaaacaatttaaagaagaagttggatcaattgaagtcaacccttccagatcctgaagaatcaccagttccttccccaagcatggacgctccctccccgactggttctgagtctccttttcagggaatgggaggtgaggaatcccagtcaccaaccatggagagtgagaaatctgccacacctgaacctgtgacagataatcgtgatgtggaagacatggaactctcagatgtggaagatgatgggtcaaaaatcattgtcgaggacaggaaggaaaaacctgcagagaagtcagctgtatccacttctgtacctacaaagccaacagaaaatatctcaaaggcctcttcatgtaccccagtgcctgtgaccatgacagcaactccacctcttccaaagcctgtgaatacttctctttccccttccccagcattggctttgccaaacctggctaatgtggatctggcaaagatcagttccatccttagcagtttaacatcagtcatgaaaaatactggggtcagtcctgcatcaagaccttctccaggaacgcccaccagcaacagcatcctcaccagtggcctgaaaacacctgcacctgccacgacaacatctcacaaccctctggcaaatatcctctccaaggtggagatcaccccagagagcattcatgtctgcactttccaaaacccagacacagtcagcccctgcactgcaaggcctgtcatctttacttcagagtgttactgggaacccagttccagccagtgaagctgcctcacagagcacttcagcctcccctgccaacaccacagtctataccataaagggaagaaatctgccctccagtgcccaaccttttattcccaaaagcttcaactattctcctaactcatcaacttctgaagtctcttcaacttcagccagcaaggcctcaattgggcaaagcccagggctcccaagcactgcttttaaactaccttccaacactaaggggtttacagctacccacaatactagccctgctgccccacctactgaagttaccatctgccaatcttcagaggtctccaagccaaagctgggagtcagagtccacctccccaagcctgggaaatgaagattcacaacttcttaaaaggtaatcctgggttttcagtggcttaaaacttaaaacatcccaatcctgnaggcagtttggggtccagcgccccatcagagagccatccctcagacttccagcgtggccctactagcacctcaatcgacaacattgatggaacccctgtacgggatgaacggagtgggacacccacccaggatgagatgatggacaagcccacatccagcagtgtagatactatgtccctgctttctaagatcattagccctggttcctcaacacccagcagtacaagatcaccaccccctgggagagatgaaagctacccccgagagctctccaattctgtatctacatatcgaccctttggtctgggcagtgaatctccctataagcagccttctgatggaatggagagaccatcttccctgatggactcttcacaggaaaagttctacccagatacttcttttcaagaagatgaggattaccgagattttgagtattcagggcctccaccctctgccatgatgaacctacagaagaaaccagccaaatctatcctgaaatcaagcaagctgtctgataccaccgagtaccagccaattctgtccagttatagccacagagcccaagaatttggggtaaagtctgccttccctccatctgtaagggccctcctggactctagtgagaactgtgaccgtctctcatcttcccctgggctatttggtgccttcagcgtaagagggaatgaacctgggtctgaccggtcaccatcaccgagtaagaatgattcatttttcacccctgactccaaccacaatagcttgtctcaatctaccactgggcatctcagtttgccacagaagcagtacccagactctcctcacccagtcccacatcgttcccttttctctccgcagaacacccttgccgctcccacgggtcacccacccacgtcaggcgtggagaaagtcctggcctccaccatttccaccacgtcgacgattgaatttaagaatatgcttaaaaacgcctcacgtaagccctcagatgataagcattttggccaggctcccagcaagggcactccaagtgatggtgtcagtctctcaaacctcacccaacccagcttgaccgccactgatcagcagcaacaagaagagcactaccgcatagaaacccgcgtctcctcctcctgcttagacttgcctgatagcacagaagaaaagggggcccctatagaaaccttgggttatcacagtgcatccaataggaggatgtcaggggagccgatccagaccgtagagtccatccgagttcctgggaagggaaatagaggacatgggcgtgaggcttcaagggtgggttggtttgatctgagcacatcaggtagctcttttgacaatggcccttcaagtgcctctgagttggcatcccttgggggtgggggcagcggaggcctcactggctttaaaacagcaccatacaaggaacgggcacctcaatttcaggagagtgtcggcagctttcgttccaacagtttcaactcaacatttgagcatcatcttcccccatcccccttggaacatgggacacccttccagagagagccagtggggccatcatctgccccacctgtccctcctaaggatcatggtggtatcttctctcgagatgcacccactcatctaccctctgtggatctttcgaaccccttcacaaaggaggcagccctggcccatgctgccccaccccctcctcctggagagcacagtggaattcctttccctaccccacctcctcctccccctcctggggaacatagcagcagtggtgggagtggtgtccccttttctactccaccccctcctccaccccctgttgaccactctggagttgtacccttcccagccccaccactggcagagcacggagtggcaggggctgtggcagtatttcccaaggaccatagttccctccttcaagggaccctggctgagcattttggggtactcccaggacccagggaccacgggggccccacccaacgggacctcaacggccctggccttagccgtgtacgagagagcctcaccctaccctcccattctctggaacacctgggcccaccccatggaggaggaggtgggggaggcagcaacagcagcagtggcccccccttgggtccctcacacagagacaccatcagccggagtggtataatcttacggagtccccggccagactttcggcctagggaaccttttctcagcagagacccatttcacagtttaaagagacccaggccaccttttgctaggggccctccgttctttgcaccaaaacgcccattcttccctcccaggtactgatggaaaccaagggaaaggcattttgaacagtctagagaacattggaagtaggagtttggtttattgttgttgtttttatttgttttctctttctcgattttttttttattataacaaagggcctctcttccaaagtaagaaatcacatacgcttacgttttactattcaattcaatcctccctcccattgcacttatctaccttccccaagttgtttgtattaaaaaaaaaa

SEQ ID NO: 61461 - DNA, 390 bp, Homo sapiens
tcatcaatacagtgaaacagcgtaatattctatagaccatccaggtgatgaaggcccattaggcctacattgtgacagagaagagagggttaacatcagtctgggccagacagtgaacttataatgttatctcttccaagtgaatgcaaaccgtgtctgagcctcctctctgatggggattggaaagaatgcctttctcccaggccagtgaccacatacaagttccagaggccctgctgtcctgttgtactaaggataccacgtctagcacagcacctggactatgggttacagcttggttaagtttatgtaacccactaccattcaccataatccatctggcttctactggggccatattggtgaattaaagtctctgaaagtagaact

SEQ ID NO: 61462 - DNA, 1959 bp, Homo sapiens
  misc_feature (1)...(1959): n = a,t,c or g
ttttttttttttgcagcagcagtttcacatttattgagggcctgccccagaggagctcacagcctgggggctgaggaccccgaattgtgcagggggcggggaagaaaagaggtgaaggcaaaaaggcaggcaatgcagagacaccgtggcccaagcagagggggtgcaaggcaggcacagagcagggggcctgatggcggattggggaggtggagaaccggtcagccctgcctagaccttgggactggtgacacccacaactttgaagggctgccctcccccaccaggaatggcacttgcccggggcacccttgtggggagggcccagctcctccacctgccctgagccgggtccagctttcacaaaggcccctccacccaggacttcccaaccatgcagactcccggtggagggcaggaagctggggtctggggcccagccgggacgtggaggtggggcctatgagggagcagatgaagttgttggtggccctgggaccctgggcaagtccctaaggaacttccaggatcccatagaagcccctgagccagctaagaagggaaggaagcagaacccaacgaagcgaggaggggcctccaagaggcctggcccctcaaacctgctcctgttggggaagctcaggagtagataggtgaaaagcagggggacccacctggggggagggggcagcagacagagcagccaggcgggcagcagagcagggacacgcacacacggctcaccaccagcaccccctttaataaaacatggggggggggtcatgtgacaggaagaagggggtgaaataggaccattttacaaccacagaaaaacctctgtaacaatgtcctaacgccctggcaagaagggggcaaccagggcaaccaagcgggctggaacccagccctattttgtagaggatatcgtagtgtcccaggccggtagagaaggtagacctttgggctcggaagccctcagggaaagatgtgcggattggtggttgccgccctcgnccgcggtcccatgtactcccaccctggatggacacgctgaaggccctgggccagcgcaatgatgtggatgtggtcgctctccttgcacatgggctccaccttcctgcttggcagaactccttgacagtccgtccaccctcgatgaagtgctcgaagaacttgctctcgcgctgcaggtagcccgaggtgagcagccgcaggtagaccacaaggtagtcggaggtgctctggtcattgaaggaggccagcaggtcggcgacagaggtctgcttctccacctgctcaatcaggtccatgaacgtgttgtggaaatcctcaattgtgaattcagtgaagccctgggacaccaggtcttccttgctcttggcagacacagccttgaacctgggggtgggatggaaaggcgggcccagcatgggctcctcgaccagcccagacgccagggccgagacagcactgccccgcctggcaaggccagagtccagcccatcgcccgggaaggagggagacaccctactcgagacacatcctactcgcccggggaggaggtagacacccacctgcctcggtgcccagtgcccacccttctcaccgctgcaactccttgctgtcatccagcagtgcctccaagtgggagaatccgaaagcccgatagaaacagttgccgtcaggcctggtcttgcggatgtacgagtactttttgtggaggtccttgatcttctgttgatagatgttgtcatcttcagcatactccttgtataggaccgagagctccagccgctctgacaccagagggttctgcacagcaatctcttgctgaattcggtcctgctgagccatgatggcttcatcataggccagacagttaacaccttcggagtcgctgcccagcggctcctgcttctgctgctgaggttcctccgccgccatctttaaacagccccc

SEQ ID NO: 61463 - DNA, 1690 bp, Homo sapiens
  misc_feature (1)...(1690): n = a,t,c or g
gttttccaaaggggattaatttggggaacccccgggtttttcccctccccccgtttttaaaacccggccccggaatttatttttgggggcccaaaaaaaaaaaatttactttcccacccccgggcgttaaaattggttcctttaaaagggccccccctttttttttttttgtgggtgttagacatcaactctacatttattgcagtcctttaagtctatgacggcggggcagccgctgacagcatgcagagcaagttaggaaaaaccgaggccctgtgggaacagcaacgcgggctccagccaggctctcgtcctcgcagcctcccacaagacctggggctcagggcagccgcttccccacccagcacagcagcagaggggccctagagcccccacagaaaggactgtcccagcctcgggagcaagagatggctccctccggacgggcctcatccaactccgccctggagtgtggctggaaggaagggacagagaaagaagggacagaggaaaggggctgtcccagcccaagaaggcagttccactgggaagtcagtcaggtccggcggcagcgcttcctctggcagggccgaggctcgcgactgctggggtgggcggaggtcgctgcctggggatcggacactggagccttgcggcggctgcaactcatgctcaggacccagcccagcttgttgtgtagcacctgcttgaggcccggcggcagcggcagaccctccagcgtgtctcccgagtctggccgcagctggcgcaggcggtggcagcacaggtactggagggaagtggcgctggcacaggagcgggtgaccttcatgctgctccgggccgccgtggagcacaccatcgggtagaatctcttgttctgcagcttggtggctgccacacctggaagggaggggcccagcctatacacttcctgttcttgaaaaaggtgagtgtgccgtgccaggtgtccaggtgcacgccaatgatggagccctggccgaaccgcgacgagaagctggtcttgtcgcccttgtggtggaggaggcccgtgtaggagaggccccagctgtcctcatccctgcccagcaggctgcagaacgtgtggcggtatttgtccaggtccacatccgacgtcccgatgcccaccatcatgtcggtgccgtagacgggagaggtcatcttgatctcccagaagtgctggccctcccccagctccttggtgccccggatggccgctgtgccgcagctgtactccatgtggaagctgaccttacggttgtcacagctcagcagggtggctgatgacttatttaagtcatcccagacccagtcgaaatactcgtcttcctctccgcagcggcagtccctgccccggtgggccgagtgcaggctgctacagaaggaggcctcgctctgcccagcacagtcacagaaggactcgccggtcacgggcaccgcactggggatggatggcggcagcgtggagtactcggggtcggagtccgagtcgctgtgctgcccatcagagtcgtagccccagttagtggagcctgctagagccacggcccgggcatctgcgtctcggcgggctgcactcaggacgaagtgccaggccctgctgttccgggggcgtctggccatggtggaaagaatctgcagcacnccctgcgcntccgccggcccggcc

SEQ ID NO: 61464 - DNA, 2203 bp, Homo sapiens
gacccacgcgttcgcccacgcgtccgcccacgcttatgctctattatattaactctttcttacctttttttctgaacttctaggccttctctttccagaactggtggaagacaaatgaaacggccaagatggtaagaaacaagccgcatttctccttggggagactgataatttaaaaggtttgttgtgtcaaaaacattcccagcttcatcaccaaccctttccttccacctctgcccactggagaccacttatatcccgaagcggacgcggcagctgaagtcaggaaaccatgcatcacattagcaggagccaactgcagactttaaactccgttcaacatgtggatgcggcagagaaatgacctgtccagacaagccggggcagctcataaactggttcatctgctccctgtgcgtcccgcgggtgcgtaagctctggagcagccggcgtccaaggacccggagaaaccttctgctgggcactgcgtgtgccatctacttgggcttcctggtgagccaggtggggagggcctctctccagcatggacaggcggctgagaaggggccacatcgcagccgcgacaccgccgagccatccttccctgagatacccctggatggtaccctggcccctccagagtcccagggcaatgggtccactctgcagcccaatgtggtgtacattaccctacgctccaagcgcagcaagccggccaatatccgtggcaccgtgaagcccaagcgcaggaaaaagcatgcagtggcatcggctgccccagggcaggaggctttggtcggaccatcccttcagccgcaggaagcggcaagggaagctgatgctgtagcacctgggtacgctcagggagcaaacctggttaagattggagagcgaccctggaggttggtgcggggtccgggagtgcgagccgggggcccagacttcctgcagcccagctccagggagagcaacattaggatctacagcgagagcgccccctcctggctgagcaaagatgacatccgaagaatgcgactcttggcggacagcgcagtggcagggctccggcctgtgtcctctaggagcggagcccgtttgctggtgctggaggggggcgcacctggcgctgtgctccgctgtggccctagcccctgtgggcttctcaagcagcccttggacatgagtgaggtgtttgccttccacctagacaggatcctggggctcaacaggaccctgccgtctgtgagcaggaaagcagagttcatccaagatggccgcccatgccccatcattctttgggatgcatctttatcttcagcaagtaatgacacccattcttctgttaagctcacctggggaacttatcagcagttgctgaaacagaaatgctggcagaatggccgagtacccaagcctgaatcaggttgtactgaaatacatcatcatgagtggtccaagatggcactctttgattttttgttacagatttataatcgcttagatacaaattgctgtggattcagacctcgcaaggaagatgcctgtgtacagaatggattgaggccaaaatgtgatgaccaaggttctgcggctctagcacacattatccagcgaaagcatgacccaaggcatttggtttttatagacaacaagggtttctttgacaggagtgaagataacttaaacttcaaattgttagaaggcatcaaagagtttccagcttctgcagtttatgttttgaagagccagcacttacggcagaaacttcttcagtctctgtttcttgataaagggtattgggaaagtcaaggaggtagacaaggaattgaaaagcttatcgatgtaatagaacacagagccaaaattcttatcacctatatcaatgcacacggggtcaaagtattacctatgaatgaatgacaaaagaatcttctggctagggtgttagatatatttatgcatttttggttttgtttttaaatcaagcacatcaacctcaagcccgtttagcaatgaggcagtgtagatgaatacgtaaaataaatgactttaaccaagtagctataatgggacttagcactgtatgcatacttaaaaaggttttgaaaaacaaactacttgagaaatatttgtttatatttttctctaacatcatgctatgtgtcagtctgaacatctgacaacagaaatttcagttattatt

SEQ ID NO: 61465 - DNA, 1100 bp, Homo sapiens
ttttttttttttggggcagcgggggtctttattcgtcagattttccttcttgggctaattcccaagttttggcaagggaaagtcaataaagtgttggtaattgcaaaggtccagaatggcaagcagacccagtggggccagcagcccttccctggatagggctccagggtccttcactggaggaagatccttggtacccctgctctctccaaggctgggactagtgttcctggttgtggccaggtgtgcagtggttgtgacagcagatggtcttggcttggtcctagcagaggctgtgaccccatacatgggcctgatggtgccgaaaggcctggcgtgagcatccacccaccgcagcagggcctgtggtctccactgacagatgctgagcagggccaggacatcaccctcagccgtgtgcgagtctggaggggactgcccatacaggcgagtgtagatgctgcctaggctgtagctcttccttgggccgtgttctgaggggctgcttgctcgctccagggccttcagcgcagtgatgctatccacacagaaggcaccatccagagcactggtgaggcccagcatagccagctctgcttggagcagggggaagtcgtagcggtcaccattgtgtgccaccaggcaccagggctgtggctggcgccgcaggaaggctaggagcaggttggccaggttgtcatcaaaacattgacgcccatgcgctgccagcacagctgtgctcagacctgtgatctcgctggctgcagggctgcaggccttccccggagccacacacagggagagcttgtctaccacacgcggtggtggaggaactgtgggaggtggcccctgagaggtgggggggctctccagggcacatctgtggacagccagcaggcacagctccgtgaccttgggctgggagaagggcaagccagtggcctccatgtcgaaaaagatgagggtctgcatgggccccgggggcagggcctgcgagcccatggttgggtacgtacctgctgctgagccgtagcaggcaggcaggcaggcagtagtgactcggctgcacgctctcccgcggctctcgccggacgcgtggg

SEQ ID NO: 61466 - DNA, 1636 bp, Homo sapiens
agggcctcggccatccaagggtctcccaggtgaccttccctccaccccaggaagctatgacagaggccgggaagctgcccctaccgctacccccacggctggactggtttgtgcacacccagatgggccagctggcccaagacggggtccccgagtggttccatggtgcaatctcaagagaggatgctgagaacttgctggagtcacagccactgggatcctttctcatcagggtcagtcacagccatgtgggctacacactctcctacaagtaaggcctgggccgggatccagggcaggggcaggtgggctcttgggtttccttggagggggcaaggggtgcttcatgtcatagcttctcagaaagcagcagtaactgaggctgtggatctgagaacgggagctgctagccaagcaatgagtgaagcttttgtccgtagtggcatgttttatctgaggccagcctttgtactcctgtgttataaatgggggaaactgaggcacagcgaggttagtaacctgctgggtgttgcatggccagtgagtgaagaagcctgcatgggaacctggggtagtctggctgtagcagtgacgctgccggcccaagggctggggacttggggcagggatgagggggagtaggatgtcccagcccccgcagtgtctccgcagagcccaaagcagctgctgccatttcatggtgaagctcttggatgatgggactttcatgatccccggggagaaggtggcccacacctcgctggacgccctggtcaccttccaccagcagaagccaattgagccgcgcagggagctgctgacacagccctgcaggcagaaggatcccgcaaacgtggattacgaggatctcttcctctactccaacgcagtggccgaggaagctgcctgcccggtgtctgcccctgaggaggcctccccaaagccagtcctgtgtcaccaatcaaaggaaaggaagccgtcagcagagatgaacagaataaccaccaaggaagccacttcctcctgccccccaaaatcccctcttggagagacccgccagaaactctggaggagcctcaaaatgctccccgagagaggccagagggtccggcagcagctaaaaagccacctcgccactgtgaacttgtcgtcactcttggatgtccggagatccacggtgatctcaggccctgggaccggaaaaggcagccaagatcactcaggggatcccacctcgggggacagaggctacacggatccctgtgtggccacatctctcaaaagcccctcacagccccaggcaccaaaagacagaaaggtccccaccaggaaggccgagaggtcggtcagctgcattgaggtgaccccaggggacaggagttggcaccaaatggtagtgagagccctatcctcccaggagtccaagccagagcaccagggcttggcagagcctgagaacgaccagctcccggaggagtaccaacaaccgccaccctttgcccctgggtactgctagagaacaggtccaccctggctctgggactcgctgccaggggctgccacactcctgaatgccttaacatttcttccatggccccacaccatggcatccgggggtcttccgggaacccgggaa

SEQ ID NO: 61467 - DNA, 5221 bp, Homo sapiens
tttttggcatctaacaattgttctttatttaaaaacactttcaggaaaatccaaggaaatacagaagcaaggcagcaccatagtcttcccagccaaggtggaagtgcctctggttcctccagcaattcccactggtgttatcataactcaacagtctgttgcaatcagttgtagaaaggcacagagtgacagctggaatgcaaagaaatgtgcacaacccagagctctgtcagccttgccaaaactcaagtgcccccatgggagggtcttgcaacatatgttctgttgagcaaagaggttgcaaaccaagcggttattgcaataaacaccacttgtgacaaacaaagtttgtaagtttaaatttattttttaaaaatgcttgtcttcctcactagacaatcaactctatgagggcagagactatgtcaccactgtcccaccagcccctggcacacagtaggtactcaataaatatatgttggaaggatggatggaggtaatggatggaaagatggatggaaggatgaatggagggatggatgtgacccagctgaagtgtgagtaggaacattctcttattatgggtggaggaaagagagaggagattgagaaaataagataaaatacattgatgcgcatcatttttggtgttcgaaaagtaggattgaattaggactaataaatctagagaattttacctctttcaatgcccaagccacacttttctatcactttgaaaccgaaaaagtaaatactttcccaacatttgctttgctgggtaggaaatggctttaataaaaatgccatctctaagttgccatggcatcattaaaagaaaggattgtcatgcccagggtccagaacttgaagggtggcaggcaccagcaagcaccatagctctgaatgggcctgccttacaggtcctcactccaacactgctcacttcttccagcttgaaaatggagaacatgttcacaccctgggttgtaagtaggaaggaactctgatcagcaagaagcttgcagaggacaatatgaggcaatagtattttactggccacagtgtgactgggttgcactctgttctgacattaggaagaatttcatgcctgggcaaagtcaaagttttttcctttagtcacattactcaaagaataagttgactatatcccaacagcacttgtccaaattccaggactccacttacgactattatgaggcaaacatctgcctgtgcagtttgtctttccatccagtctattctttggggtccagatccttgatcattctcacacccagtgctatctgcctcattgcccagcatcaggaagcaaggagtatggtgcaataagacaaccacctggccatgggatcaggaatggggtcaggtcagttgacctgagcatacccattaaacatgttcaaatgtccccatcccacccactcacatgacatggctcccgagccctgagatctgtatcccaagaacctcagttgagaaatatttatggcagcttcactgttgctcaagagcctgggtattgtagcagcctgggggcaggttgtccctaatgttctccaagttcttcacatcagccagaatcccatctatgcttgtctccagcaaatggaggtggcccctctgctgacgtgccctctcttccagctctgacatcatgggccgcagttggctgttgatctgggtcttggctcgggaaagcttctgctccagtaagaccagcccctcttcatctacactgagaggctggtccatcagatgcaggaggccgtctaatgtgttgagtgtgtcttggattgtaaccccagcgttcttggctctggtatcaaccttctgggcttctgtaatcaccatctgtactgcatccatattcgtgtcaaactccagctccttcctttccagctctccttccacttccctcatctcactcttcagagaggccagtcccttttccatggccaaggctccatctgctgtcacattggcttccaagttcagactcccaatctcctgttcaatctcactggagatttccagggcctccccggccccattctttgccctctgtgcatcagcagcagcgctccccagggctctttctgcttgctgggtcttgtcactggcatctgaaaccttctggctgatgtaggagagtctcttcatggcttcttcagcttctgcttttctgttgtccacctgcaggtcaaactctctgaggtttttaaggatgctctcaacttcataaaaagtggcattgcccatactcagtgcttcttgtgctctgcttttagcaagattggcacgggaaagcagctgatctgatttctctctcccactttttccattctgtaagagctgctgtgcttcttctttccagtttcccagattcttctgtgtacgcttgaactcatccatatgcctggttaccaggcttgagagtgaatccgctttttgtttgatcctctttgcttcttccacctgaaaggactgatcactgactccctgaagccgagacactgaatccaggaggcggagactgtgctgataagacctatctgcttcaatttccgcttgagtggcctcccttgtcaactgctgggccagggacttggttttctccaatttttccacaagcccttgcaccacagcaccgtccgggctaccgcttccgcttccgactccttcatgcagggccttgcgcaccagtgagagggcttgtttggaatagtcctcagtttcccttgtcagttgctccatgttactggctgactcaacgtggctttctgctaatcttgtggcctcctgagccagacttttaaagccatttggccccacgtagtggtctgaggcaggaatgttagtgtttcccaaggaagcttcactttctgccaggctcagctgcatctgagtgatgagcctgtgagtatcccgaactcggttctggtactgacttcccagagcccgaactctttccacagtcatcttgaggtcatccaggcggctctggtagctgttctcttggctcctcaccttggccaactggagaccaagggatctgctagcaccttctgaaatctgggcatctctcagaatgtcctgaagggcctgctcagcctgctgcatcctgccttccagctctgtatcaggtactactccatcaccaccctgagcctttgaaatcagggcctccattctctgaagctgctgcataaactgatccatctgaatcttcacttgattatagcaagctggacagctgaatgctccatgctcacagttggggccaccaaatcctggcttgcaaacacaggtgccatcacttcgacatccttaacaggctctgagccccatggggttacagttgcaagctcgaacacttgtttgctgggttgggagccaatgggtccccgaagtagcctgcttcgcactggtcgcagtaaatgccggctgtgttgtggatacacttcaaacacctgcctgtcagccggtcaaaattcccagaggcactggggtccacattgttgttgcattgacagggctgacaaggcctcactgggccatgttcaccaaaggggtccccaaagtagccatcagcacagagctcacagcgggcaccggtgaccccgggagggcagttattgcacaccacctcctccgtctccggcatcactgagcagctgaacccgttatgacagggacatggcttgcagctgcgggggtcgtgcggatcgttgtagaaaccaattgggcagtcagcacactcaatgtcaggattctcatcccctgaataacaatctcctgtgtctggatcacaggcccctcccccttgacagttacaaggaatacaggtgccaaaaggccccagtctcgctgaatctctcttgtagccagaagcacaatcctggcagaattgccccttgtacccaacaggacatatacactgttcaaccccaggttgctgggcttccagagacaggccgggctgaaatcagggtcacattgtcaatgtacccagtactgtattctccatatgtagctcggatgcggagggctgtgagattccgcagtaaccttcgatactcaaagtaacttcaggctgggggctccaattattgcttggatgctcatttaacctgaatgtgtaagtcttggtgagcccacaaggcagtgtcttgccaagtggcatcaagggagctgtgatccgtagaccagcaccttccagaatcacatcatgggcagatgggtgtctgcctcctctgtccacacggtagtcaaaggacaggctttgaccatagctcacctgttgattcccaagaaatttggcaggagccacaaaatagacagggtctagtcgttgggctgagctaaacacatcttgatggcgctgtgaccattggagctttgcaggagacccatttcgttggacagccttccagccatcaacatcttgatgaaaggtagaggtgatcttatggacactgtattctgcagagctgcggcagctggctgaatgcccatagcagaaacactgggtacagccctcagggttccccccatccagattatagtaacctgatcgacacctatcacagcgttctccagtgacagctggcttgcagacacagcggcccgcgtcacagggccctgcgatgccagctgggtcacagtcacacttggagtctagcagtctctggtcttgggtgcaccccgcatccgtgagcatgtggaagcctggcagacatcggtcgcatctggctcctgtcacacctggtttacagctgcaccgtccggagttgtcacatcgagcactaagagaacctttggagttacaattgcagggcaaacagcggtccctttctctgtgccggtaaaagccattcttgcacttctcgcagtgaatgccatcagtgttgtcattgcagttgaggcagcggaatccattaccagtttgtctgtgaagttcccgatcaaagatacactgcctggacttcccattgcaatcacagacttccctcctggaggtggcccgggctgcgggcaggaggagcgagaagcagaggcagcagcccagccagagcgcaggcatggcggggccgggccgctcagtctctgtctccgctgcaggggtcgctgcccggcgcctcggttggtggttctcactctgcgctccgctgtgccttccttttccttcgatcaggtggtc

SEQ ID NO: 61468 - DNA, 5553 bp, Homo sapiens
ccacgcgtccggacagacagacggatctaacctctcttggatcctccagccatgaggctgctctgggggctgatctgggcatccagcttcttcaccttatctctgcagaagcccaggttgctcttgttctctccttctgtggttcatctgggggtccccctatcggtgggggtgcagctccaggatgtgccccgaggacaggtagtgaaaggatcagtgttcctgagaaacccatctcgtaataatgtcccctgctccccaaaggtggacttcacccttagctcagaaagagacttcgcactcctcagtctccaggtgcccttgaaagatgcgaagagctgtggcctccatcaactcctcagaggccctgaggtccagctggtggcccattcgccatgactaaaggactctctgtccagaacgacaaacatccagggtatcaacctgctcttctcctctcgccgggggcacctctttttgcagacggaccagcccatttacaaccctggccagcgggttcggtaccgggtctttgctctggatcagaagatgcgcccgagcactgacaccatcacagtcatggtggagaactctcacggcctccgcgtgcggaagaaggaggtgtacatgccctcgtccatcttccaggatgactttgtgatcccagacatctcagagccagggacctggaagatctcagcccgattctcagatggcctggaatccaacagcagcacccagtttgaggtgaagaaatatgtccttcccaactttgaggtgaagatcacccctggaaagccctacatcctgacggtgccaggccatcttgatgaaatgcagttagacatccaggccaggtacatctatgggaagccagtgcagggggtggcatatgtgcgctttgggctcctagatgaggatggtaagaagactttctttcgggggctggagagtcaaaccaagctggtgaatggacagagccacatttccctctcaaaggcagagttccaggacgccctggagaagctgaatatgggcattactgacctccaggggctgcgcctctacgttgctgcagccatcattgagtctccaggtggggagatggaggaggcagagctcacatcctggtattttgtgtcatctcccttctccttggatcttagcaagaccaagcgacaccttgtgcctggggcccccttcctgctgcaggccttggtccgtgagatgtcaggctccccagcttctggcattcctgtcaaagtttctgccacggtgtcttctcctgggtctgttcctgaagtccaggacattcagcaaaacacagacgggagcggccaagtcagcattccaataattatccctcagaccatctcagagctgcagctctcagtatctgcaggctccccacatccagcgatagccaggctcactgtggcagccccaccttcaggaggccccgggtttctgtctattgagcggccggattctcgacctcctcgtgttggggacactctgaacctgaacttgcgagccgtgggcagtggggccaccttttctcattactactacatgatcctatcccgagggcagatcgtgttcatgaatcgagagcccaagaggaccctgacctcggtctcggtgtttgtggaccatcacctggcaccctccttctactttgtggccttctactaccatggagaccacccagtggccaactccctgcgagtggatgtccaggctggggcctgcgagggcaagctggagctcagcgtggacggtgccaagcagtaccggaacggggagtccgtgaagctccacttagaaaccgactccctagccctggtggcgctgggagccttggacacagctctgtatgctgcaggcagcaagtcccacaagcccctcaacatgggcaaggtctttgaagctatgaacagctatgacctcggctgtggtcctgggggtggggacagtgcccttcaggtgttccaggcagcgggcctggccttttctgatggagaccagtggaccttatccagaaagagactaagctgtcccaaggagaagacaacccggaaaaagagaaacgtgaacttccaaaaggcgattaatgagaaattgggtcagtatgcttccccgacagccaagcgctgctgccaggatggggtgacacgtctgcccatgatgcgttcctgcgagcagcgggcagcccgcgtgcagcagctggactgccgggagcccttcctgtcctgctgccaatttgctgagagtctgcgcaagaagagcagggacaagggccaggcgggcctccaacgagccctggagatcctgcaggaggaggacctgattgatgaggatgacattcccgtgcgcagcttcttcccagagaactggctctggagagtggaaacagtggaccgctttcaaatattgacactgtggctccccgactctctgaccacgtgggagatccatggcctgagcctgtccaaaaccaaaggcctatgtgtggccaccccagtccagctccgggtgttccgcgagttccacctgcacctccgcctgcccatgtctgtccgccgctttgagcagctggagctgcggcctgtcctctataactacctggataaaaacctgactgtgagcgtccacgtgtccccagtggaggggctgtgcctggctgggggcggagggctggcccagcaggtgctggtgcctgcgggctctgcccggcctgttgccttctctgtggtgcccacggcagccgccgctgtgtctctgaaggtggtggctcgagggtccttcgaattccctgtgggagatgcggtgtccaaggttctgcagattgagaaggaaggggccatccatagagaggagctggtctatgaactcaaccccttggaccaccgaggccggaccttggaaatacctggcaactctgatcccaatatgatccctgatggggactttaacagctacgtcagggttacagcctcagatccattggacactttaggctctgagggggccttgtcaccaggaggcgtggcctccctcttgaggcttcctcgaggctgtggggagcaaaccatgatctacttggctccgacactggctgcttcccgctacctggacaagacagagcagtggagcacactgcctcccgagaccaaggaccacgccgtggatctgatccagaaaggctacatgcggatccagcagtttcggaaggcggatggttcctatgcggcttggttgtcacggggcagcagcacctggctcacagcctttgtgttgaaggtcctgagtttggcccaggagcaggtaggaggctcgcctgagaaactgcaggagacatctaactggcttctgtcccagcagcaggctgacggctcgttccaggacctctctccagtgatacataggagcatgcaggggggtttggtgggcaatgatgagactgtggcactcacagcctttgtgaccatcgcccttcatcatgggctggccgtcttccaggatgagggtgcagagccattgaagcagagagtggaagcctccatctcaaaggcaaactcatttttgggggagaaagcaagtgctgggctcctgggtgcccacgcagctgccatcacggcctatgccctgacactgaccaaggcccctgcggacctgcggggtgttgcccacaacaacctcatggcaatggcccaggagactggagataacctgtactggggctcagtcactggttctcagagcaatgccgtgtcgcccaccccggctcctcgcaacccatccgaccccatgccccaggccccagccctgtggattgaaaccacagcctacgccctgctgcacctcctgcttcacgagggcaaagcagagatggcagaccaggctgcggcctggctcacccgtcagggcagcttccaagggggattccgcagtacccaagacacggtgattgccctggatgccctgtctgcctactggattgcctcccacaccactgaggagaggggtctcaatgtgactctcagctccacaggccggaatgggttcaagtcccacgcgctgcagctgaacaaccgccagattcgcggcctggaggaggagctgcagttttccttgggcagcaagatcaatgtgaaggtgggaggaaacagcaaaggaaccctgaaggtccttcgtacctacaatgtcctggacatgaagaacacgacctgccaggacctacagatagaagtgacagtcaaaggccacgtcgagtacacgatggaagcaaacgaggagactatgaggactatgagtacgatgagcttccagccaaggatgacccagatgcccctctgcagcccgtgacacccctgcagctgtttgagggtcggaggaaccgccgcaggagggaggcgcccaaggtggtggaggagcaggagtccagggtgcactacaccgtgtgcatctggcggaacggcaaggtggggctgtctggcatggccatcgcggacgtcaccctcctgagtggattccacgccctgcgtgctgacctggagaagctgacctccctctctgaccgttacgtgagtcactttgagaccgaggggccccacgtcctgctgtattttgactcggtccccacctcccgggagtgcgtgggctttgaggctgtgcaggaagtgccggtggggctggtgcagccggccagcgcaaccctgtacgactactacaaccccgagcgcagatgttctgtgttttacggggcaccaagtaagagcagactcttggccaccttgtgttctgctgaagtctgccagtgtgctgaggggaagtgccctcgccagcgtcgcgccctggagcggggtctgcaggacgaggatggctacaggatgaagtttgcctgctactacccccgtgtggagtacggcttccaggttaaggttctccgagaagacagcagagctgctttccgcctctttgagaccaagatcacccaagtcctgcacttcaccaaggatgtcaaggccgctgctaatcagatgcgcaacttcctggttcgagcctcctgccgccttcgcttggaacctgggaaagaatatttgatcatgggcatgggtctggatggggccacctatgacctcgagggacacccccagtacctgctggactcgaatagctggatcgaggagatgccctctgaacgcctgtgccggagcacccgccagcgggcagcctgtgcccagctcaacgacttcctccaggagtatggcactcaggggtgccaggtgtgagggctgccctcccacctccgctgggaggaacctgaacctgggaaccatgaagctggaagcactgctgtgtccgctttcatgaacacagcctgggaccagggcatattaaaggcttttggcagcaaagtgtcagtgttggcagcgaagtgtcagtgtgtgttgctagggctgagagcagtgcccctgcccgatgcagttctgggcaggccaggttgacataaccttagactctctgagccctgatgacccttgggctgtt

SEQ ID NO: 61469 - DNA, 1669 bp, Homo sapiens
gcgaccacagggctgaggtcagggctaggattccggtgtctctacgtaggttgcttgaatggggggcaccctggcatggacgctgctgttgccgctgctgctgcgggagtcagacagcctagaaccgtcgtgcaccgtgtcctccgcggatgtggactggaacgcggagttcagtgccacgtgcctgaatttcagtggcctcagcctgagcctgcctcacaaccagtctctgcgggccagcaacgtgattctccttgacctgtctgggaacggcctgcgagagcttccagtgaccttctttgcccacctgcagaagcttgaggtcctgaacgtgctacgcaaccccttgtctcgtgtggatggggcgctggccgcccgctgtgaccttgacctgcaggccgactgcaactgtgccctggagtcctggcacgacatccgccgagacaactgctctggccagaagcctctgctctgctgggacacaaccagctcccagcacaacctctctgccttcctggaggtcagctgcgcccctggcctggcctctgcaactatcggggcagtggtggtcagcgggtgcctgcttcttggacttgccatcgctggccctgtgctggcctggagactctggcgatgccgagtggccagaagccgggagctgaacaaaccctgggctgctcaggatgggcccaagcccggtttaggcttgcagccacggtacggcagccggagcgcccccaagccccaagtggccgtgccatcctgcccctccactcccgactatgagaacatgtttgtgggccagccagcagccgagcaccagtgggatgaacaaggggctcacccttcagaggacaatgacttttacatcaactacaaggacatcgacctggcttcccagcctgtctactgtaacctgcagtcactgggccaggccccaatggatgaagaggagtacgtgatccccgggcactgagcctaagatgtcctaacctccacccagaaccccttcagtccctgctgggtgactcagggcgtcctaacgcctccatggcctcagtttccccatctgaagaatgggtacaggaaaggattgtccttgaggccccaggaagctctgccgccccctccctgtccctcatgccgctcctcagctccctcagctcctagagggggaagaggagagacccccaacaaggggacaggagggtcactgtgccaatcctgtcatcaccctcctgtggatgtacaggcagtgctcaataaatgcttcgaggctgatgaggctgctggctcagggtgcgtgggttcctcaaggtggggatttctgagttctaagaccaagtctccatctgagactcccaaattgctccccacctcccatccctgtttttttttgttggtgggggttgtttgtttgtttttgaaactgagtctcactctgtcacccaggtgggagggcaaggttggggtttaagttaattgaaacctcggcttccggggttaaagggattttccggcctaaccctccggagaagtggggattacggaacccgccaccatgccgggctaattttggtatttataaaaaaaagggggtttcgccatgtgggccaggttggtttcgaattcttgacctaaagcgatttgcccgcctgggcctcctgaa

SEQ ID NO: 61470 - DNA, 1833 bp, Homo sapiens
tttcgtgccgtccgccgcggacaagaccctggcctcaggccggagcagccccatcatgccgagggagcgcagggagcgggatgcgaaggagcgggacaccatgaaggaggacggcggcgcggagttctcggctcgctccaggaagaggaaggcaaacgtgaccgtttttttgcaggatccagatgaagaaatggccaaaatcgacaggacggcgagggaccagtgtgggagccagccttgggacaataatgcagtctgtgcagacccctgctccctgatccccacacctgacaaagaagatgatgaccgggtttacccaaactcaacgtgcaagcctcggattattgcaccatccagaggctccccgctgcctgtactgagctgggcaaatagagaggaagtctggaaaatcatgttaaacaaggaaaagacatacttaagggatcagcactttcttgagcaacaccctcttctgcagccaaaaatgcgagcaattcttctggattggttaatggaggtgtgtgaagtctataaacttcacagggagaccttttacttggcacaagatttctttgaccggtatatggcgacacaagaaaatgttgtaaaaactcttttacagcttattgggatttcatctttatttattgcagccaaacttgaggaaatctatcctccaaagttgcaccagtttgcgtatgtgacagatggagcttgttcaggagatgaaattctcaccatggaattaatgattatgaaggcccttaagtggcgtttaagtcccctgactattgtgtcctggctgaatgtatacatgcaggttgcatatctaaatgacttacatgaagtgctactgccgcagtatccccagcaaatctttatacagattgcagagctgttggatctctgtgtcctggatgttgactgccttgaatttccttatggtatacttgctgcttcggccttgtatcatttctcgtcatctgaattgatgcaaaaggtttcagggtatcagtggtgcgacatagagaactgtgtcaagtggatggttccatttgccatggttataagggagacggggagctcaaaactgaagcacttcaggggcgtcgctgatgaagatgcacacaacatacagacccacagagacagcttggatttgctggacaaagcccgagcaaagaaagccatgttgtctgaacaaaatagggcttctcctctccccagtgggctcctcaccccgccacagagcggtaagaagcagagcagcgggccggaaatggcgtgaccaccccatccttctccaccaaagacagttgcgcgcctgctccacgttctcttctgtctgttgcagcggaggcgtgcgtttgcttttacagatatctgaatggaagagtgtttcttccacaacagaagtatttctgtggatggcatcaaacagggcaaagtgttttttattgaatgcttataggttttttttaaataagtgggtcaagtacaccagccacctccagacaccagtgcgtgctcccgatgctgctatggaaggtgctacttgacctaaaggactcccacaacaacaaaagcttgaagctgtgggagggccacggtggcgtcgttcttccttcgcaggtgtttctggggctccgtttgttacccaagtgggagcaggtggtttgcggggcaagcgttgtgcagagcccatagccagctgggcagggggctgccctctccacattatcagttgacagtgtacaatgcctttgatgaactgttttgtaagggctgctatatctatccattttttaataaagataatactgtttttgagac

SEQ ID NO: 61471 - DNA, 855 bp, Homo sapiens
tgactgcccgtagaggaaacgacattcggagctgcgctcccgcccaggccggccctgccgcgggcctcgtcagccagtaacagggagcagaggtgggagttagcgaggcgaccacgaaaacggtgaaggtcggaaccgacagcctcctccgagaagggcaggagctgggaggaggcggcagcggcggcggcagaaacagcagcggcggcggcggcggcagctgggaggaggtggtgacggtggcaacggcagcgtcggggacgatggcgcgactcgtggcagtgtgcagggacggggaggaggagttccccttcgagaggaggcagattcccctctacatagacgacaccctgacgatggtgatggaatttcctgataatgtgttaaatctcgatggacatcagaataatggtgcacagctaaagcagttcattcagcgacatggtatgcttaagcaacaggatctaagtattgccatggtggtgacatcacgcgaagtcctgagtgcactttctcagcttgtcccatgtgttggttgtcgtcgcagggtggagcgtctcttttcccagcttgtagagtctggaaatcctgctcttgaacccctaacagtagggcccaagggagtcctgtctgtaactagaagctgcatgactgatgcaaagaagctttatacattattttatgtacatgggtccaaactaaatgacatgatagatgctattccaaaaagtaagaagaataagagatgtcagttgcactccttagatacgcacaagccaaaacctttgggaggttgatggatggatgtatgggaactaatgtcgcaggaatgcagggatgaagtagttataattg

SEQ ID NO: 61472 - DNA, 1357 bp, Homo sapiens
agaggacaacgaggaggacgaggatgagcccacagagacagagacctccggggagcagctgggcattagtgataatggagggctctttgtgatggatgaggacgccaccctccaggaccttccccccttctgtgagtcagaccccgagagtacagatgatggcagcctgagcgaggagacccccgccggcccccccacctgctcagtgcccccagcctcagccctacccacacagcagtacgccaagtccctgcctgtgtctgtgcccgtctggggcttcaaggagaagaggacagaggcgcggtcatcagatgaggagaatgggccgccctcttcgcccgacctggaccgcatcgcggcgagcatgcgcgcgctggtgctgcgagaggccgaggacacccaggtcttcggggacctgccacggccgcggcttaacaccagcgacttccagaagctgaagcggaaatattgaagtccagggagggagcgccccgggccgcgtccgccccgtcccacactacgcccccgccccactcccggggcctgctaatctgaggccgatccgggaccggcctccttgcgtctcccattcccaagattgtcccgcctctgccaatccccgccgtccttccagcccacgacctgccgcgccgaggagcggcatctgtcccgtttcccgattgggtctgtcgtctctctccgcctagcgacagattccttctattaagggattggctcgctgagttctaagctctaaatgggtcaactcctttgttttccgcctagcgacaagggatttgctcgcacggcattggctccatcccctagtcgctggacagctctttttttgattggctcaaatcctgtaaagggcttgaccagtctctacatagtcaccgtccgcttttcctgagttctccctcccaattggctccagcttcctgggggcgtggccaagccctcctcttcccagaattggcccggggccttcaatttacgttctttacactacggggactggggtcgtctttgcccacgtcccgacaacttgttccctgaccccctcagggatggccccaaactgtccctgcctctggcaccccctttcattggttccatccatccccacaacagcctgccaatcgaagcccgtccctgcatccaggatggtaccagctcccgcccctcgccccccacctccacaggtgccttaaagggccctcgtccacccaaggtggggggcaggggccctcactctccggccctggtgtgggggagagagtgaggggttgggggatcggcagttgggaggggcgctctgagattaaagagttttacctctgagataaaaaaaaaa

SEQ ID NO: 61473 - DNA, 5655 bp, Homo sapiens
  misc_feature (1)...(5655): n = a,t,c or g
gcgcgaccgtcccgggggtggggccgggcgcagcggcgagaggaggcgaaggtggctgcggtagcagcagcgcggcagcctcggacccagcccggagcgcagggcggccgctgcagggtccccggctcccctccccgtgcgtccgcccatggccgccgccgggcagcctgtgcttgctctacctgtcggcggggctcctgtcccggctcgggcgtcagctttcaacttggaacactcgggaggacaacgtgatccggaaaatatggagaccccggggaacctcttcggctttctcgctggcccatgcactggcaaactgcagcccgaggacaagcggctgttgctccgtgggggccccgcgggcagaagcgcttcccactgcagagagcccaacagaacgggagggctgtacaagctgcgacatcacccgcccgggggccatgcacgcgggatcgagtttgataacgatgctgaacccccacgtcaggaaaggcaagggaagatcagtgggtgggggggtcaaccgttccagaggccaaggtcccagggggggnaaggtcgtttacattttgtttaaccgatattttaaaaaaagggcagcattgttaatacgaagcagggattcccgagacatctttggggcggtgttatgtcctgagtcagaatctcaggattgaagaacgatatggatgggggagattggagcttttgtgatgggcgattgagaggccatgagaaatttggcccttgccccagcaaggtgtagccagcctacttttactaaagactttcattacattgtatttggagccccgggtacttataactggaaagggattgttcgtgtagagcaaaagaataacactttttttgacatgaacatctttgaagatgggccttatgaagttggtggagagactgagcatgatgaaagtctcgttcctgttcctgctaacagttacttaggtttttctttggactcagggaaaggtattgtttctaaagatgagatcacttttgtatctggtgctcccagagccaatcacagtggagccgtggttttgctgaagagagacatgaagtctgcacatctcctccctgagcacatattcgatggagaaggtctggcctcttcatttggctatgatgtggcggtggtggacctcaacaaggatgggtggcaagatatagttattggagccccacagtattttgatagagatggagaagttggaggtgcagtgtatgtctacatgaaccagcaaggcagatggaataatgtgaagccaattcgtcttaatggaacccaaggactctatgtttggcatggcagtaaaaaatattggagatattactcaacatggctacccagatattgcagctggagctccgaatgatgacttgctaaaggtttttatctatcatggatctgcaaatggaataaataccaaaccaacacaggttctcaagggtatatcaccttattttggatattcaattgctggaaacatggaccttgatcgaaattcctaccctgatgttgctgttggttccctctcagattcagtaactattttcagatcccggcctgtgattaatattcagaaaaccatcacagtaactcctaacagaattgacctccgccagaaaacagcgtgtggggcgcctagtgggatatgcctccaggttaaatcctgttttgaatatactgctaaccccgctggttataatccttcaatatcaattgtgggcacacttgaagctgaaaaagaaagaagaaaatctgggctatcctcaagagttcagtttcgaaaccaaggttctgagcccaaatatactcaagaactaactctgaagaggcagaaacagaaagtgtgcatggaggaaaccctgtggctacaggataatatcagagataaactgcgtcccattcccataactgccctcagtggagatccaagagccaagctctcgtaggcgagtgaattcacttccagaagttcttccaattctgaattcagatgaacccaagacagctcatattgatgttcacttcttaaaagaagggatgtgggagacgacanattgtatgtaacagcaacccttaaactagaatataaatttttgcaccccgagaaggaaatccagacaaattttcttatttaccaattcaaaaaggtgtaccagaactagttctaaaagatcagaaggatattgctttagaaataacagtgacaaacagcccttccaacccaaggaatcccacaaaagatggcgatgatgcccatgaggctaaactgattgcaacgtttccagacactttaacctattctgcatatagagaactgagggctttccctgagaaacagttgagttgtgttgccaaccagaatggctcgcaagctgactgtgagctcggaaatccttttaaaagaaattcaaatgtcactttttatttggttttaagtacaactgaagtcacctttgacaccccagatctggatattaatctgaagttagaaacaacaagcaatcaagataatttggctccaattacagctaaagcaaaagtggttattgaactgcttttatcggtctcgggagttgctaaaccttcccaggtgtattttggaggtacagttgttggcgagcaagctatgaaatctgaagatgaagtgggaagtttaatagagtatgaattcagggtaataaacttaggtaaacctcttacaaacctcggcacagcaaccttgaacattcagtggccaaaagaaattagcaattggaaattggttgctttattttggtgaaagtagaatccacaggatttgaaaaggtaacttgtgagccacaaaaggagataaactccctgaacctaacggagtctcacaactcaagaaagaaacgggaaattactgaaaaacagatagatgataacagaaaattttctttatttgctgaaagaaaataccagactcttaactgtagcgtgaacgtgaactgtgtgaacatcagatgcccgctgcgggggctggacagcaaggcgtctcttattttgcgctcgaggttatggaacagcacatttctagaggaatattccaaactgaactacttggacattctcatgcgagccttcattgatgtgactgctgctgccgaaaatatcaggctgccaaatgcaggcactcaggttcgagtgactgtgtttccctcaaagactgtagctcagtattcgggagtaccttggtggatcatcctagtggctattctcgctgggatcttgatgcttgctttattagtgtttatactatggaagtgtggtttcttcaagagaaataagaaagatcattatgatgccacatatcacaaggctgagatccatgctcagccatctgataaagagaggcttacttctgatgcatagtattgatctacttctgtaattgtgtggattctttaaacgctctaggtacgatgacagtgttccccgataccatgctgtaaggatccggaaagaagagcgagagatcaaagatgaaaagtatattgataaccttgaaaaaaaacagtggatcacaaagtggaacgaaaatgaaagctactcatagcgggggcctaaaaaaaaaaaagcttcacagtacccaaactgctttttccaactcagaaattcaatttggatttaaaagcctgctcaatccctgaggactgatttcagagtgactacacacagtacgaacctacagttttaactgtggatattgttacgtagcctaaggctcctgttttgcacagccaaatttaaaactgttggaatggatttttctttaactgccgtaatttaactttctgggttgcctttgtttttggcgtggctgacttacatcatgtgttggggaagggcctgcccagttgcactcaggtgacatcctccagatagtgtagctgaggaggcacctacactcacctgcactaacagagtggccgtcctaacctcgggcctgctgcgcagacgtccatcacgttagctgtcccacatcacaagactatgccatttggggtagttgtgttttcaacggaaagtggctgtcttttaaactaaatgttgcaatagaaggtgatgttgccatcctaccgtcttttcctgtttcctagctgtgtgaatacctgctcacgtcaaatgcatacaagtttcattctccctttcactaaaaacacacaggtgcaacagacttgaatgctagttatacttatttgtatatggtatttattttttcttttctttacaaaccattttgttattgactaacaggccaaagagtctccagtttacccttcaggttgggtttaatcaatcagaattagaattagagcatgggaggtcatcactttgacctaaattatttactgcaaaaagaaaatctttataaatgtaccagagagagttgttttaataacttatctataaactataacctctccttcatgacagcctccaccccacaacccaaaaggtttaagaaatagaattataactgtaaagatgtttatttcaggcattggatattttttactttagaagcctgcataatgtttctggatttcatactgtaacattcaggaattcttggagaaaatgggtttattcactgaactctagtgcgttttactcactgctgcaaatactgtatattcaggacttgaaagaaatggtgaatgcctatggtggatccaaactgatccagtataagactactgaatctgctaccaaaacagttaatcagtgagtcgatgatctattttttgttttgtttcctcccctatctgtattcccaaaaattactttggggctaatttaacaagaactttaaattgtgttttaattgtaaaaatggcagggggtggaattattactctatacattcaacagagactgaatagatatgaaagctgattttttttaattaccatgcttcacaatgttaagttatatggggagcaacagcaaacaggtgctaatttgttttggatatagtataagcagtgtctgtgttttgaaagaatataacacagtttgtagggccactgttgttttgggggggcttttttcttttcggaaatcttaaaccttaaaatactaaggacgttgttttggttgtactttggaattcttagtcacaaaatatattttgtttacaaaaatttctgtaaaacaggttataacagtgtttaaagtctcagtttcttgcttggggaacttgtgtccctaatgtgtttagattgctagattgctaaggagctgatactttgacagtgtttttagacctgtgttactaaaaaaaagatgaatgtcctgaaaagggtgttgggagggtggttcaacaaagaaacaaagatgttatggtgtttagatttatggttgttaaaaatgtcatctcaagtcaagtcactggtctgtttgcatttgatacatttttgtactaactagcattgtaaaattatttcatgattagaaattacctgtggatatttgtataaaagtgtgaaataaattttttataaaagtgttcattgtttcgtaacacagcattgtatatgtgaagcaaactctaaaattataaatgacaacctgaattatctatttcatcaaaaaaaaaa

SEQ ID NO: 61474 - DNA, 610 bp, Homo sapiens
cggaggaaagccttttgagttcaaagaagtgtgtgaaagccttgagcattcgaaaaagcctcattagacggttctacatccacactggagagaagccctatgagtgttgacagtgtggaaagggttttacccgcatgtcagggctcacaaggccccagtggattcatactggagagaaaccgtatgtatgcgtccaatgtgggaaagccttttgtcggaccgcaagcctgattcgacactttagcatccacactggagagaagccctatgaatgcgtggagtgcgggaaggccttcaaccgcaggtcacccctcacaaggcaccagcggattcacactgcagagaagtcccacgaacccatccagagtgggaacgtttcttgtgagagcacagatctcattcaacactccatcatccacactgagagtagcccagtgagtgcagtgaatatggaaacgccttcaattgccgctcattcctcctcactcgacatcaacggattcatagtggaagaaaccctaccaagcacagcagatgtggaaaggaaggaataaaaatgcccaagaccaaacgaaagaagaaacactttattttcattgcaaaaaaaaaa

SEQ ID NO: 61475 - DNA, 1155 bp, Homo sapiens
tgttgttgttgttttttaaatcacccctccattactcaacattctcgttcccagatgaattttaaactgggagttgcaccaactgtgagacagcctcaaccccaatgttaaatactaccagttttatatatatatatatatatatatatatataaagactgaaaacagttctctctggaaaacgatccaccaacctttttatgggaagaaggtcttctctaacactttaacttaagggaagaagtgatggagaggaagaaggaaagtacactggccaatactctggaaactgactgacttggggtatctgtggtccaaagaggatcccgaaagacagtgactctgtctcaatgattattcccatcccgaattaaaagtcataatgacagcatttacattcacacagggtctctttccaagaagtttgtgagtcacctacatgtcttcaattctcaaggcaacagtgggggcaacaaggaggttgacagccaggtcctgtgagagctgtttgtcaaagcccactctcagtgagtcagtccctggaaagttgggttcagtgcacggaggcagggccactgactggcttagcaacgtgtcccatcatgctgatttttagcatcttgccttctcaatgtcctcatacgggagtccaggacaagtcatgctgtagtttgtaggcaccaaggaagtcatgttggacaaacttgtcccccaattcctttggagaaatgatggaaaaatactgctgaccactctcccgtttatagagatagtaaatgttgccaggttttttcactatattacaagctacatggtgcaggttggcatctctgtgagcatcttccagtaccttcctggcttgttcttgcaaatgttggatttgctcagctatgactgtcagcttgttggtggcatttgctcggatgaattcatcagccttctgcacctgctctgcgagcgccacgaggtctaaggggtccccggcccggtgggtgtggtaggggctcaccagggccaggccgccgggggtcggggtgagctccaccagggctcctccctggcctgcagctggcggcgctccttgcctttcaaggaccccctcggtccgccccggcgcggcggcgtcctccatgacagcgccttatccctcgtgcc

SEQ ID NO: 61476 - DNA, 2600 bp, Homo sapiens
tttcgtggtggcagggtggtggatctgttggtcccgttttcccgtcgcacgtggtggccactgttggcttctgaatggtttgcaaggcggatatccacgccaaggcctttggatcggccgtgggtacatccgtctgagccgttcctttccatcgcagagcggcggcctccggcggcgctctccagtcatggactaccggcggcttctcatgagccgggtggtccccgggcaattcgacgacgcggactcctctgacagtgaaaacagagacttgaagacagtcaaagagaaggatgacattctgtttgaagaccttcaagacaatgtgaatgagaatggtgaaggtgaaatagaagatgaggaggaggagggttatgacgatgatgatgatgactgggactgggatgaaggagttggaaaactcgccaagggttatgtctggaatggaggaagcaacccacaggcaaatcgacagacctccgacagcagttcagccaaaatgtctactccagcagacaaggtcttacggaaatttgagaataaaattaatttagataagctaaatgttactgattccgtcataaataaagtcaccgaaaagtctagacaaaaggaagcagatatgtatcgcatcaaagataaggcagacagagcaactgtagaacaggtgttggatcccagaacaagaatgattttattcaagatgttgactagaggaatcataacagagataaatggctgcattagcacaggaaaagaagctaatgtataccatgctagcacagcaaatggagagagcagagcaatcaaaatttataaaacttctattttggtgttcaaagatcgggataaatatgtaagtggagaattcaggtaagttcagatttttccctccagttggtttaatttctatttcctaaaacattaaaataataatggaatgattgaaataataaacatttttcttattcaagatttcgtcatggctattgtaaaggaaaccctaggaaaatggtgaaaacttgggcagaaaaagaaatgaggaacttaatcaggctaaacacagcagagataccatgtccagaaccaataatgctaagaagtcatgttcttgtcatgagtttcatcggtaaagatgacatgcctgcaccactcttgaaaaatgtccagttatcagaatccaaggctcgggagttgtacctgcaggtcattcagtacatgagaagaatgtatcaggatgccagacttgtccatgcagatctcagtgaatttaacatgctgtaccacggtggaggcgtgtatatcattgacgtgtctcagtccgtggagcacgaccacccacatgccttggagttcttgagaaaggattgcgccaacgtcaatgatttctttatgaggcacagtgttgctgtcatgactgtgcgggagctctttgaatttgtcacagatccatccattacacatgagaacatggatgcttatctctcaaaggccatggaaatagcatctcaaaggaccaaggaagaacggtctagccaagatcatgtggatgaagaggtgtttaagcgagcatatattcctagaaccttgaatgaagtgaaaaattatgagagggatatggacataattatgaaattgaaggaagaggacatggccatgaatgcccaacaagataatattctataccagactgttacaggattgaagaaagatttgtcaggagttcagaaggtccctgcactcctagaaaatcaagtggaggaaaggacttgttctgattcagaagatattggaagctctgagtgctctgacacagactctgaagagcagggagaccatgcccgccccaagaaacacaccacggaccctgacattgataaaaaagaaagaaaaaagatggtcaaggaagcccagagagagaaaagaaaaaacaaaattcctaaacatgtgaaaaaaagaaaggagaagacagccaagacgaaaaaaggcaaatagaatgagaaccatattatgtacagtcattttcctcagttccttttctcgcctgaactcttaagctgcatctggaagatggcttattggttttaaccagattgtcatcgtggcactgtctgtgaagacggattcaaatgttttcatgtaactatgtaaaaagctctaagctctagagtctagatccagtcactgactctgtctggtgttgacagaggatttatttaagctattattttaataaagaactttgtacatttttatttttatatttttttctcttacaaatatgtttttggaagcatgataaatgtttaaatgtagtcaacatctgtaactcttacatgagtgtccagaggcactcatgggaaaattggttttgctttctttgtacacaccagagacccatctgaggtcatctgattataaggccatgtttatataaagggaatttcacccacagttcagctggctgttgattttcactgcaactctgcctttgtgtgtattggcgatcatttgtaatgctcttacacttcgtctttaatgttctttttggagttaggacctctcagttcataaagttttttacaattcaaaaaaaaaaa

SEQ ID NO: 61477 - DNA, 2162 bp, Homo sapiens
ggggtttttttccaagccctttaatttggtttccccccgggttttcccctcccccccgtttttaaacccgggcccgggattttatttttggggccccattaaaaaaatttttcttttcccccccccggtttttaaatttggttcttttaaaagggccccccttttttttttttttgggggtcaaatgaagcacgttattttatttcacaaagactgtacaaaattccttataaaacatggggtagatgccacctggttacctcactcggcccccatccaactccgtatgagggggcaggtgagggtggaaactgtgtggatggaatagtattatgtacaaggcaggggttgaagtgataggtacaagttctttcatatttacactatttcacatattcacaggtatatagagagccaggaggaaggagtgaactctggctcgttctcttgtataaaaaagcaccagtgtcctggactggacacccactgctataaaagatgcaggggggcccagggcctgatcgtcaccgactgatatcccgactggagtcccacaacttgttgggcggctcagcccgaaggcgggcgaagaaagcatgttggaagggtttcacccaaggttcagccgctttagctggtttcatactctagcatgcttttcaatcagattcgaagagctggtggtgttcctctgcctctgaggtcagataccgcccgcagcggtttgcaagttctcacgaacatagcgccccagcctgatgtgttctcatcccaatccaggccgaccccgggaaaattatttctgctttcttgtctttcggatcatcccgggaagggataggaacccagatccctttcatcatggctagatgctctctgttgtcatgggtctggaagagggtgaatcccacatagtattcaaagatgatgcagcctatactccacacatcacaaggctgtgaccagcccaactcaaggatgacttctggtgctcggtaatggcgagtggagacaatggtgctatggtgctcatggtcaaaggtggcactgccaaagtctaccacccgcacagctgtgctcttcacactgcgctcatctcgcttcttctctaggttgtaggtgagctcatagtctgaattcacaaacagaatattttcaggcttgaggtctgtatgtgtcagcttgttatcatggaggaacttgacagcctggcacagctggaaggccatgtggcgcacttggtggatggggtagggcaggtagttgttgtctttgaggaaatcgaaggtgctaaggcccagaagctcaaaggagatacacatgtggccatggtagtcaaaccagtcaaacatctggacacagaggttcttgttgtcagggtctttctcattgattttctctagcacgttgatctcaagtcgagctgcttccttgtacttctccacattcttaatgatcttcagggcaactcgagccccacccctgcgatggtcaacacattgtacaactcggccgaaggtcccctctcctaaggtgctaacgatttcatatcgctcttgtagccagtccccgacgtggtagatgaggtggccctcagcgtcgtcctctacactcttggctctccggctgctgtgctgcgaagatgagcggctaaatgtccggctgcgcctcctccgccgtctgtgcttcctccggctgctgcgctggctgcggtaactgctgttctcccgctgatattcataggaatgccgatagtctgtgtcatagtaggcatctccccgatcccggctataatcgttgcgtctgtagctgccacagtatcgccggtcatacaccctccggtcggacgaacgatcatcataacttcgagaacggacatggtagctgtcctctcgccgacgccgtcgtgtccggtcactactacttgaccaggagcgacttcttcgtcgcttatgctttcggctccgatagtgttcacggtaactcccccggctgcctcgctctgaggagtggtaccttcgaggatgcggcatcgttctggcggcgaggcccgtgcgcttgtcccacaggaagtccgtgatggcggcgacactgcggccggagtcccggcacccccgcggcgacgaaatgctgctccacccccccaacccgggaccctggga

SEQ ID NO: 61478 - DNA, 1494 bp, Homo sapiens
cactttggaaggtcgaggcgggaggaaaacctgaggttgggagttcgagagcagcctgaccaacatggaaaaatcccatctttactaaaaatacaaaattagccgggtgtggtggtgcatgcctgtaatcctagctactctggaggctgaggcagaagaatcacttgaacccgagaaggggaggttgcagtgagccaaaatcgcgccattgcactccagcctgggcaataagagtgaaactccgtctcaaacaaaacaaaacaaaaaacaaaacaaaaaatccagtcttccaagcatggcacatctctcttaaggaccagaaatggatttcaaaccatcctgttgtatcttttcctcagagaaggaactgctgcttctctctgtcgctatctagaaaccagcaggctccatgatggctacttataatttatttataaaacattttaccagtgagtgatgtctcaagtgagaggtggtaacagatacacaaagcagtttatagcatgcaatatttcaatgcctctgagaggtagaaacagcttgtgctctcagatggccctcagtccttccccttgtcatctttctgtcctagactgtgtcctaactgctcacaagggttcagcggcatgcaaacagtctttaattggttttcttcaaagaggcattgttgactggaaagactggcttgtatttaaactctgctctttttgcaaatgacagactttctcaacagtatttcagaggaaattttgttctgaacagttaactgaatctgaccagattacagacagcaccacccatattactcaatgctaagacacagcatctttgattttctgtatgtcataacattctgaagcttgagttaccgatggagccatttttgcaactacacatcctccttatagttcttgctttcctttcaagcagatcacagggcccagggcaagatgatttccttgaggagaagtagcctgagccttagaaatgcaatttgtataactgaccagcctggctttccccctcctttaggaatctgattcttcttcctcttcctcctcctcctcttccgtcacatgactctttgtgctcagctccagggttgtttggttgattgatgcttcattgtctacatgcaccaacatatcatgtgactgttcaggtacagtgtgagaagacagcatctcatcccctcttctagaactgatcattgattggagggctaattcttcaacctgtttgtttgtaaacctctaaattggcgccaccacagctagtgagtagcggagaactggccgcagcaggtggtcaccacagaggcccaggttggggggaaatggtcgctcgggaggaatggaggaggggcaggagagggccgcggggtcaccttgaggcggttcagctggtcgtgcagggctgccttcaaccgcagcagcgtctcctcctccttgcgcagttcctgaagccggctcagcatgttgcctggtcacatag

SEQ ID NO: 61479 - DNA, 3542 bp, Homo sapiens
gcacgagtaaggacagaaaagtgaaatgcagtatggtgaagaggataccctgaatatgtatgaagacatgctgttgtgagacggagttgtgaaacagaggccacagaagctgttgtgaaggcagagcagcatctgctgaagagacagaaaccagccccagaggtgtcacaggaaggcaccagcaaggacattggtctttgatttgattcagcagtcctgtcaagtataaatgtgatggctgtgctgcctggccctctgcagctgctgggagtgctgcttaccatttccctgagttccatcaggctcattcaggctggtgcctactatgggatcaagccgctgccacctcaaattcctcctcagatgccaccacaaattccacaataccagcccctgggtcagcaagtacctcacatgcctttggccaaagatggccttgccatgggcaaggagatgccccacttgcagtatggcaaagagtatccacacctaccccaatatatgaaggaaattcaaccggcgccaagaatgggcaaggaagccgttcccaagaaaggcaaagaaataccattagccagtttacgaggggaacaaggtccccgtggagagcctggcccaagaggaccacctgggccccctggtttaccaggtcatgggatacctggaattaaaggaaaaccagggccacagggatatccaggagttggaaagccaggtatgcctggaatgccagggaagccaggagccatgggcatgcctggggcaaaaggagaaattggacagaaaggggaaattgggcctatggggatcccatgaccacaaggacctccagggcctcatggacttcctggcattgggaagccaggtgggccagggttaccagggcaaccaggaccaaagggtgatcgaggacccaaaggactaccaggacctcaaggccttcggggtcctaaaggagacaagggcttcgggatgccaggtgcgccaggtgtaaaggggcctccagggatgcacggccctcccggccctgttggactgccaggagtgggcaaaccaggagtgacaggcttccctgggcccccagggccccctggggaaagccaggggctccaggagaacctgggccacaaggccctattggggtaccgggggttcaaggacctcctgggatacccggaattggaaagccaggccaggatggggatcccaggccagccaggatttccaggtggcaaaggggagcaaggactgccagggctaccaggacccccaggccttccagggattgggaaaccaggcttcccaggacccaaaggtgaccggggcatgggaggtgttcctggggctcttggaccaagaggggagaaaggaccaataggtgccccaggaatagggggtcctccaggagagccaggcctgcctggaatcccaggtcctatgggccctccaggtgctattggttttcctggacccaaaggagaaggtgggattgtagggccacaggggccaccaggtcccaagggtgagccagggcttcaaggcttcccaggaaagccaggtttccttggtgaagtagggcctcctggcatgaggggtttcccaggtcccataggccccaagggggaacatgggcaaaaaggtgtaccaggactccctggtgttccagggcttctcggacctaagggagaaccaggaatcccaggggatcagggtttacagggccccccaggtatcccagggattgggggccctagtggccccattggaccacctgggattccaggccccaaaggggagcctggcctcccagggccccctgggttccctggtatagggaaacccggagtggcaggacttcatggccccccagggaagcctggtgcccttggtcctcaaggccagcctggccttccaggacccccaggccctccaggacctccaggacccccagctgtgatgccccctacaccaccaccccagggagagtatctgccagatatggggctgggaattgatggcgtgaaacccccccatgcctacggggctaagaaaggcaagaatggagggccagcctatgagatgcctgcatttaccgccgagctaaccgcacctttcccaccggtgggggccccagtgaagtttaacaaactgctgtataacggcagacagaactacaacccgcagacaggcatcttcacctgtgaggtccctggtgtctactactttgcataccacgttcactgcaaggggggcaacgtgtgggttgctctattcaagaacaacgagcccgtgatgtacacgtacgacgagtacaaaaagggcttcctggaccaggcatctgggagtgcagtgctgctgctcaggcccggagaccgggtgttcctccagatgccctcagaacaggctgcaggactgtatgccgggcagtatgtccactcctccttttcaggatatttattgtatcccatgtaaaaacaaaaaaacaaaaaacaaagaaaagaaagagattttatagaagaaaatgacacaccaaaaaatccaaatgaaaaacataattgcttcaaaacacttacacagttggaaagttatatgtaagtgaaaatttggaccattgtgtacaaataaaaactaagatgcatgtttaatactccacacagcagcctgtaattgcgaatgatgggatagagttatgtatcaagtactgacacttggttgtacccactggaatcatattagctgttttatgttatatgcttccacagtaacctgcttattcagatcagtcaaaatatatcagtatgaaagatcatagctaatgaaaggcactcactcatattgtttactttaaaatatttataaatatgccttaaagaaatacaaatgataacaattacataccgtatttacttgcttaatttcctctgtatttgtgtagatactttgacatggaatatatggtggggagacccgtagtgttaccgccccagtgggagggggccctggggaccctggtaatgctttagtcaaagggatatctctcttgtatcagaggctgtgtcttttagtaacaggagtcctcgtcagaattgcgtgtctgttgtctctaaaagaatgggtgaaccaatcggcctttgtgaatttattcagtgccttctctgtaccaagcactgggtaaggcacttttgtggagcattagacagtaaccctcaaggagctagagaaccggatgggagacatgagcggtaattaactcacttgttccccagagtttctatttgttttgattttctttttctgtgacttattttcctattttctttcctccatgtaattttcactatggcccaactaatataaacacctggaaattacaaggaaaaaaaattcttcctctaataactttccaaatttgtggaatatttatttgtaatagcagttatcagttatgcttatatagcattaaaaattcccctcctttgactacacacacaaccacagtgtggttctaatcatggagatatcagtaatttttagtaactgaa

SEQ ID NO: 61480 - DNA, 2091 bp, Homo sapiens
cggacgcgtggggccaatgttggagccgtctgcaaagtgtccccggcaagaagaggctgcctaccacaaggactttagcttactttttaaagattgaagaaaaaaaaagaagacagaaaaagaagaactcaaagatacacaaagtaatttgaaccaaggctcaaaagtttttggagccgtgagggatacagcagtttggtcaatattgtcttaacatgcttcaaataaatcagcttctctccaagataaaatggcaaacccaaaagagaaaactgcaatgtgtctggtaaatgagttagcccgtttcaatagagtccaaccccagtataaacttctgaatgaaagagggcctgctcattcaaagatgttctcagtgcaactgagtcttggtgagcagacatgggaatccgaaggcagcagtataaagaaggctcaacaggctgtcggtaataaagctttgactgaatctacgcttcccaaacctatttagaagccacccaaaagtaatgttaacaataacccaggctgtataacaccaactgtggaactgaatgggcttgctatgaaaaggggcagagcctgccatccacaggccattagatccaaagccattcccaaataatagagctaattacaactttcaagtcatgtataatcagaggtatcattgcccaatacctaagatcttttatgttcagctcactgtaggaaataatgaattttttggggaaggaaagactcgacaagctgctagacacaatgctgcaatgaaagccctccaagcactgcagaatgaacctattccagaaagatctcctcagaatggtgaatcaggaaaggatatggatgatgacaaagatgcaaataagtctgagatcagcttagtgtttgaaattgctctgaagcgaaatatgcctgtcagttttgaggttattaaagaaagtggaccaccacatatgaaaagctttgttactcgagtgtcagtaggagagttctctgcagaaggagaaggaaatagcaaaaaactctccaagaagcgcgctgcgaccaccgtcttacaggagcttaaaaaacttccacctcttcctgtggtggaaaagccaaaactatttttttaaaaaacgccctaaaacaatagtaaaggccggaccagaatatggccaagggatgaaccctattagccgcctggcgcaaattcaacaggccaaaaaggaaaaggagccggattatgttttgctttcagaaagaggaatgcctcgacgtcgagaatttgtgatgcaggtgaaggtaggcaatgaagttgctacaggaacaggacctaataaaaagatagccaaaaaaaatgctgcagaagcaatgctgttacaacttggttataaagcatccactaatcttcaggatcaacttgagaagacaggggaaaacaaaggatggagtggtccaaagcctgggtttcctgaaccaacaaataatactccaaaaggaattcttcatttgtctcctgatgtttatcaagagatggaagccagccgccacaaagtaatctctggcactactctaggctatttgtcacccaaagatatgaaccaaccttcaagctctttcttcagtatatctcccacatcgaatagttcagctacaattgccagggaactccttatgaatggaacatcttctacagctgaagccataggtttaaaaggaagttctcctactcccccttgttctccagtacaaccttcaaaacaactggaatatttagcaaggattcaaggctttcaggttcactactgtgatagacaaagtggcaaagagtgtgtgacctgtctgacattagcccctgtgcagatgactttccatgctattggaagctccattgaagccagccatgatcaggtataatatgccactgccattttgctgtgttatggcccagctcggaaatggaaggccatcaaaatggaagctatgtgcgcacatgcagctttgctttccttaatacattatctgctagcaccatctgctagacttgaaaaatcaaaattgtttgcgttgggaaattgatatcatagtagatttaaattattttaa

SEQ ID NO: 61481 - DNA, 3132 bp, Homo sapiens
gaagacaacagattgaaggcaaaagaacacagagctttcacaagctcaaagaaaaatatttgctggctgatcgctgatttgtatgcactataaaacaattccataaataaaaccaatatatcatttcttaatcatgaccctatcaaaaccaagttatttcctaactattctttcaatgtcaaatgtaccctagagttgacgtttcatttttaagggttacagctacctcataggaactgaactagatgtactcttaccctttctctgaagtataacagtacaccactgcacaacagtatccaatttgaagactaatggtaaagaaaattcttcaggaaaaactgaaaatccatcaagctgaaaatctaaaattagttctactttctaatgaaaaatacataaaagtgcatcatcagaataagtaattcttatgccagtttgtattgcaaattttccaaacaatgcatcaaacataaacccaatccagatgtcaattatgaatacaaatatagcttgaggttgttttttttaaaggcagtaatttttgaaatagttaatgcaactgttgctaacacaataataatagtactcctggcttcacatactaacctggacttccgatcaagtgctgattagcccagtaagggaggtcaccaaaaaacccaaatccatttcagtcatgtctagtcttgtaccctccattctccttttttagcatttgaagacaacaggttgagttggcagatattgtttatggacccctgaggttgtttttaccgattcaatctcagttttattgaattcttgataacaggaataggatttgcagggagagcagggatatcagaaaggtctgtactggatgttttctgagaggccaacagagaagccgctgtctgaatagtttctgattgagttgtacttgtctctgtatcaagttgttcctttgcttctgttttatcatgtccactcaaagcaagacagttagcatcttcacttgtttcatcctcttctgttttggttttcttgggactctcttctttatgaggtgaggatgtcctcttgactcctactataggagtaggtatttttgttgctgcatttcctgaagttgctgcatttcctgaagatctaggtggtgggtttaccagacgtgttgaagaaacaactctggagaccgtaggctttggtggtggagaaatggctggttgtgtggcagtttgaggaatgctttcactcgatgtaccccctgagctttcactggaatttacttgtggcacagaaacttcagtagcctgtatgttggtcacagatgctgctgttacagctggagcaggactgtttctgccctgagagctgccagaactgttcaatggactggtcttcgtagcactagtaggtgaaggcacagacatgctgttatcactgtccatagacaagtcgaggctgctgtcattgagagctgtcaatttgacaccttctgttgaatgctttttctttttctgaagcacatgattaggtagtagttgatggagttgctttctttttacatgcattgcagcaattttcatatccacctcaaacatcttgctgtttattgcttgcctataaactgtatctgtgaaagactgaatatcataggtgagatcaacactgaggttttcagagttttctgtttttttaaacactaacccaatcacccacatcgtgcgaaattcttccttgtcgggattttctttgggtgctggaaatgactggggattcacatgagccagtgtaataaattcattcttctccaagcttccaaccaggattcggatttttgattccaccaagcccacccattccaggcgttgattttctgttggtgcacttgctagaagtacaatataatgcttgtacttttgaaagaagtttggagcttcaaaaagtttggaccactctgccttactcagcaaaatttcatctgtgatagcaagaccttgtttaaactcctcaaccatgaccatccgtgttgaaacggacacattgtacgtggagttctgttgtgggtatgctggtgtaattataggcataagatggtacctatcactggggtttacccttgggtcccatacaggcaaattaagattgcattcttcaggctgtttcaatagcactggatttggccattcccatttagaaaataccaagaaaaatttatgtacaagagttgatgctattgcatttggataaagctggcaagttcttgctactagcatagcccaggaaacaccaccgaggaaacctaatatattggaatagatgttgtggcgtttggcccatagtttgatagctctcagagttaacctgaagttgtcaatgtttggtactagatgtaaaatttcatcggttaccctgcaaccgttaagacttcttatacatcttatatctaaattttttagcagactgtcatctcgtagatccaaatcttcaggaattgtctgcagtgctaatcttgcaaacaaaatatcaatctctatcccatcaaaacagagtttaataactggtacgaatgcctcttcaacagctcttaaatcttttacttcttcctgtaatttcaacttatcatagaatgaaggtgaaaaagtcacttcgatcaacatgtcttggtgcaacacacaacgcatcaatatcagcaccttttgtatgcactcctaatctgtaagatccaaatgtaaaaatttttcctccaacattttcaattacagattgtggaagattcttgctttcactgatttcgtcgtatccactcttttaccaggtttatttagtttttcccaaaattaaaattcctgcggctggcagttccctcttccttcttcaaaaaccccccaaagggtttcaatgtctccaattagttttctgtgtaagtacgcagtcagtctccttgggggctgctaagctgataggagaagtaatgccatagtgcttctgtggcggttgtgtttgttgtgatccctgtgttgtaactggaaacggcatcgtctccggcgccgcaccgcccagtcacttcccccccgcaatcgccgcctgccgccctggtatgatccactgaggcgggagggagggggggcctgcctcagcctcgtc

SEQ ID NO: 61482 - DNA, 2379 bp, Homo sapiens
ttttttttttttaggaggaaatcttgtcatttatgaaaacatgggtgaacccggtgcacattatgctgagtgaaataagccaggcacagaaagacaaacactgcatgatctcacttacatgtggaacctataaaagctgcccttatacaagtaaagagtcaaatgctggttaccatgggctgggaggagagggactgggcagatgtgtcaaagaatacaaaatttcagttaggaggcataagttcagggatcttgtacagcatggtgactatagttaacaacaacgtattgtattcttgaaaaaaaggagtgatataggggtaccagagatgggcaggatgattgaagatcacagtccagccttgcaggaccccgggggacagggcgggcactcagaggtggacctccagcaggtagcgcaggcgacactggctctcctggtagatgaggtactcgctctgggagaatgtggagctgctgaactctgggcagggcacaggctggccctggggcaccaccacttgctggccatccagctccaactcagtgtcctgggtcggatcaggctcggtgtggcctcgggcaatgacactgtcgaagccaggaggtgggctcttcaagctggggttgtccgtgttgatatggtgctctctgcccagggccacctcacccaggaacatgtagccgacatggtgggccccacacttcatgccaataacatatccagctgacttgctgttctctgaggcaaagtagatgcccttgccaacacgcccaccagaatgtggcatgatgcggagcccactagtgaggatggcggccaccacggccatgttggtgccatgccacagcagcttccgattacccagtttggagtgggcctggaatctgtcttcctccccttcttggtttactttccagatgtgttgaagtgtagggcacctgtggttgctgccagtctgttctaagtaggtctgtatcaccttgtactcaggtgctccagagtctagcagctgcagctggcacttgagaagctggtagtctcggtccagggggtgtggcacctcctccaccgtcttctcctgctcagagactgcctgcagggcctgggccagctcgatgtccgccagcaccagcagcatgtccttcttggcctgcagaagctcaggggaattgatgggcgggggctggctgtggccgaagttgtgcgggatgacggtgtaaaagtgtgaggacagctcctccaggctttggccaccatccgtggggcctttcagggcctcctccagcgcctccaaggcctcgaaaccccgtgcaatctgttgcttgctcagctttcccaggggcatcttcttcacatccaggtccatgagggccatggtgttcttgaacatctccttgctgaagatgttagtgatgagcttctgcgtggctgggtccagggagcagggctgcacccgcttagtcacagtcctcactgggcctctgtccaccttcaccacagcttcctgggcctcatcctctgcctgtacttcgataagtgtgtacttgcccgggtgagacacaaagtggtcccgctctgcccagttgttcttggtcttttcccgaaatttcttctcaaagtccttctttgcatcttctagccttgtgaagtggttgatctttgactggccgacctctcccacacggccccagcggttccagcaggtgaagaagcggttgctgtcttggagcagctggatgatgtagaacttgttgttgttgttctcgaatgttggtcttggttcagggtgcaagttgtagtcctcatacacctgggtcccgggggtttgcttgcttgagtggacatgttggaatccacgcggattatgcgctttcttctgcggggtaatggcctttgagggcctcagcgggtggagcggaaggggtccttccttcccttcctgcctgccggcccttcttcttctcagggccctcagtctgtacccagggcttcggctttggagccatggccaagaaaagcagggacatgggagaggtcctggctgccacccggcctggttgtgtgcgcctcccagggcagtcccaggtctagcaactctccatgagcctcaggcgtgaattagggagagaattcccaacaatcgccagaggccggggatgagcttgtgtgggggattagacatcggctatttggccaccagtggggtgaagcagaggctggggcaggccgagtcaggcgaccagtcccacggacgggtggacactcgatctggcatatccaaggccggggcagtcgcgtccgtagcgctgctcatgtggccggggcctgcagcacgcatcagccggtcgcgcggtgaccttgggcccggaacgaaa

SEQ ID NO: 61483 - DNA, 2113 bp, Homo sapiens
ttttttttttttgagacagagtcttattctgtcacccaggctggagtgcaatggcgtgatcttggcttactgcaacctccgcctcccaggttcaagcaattctcgttgtctcagcctcccaggtcgctgggactacaggcatgagccaccacacccagctaattttttgtatttttagtagagacggggtttcgccgtgttgaccaggctggtctcgaacttctgacctcaggtgatccacccacctcggcctcccaaagtgctgggattacaggggtgagccactgcatgcggctgaaggtaaggattctaaactcggagactagaaatgtcctaaaggtgtctgcaacattggatgaggagtacaagtgcatttttctgggatgattcctccctttttatcacattctcagaagtatctttgattcagaagagttaggaatgcctccctatttcagttgggttttctgccctttctccacagaggtccagactcattttgcttaattttttttctagctggggcctgggaggtagaggcttcagggcctgggtggtagagctgcctgacaagtgttcagcagggctgctgggtcagggccctgtgggccttctgacccaacctgaagatgggtctgctaagtctaacaaggtcaagggaagatcagagggacccagattcttttttatcccccacttgaaacggagtcttgctctgtcgcccaggctggagcgcagtggtgcaatcttggctcactgcaacctccgcctccctgaccctcacactgtccagtgcccttgtggttactcagcatcatatcttgagactggcctggcaggagccagtgactgtggaatgaccacagaagattcagggcagctgccagaccaggggctatctctgccctgcgctgcttctgctcaagagaggttgtcactagcctctgatcttcccttgaagaacccgactggggctcttcagagggtggggcccaggaagttgtagttaaccccttccccaggcagtccttacacggccatctaggtatgcctgggaaccttgcaccaggtcggtggttctcactggctgcccattggaattatctggggagccttctggaaacgcagtgcttacattccatctccctagaccaacagaaactgccctctggaggtgaatcccaggcttagagattctgatgattctgcggtccagtgagtgctgagatctgtcctgagctctgtggggaggggcctggactgatcactgcttggaaatgattttgccctacagtaggccttcaagttgatcaaatgcatgaatgagcaagcttttcttggagtttgtgatgaagcccaggaaccgggtgcttgcagtcgtcccataaggctcccagggacaagctagagaatctggctgtccctctgtctccatggtgccagccctcttaggctcagttcaaagggagaggaggctagttaaataagaaactgagagaaacatggagcattattgatttattagaaaaactagtaaatgggtttcctctggttggtggaagcacggttgagcaggtggaggacaggacccagctggccccagggccagccccagattgcatggtctgtgcccaacagggttgcattcctctgcagccgccgcctcctcatttcctccctgagcttgtttgtccaagccaccaagccatgtggtcccgctggcttcatcctcctctggattcctgcccccctcccatgaagggaggaagaggattcagggtcagcctaggggaccctggctccctccgataggcaggaaggaggagggatgcggaggagaggctgagccttccacgggcctcctgttaggggtgttggtggaggccaggttggtgagggaagcctaaggaccctccacacctcccacagccagagtcagttgaggctgggacaaaggggaaggagagagggaaggaggaccgcctgaccttgcccagaaggagcttcctctaaactgccctgggaaggaagcctggtatgctggtgtggactggagctgtgtcaacctcgtttgggaatactgtcaaaagactgtagagtagaataaggagag

SEQ ID NO: 61484 - DNA, 659 bp, Homo sapiens
cataggttggaaactgaaacctgcacatttgtggcaaatgtcactgcatttacagggagagaaagaaaaccacatgactcttctttgtatgttaaagactttttattttcaggccctttcagaggaatcaattcctttaaacctttgtaaaatgccacaggagccaaggttaagcgatgcttttaacttaggaactgaccctctccaggcagagtctccaaagtagattacctcgaaatttcaaagaggcagttctacaagaggagcctttgaagaagccaatcctgttttccattgttttgctttcacacacgggttgaacttgaactcttacctttctccatttataacaaccaaaatccaccttaaaaaatcaaaggctgggagcggtggctcatgcctgtaatcccggcatttagggaggccaaggtgggttgatcacctgaggtcaggagttcgagaccagcctgaccaatatggtgaaacccccatctctactaaaaatacaaaaattagcagcggcgggtgcctgtaatcccagctactcaggaggctgaggcgggagaatcgcttgaacccgggaggcggaggatgcagtgagattgcgcccctgcactccagcctgggtgacacagcgagactttttcagaaaaaaaaaa

SEQ ID NO: 61485 - DNA, 1300 bp, Homo sapiens
  misc_feature (1)...(1300): n = a,t,c or g
cttgaattcctgacctcaagtgatccacccgccttggcctcccaaagtgttgggattacaggagtgagccacctcgcccagccaacttgacataacttttaaagatggattgccaagctgaggtgaactgcgggcttcatctggttattcaaacatcatcgcttcctgaaaaaaacaaagttgaattcaagctaaataaagacacatcgtcattccccggtagacttttacaacatgaccttgaaagaaactactcaagtaggcaaggtgatcatattaatttggtgagctcatcattgtcatcatttcctattcttcaacgttcttctgaagagaaaattctttactcagacaggttgagcctagaaagacaaaagctgaccgtatgtcctatcatcaatggggaagaccaccttcgtttgttgaactttcaacacaattttataactcggatacaaaatatttctaatctacagaagttaatatcgttggatttatatgataaccagattgaagaaattagtgggctttcgactctgagatgtcttcgtgtccttctgttggggaaaaacagaatcaagaaaatctcaaatctggagaatctaaaaagcttagatgtcttggatcttcatggaaatcagattaccaaaattgaaaatattaatcatttgtgtgagttgagagttttaaatcttgccaggaactttttaagtcatgttgataatcttaatgggctggattcactaactgaacttaacttgcgacacaatcaaatcactttcgtgagagatgtggataatttgccctgcctcccaacatctctttctcagctttaacaatatatctagtttttgacagtgttttcctgcccttgctggactcttctttccctctcgggacatcaccctttgagggccaatcccataggcttcaaggagtcagggtaccaaacacactgtccttcagaatatgatgcagctgcgccactaagatatggaaggagaattcacgggaagaaggaaaggcgtatggcatctgttttagcccaaaaaaggagggaagaggaaggagccgggaaagtcctaaaccattcttttgcttaaggagaagaaaagggttaaccatttaaccacgtagcttcgacagtgggacttgcaacaacgagtagccaatattgctacaaatgaagatagaaaagatttctggactctcctcaggaccctgttcagattgatgggaaggcaccctctttggctttcccagaggcccacaggggcntttaggattcagggnttcaagg

SEQ ID NO: 61486 - DNA, 1586 bp, Homo sapiens
aagaaaccagaaaccctatttgtaacaaagtctcaacaatgagatacaatggtattagatacacgccaacgcgctcgcactctcaacaaaatacacaaataatcctagatcttgtagcgaattgttgatttattcattgtgactgcagctcctagtaatgctattatttgcaggtggtgagtgttggtatgggatggtatggagcaacattttccaaattgtggttgtgatcagtatgttttttaaaattaaagacggaaaaacatcacagtgcataatatataaggtcaatgtcttgtgatacttgatgtatgtatgtatcacacacacacatacacacctacacacaaatacacaaacatacacaatgaattccacagatattggattgtgatgtaatctttatttcttactctgagctccagttagaaaagtttgacaatcattgttatagagctatgttcagaaagtggagactttctgactcactgtgagctctgctgtatctatgcgctccctggagagggagcaacttgctaaggtacagtcctggccattggcatggatatttattgttccacatgttgggaaaaccatgtgcaataaaaatcaaacatatgaaacaatggctgtcattgtaccacagtatacattgtatcttggtgaaggttcttaaattactccttggagtttcctaattcacttcaggaaggatttgttgtgttccgtctttatgctgtcacttgcaaacacttttgctttgctagttcttgtattagatcttcatatacttgcaaaaagaggtcctcttcagattttgttccatccaggtacacaacttcccatgtgatgtcctgcatttcttgtctgtactttagatacatgggccacacatggccatcaaagtatcccggagagtctggaggctgatagacccttgtactcctcctccttttacattcttcatatggaatagtcaggaaatagcttctattccatatagtgtcaaggggcttataattaaaaagaagaaaaccttcgatgattaaaatgggaatttcctcagcactttcctggtctgttgataccacagagtgtcttgcgctttccatccagcaggaaatggctgacatcattttttccatgttaagtgcttcaagcacatcgtactgcaaaaatccatttttatctgtctctatctcagactctggcttgaagaaatcatcctgagatatgacactgcaatttgggaggtgtttctgcaaattcttagccagtgttgttttgccactgtttgtcacaccactgattccaatgataaatgttttcataattagctttgaaaatcacagcttcctaatatttcctggcgccagttcgagtcctcccaaacacagcggcagaggcgacagccaagcgcgcgcctgtacccagtgcgccgctacccgcagctcgctccccgagaggcccacagcccctttccccacgctcctcctgggttagagggatgccaggtaggggcggtcaccagaggccccttttctctactctcggcgccgggttccagcccccgttggggcacgaaa

SEQ ID NO: 61487 - DNA, 908 bp, Homo sapiens
gcgggcccccgatggctggcctgactgtcccaggggcacaggctccagcaggctgcctgtctgtggtccaggcttcaggaacccccggtcttgggtgtgcgggggctgggaagtggctgggggtgcacagtcccacacctgtcattcactgaacaggcacgtattgacagcttgtggcgtgtcaggccctgtgcccaactctgggagtcaaggataacctgacagactcaggccactttaggaaaacgaaatccaccccaaccacacttagcgagtcaccctggccgggcctgggctgccctccagtcggtcagccggactggatttccacgcggccgagccctacgcctcccagaccctgagctccagtctgcacaggccaggtgtctggagccgggcctggtgacaggcatcccccaggtgggaggaggggctgtcctggctctgacctggatatcagatccagagctgagggggaggtgcagggtcaggaggggaggggttctgttctgagtttcccctggccaaggctgcagacaagggacgcagacaatcggcacattgtgagcaggggctgcaggatggaaccagcaagctgctgtgctgagcgccccaaacctgggcctacaggggtgaagaccaagccctcctgcgggggctggagagccgtgggcctgctcctgctgctgctgctgctggtgctggccgctgtggggattgtggctggagggcttcttggctctgctcagggccctcccaagccaaggctgcagacgctgcgaatgaccctcccgagcccccacatgccccggcccaaccaaaccatcctggtggacgtggcccggaacgcggcgaccatcacagtgaccccacctcagagcaaccacagctgggcggtgctgttcgaa

SEQ ID NO: 61488 - DNA, 1642 bp, Homo sapiens
ggaacacagagaaaggttcacccgggagagatggcctagccacttccttagtgactgtttggtatatgtaggtccccctgccattactctttcagccttctgcaatctagttctacttagtcacacacttctctaagaccactcatacgtaaacactacgtagaggcccctttttgcctcattttacattgtttagttatcattttgaaacttttcttcacatatgtaacagtgccggagtttttctgcttctctgtgtttgttcagtaactcttctttaggatacacctaaagatgagaagcttcatacccagtactcctcttcattcactcatatgtttttgggatcagtcccttctgctggctgtgcattggtctaatggaacagaatagagtccagaaataacccaacatgtatgtggacaactggtttttgacagaggtgcaaaggtcttgaaaaaatgatgctggaataattgggcatcagatgcaaaattaaaaacaaattgatccatatcttaacactggcaaagattaaagtccaaatggattatagttccccaaaactgtataatttttaaaagacaacaaggaaaacgggttcagccttgggttaggaaaagatttcttaaatccaacaccaaaagcacaatccatgaaggaaaaatcgataaattgtactttatcaaaattgagaacttctctttgaaaggtaccataaggagaacaaaaagacaagctgtagagtggcagaaaaatatttgcaaaacatttctgataaatgagttgcatctaggttacataaagaagtctcaaaactgaacaaagtaaaacccattgttgacttaatgcgctgtttcctcctgagcttgctgcctctgcccctgctctctctccttttccatttgttttcaacattgaatccagaatgttcttcttgagatccaagtcagatcacaccaaccctcagaactctccaatagacgaccatggcactcaaaagtccacaatagccttcaatgctgggcaaaacatgaagcaccccttttctcccttctctgaccccatcacctctgtgttcaccctgctcctgccgtcctccctgcctccaaaacaggtcaggccttcgtgcctttgcacttactatttgcaatacccaaatgttcttcaggctctttagcctcttcatttctttcctgaagtgtcattctcactgagggcttatctaaaagctggcagctactgggggcattcctgtctcatctccctgctgtattttgtaactcccgggctctcttttgtacttttaaacatactatatggtttacctttgttgtttatatttgcatgttgtttcccacttgaatgtaagctccaaagattttatttttttaaactgaattattactgtattcccagaacaattccctggcaaatatttggtactcaatagtaatgctaagttagtaaataaatgatgaatttagaatcaaaataacgtgtctatggccaaaataaaacctgaaatccctgtcctattttcccagaggtaactgctgttaatagtttagttgtgtgcttccagacataccttcacagaatcatttatcacaataaaggtgtcatactatgcaaaaaaaaa

SEQ ID NO: 61489 - DNA, 1249 bp, Homo sapiens
cccacgcgtccggtgtttgaccaggtcagaactcttgttctatgcgaatgtgctcacgcagacagaagcggaggggctccgtcgctctgccctcacgccgctgaaccgcgagggtctcccgctcctcaggcttgcggctcggccgcgaagtgtgtcaggtgtgcatcctgggtgctcctttgtgctctgtcctacggcgacacaggcggcgtggggttagacaggtaccggtcagactacggtgacacaggcggcgtgcggttagacaggtaccggtcagattacggtggcacaggcggcgtggggttagacaggtaccggtcagattacggtgacacaggcggcgtggggttagacaggtaccggtcagattacggtggcacaggctgcgtggggttagacaggtaccggtcagattacggtggcacaggcggcgtggggttagacaggtactggtcagatgcacgggctccctaaacccctgctgtggcttcggcagtaaagacaggacgcacccatgtcacaagaggagcacaggcaggggtgttggtgttggggcagccctcagggtctccagaccccagccccactcacacagcagcctaggaaggaagggcagagtcccaggtgtcagctggtgggtctcccaggagctgcccctccctggaagtcacaggacaggaatgacagatcagggaactgcaggaagctgccacctctggggtcagaatatgcccagcctgcgggggctctctatcggggtcttcgagagccagacagcctgccttgtgctgcatacctggctttgctctgtgcagaacccagcacacgtgattttgtgtgacatgccagcagcctggctcccaggacaggaggcctgccctgggggaggggctgcaggaggagggggggcaggcacccatgagtctgtccagccttgtcacagatgcatcgcccagcctgcggtcctgatttcagctcacctcagagtaaatcagaataaactgcacccagactttcacgaatgcatgttgacgctttcagttcacccctttctttgctaactttcttcctattttcttctaatgcgagagcttattaattccatatttatcattttgaataacttttctcctttttaggttacaaaagtactttcactcttagtaaaatgtatttactattttagtaacaaaaatatacttgcctaatcatgtttaaaatatagtgatgtgaaaaattctcgtgc

SEQ ID NO: 61490 - DNA, 2042 bp, Homo sapiens
ctctgttgggaacttttctcatggagaaagctaccatcgctttgaagaggtattcttcattggtatcccaggcatatgctttatctcccagagctgttctgataataagtctcactttaaaagcattttctgcacctcgaacgtgggggcgcggtccttacgtgtgggcgcggtccttacgtgtgggcgtgccttgttgctctgaggggcgtaacaaagatggtggagcaggcggagggcagaggcgtcggcaggttagcgtgcaggcgcgtggcagcgacaggagatgtgtagccagagcgcagagcaggtgtggactccggcgctggggaagcgtggccagggcgagatttcagcctgggtcggggacagaatggggactgataggggcgtaacctggaatgacgaaatgacgtttgctgcgtagggacgtggctaaacgtgagggggcgtggccaagatggccgcgtgtgggatcctcgggtaccgggagcgaacgaggaggttctggctcagtgcatccactctgggagagcgtggacctggttcctgggggcgatcgacagtcacccatcaacattcggtggagggacagtgtttatgatcccggcttaaaaccactgaccatctcttatgacccagccacctgcctccacgtctggaataatgggtactctttcctcgtggaatttgaagattctacagataaatcagctgcacttagtgcattggaacgcagtcaaatttgaaaactttgaggatgcagcactggaagaaaatggtttggctgtgataggagtatttttaaaggaaaattctcagtctcccttgaagaagtgaagcctccttctttatgcactggccactgtctaatacctcccagcaatactcagaggagactacctgctggaacctcactagaattgagagatcaaatggttttggctgttttcccactggagaatataaaaaatacacagttaattttagaaacaaaggctgggcatgattccatcctaagcagcaattcttcaggtagctgcccagaagggcctggagctcctctggaccactgctgatctccagatactccctgagaaccgtcacctcggcgtccaattcctgagtggttttcactactaaataatgactcagtgacccagtctcttggccaggacgctgttatggaatttgggtcgtttggcacttcctgcctggtgcccacctgtctagattactggacccaagtaggtccagtatctccctggtccagccctgtcttgagtccatcacctttatcattaagaagcagccagtagaggttgatgatgatcaggtacgttctctccacaattttcatctaaggaaatcctcgtctccccttttaaaacaaggctgggctcaaacttgtaggatccagttttaacatcttgtaatgcttatacatttttattgaagtgtaccaacgtcttatctcagtttggacatgaatttaaagatatttccaattagctagagagaagagttaaaacatagaagaacataagctttttacatctatatttgacagtgacatatgtttttattatacatgcattgtgtagattctctatgaaaattaagacccttttaaataaaaaaacgaaggctggaaatgggtgtattcaaaaccctttaaaatccttaagggagttttgctatagaatctcaggataaagacagactccgacaatattcatccagaaattttcatgtaagtcagttgtttgaaacttgggatttatttttctcttagaaactaagtctaagtggtggttactacatcagcacacaaaatcctgtttaattcataaactaaactgtaataataactgcgtttacttgttcatattgggtttttattgactaaaagcttccagcctctttttcatgcagccaggataacagtgataccaaaacctatcaaagattagaccatcctacccccaaaatataacaataggccaatatctctaaaaaatatgtaacaacagaaaaaaaaa

SEQ ID NO: 61491 - DNA, 2937 bp, Homo sapiens
tttttttttattttataattctttttattaggaaccagttacctaaacaatgtaaatgcattagaccaggagcatactagatccccgatctagttactcgaagcacaaattctattggcaaaacatgcataaacatacacattctagatgcaacacagcaaaatgctgatgtatagtaaacccccattcaagaaaatattgtaaatatacaaaactgattataaaacttcccaaactacctttgaaataatctactccaaagccttcattccataaaggaaactaaagcttaaaacagtaggagttttctaatgtcacagagtgggctttaataacaattgggattagttcagcccaatggtactttccattccataacatgatagtgaaaatttaaaagatttcaaggcagtttctaaatccactctgattcttcagtacttaacaaaaggacaaactaaagtaaatatctcccctaaatttatgatgttcctagaattgtcatatgccaggatgcagtctctgatgtttgttgagagcagagcgatatctgaaggattttccacaatcattacatccaaaaggcttctctcctgaatgaattctctggtgctgaatgagatatgtgctctggctaaaagtctttcccacattcattacatttatatggtttttctccagtatgaattctttgatgttgagtcagatgagtgctccggctaaaggctttgtcacattcattgcacttatagggcttctccccagtgtgaattcgttgatgctgagttagatgggagctctggctaaaggtcttttcacatttattacactggtagggtttttcttctgtgtgagttttttgatgttgagcaagagatgaacaatgtcgaaaggctttaccacactcagcacactcataaggcttggctcctgtatgaattctcttatgctgtgtaaggtgtatgttctggttgaatgctctcccacactcattacacttgtaaggtcgttctccagtatggatcttcctatgctgaataagggatgaaccataactgaaggttttcccacattcatgacactgatagggtttctctccagtatgaattctttcatgcttagcaagagatgaactccgaataaaagctttcccacattctttacattcataagctttctcttgagtatgagttttctgatgctgattaaggtttgagagataactgaaagcctttccacattcactgcattcaaagggcttttctctcgtgtgaattctccgatgttgagtaagggatgagcagtaactgaaggcctttccacattcattgcatttgtaaggtttttctccagtatgaattttcaggtgttgagcaagggatgaccagtaactaaaagattttccacattctgcacaatcatagggtttctccccagtatgagttttttgatgctgagtgaggtttgagtgctggctgaaggctttcccacattcattgcattcgtacggtttttccccagtatgaatcatatgatgacggataaaagttgagggcccgttgaaggcctttccacattcattacatttataggttttttctccagtatgaattttttgatgttgagtaaggtgtgtgctcctggtgaaggttttatcacattcatcacatttaaaaggtttttctcccgtatgaattttctgatgttccataaagtggcctctctggctaaaggcttttccacactcattacaagtgtatggcttctcgccagtatgaattctctgatgctgaacaagatgggtcctctgactaaaggctttcccacattcatcacatttatatggtttttctccagtatgaattctttgatgttgagtaagagatggaccctcaatgaagccttttccacactgatcacatttatatggtttatctccagtatgaattctttgatggtttataaggttttcactccggctgaaggctttttccacaatcaattacatttgtagggtttttctccagtatgtgttctctgatggcgaataagagctgaacaataactaaaggctttcccacattcattgcacttacaagatttctcttttttaactgggtttgaattctgtttgatgcttcttttagtagaggtctcttctggagatggttcttgtgttacaaggtttgaactcacattgacacttttcccaaattcattatttacagggcctttttcccaactgggtattgtcttttcggttacctttatttcctttggcagtgtctgttggtttgcctgctgtctctctaaactgccttcatattcccaactttctagcaagttggaactccaagaatcatctcttttgtgtttttccactattacctctggagatagctcttcttcagaaatgtcaggctctggggctgacacactattttcaagtcttgtctcccagtctgcacaggtacctactggaatgcttggctccatgatccatggctctgtcccttgctctaactgggaaatcacatcaggtttagaaacttggagtcctatagagaccaggtgtgtataattttccaatgtcacatccctgaacaaatctctctggccagggtccagctgtttccattcttcctgggtaaagtccactatcacatccttgaaagtcaccgattcctgaaaactggctgatgagagtagattatgtcccccttggagaagggtggagtctggagaggacagatcttccatctcaggagctcatcccgttcctctggaacttgaacaccagggttcgccaggcagcgttccttcagctggtatctcggtctaggactcagatgtctaactccccttgcagggaatctgcaacacgctgaggttgtctaccctgttgcagagcgttaaagctggaaggtggacaagcaa

SEQ ID NO: 61492 - DNA, 3877 bp, Homo sapiens
ttttttttttttggagcttattagaacatttatttttttctgaatgacaggccgggagtgggagtagctgaacagggcatgttagtggtgtgagtgctggcttaagcgaaggagctggagtgggggtttgtgttgggggagcagtgggatgggaaacacacctgtggggcagctgaactagaaagaaggatgcccaggatagctatgagacacctacaaagcatgggaacccagttcccctaagcccaccccatccccagatccctttttttctcccttaagttaaaaaaattcctttgaggcagcttaagtcaagaggcctgtaaggggtcaagactgggtcacaggtttaggacagcagagttttgctcccggccagcagagccaaggttctgggctgggatgggcagcttcagggccttcctcagctgtgggcattcaattgcccgcgtaagtgaaagtttttcaaacagcgaacatgttcacatagggccttccctggcttccagcatgcggcctagctgtagcgcaatctgggcaaaggggggtcgctcatagggacggtcccgccagcactgacgcatcagctcgtacacttcatcgtcacagtttcgaggctgctccatgcggtagccctggggcagcttttcatagagctcggcacaggtcatgccacagtagggtgtacctccaaggctcactatctcccaaagaaggactccaaaggaccagacatcactcttggtggtatagacactgtagttcagggactcaatggccatccagcgcacagggagacgccccatcgtcttcttcacataaacctcctctccccgagaaaggccgaagtctgcaatcttggaggctaggttctctccgaccagcacattccgggcagccaggtccctgtggatgaactgcttctcactcaggtactgcatgccattggccgcatcactggcgaaaacgcagcagctgccgggagcctaagggtagaggctgtcccatgctctcgagcaaaagctgggtcagtctctaggacccggcttttccgcagaaaatctagcaggttcccgtagggggcatattcaatagcgatatacaagtaacctcggttcttacaggcccccaggaggttgatgatgttggggtgatgccccaatttgcacagaacttccagttctcccgcaaagtcacgatggtcattttcagaggcatactctttcagcattttgatggctgcgttcatcttcagcccgtccttcttgatcatggcccggatgacctggccgaagttcccctccccgatgaggtcctcaaaggtgatgtcctcccactctagcactgggtagctcaggggctcgggctgcagttttggccgccgggtaagtgtcaaggtccctgagctgaactgcaggatggtctcctcgcccgagcctgactggtaggtgaaggtgcgtctccgatgcaggcagcttctgcggatgcacaccagggttaaaagggcggccaggatggtgaggcaggtggcagacacggagcccaccaccgccaggatcagctgctgatccaggccctcttcagctgcccggctctcttggactgggccctcagcctgcagcccgttgcccagggtggactcttctactgtgttgctccagtccccgagcccctgaatgctggcccgcatgcggaagaggtagcgcgtgctggcgttgaggccacggatgatggtgcttgtctcctcaggcctgtccacgtctatccacagtgggtctcctgcacccccagccacctgcacctccacaacgtacttggatattggcccaggcagagcctccgggtgcttccatgtcagctggatctcggagtctgagagggcctgggcgtggaggtgtcggggggctggaggcccactggggggcagaagcacgtgtgcagggggcgaggccgggcccaggagggtgcagtggtagagctgcacatccagctggtagtgggtgccaggcgtgagtcccgtcaggagggcagtgcgggcctggggggatgagacgttctcccgccgctcctgcccccgtgtcccgtcccacaggcgcagcaggaaaccgtcgcccaccagtggcccgggcaccaagggcaaggaccagctcactcgcagccggtcagtgccttccacatgccagccctccaaccacggctgcaacaaaggctcaggacagtctgtggtcatgagggtgggaggcccccaggccccctctcctccttcccctggccggctcagctgcacacgaacactgtatcctgtctttggcctcaggttcattaacgtcacgttctcactggggtccaccacaatggtcgaccagtccatggtactgtcctggggccggtagtgcaggcggacagtggagatgggtccatccccagagaacgagaccagcggggagaccacaagctggcggctctgcttggtcaggagccgaggtgcagccaggggcacggggggcactttcacattgaccttgaagcgccggctgtcttggccgccagatgtggacacacggcactcccagaacccactgtccgcaagaaccaagcggggcacctcgaactcagctgtggtcttctctggctccacaatggccttggtggacaggagcacagtgccgtctggcttgcgtagctctatgctgccccgcacggggaaggggttccctgcagctgcacagttgatccggggcatcgtctctaagttgaactccagttctgaggccatgttgaggatctgggggatccggtctgacttctcacagtgcactccatgccacccagaggggcagacacaaccactgaaccggtcacaagtgccaccattctgacactggcactggagtcggcaatcagccccaaaatgaccaggggcacaagcttcttggcactggcttcctctccagccagatccacaagagcagccataggggtctgggaggcagaaggtgaggccccggcagcctgatatgcctgggcactgctcctggcagctctgcccaaaacggccctctctgcaggcctgttcacagcgggtgccagtgaagccaggggggcatacacattcgccgtcatggtcgtggcagacacctccatgtaggcaacctgggcactccttggtacagcctggcccccagcgcccagccccacaaccccgcacgatgagccgaaagaaggcgctgcccagggggctggcttccaggtaagtggcactgtagatgccgctcgatggtggctgcacatttgggagctgcagcaggaaccgcccatcctgggcttcatgccagtccagggtgtagaagtaggatccgttgctcttccagatcacgtctgtctgcttctccttgtgcacacgtgcagaaagtacagcggtgtcacctttgttcacagtgtgtgtgaccttgtctggaagcaggtgggctccagggctgttgtgcacgtagatgacgcgcgtgcgccgcgccccagcaccgcccacgcaggagaagacgcccacgaggtccgagggcttggagaagccgcgaagcgtgacctggtgcgaaccgttgcgcgccaggcgcaggggtggcccgggcggggtgcgcacgatacggtcgtccttctccagcagcaggggcgggccccaggcgtccgagcccctccccgccccggcctccccagacacgcaagtcaggaagaagcgctgggggtccgtgagccgcaggttggccagcagcgtcaggtccaccgccgcgcccacatgagaagccaagaagaggatggggagcaagaaagggggcacccgccagaccatactccagaggccgacccaggccagccaggacgagcg

SEQ ID NO: 61493 - DNA, 4588 bp, Homo sapiens
ccctgaggcggccgtggttaggcggctccccggcggctcctccgcggcggtgacggcgaccgcactccccgcttcccgctccccgcgctcctccgcccgggtccgccagccgaggccgctcccgagcgtcggaagatgccggccgtgtccaagggggacgggatgcggggcctggcggtcttcatctcggatatccgcaactgtaaaagtaaagaagcagaaataaaaaggataaacaaggaactggcaaatatcagatcaaaatttaaaggtgacaaggctcttgatggctatagtaaaaaaaagtacgtctgcaagttgctcttcatctttctccttggtcatgacattgactttggacacatggaggctgtgaacctgctgagttcaaacagatacacggaaaagcagatcggctaccttttcatctctgtgttggtgaactcaaacagtgagctgatccgcctgatcaacaacgccatcaagaatgacctggccagccgcaaccccaccttcatgggcctggccctgcactgcatcgccagcgtgggcagccgggagatggccgaggccttcgccggggagatccctaaggtcctcgtagccggagacactatggacagcgtgaagcagagcgcggccctgtgcttgctgcgcctgtacaggacgtcccccgatcttgtccccatgggcgactggacatcccgagtggtgcacctgctcaatgaccagcacttgggtgtggtaactgcagccacaagtctgatcaccactttagcacagaagaacccagaagagtttaaaacctccgtgtctctggctgtctctaggctaagcaagaatcgtgacgtctgcatccacagatctccaggattacacttactaattttgtcccggcttcctgggcttgtctgtcaaactgctgagactgctgcagtgctacccacccccagaccctgcagtgcgaggccgcctgactgagtgcctggagaccatcctgaacaaagcccaagaaccgcccaagtcgaagaaggtccagcactccaacgcgaagaatgccgtgctcttcgaggccatcagcttaatcattcaccatgacagtgagccgaacctgctcgtccgtgcctgcaaccagttgggccagtttctgcagcaccgcgagaccaacctgcgctacctggccctggagagcatgtgcacgctggccagctctgagttctcccatgaggctgtcaagacgcacatcgagacggtcatcaacgccctgaagactgagcgggacgtgagcgtgcggcagcgggccgtggacctcctctacgccatgtgcgaccgcagcaacgccccacagatcgtggccgagatgctgagctatctggagacagctgactactccatccgagaagagattgtgctgaaggtcgccatcctggctgagaagtacgcggtggactacacctgggtatgtggataccatcttgaacttgatccgaattgctggtgattacgtgagtgaagaggtgtggtaccgagtcattcagatcgtcatcaaccgggacgacgtgcagggctacgcggccaagactgtgttcgaggctcttcaggctcccgcgtgccacgagaacctggtcaaagtgggcggctacatcctgggggagtttggaaacttgatagctggagacccgagatccagcccgctgatccagttccacctgctgcactccaagttccacctgtgcagcgtccccacccgcgcgctgctcctgtccacctacatcaagttcgtgaacctcttcccggaggtgaagcccaccatccaggacgtgctgcgcagcgacagccagctcaggaacgcagacgtggagctgcagcagcgtgctgtggagtacctgcggctcagcaccgtggccagcaccgacattctggcgaccgtgctggaggagatgcccccattcccggagcgggagtcctccatcttggcaaagctcaagaagaagaagggccccagcacggtgacagacctggaggacaccaagcgggacaggagtgtggacgtgaacgggggtcctgagcctgccccagccagtaccagcgccgtgtctacgccttctccgtcggcagacctgctgggtctcggggctgccccccctgcccccgcgggccccccaccctcctccggcggcagcgggctgctcgtggacgtgttctcagactcggcctctgtggtcgcgcctctcgctcctggctccgaagacaactttgccaggtttgtttgtaaaaacaatggtgtgttgtttgaaaaccagctgcttcaaattggacttaagtctgaatttcggcagaatttaggtcggatgtttatcttttatggtaataagacctccacgcagttcctaaactttaccccaacactaatctgttcagacgaccttcagcctaacctgaacctgcagaccaagcccgtggacccgaccgtggaggggggcgcgcaggtgcagcaggtggtcaacatagagtgcgtgtccgacttcacggaggcgccagtcctcaacattcagttcaggtatgggggcaccttccagaacgtgtctgtgcagctgcccatcactctcaacaaattcttccagccgacagaaatggcttctcaggatttctttcaacgttggaagcagttgagcaatccacagcaggaagtgcagaacatcttcaaagcaaagcacccaatggacacagaagtcaccaaagccaagatcattggatttggttctgcacttcttgaagaagttgatcctaatcctgcgaatttcgtgggagctggaatcatccacacgaaaaccacccagattggatgcctgctgcgcttggagccgaacctgcaagcccagatgtaccggctcacgctgcgcacaagtaaggaagccgtttctcagagattatgtgaattgctctcagcgcagttttagtcctgaggatggaagaccaggctcgtgtgtcttgtgttgtcttcgtctgtgccgtttgtcttcgtggccatcctgcagatgagcaccgtgtccagtgccacagcacaaggcgcctccccgccccgccgccccacacctctcccctttgggctggacgggaacacacgtgtgtggctcaggaggaaaagctcagcctggactgtggcagccacggcagaaggtggatcttgggatcaatttttataaaaatcgagacagttctgtggttaaatctacaaattaaagggaaattagaagttggcgtgaacgtggcgtttgtgggagtgtcactgagatggcccgtgctgccgcccaccccgcctcggagcctctgggagcagcagtgccactgtgcatggcgtgggctgagccttggtgtgtggccgtcctggtggctgcacacctggcgtcgtcctgggcccttgggaggagcacagctgaccctggttttgctgcagtcccagctggactgttttcccaggcaggattttaatctagaatttagaaacatttgtatttgtaatgacttctggcaaaagcacgtgtcctggccggatgtaactgttctcctttcccagctcctgtttgtgaagggcgtctgttatgctcctgcagtcgccgaggccttggatgtgcagccaggggaggagcgtcctgccggccccgcagggcccccaggactccagggtaaagtgtgggccggtggcgcaagactcagaggtgtgctcgtctctttcctgtcagagtgggcgtccccaggccacggtgcaggcctgagtccttccaccggccccgtccagtcgtccctggaggggctgtggaggaaggacgcctctgtgtggtcaggaagtgaaggggccattggccgcatgccatgtgccacctgcggcttgtgtctcacctgtcatctggactcagcacccaggctgcacgtctgacacctgagaggcgagagagtggggccggcctaggagccaaggctggggccttgcgctctgtccccaggatggtggccttgtttgtcctaaacacacccagcacaggttctggcttcctgacatgctgtggaggcagggagggtgggtggccacatgtgcttgagggttttcaccctggccctcagttgcctgctgtgcgggtccctggggcagctgcaggggctcatggacccatcagggtctccacagctcccctgcagtgtgtgcaccccacaatgtctgcggctcttcttccggcgtgtcgggctttgatcacagcatagccacgtcagtggcgtgcgcctctcgcacaggccattctgggtctggtggtgccaggtgccgtgacacgccgtgctgggcttgtgctgcagctgggtggtgtggccctcattctcatgttccagctgctgggcagtgctctgcctgtgtgctgcgcctgcaggctgcgtgtgctgccgtggatctcctgcatcccttgacccctcccgccatcagaggaaaggctgctccccgaggcaccgcttgccctgtgcggcgctgcagaggggccctcagtgtggcactcctcgtcaaagaaaaataaaggctagaactgcaaaaaaaaaaaaa

SEQ ID NO: 61494 - DNA, 1838 bp, Homo sapiens
gtaaccttacagttcggatctcttagaacccacaagcaggtaggcgatcgctgcttcatcacacttcacagggagtcctggatctttcctgtccgtaacccatggacgccatgattcagtatggcggaggtccggggcttaagttcctgttcatgcttcctaatcattcatggatccatcacaatgtgctctgaagggcctctcttgctgggattgagaaggatacattttttgagcaggtttttatactcaatggacatgtagaagggaatatattctactcagttcccctcctgcagctccttgaaattctgtccatcaaaaacagggatctgctgaccagaggtgactgccacagaaggtatccagtttgtaaaagctgaattttgtgctgaagccagaatttgcaatcttgatgtttgtgttaacatccaacagcgtgttttctgcctttaaatctctgtggacaatacgtttctggtgacagcttgcacagcaaacacttttggtagaatttgcttcagtccttttttttctttcctgctgccatgagcaggtattcacaaacttctcctcctggctagtgtgcttcatgacaaagcaaagagattcctcaatatcgatcacagcaaatgtttcactatgttggggtgatccgagccttcatggttcctactttgtggatggtgtctggaggagatctgctgagtctcatcaatgaacttcacagctgctgctttcccagttaagaggtcccaggccaaccttaccttagccaggttgcccttgacgatggtctcaaggatcctagctgccagtaagggtcccttctcagcagagatggctgagaggccctgtggcatgtgagacttactgctgggcttggagtcaaggtgtcccaggtcagcttaatttcgggaaaaactggtaagacgcttggttcaaatcacttgaaaagaaaatcacttgcatagttcacctgaagaatggatctctataatggaattaaagcacaatgctggacaaaaagtaagaaaaagcaacaaactgaaaggaaaaattgagtaaaaagaataaagaactagaactggcaacctcagccaagccagggaattacatacatcttggaattccaaagcaatgcttccttatgagggcataggaagaaataaatctaataacaaggctgggattaattcacgtggttttctcacattttggtctcaagaactttttactctaaaactaattattgaggaccccaaagagctttttatgtgggttatagttatcagtatttactttattggaaattaaaacctgtaggatgtttcagtggtcttttctagtttgaagggtttaataatttttggcttttaaagagcccataatcaattaaaatattttattttcctttaaattgtaaatgattggtgtcataatgatgctacaacttaactggcattacaatactatacaaatacgttctattgtataagtcacaataaggtacattattaactctataacatttaggggaagatagctgttatcatattatttaaagttttgcctagtttctttgtagtagacttatcttttccaggagccagagaacccgctatatcagtttcagtatctttaaatgtagagattgcagctgtgtgttgagaaagcacgtttcacttagcatgggatggggacttcgaggtactggatatgtcactggcacctcaggggaggaaaccaagatgcccctatatgattttaaacatggtttattaaagcgtgatacagaaaagtgcacaaattgtccacctacagcttggtgactgttc

SEQ ID NO: 61495 - DNA, 1020 bp, Homo sapiens
ccgcaaatattgaatgcttttcccctaacacaaggataaccactttcatcacttctcatcactggctagagaacctagccagtgtagtaagggaagaaaaagagataaaaaacatacatattgtaaagaaagaggtaaaactgtttaatgcatagctcacataattagttttgtagaaaatcctgtggaatctacaaaaatgctcatgaaacttgtgagtttagaaacatcacaggatacaagatcaatatacagaaatcaattgttttatatactggtgataacaaaaattaaaataatacagtacaatttaccacacatcaaaatatgaaatatttagggatagatttaacaaaatcaagacctgttcactgaaaactataaaactttgctatcagaaattaaataagacctgaataaatagaaagatattttttgttcattgcttgggaaattcaatattgttaagatgctagttctccccaaattgctctataaattctatgcaatgtcaaccaaaatctctgcttttaaaaaaattgacaaactgattctaaaattcctataaatgccaaaagcctagaataatgaaagcagttttgaaaaagaaggagaagttggacaagtacaaattttgagacttattataaagctaaaataatccagaaaatgtggtattgacataggatacatatatagatcaatggaacagagtagagagaccaaaaatagattcaatgtatagggtgaattgatttttgacaaaagtggcaaaatactttaatggggaggatggtagtcttttcaacaagtgatgctagaacattgagttctagcaccagtagaactagaatgtggaaaaagtgaactttgggcatatcatgttgaaaaataactcaaaatggatcacagacctaagcacaagaactgaaaatataaaacctccagaagaaaacataggagaaaatccttgcaaccatggaatgagcaaagatttttcagggcccccagtgcatgaaa

SEQ ID NO: 61496 - DNA, 2856 bp, Homo sapiens
tacgagtacagcttccgcacagagcagagcgcagccgccaggctcccgcccagccccaccaggtgtcagcagatcccgcagtcctgaggagccagcggccacctgcggggagaccaccgccgcccagactactgacggcaggggctgctgcccccgcctcctcctgccgcctccgccagccctccctcccacactgccccagcagggctggcccggagactgggcagctaagtgggcgcatcctgtcttcagctggcctgactgacaccccggcctccctggggacattgttcataaccatgactaatctgtgtgtgctgtagtgaccagcggctcctaacgtgtctgtgtgatgaccagttgtcctccaaaaacctcactcaccacggagtcaccctgagggccccgggcagttgccctggccgcccagtgacgcccaccggctccctccgctccctcctgtcacctaccagggcagaccccactaagccgttgagtctcttcctggaagaccctgagggccggcagctttgcctaggactctccagggtcgctgatcctccccggcccagggctgccaggaacaagttcctctctgcaggatctcacagcagccctgagaagacatgggaggaagaagccagtggccctggggtggaccctgcccttttggacatcccatggacttgtcacccagtcgcctggaagtcggggagcagcacccctgcccccggtggaggggttgttgctttctggggaggaggacggttgacggccctgcttggatccaccaccaggacgctgtgctcggccatggcgcgcctcccccaagggctcatctgtgcaacaaccacatgccaacaatagctccaggtgcctcagccccgtgccctgacccggggaccacagggacaccctctgagacgtgctggccccaggaggatacaggcacacgggcacccagcccctctcagagccaggcgtgtcttgacggtatctgctgacgggaacaagtcattctgaaaggtccctctgacccaggtcaccaaatttgggccagaactggcacttccgagtgcccactggtgctggcgtcctcaaagtgccgggcgccaagttcagccccaggtgcgtttgcctaggcagtggtggctgccatccctcggggcccaggccctcacccgaagggctgcctcactctgtggtgtcaggcactgggctgtgtcctgattcctcagagtatggggacctgacatctttgggtccccaagagttggctcttggatgtggaggcttgatgctgcggttgggggctgcactacctgcgtccgtggaagcctctgcctcagcggggacggcctcctgctgcaggtcctgggcagcccacagtagtgctagctgaggcccagaggaacgggaggaaagggaggcagcgccggacggcgcagctggccaagaggcgggcggggccagaaatacctcatgcccctgcaccagcccctccgtctccaggccccaggcctctttgtggacccatcttcctcctctgccaccccgatcttcactcggatacctcttgatttctgtggataagggaagcggccacttctccctccctgagacccgaggatgcccctggtgggggtggccttctcaggactcctgggtggcacagcagcaggaccttgtcatgggactgatgctgagcagggagggggctgccaggctggctgccgatgctccgttcacataagccagtgtggttctggggacctgaggagccctgtggcacccacagggggcacctatgtctgccgtggctcctcgggtggtgccctgtgtgacaaagcccaacagcaagggtgactcctggcaggtgggggcagcaggagggcagagggcagagctctggccacttctgcccacttcattagggtttgtgaactttgtccttcacctcttttcgtgccctggttgtgagattgcctctaacaggtaatgccaggggcccttcactccgcccccatgactgggaagaggcctgtggcagcgccgctggaccctaggaggctcagaggcagtggtgtgggagccctgtctgcaaggacgcagaataagcagtgagggcggctgcaggagaggaaggggctcccacagcccccactgatgccgctgcaggcccctgtcgagctggggtcccagccaggtgcccccgcatgccctcctgcagttgctggatggatagggacaccaggaagaggacaaactgcatggactcaagcgagctggagccatcttctccatagcattacggacttagcataagagtaaatgactgtgaacgttgtagtaaacggcagcttaagataagtaagcagagacagtgttaaggacgagttggtgtctgtggtagcttttaggctgctcctaacccaccatttattgccttctgagaggtgggtgaggacaagcatgtgcctgtgtgtgtgtgtgtgtgtgtgtgtatatgtgtgtgtgtgcacgcacatgcgtgtgtataagcccacctgagtggggctcgtgcaggagaactgaggcatgaaactctggctcaaacctaggaattgagagcgtttctgtcttttgggagagtacttttctccacgagccctctggccactgtgggagggaaggacaagggttcccttggaaatgtgaagggtcttggcctcatccctcaggtccccccacagcacttcccactacttgcttctgtccctgctggcagcctctgtccctccagaacggctaaccagagcacactgtccccaccgcctcccctttctctctggaaagttgaagtatctccaaaggcct

SEQ ID NO: 61497 - DNA, 2043 bp, Homo sapiens
gaatataacctagaaaagaagagaaataaaagagactgtgtttcaccatgttgcccaggctggtctcgaacttctgagctcaagcaatccaccctcctcagcctccagaagtgctgggattacaggcatgagacaccaagtccagccataagatccctgcatgtcactgagtccaccatgctttacagaagaagacagatttagtctggaagctcttcaaacaatacataaacaaatggatgatgacaaagatggtggaattgaagtagaggaaagtgatgaattcatcagagaagatatgaaatataaagatgctactaataaacacagccatctgcacagagaagataaacatataacgattgaggatttatggaaacgatggaaaacatcagaagttcataattggacccttgaagacactcttcagtggttgatagagtttgttgaactaccccaatatgagaagaattttagagacaacaatgtcaaaggaacgacacttcccaggatagcagtgcacgaaccttcatttatgatctcccagttgaaaatcagtgaccggagtcacagacaaaaacttcagctcaaggcattggatgtggttttgtttggacctctaacacgcccacctcataactggatgaaagattttatcctcacagtttctatagtaattggtgttggaggctgctggtttgcttatacgcagaataagacatcaaaagaacatgttgcaaaaatgatgaaagatttagagagcttacaaactgcagagcaaagtctaatggacttacaagagaggcttgaaaaggcacaggaagaaaacagaaatgttgctgtagaaaagcaaaatttagagcgcaaaatgatggatgaaatcaattatgcaaaggaggaggcttgtcggctgagagagctaagggagggagctgaatgtgaattgagtagacgtcagtatgcagaacaggaattggaacaggttcgcatggctctgaaaaaggccgaaaaagaatttgaactgagaagcagttggtctgttccagatgcacttcagaaatggcttcagttaacacatgaagtagaagtgcaatactacaatattaaaagacaaaacgctgaaatgcagctagctattgctaaagatgaggcagaaaaaattaaaaagaagagaagcacagtctttgggactctgcacgttgcacacagctcctccctagatgaggtagaccacaaaattctggaagcaaagaaagctctctctgagttgacaacttgtttacgagaacgactttttcgctggcaacaaattgagaagatctgtggctttcagatagcccataactcaggactccccagcctgacctcttccctttattctgatcacagctgggtggtgatgcccagagtctccattccaccctatccaattgctggaggagttgatgacttagatgaagacacacccccaatagtgtcacaatttcccgggaccatggctaaacctcctggatcattagccagaagcagcagcctgtgccgttcacgccgcagcattgtgccgtcctcgcctcagcctcagcgagctcagcttgctccacacgccccccacccgtcacaccctcggcaccctcaccacccgcaacacacaccacactccttgccttcccctgatccagatatcctctcagtgtcaagttgccctgcgctttatcgaaatgaagaggaggaagaggccatttacttctctgctgaaaagcaatgggaagtgccagacacagcttcagaatgtgactccttaaattcttccattggaaggaaacagtctcctcctttaagcctcgagatataccaaacattatctccgcgaaagatatcaagagatgaggtgtccctagaggattcctcccgaggggattcgcctgtaactgtggatgtgtcttggggttctcccgactgtgtaggtctgacagaaactaagagtatgatcttcagtcctgcaagcaaagtgtacaatggcattttggagaaatcctgtagcac

SEQ ID NO: 61498 - DNA, 446 bp, Homo sapiens
cccgccactcctgaggagaaggggacgcgcggcgcgctcctcaccgggcccgggcccagcgcctatcgccgcccacgcgagcctcacgaatccaggaatgcggaacccgaggatactgagggccactgtacattgcaaaaaaatgggacaaaagacttagtggaaagggtataaaagctgatgaagcagagcctgaggattttgtggtggaaaaagtactacaccaaggtgtggtgaatgggaaggtggaatattccctgaagcggaaaggatttacacttgctgacaataattgagaacctgaagaaaacttagattttcctgagttcattgaactatttcttaatcctcaaaaaaactggtaaaggaaaagatagtacaaaaagaaaatctttatccgagagtgaatctgatgacagcaaatgaaagggatgctgctgaaaaac

SEQ ID NO: 61499 - DNA, 1973 bp, Homo sapiens
gaaaagctgtgttaaacttctctgcatctggaagtgtgatttcccttactgggtccaatccaatgcatgatgctagcatgtggcatctgaagaaaaatggaataattgtatacctggatgtacctctactaaatctaatttgccgcctaaaattaatgaagacagataggattgtaggtcagaattctggaacatctatgaaagacttacttaaatttagaagacagtattataagaagtggtatgatgctcgtgttttctgtgaaagtggggcttccccagaggaggtagctgacaaagtgctgaatgcaattaaaagataccaagatgtggactcggaaacattcatttcaacaagacacgtttggcctgaagactgtgaacagaaggtttcagcagaattctttattgaagctgtaattgaggggttggcttctgatggtggcctctttgttcctgcaaaggagtttccaaaattaagctgcggggagtggaaaagcctagtaggagcaacctacgtagaaagagcacagatactgttggaaagatgtatccatcctgcagacatacctgctgccaggttgggagaaatgattgaaactgcttatggggaaaactttgcctgctcaaaaattgctcctgtcaggcacctttcaggcaaccagttcatcctggagttgtttcatggaccaacaggatcatttaaagatttgtctttacagcttatgcctcatatttttgcacaatgtatcccaccaagttgcaattatatgatacttgtagctacttcaggagacacagggagtgcagtcttaaatggttttagtcgtctaaataagaatgataagcaaaggatagctgtggttgcattttttcctgagaatggagtaagtgattttcaaaaagcacaaataattggcagtcagagagaaaatggatgggcagtgggtgttgagtcagattttgatttttgccagacagctataaaaagaatttttaatgattctgattttactggctttcttactgtggaatatggaacaatcttaagttcggctaactccataaactggggccgactacttccgcaggtagtttatcatgcttccgcatatcttgatcttgttagtcaaggatttatttcttttggaagcccagtcgatgtctgtattcccacaggaaactttggtaacattttagcagcagtgtatgccaaaatgatgggaatcccgattcgaaaatttatctgtgcctctaatcagaaccatgttttgactgattttataaaaacaggacattatgatctaagggaaagaaaactagcacaaaccttttcaccgtcaatagatatttcttccaaatctttcaaacctagaacgacatttacacttgatggctaataaagatggacagctaatgacagaattatttaatcgattagaaagtcagcatcatttccagatagaaaaggctctagttgagaaacttcagcaggattttgtagctgactggtgctctgagggagagtgcctagcagctattaactccacctataatacttcagggtatattttggatccacacactgctgttgcaaaagtggttgcagatagggtgcaagacaaaacttgccctgtgattatctcatctacagcccattactcaaagtttgcacctgctatcatgcaggctttaaagattaaagaaatcaatgagacttcatcaagtcagctctatttgctgggttcatacaatgcattacctccactgcatgaggctttattagagagaacaaaacagcaagagaagatggagtaccaggtctgtgcagctgatatgaatgtcttgaagagtcatgtggaacaacttgtccaaaatcaattcatatgaaagctttcagagtaaatttttttttctagctataagcatgcaataataaatctcaaacactgatttggagtaaaaaaaaaaaa

SEQ ID NO: 61500 - DNA, 4567 bp, Homo sapiens
agaggaagaaaatggcagagaatacaaatttgatgtttcgtcagagttactagagtggatttggcatgataacatgcagtttcttcaagacaaaaacatttttgaacatacatattttggatttatgtggcaattgtgtagttgtattcccagtacattaccagatcctaaagctgtgtccttaatgacagcaaagttaagcacttcctttgtcctagagacatttattcattctaaagaaaagcccacgatgcttcagtggattgaactgttgacgaaacagtttaataatagtcaggcagcttgtgagtggtttttagatcgtatggctgatgacgactggtggccaatgcagatactaattaagtgccctaatcaaattgtgagacagatgtttcagcgtttgtgtatccatgtgattcagaggctgagacctgtgcatgctcatctctatttgcagccaggaatggaagatgggtcagatgatatggatacctcagtagaagatattggtggtcgttcatgtgtcactcgctttgtgagaaccctgttattaattatggaacatggtgtaaaacctcacagtaaacatcttacagagtattttgccttcctttacgaatttgcaaaaatgggtgaagaagagagccaatttttgctttcattgcaagctatatctacaatggtacatttttacatgggaacaaaaggacctgaaaatcctcaagttgaagtgttatcagaggaagaaggggaagaagaagaggaggaagaagatatcctctctctggcagaagaaaaatacaggccagctgcccttgaaaagatgatagctttagttgctcttttggttgaacagtctcgatcagaaaggcatttgacattatcacagactgacatggcagcattaacaggaggaaagggatttcccttcttgtttcaacatattcgtgatggcatcaatataagacaaacttgtaatctgattttcagcctgtgtcgatacaataatcgacttgcagaacatattgtatctatgcttttcacatcaatagcaaagttgactcctgaggcagccaatcctttctttaagttgttgactatgctaatggagtttgctggtggacctccaggaatgcctccctttgcatcttatattctgcagaggatatgggaggtgattgaatacaatccttctcagtgtctagattggttggcagtgcagacaccccgaaataaactggcacacagctgggtcttacagaatatggaaaactgggtcgagcggtttcttttggctcacaattatcctagagtgaggacttctgcagcttatcttctggtgtcccttataccaagcaattcattccgtcagatgttccgggcaacaaggtctttgcacatcccaacccgtgaccttccactcagtccagacacaacagtagtcctacatcaggtctacaacgtgctccttggtttgctctcaagagccaaactttatgttgatgctgctgttcatggcactacaaagctagtgccctattttagctttatgacttactgtttaatttccaaaactgagaagctgatgttttccacatatttcatggatttgtggaaccttttccagcctaaactttctgagccagcaatagctacaaatcacaataaacaggctttgctttcattttggtacaatgtctgtgctgactgtccagagaatatccgccttattgttcagaacccagtggtaaccaagaacattgccttcaattacatccttgctgaccatgatgatcaggatgtggtgctttttaaccgtgggatgctgccagcgtaatatggcattctgaggctctgctgtgagcagtctcctgcattcacacgacaactggcttctcaccagaacatccagtgggcctttaagaatcttacaccacatgccagccaataccctgggagcagtagaagaactgtttaacctgatgcagctgtttatagctcagaggccagatatgagagaagaagaattagaagatattaaacagttcaagaaaacaaccataagttgttacttacgttgcttagatggccgctcctgctggactactttaataagtgccttcagaatactattagaatctgatgaagacagacttcttgttgtatttaatcgaggattgattctaatgacagagtctttcaacactttgcacatgatgtatcacgaagctacagcttgccatgtgactggagatttagtagaacttctgtcaatatttctttcggttttgaagtctacacgcccttatcttcagagaaaagatgtgaaacaagcattaatccagtggcaggagcgaattgaatttgcccataaactgttaactcttcttaattcctatagtcctccagaacttagaaatgcctgtatagatgtcctcaaggaacttgtacttttgagtccccatgattttcttcatactctggttccctttctacaacacaaccattgtacttaccatcacagtaatataccaatgtctcttggaccttatttcccttgtcgagaaaatatcaagctaataggagggaaaagcaatattcggcctccgcgccctgaactcaatatgtgcctcttgcccacaatggtggaaaccagtaagggcaaagatgacgtttatgatcgtatgctgctagactacttcttttcttatcatcagttcatccatctattatgccgagttgcaatcaactgtgaaaaatttactgaaacattagttaagctgagtgtcctagttgcctatgaaggtttgccacttcatcttgcactgttccccaaactttggactgagctatgccagactcagtctgctatgtcaaaaaactgcatcaagcttttgtgtgaagatcctgttttcgcagaatatattaaatgtatcctaatggatgaaagaacttttttaaacaacaacattgtctacacgttcatgacacatttccttctaaaggttcaaagtcaagtgttttctgaagcaaactgtgccaatttgatcagcactcttattacaaacttgataagccagtatcagaacctacagtctgatttctccaaccgagttgaaatttccaaagcaagtgcttctttaaatggggacctgagggcactcgctttgctcctgtcagtacacactcccaaacagttaaacccagctctaattccaactctgcaagagcttttaagcaaatgcaggacttgtctgcaacagagaaactcactccaagagcaagaagccaaagaaagaaaaactaaagatgatgaaggagcaactccaaataaaaggcggcgtgttagcagtgatgaggagcacactgtagacagctgcatcagtgacatgaaaacagaaaccagggaggtcctgaccccaacgagcacttctgacaatgagaccagagactcctcaattattgatccaggaactgagcaagatcttccttcccctgaaaatagttctgttaaagaataccgaatggaagttccatcttcgttttcagaagacatgtcaaatatcaggtcacagcatgcagaagaacagtccaacaatggtagatatgacgattgtaaagaatttaaagacctccactgttccaaggattctaccctagctgaggaagaatctgagttcccttctacttctatctctgcagttctgtctgacttagctgacttgagaagctgtgatggccaagctttgccctcccaggaccctgaggttgctttatctctcagttgtggccattccagaggactctttagtcatatgcagcaacatgacattttagataccctgtgtaggaccattgaatctacaatccatgtcgtcacaaggatatctggcaaaggaaaccaagctgcttcttgacattaggtgtagcatgtctacttttaagtccctcacccccaacccccatgctgtttgtataagttttgcttatttgtttttgtgcttcagtttgtccagtgctctctgcttgaatggcaagatagatttataggcttaattcttggtcaggcagaactccagatgaaaaaaacttgcatcttcagtatacttcctaaagggcaatcagataatggatatgttttatgtaattaagagttcactttagtggctttcatttaatatggctgtctgggaagaacagggttgcctagccctgtacaatgtaatttaaacttacagcatttttactgtgtatgatatggtgtcctctgtgccagttttgtaccttatagaggcagattgcctccgatcgctgtggttcttattatcaaaattaagtttacttgtatacggaacaaccacaagaaatttgattctgtaaagaatcctctttagctgtggcctggcagtatataaatggtgctttatttaacagaatacctgtggaggaaataaagcacacttgatgtaaaaataattgttttatttttattgacatgactgattgattgattgctattctgtgcacttaattaaactgattgtgatgacttttaaaaaaaaaa

SEQ ID NO: 61501 - DNA, 3212 bp, Homo sapiens
tttttttttgtgttcagaaaagtacagtgttgacattttattttttatgtaaagaagccatatttacataatacattcatatttttaagtatgttacagctcctgtagaaaaccatttccattaagacagcaacaagtgatctggattcaatctttaaaatattaagtcaaattaaaatgttcttatcaagactccaatttaatttcacagcccatctgccacaggggaactgaggagaaacaggaatgaagagtgggcgacaaagagaaagcatcccttcccacacgccaagagtccagtgcaacgatccctgccacacggtcagccgaccccacttggtgccacagggtccagcctcggccactctgggctcaacctttccagcacgtctgggagcccaatgaggctatgggacagtgtgcatttccctcaaggcctccggaaagtcacctgccacccactgtgaccttctgaggctgaaaggacttaaggactcctttcccccatcatttcagctggcccagtggctgggctaaaatcagcgcagcatttcccattcttctgaaaagccacagctgaaataatgcaccagctgaaaaccaccagtggagagacttgagatgggcctccctctgggcctctagttggcaactttctcacccgggggctcctctttctccttttcccgctccttgttccagtccttaaggccttctggaagtgaggtgtcctcatccaagctgccagtgccttccacaaattcttcataggtaagatttttccgcaaatggtctgggggccaaaaagttcaaccatatcattcctaaccaatacttctttttctaacaacagaagagcaaccttctccacgtcagctttcttttctgtgagaagagctactgttcttttataagcatcattaataagtattcgtacttcatcatctatcaatcttgcagtggcttcactgtaaggtttctccaataccattgtccccctgacgtgggaggtcaaaggagatttgcccaaccttttcattcatgccaaactgaaacaaatttgggcataatggcactctgaagttaacttttcacaagtcatcttgagcaccagttgtaattcttccaaagaagatttcttcagagactcgaccacctaaagtcatacacatcctatccaagagctgctctttggtatagaggtattgttcttttggtaaatactgagcataacctagtcctttgccacgtgggatgatggatacctttaaaagcgggtctgcgtgctccagataccagccggcaaccgcatggcctgcttcgtggtatgccacagtcttcttctcctcaggctgcagaacctgcgttttcttctctaagccaccaatcactcgctcaattgcctgttcaaagtgtttctgatttatggaatctgacagatgccttgcagcaatcaacgcagcttcattacagacattagcaacatcagcacctgaaaaccctggagttaaagatgccagttttcttgccaatttatccttctccagggtactgtccagttttagcggtcggagatgaactttgaaaatagaagctcttccttttatgtctggtggtccaataaagatctgcctgtcgaaacgccccggcctaagtagcgcggggtccaggatatctggtcgattggtgccggccaaaatgacgacatttgttgttgtattaaaaccatccatctccaccagcagctggttgagtgtgttctcctgctcactctgccctccaaagttgcctcttcctctcttccttcccaccgcatcgatttcatcgatgaagaggatgcaaggggcattcttccgagcaagggcaaataagtctcggactctagcagggcccacaccaacgaacatctccaaaaactcagatccactaacggtgatgaaggggacattggcttctccggctgtggccttagctagcagcgtcttcccagtgcctggaggaccagtgagaatggcaccctttgggatttttgctcctaggtcttgatactgctttgggtttttcaagaaattcacaaattccatgatctctagcttggcctcctcacagccagccacatctttgaacttcacatcaatttcatcctttaagaccttggcagtggtttctccgacactgaagagtccgcccatccctcggcctgtccggccaatggcagcaggccctcttctgatggtgtagagcaagaaggcgatgatgagcaccgtaggcagcatgctcagcagaaaagagccatcactttcagcaatgtagacaacaggcacccgattttctccttctatgcccaattcctgctgtaaagtttccagattccgttcaaaggtgtccacactgccaatattaaaccaaacgtattgcccatcaacaggagtttttcctggtgtaaaggtcactcgaacaaaacgcttgttgacgacttccaatctgtctactactccttttgaaagatagttattgacaaagtccttccaagtgatttctctcccggatctcttgagcagcaagtaaaacatgactccaccccagaacagagcagtccagaggaagaacatcctgaaatccttgtcgtcccatggaatgtcacccttctgaaacctggaccaccagtgagaatcatctttcttgccacctcgttttccaccgccaccacctcctcctccagaagagcgtgtggtagcagctggctttgattcttttttctctcccataacttctttaggttcactagctttttttccattttttccattaggaaagtattttccaaatccttttgggggtcgagaacagaatctttgataagcagcaattatatctgtcaaaagagaatttctgctggcccttgcttgagttgtaacaaatcggtaaagcgtccggaggcagggctgctcgcccgggcccacgccgccaggcacgaggagctgctgtaggccgcggggccagcagccgccccggccccacagccgcaaacagcggtgcgccatggccgccgccgtggccctctcggcccgggacgctgcgcaggcgcgggcaggcgacgactggcggcctcgggaagcgggctcggctcggggaaaggccgccaggcagcgaagcgcgccggcggctcacggaggagcccaagctctcaacgcggcgtctcccctcgtgcc

SEQ ID NO: 61502 - DNA, 2896 bp, Homo sapiens
ccatatatggtaccttctcccggatgggaacatacaaaggggaaacaactgcctgaggtgggaaggtgacagtactaccttcttctagaaaacaaagattgttcaaccaccaccatgagaacaggtggaaaatatctctatagacccaacctggcaatgaagtataaacatcgcaccccgcagggcttctcttggtgccctagttgggttcatttttgtttgtgactatgaatgggaagaagtcacaccctgtaaccactccaactccctaaggagtcacctcttctttaaggaatagctttcccttgtatctaaaaaacttggaactgacatgaatgaacgttggccactcttacccctccaggggtcacaatctataacgcctaggacccaagaatatcagaaataagtaagcaataaaactaattctggcaggaatcagggtggcaataggactagcagcaccctggggtggctttgcctaccatgagttaacgctaaagaacttggctcaaatcctagaatccttagccaccaacggagatcaggcattaaagagaattcaagagttccccagactctggaaaatgtagttgttgataacagactagcattggattatttactagctgaacaaggtggggtcttgtgcagttattaataaaacctgctgcacatatattaactctggacaggttgaggttaacattcaaaagatctatgagcaagctacctagttacatagatataaccagggcactgcccccaactatatctggtcaaccatcaaaagtgccttcccaagtctcacctgtttttcacctcttctaggacctttgacaactgtcttgttacaaatgtttggtccttgcttctttaacctcttagtaaagtttgtgtattctagattaccacagttccagagacaatgctggcacaaggcttccagcccatcctgtccactgacacggagaatgaaatcgtcctgcctctgggctccttagatcaggtatccagagatttttactcctccagtgccaggcagggcctacgtccataaactcagcaggaagtagttacggaaaacagatctccgcccttctgcagcccccttaagattaaggaggagtatctaatctctgaagggggaatgaggtaggaggtgggactcaactctggaagtggggctcaggcactcagaccaaactgagcactagctaaaataggtccagggcagatgctagtttccataggacacaccgacctgtgtcaagtcagttcaccatgggctcctgggcagcacccaggaagttaccaccctcaccctgggaaatgtcttgcataaactgccccttcaatttgcatataattaaaagtggatacaaataccactgcagaactgcctctgagctgctactgtgggcgcacagcctgtagggcagccctgctttgcaaggagcagcgcctctgctgcctgctgtgcacagccggccgcttcaataaaagttgctaacaccactggcttgccttgagttccttcctgggcaaagctaagaaccctcccgggctatgcttcaatcttagggctcgcgtgtcctgcatcactgggatcatctcccagtaaactagccacacttacatccatgtgtcagggacatttctggagaaagcagcccaggacactgttgaataaaacacacaatagtctctgtggtcttctccaccccaccccacaccaggcaccctcagcttgattctcctttttaattgcctgtaagcagggaagcacaatgttttcacattctttgtaaggcctttgttctactaaaatctaacctcagagcacaattttaaactagatgaaagagttgctgcgcctgaagcactgcaaacacctcctcaccacacatgtgcactcaccctggacaccctcactcaccctgacaccctcactcctcaccctggactccctcactcaccccagacaccgtcactcctcaccctggacacctcactctgcaccctggacaccctcactcaccctggacacgttcactcaccctgacaccctcactcaccctggacaccctcactcaccctggataccctcactcctcaccctggacaccctcactcaccctggataccctcactcctcaccctggacactctcactcaccctgacaccctcaatcctcaccctggactccctcactcctcaccctggactccctcactcctcaccctggacaccctcattcctcatcctggacaccctcactcctcaccctggacaccctcactcctcaccctgacaccctcactcctcaccctggcaccctcagtcaccctgacaccctcactcctcaccctgacaccctcaagtcttcacctccctgggtgcagcctgggacacgctttccctaacttctgaaggctcagtcctcctcaagccaatctcatctcaaattgcaccctccctcagagaggtcttccataaccgcccttataaagcaggattctttcaccaataccccttcccacatggcactgtctcacagcactcctctaaaagtctgtttacttccttgacaatctgtcttccttataaggggaggttctgtaaaagccaagactctctctgtctagttgactgttgcataccagggcttagaccaaggccctgacatgcagtaggtgcttaatatgttttgaggcaaggtcttgctctgttgcacatgctggagtgcagtggcacaatcgtaattcattgcagccttgaactcctgagctcaagtgatcctcctgcctcagcctcctgagtagctgggactacaggcatgcaccaccaagcttggctaatttaaaaaaaaaattatatagatagggacttgct

SEQ ID NO: 61503 - DNA, 3328 bp, Homo sapiens
ttttttttttttgagattttcaaaatatttttatatagaaattttttacaaagattttacaacatagcaaatcattatgtcatactgtagaaagatgaagcaaaggattaaactccaaggataaagaaagtgctcatagcaacgtattgcagtctccatgaaagtgcatataaacggttaaggcaaagtaccatcttggtacagacatgttgcaaactgacttttaaaacaattttttaaaatatatacaaactttttttcttctattcttctcaaaggcatttgaaagggatacttttatgaatattcttgctgtagaacaatgtagaaataacttctgggtataaaacagtaaaaataaaaatattctacctgagtgtgttaaatcaagtgatttgtaaaacaaaaccttcacaagtgtgggctttctacatgtaacttgccaggctgaaggcttacaccctcatgttctacaacacagatcactaatgatgataacatgagttaaattgggattcttgcccttctgtgtggcttttggcttctaggttctatgaccaaactattgacatatttgaagtctgtatgcagtcattgtgtgataaatctactttacagctttgcttctacctgcagcttacatgataaccatgctgtgaagtgctacatatgcttcatacaatatgttgccccatctgataataaaaatacaaaggtgctctttaagctaaaccataaaccttattagagaattctagttaagtgttttgtttttccacatacatgtaaataccttaagatcaataggatcaataaggataatattagttatcaaaatttagtcttcatacttgaagaatttgtttttaaaaataactaagatgcaaaaaaataaattagctagtcttgaacaagagtgagttttgcagaaaactgacatatctgaattctagtacagataagaatctgtcaaatgataactgaattcacgtgactaaccactcttttacgtaagattgtatctactcatgagaaataggggaattcagtgttatcattatagtctccgtatttaaactgagtttttcttttccaattttttttccatgcctcaacataagggaaattaatcagttaatttctgctgacttaggtttcctaaacagcttttagttctcaaggcacagctgtggtaaaaacagagcaaaacacccagccatttattggaattctgcagtacaaaataagcacatgtgctctatataatctagtaacaggatagcaacagttaaactgtctcaaacaacagatgtatttgcttgattttccttcctaacttcttttgcatcaggaccgcaagcaaagagcttgtttcccagagtattttgggcaaatcggaaatacataatgtggcccattgccacaaaggagactgaaatcaatacgagcaagccaaaagcttcaggatttggagccaggatgaccatgatgaaatgcagaagatcaagaagatagttcatggagttctgtacaccatttataatgcctctttcagattcaattacattttcttgcagcaactgtgtcacagttaaatcaaaggaccaaagaccgattctagcagcaatgacgcctgcaaacagcagactgacagagattatgggcacagattcaggacttgtctccgggacaatattagcagaattagacccattagacatgtatatttcagttgtaatttcaggtatcttggtaggtgtaattgactctccttgaatgaaccttgatcggatatcttcaaaaggagaaacggacaagtccagggggcttccaggcatgaatacagagatcacacacaagatcaaacaggaaagctgtgccaatcctgagatcagacctgtccgaaccaaaccacattttcgacgtagccaagtaaaagctacagttcccattattccagttatagctgatgctcccatcaaaatactgaggatggaaccactcagtccctgagtgtaggcgtaccctgtggtgatgcagtcaaagcccaggacagtcatataaaggaaagcaagacccatgccagccagaaacacaggctggttgtagtaggagacccatccatctcggaaggtacggaagggctcagccatctgggaggcacaagtaggctcttgctcatgttcaagctcatggatgttagagtctttcacacccattagatgagttccctccaggggttttggctcagtatctttgtgtaaattcagctgtttcaattcagtttcctcttctttaagaccagctttcacagctagagctggggttttctggtaaaccttccagagcaggacgtactccacgcacatggataccaagttccatcccgaaataaagccacagccgatgactggggagccaaatgtcataatctggccaacagccatgggggctaagatgttggttaactggtcaatccttcgtattgtggcattcatatttgctagtttgcttctgtcttctcctgcaacaacaacaatccaatccctttggattgtgattgcagtagcagtactggccaaatttgcaatatttgcaatagtgatgatcaggatatagcaggaagtgagaacccatccatggtacatggtcagaagctcatgtttatgtaagaaaaccatcatcaggatgattccacacaggatgactgaaacattctgtaccaccagcgaggtctgggccactttaagtctagcattcttgtccacccagtcaccgatgatggctcccaggaccagaacagaccctgccaccaccagcccgtagactgctgtcaaaaggaggctgtttccatagagctctaccagaaacacagacaccgcaaagtgccacatccgatctccccaagtagagagagaatgaccaaggtagagaaggaattttgcagaggtcaggtagtcggccaaggatccacagcatcctctctggcggttgtgatctcccgccctggtcatgacactaggcgaccccgctggctcttctgcggctgctatcgctgctgctgctctcgctgaggtgcttgttaacaggagtgcaaggaactggagatagcacctctaaaaacacaacagccttgggcaaaaagactacaacgacgactttggcaaagaacaaaagaaaaggggcccagggattttcttttttccttctttccaaacttagctaacactgtagctgaagttggaaaggcaaagccttatggaagcggtttgggaggctcagcaggtcgtccgagcctagcggacgccctgagccagctcctcgtgcc

SEQ ID NO: 61504 - DNA, 2701 bp, Homo sapiens
  misc_feature (1)...(2701): n = a,t,c or g
tcaacgctccggggccgctcggctcgcctttcttccctcgcctttctctcctgcttgcgttcaccgctcccccctgtcttttcacggttgctggttttattttgttgttgtatttatgcctttaggggttttgttccatcggcgtcgagctcatgggtgtacattatcatgctcttcttttgtagagcagccgacggccatggaggctgaagagacgatggaatgccttcaggagttccctgaacatcataaaatgatcctcgaccgattgaatgaacagcgagagcaggaccggtttactgacatcaccctaattgtcgacggacaccattttaaggctcacaaggctgttttggctgcttgtagtaagttcttctacaaattctttcaggagtttacccaagaaccattggtggagatagaaggtgttagtaaaatggcctttcgccatttaattgagttcacatatacagcaaaattaatgatacaaggagaagaagaagccaatgatgtatggaaagcagcagagtttctacaaatgctagaagctatcaaagcccttgaagtcaggaacaaagaaaactcagctcccttagaggaaaataccacaggaaaaaatgaggccaaaaaaaggaagattgcagaaacttcaaatgttatcactgagtcattgccatctgcagaatcagaacctgttgaaattgaggtagagattgccgaaggcaccattgaagtggaagatgaaggcatcgaaacattagaggaagtggcttctgccaagcagtccgtaaagtacatacagagcacaggttcctctgatgattctgctctagcactgttggcagatattaccagcaagtaccgtcaaggtgacagaaaagggcagattaaagaagatggctgtccatctgaccccacgagcaaacaggtagaaggtattgaaattgtggaacttcagctgtcacatgtgaaggacttgttccattgtgagaaatgtaaccgttcatttaaattgttttaccattttaaggagcacatgaaatcacactccactgagagtttcaagtgtgaaatatgcaataaacgatatcttcgagagagcgcatggaaacagcacctaaattgttaccaccttgaagaaggtggagtcagtaagaagcaaagaactgggaaaaaaattcatgtatgtcagtactgtgagaaacagtttgaccattttggacattttaaagaacatcttcgaaaacatacaggtgaaaaaccttttgaatgtccaaattgtcatgaacgatttgctagaaatagcactctgaaatgtcacctcactgcatgccaaactggagtaggggcaaaaaaaggaaggaagaagctctacgaatgccaggtctgcaacagtgtgtttaacagctgggaccagttcaaagatcacttggtaatacacactggagataaacccaaccattgtactttatgtgatttgtggtttatgcaaggaaatgaattaaggaggcatctcagtgatgctcacaatatttcagagcgtctagtaacggaagaagttctttcagtaggaaacacgtgtgcaaacttgaacctgttaacattcaatgactatttttaggaacaagttggggaaggtgcatgtgctaccattgcttcaggttcaggtggattcagcacaagtgactgtggaacaagtccatccagatctgctccaggacagccaggtgcacgattcacacatgagtgagcttccagagcaggtccaagtgagttatctagaagtgggccgaattcagactgaagaaggtactgaagtacatgtagaggagctgcatgttgaacgggtcaatcaaatgccagtggaagtacaaactgaacttctagaagcagatttggaccacgtgaccccagaaatcatgaaccaagaggagagagagtctagccaagcagatgctgctgaggctgccagggaagatcacgaagatgctggaggatttagagaccaagccaacagtgggattctggaagccggaanaaggcagagaatggaggacagaaccagctctgcccagttttaggaatgaaattacacatgaatatatttttaaatttacttgttgggtttttgaactgattatgggcagtttgactgtccttaattaagcctaacagacaagtggaccaaagttaagctgtttcctgttgtgctgaactgttgtccgttgaaacacattgattcccctccccctacttattgccacagaggagggatcttttccataactgaaaggggagtttttggagaccgtataatttcctggaaacttaaaatggattatattcttattatatagttgggtaccgaatgtatctattttccattgtggtaaaagttccttccttttctctttccccaggtccatgttcctcccctcaaatttttccccatattgtaaaatccaaacttaaatcattagaatacaagtttatgtattctaatccatgttagaaaattgaataatataggaaacacaaggctgcatgatgaaaagtgcattgttactgtgcagttaaattttggcttctggctttctttagtttgaacaaacgttcttgtctaccccagtagtcacagatgccatctttgcaacagaaagagtggtggtggcaaaatttctagaatgttaaaaaaaaaaaa

SEQ ID NO: 61505 - DNA, 1727 bp, Homo sapiens
  misc_feature (1)...(1727): n = a,t,c or g
cgagcgcggaacgcgaggggctgctggggtgtttgtcgcagcgggttttcctcggcggtttgcggagctgctaggatggagcaggttgcggagggagcaagggtgaccgcagtccctgtgtcagctgccgacagcactgaggagttggccgaagtcgaagaaggagttggagtagtgggcgaagataatgacgcagccgcgagaggagcggaggcctttggcgacagtgaggaggacggagaggatgtgttcgaggtggagaagatcctggacatgaagaccgaggggggtaaagttctttacaaagttcgctggaaaggctatacatcggatgatgatacctgggagcccgagattcacctggaggactgtaaagaagtgcttcttgaatttaggaagaaaattgcagagaacaaagccaaagcagtcaggaaggatattcagagactatccttaaataacgacatatttgaggcgaactctgatagcgatcagcaaagtgagacaaaagaagatacttccccaaagaagaaaaagaaaaaattgaggcagagagaagagaaaagcccagatgatctgaaaaagaaaaaagcaaaggccgggaagctaaaagacaagtccaaaccagacctggagagctccttggaaagtttagtttttgatttaaggacaaagaaaagaatttctgaagccaaagaagaactaaaggagtccaaaaagcccaaaaaagatgaagtaaaagaaacaaaagaattaaagaaagttaaaaagggtgaaataagagatttaaagacgaaaacaagagaagatcccaaagaaaatagaaaaacaaaaaaagaaaaatttgtcgaatcccaggtggaatctgaatcaagtgtacttaatgattctccctttccagaggatgacagtgaagggctacattccgacagcagagaagagaaacaaaacactaaaagtgcaagagagagagcagggcaggacatggggctggagcatggctttgagaagcccctagacagtgccatgagtgctgaggaggataccgatgtcagaggcaggaggaaaaagaagaccccgagaaaggctgaggacactagagagaacaggaagctagagaacaagaacgctttcttagagaagaaaactgtgcctaaaaagcagaggaatcaagacagaagcaaaagtgctgcagagttagagaagctgatgcctgtatctgcccaaacgccaaagggccggaggttgagcggggaagagagaggcctctggtccacggactcagccgaggaggacaaagaaaccaaaagaaatgaatccaaaaagcccaaaaaagatgaagtaaaagaaacaaaagaattaaagaaagttaaaaagggtgaaataagagatttaaagacgaaaacaagagaagatcccaaagaaaatagaaaaacaaaaaaagaaaaatttgtcgaatcccaggtggaatctgaatcaagtgtacttaatgattctccctttccagaggatgacagtgaagggctacattccgacagcagagagaagagaaaagcccagatgatctgaaaaagaaaaaagcaaaggccgggaagctaaaagacaagtccaaaccagacctggagagctccttggaaagtttagtttttgatttaaggacaaagaaaagaatttctgaagccaaagaagaactaaaggagtccaaaaagcccaaaanaaaaaaaaaa

SEQ ID NO: 61506 - DNA, 4433 bp, Homo sapiens
ttttttttttttcggggtgagacgggtttattgtgcacatttacacagcgtcagcagcgtctgggctggcagcggccatgctcctgtggtcgggctgctctacaagggcgttcacttttcttcaccacactatgtacagtcagtgctccaaggtgatgggctacagtgctgcatcagtgagtctgtacacacatttttacataaattacacacgactcatacatgaaaaatagagcctaagggcctgtattttaatgagaaaaaaaaaatttccaacatagttcgggtagctttgaatggtctagtcaaaaaatacttttggtatataaaaagcctgtacgtacaattcacacctcagtgaagcgccctccttgccttgaggctgggcctgggacaaaggtgggcctcacagccagcccaggcagggagatcggcagagaggggtggcccctgaccccagctcctctgccccagctgctgctccttggtggcggcccctcctgacaccaggcgtctgccatccttcaggcaccaaacagccccgtctacctggccctggtctgccctcacaccagtccacccccagccccaaccccaaccaccctccgctgccacggcctccagcacctgactccattcagggaactgaatttgagcttgcaggggtgagaaccacactgagcagcatgacaggctgtgagatcggaggagaagagtatatgctgaggctctcccagttgtcacttggtcttaggggtcctggtgcccgtggcgcggcagtccagccacagtgctgggcctgcacaatcagcctttaggtgaactggaacaggaagcggaacccccaaggcggccgagcagagtgggtactgggaggcatacacactgggccaccaacactggaacatgtttcccatacagaggcctcctttggtgatgaagggaagaaggatcatgtgtgggaagtgtgagaaaggatgagtgtccgattcggtgacggggggcagagcggtcgcaggggagcaggcctcacagcggcggacagtgttcactgctggagggggtgaatgcctcggggccaagtcagtaagagcttctgtcttcactggcaaccaaccgggggttatgggacttcttaatggcaagaggggtgggtgttttgaaagtgggtatttatttggatttatagtaattggcaaaattcagtccttggaggcgaaagtacctctcccagttaatgggcaaactggagaaagggcctcacctggaaactgtaggattcacattgtggacgctgtctgctaaagtgagcaccattaagaccattttctagctgcagctttcctggaaaacagcacaataatctcttaagtggctcctggtagctggcaagaccatgcggtgctccaaaaggaagttcaggcgagtgttcgctgtcgggggtttgaatccgtggatacagccccagcaggtttttgggcacatagccctcccggtctccaaggcgagcccaccaccacctcagtctcgcttttcgtccttgcgcctcaggatggtgagggcgtccccttcgtggaaggacagctcgtcactgttctgggcctcgtagtcccacagagcatacgccacacctttgttcatcacacccagcttttcctgcaccccatatagaaactgggagcactggatgtagccttcctccatctcctcacacttgtctgcagcagtttcaatgtcgcttatggttgaggcaaaaatggcggcaccactctccaccagctgtttgcagaggtgaacgctgttacaagaggcagcgcagtgcagcggcgtccatccatcactatcagcagcattcacgttgacaccaaaatccagcaggaacttcacgatgtgatggtggccggcgcagacggcgttgtgcagtggggtgatcccttcatcgttgggcttgctgggatcttccacctcatagatgatcctctgcaccagatcgaactctccttccagagacgcgtctaggagcagtgccagggggttaaaccggactctcagcccgtgccccgtccgctccgagttgggcttcttcaagttggtccgcttgttcgtggaggtggcaggagggtggctggcagggggaagaggtgctggagggacctgctcttcccctggagatggggcctcagccacaggactcgggatctgctccgtggtggggaccgtggccacgttgttgttattgtcctctgccggctcggcagtttggtgggtggtttggggacagatgagctcctctggttcgggggaaggtaactcattatcattggcatctgatgacggggcaggctcagcggggagtggggctgtgggctgggcaggggggagctcttccaggtttccattggcattggtgtttccattgtccacatcggccaaggtgaccatgaagtcctgggaggggctgggctggtagaaaggggtgccctccatgccaccggccagggtgttgaagcgctggtacagcagcttctggatgttgggcccgccggggccctcgggctctgtgatggagctgcgctttttcaggggccggggcgcgttggccagcttcctgcggagggcctccaggtctgcatcactctggtagcgcagtggcgaatgcacgatgggcgtgagcttggtggggctgagtggccgtggcaggctctccacggtgctgccatctgcgggggcggcggggccatcctgctaaaggctctttctcagtactttctgaaaggtggctgaaggctgtggtgtgcccgtggacagtgacccgtgaagaaacggcagcggcgatggagaggttgaacccgaaggtaaaacgggcttaccatacactgctttaactgacttatttaaggcgctgtgtgctgccggctggtaattcttaggtggtgtggcttgctggaggtacatggagtatatggaacttgaattcactgtctggggtcctttcctgggagactgtggccttgaccctttatcagccaggaaaggcctaatggccactgtcagtgggagttcaggcttgctgtccccagctggaaatgcaggtggtcccgctggcgggtacgtgggacttggcggtacggaaatcctctgctgaatctgttgtgaggagcctggctggggggtgctgcctgtggcgggcagcagggtgggcctctgtcgacttggcaggcctgcactgggcctgggcaagctgccttccttcctcctttccagggagcttgtcgacccaggacccagaggtgtaggacttgggtatgtcccatagcttggaggcagctgcttgcctacacccgggatgggaggtggcactttaccaatctcgatgcccggcttctccgtgggtcccagtgctgagaagggcacaggctggctggagacagtgccctgcttgacagacccctccacgctcggatccttccagtctgcaccggccacctgcactggtttcacggaagagctagaattctgttttaatgttggccagtttccatcattagcggatttggatcttccatgagcagcatttgaggcaatactgagagactggggctttatagggtcccccagcacaggaaagcttccggcactgggaacctggatataaggccccacagcagcgaccctgcccgatgtgctcagaggggactgtggtgatgacgtgccattcacacggttcagctgaatttttttcccatagagacgttcacgcagttcactgattcgcttgtccatcatggccacctccatgttgcgcttatttaagagttccttctgctgctgaagttttgaattttgttcctggttaagttggttacgaatctgtagttcttggtacagtctttttaactccaccgccgctggtcccgtcaatttgccattgtaagactggaacccattcagttttcctttctttaaatcttccaattgctgactaagctgatcaacccttaaaattgcagtctgtacttcctgcttcttttcctggaacatggcactgaacctttctatttcagcagacagattgccgttcatgattttgctgtagtcgacttgtcctctcattgcacgaattttcttcagcttgttctcctgggcttcaactcgttctttcaatttctgaagcttttcattttcagaaatagactgctgctgacggcgctcctgttgctttagaaaatgtaaacgctgttccttggcaaccaacatctgctgctgattttcaatctgctgctgttgcctagctgccatatcttggagctctgagagggtaagttcaacacgtggattcccaactttcttccggacgcttcatataagtgaagtcataccataggtagtctttcacacctgctgtgaggtttttgaggttcatctgtgttgag

SEQ ID NO: 61507 - DNA, 818 bp, Homo sapiens
aagaccacatttccctcatccctgtgtcccttgcggcagttgcctgaggtcagagggtacagtggtcaacctctgactgaccctctcatctctctttgcagatctcataagtgcaggggaaaggggtggggcagcagctcctatccttccctcccagccctactccgggcccggtcagctcctggccactgtactcaccgaagctgtggcccagaatggagaatcgattccatttcaaggctggaaatgcaaggagccagaaggtccggctgggcacaggctcagcccacgatcttgcttctagtccccaggctcaggaaatcccttcccagcatctggggtgtccacccaggagactagcttgggggacccactggaggaagcgaactcttcaactttcccaagatctcccgtgaattgctggcagacctggggccagagcccaggccccactctcaggccagcgctgcttcctggatcctaccccgcctccagtgataagagggggtgccctagagcaccccccacaccgccgaaaatacacactctgtttcttacctgccacaactcttcggatctcactcacaaaagtctggaggtaatatgggacacctgggctgtaatgggacgagagcccatgacctccgaaatccatggcaacgtaataaaagtctgattcagtgaataaaacctaatgcctcccggaaataaaaaaataatactgcctaaacctcccgggccgcttgttataaaggggcccatcaacacccccaaataacctttgtttgtctattatagatcccaaccttttatgtttg

SEQ ID NO: 61508 - DNA, 1836 bp, Homo sapiens
ttttttttttttgaaggaaaggaactttcaatgagaaatcaaaacacaggggaaccaaagtgcaaatcatccaccccccatgggggggccaatcctgaaccccacatcatcccctcagcccccttcaggcccccagcgcaggcccagggctcggatgcttctgcctcaggtagctcttgagctgggggcaggccctctctgggacctccagtttcttagaaaggtagacggcagggagcttgaagcccattcagggcctagggtgccgttccctcaggggcccttcgagcccagtcaggcacccgggccgtcccggcagtaaatgcccagccgttcccgcaacaccagcaccaccctctgggcaagggtctcgagtagtggcgctagaggcagcctgggccctgtgggcaggacccttggtgggtatggcaggaaggggtcctgggtcctcacgggaagcacagcaccagagctgctggcgcacagcaggaagtctgtgcagtagcctggaggcacagtcaggtcctggcggtatttctcctcccccagcagctggcgcaacccctcagctactatgtccttgtgactgtacttgcagcgggcacggtcggtgatgagaggctggggaaagatgggcacttgctgccttcggggaaggcggggaccccggtatcctgggagctccagctccacggccgtgtccagcagggagaggtagcgacgcacaatcagagcatgaggggtgccactgatgtagttgatgaagccaggggaaaaaacaaagtgcagggctctgaagggcaggcaccgcagttggcacagtgacatcaagatgttgactgtagccaggggtgccacccctgcttcccgagccaggatcctctcaaggcagggcataaactgctgttccaggggcaggtagttcagtcgcccaaagggcaggaccaacttctgtaccaccttgctgctgagttgcgtttcctgaaccaccaggaagtgggcaatggcttccagaagctggggctcccgcaaccggtgccgggccaggtgctgggccaggagcaccatcacgtggggagtcagttcctctggccttgcctctgccaggctgctgatcagatgctgccgtggataccgcagaaaacgggggcagcttagagcagcttccaacccttgcccacctcggagaaggggctgcaaagggggaggtggcttcggagggaggcggagccttcgctcctgttccagggcacacaccaggggaccatcagatggaaagccaagtaagactgcaaggtgcagacacacgtggatggtgtgaatgtcaaaggaggggcagtttcggatgatgagctgactcaagtcctgcagtgtgacctgctccacaggagggggccgtggccgagaccccaagagctggcccagacgacgaagcgccaccgagtagtggtgggcgcgcaccttgctggggttctggcccagccagcgcagcagctccccagggctcttcgcctgttccagaagccgctgcagtccttgcacaggacctgcactggggcctcctccaacaggccggtccccccatttgctgggccccaaacagcagggctgtactggagggatcagcagcaggccagacagccgagcaggggaggtctgagcagagagcaggactcgaagcatggagttgggtgatggagaccatgactccccgggccctgcgcaggtcgctccctcagtcggtctcggggcccgggggccgggttccccccgcggcctcctcatcggctagccaccgagtccgccatcttccccctcgtgccgaattcgaatcga

SEQ ID NO: 61509 - DNA, 1450 bp, Homo sapiens
ccactctgctcagctccgctccaggaaggccacctcctcctccccctcctcctcccgctgtcaccactcaccgctcataacctcaagggggtggggaccccagggctggacacaccccaccgtggccccagagctcagccggtcgcacggacggacagttggaagccggaccccagagcctgaggtgggcagtgtgccagggtcccttgcggcctcctcaagccctgtccaggctatgggcatcaagacagcattgccggcggctgagctgggcctctactctctggtgctgagtggggccctggcctatgctggccggggcctccttgaggcttcacaagatggggcccacaggaaggccttccgggagtctgtgcgacctggctgggagtacattggccggaagatggatgtggctgacttcgagtgggtgatgtggttcacctcctttcgcaacgtcatcatctttgccctctccggacatgtgctgtttgctaaactctgcacgatggttgccccaaagctccgctcctggatgtatgctgtgtacggggccttggctgtgatgggcacaatgggcccttggtacctgctgctgctgcttggtcactgtgtgggcctctatgtggcctcgcttttgggccagccctggctctgtcttggccttggcttggccagcctggcctccttcaagatggaccccctaatctcttggcagagcgggtttgtaacaggcacttttgatcttcaagaggtgctgtttcatgggggcagcagcttcacagtgctgcgttgcaccagctttgcactggagagctgtgcccaccctgaccgccactactccttagctgacctgctcaagtacaacttctacctgcccttcttcttcttcgggcccatcatgacctttgatcgcttccatgctcaggtgagccaggtggagccagtgagacgcgagggtgagctgtggcacatccgagcccaggcaggcctaagcgtggtggccatcatggccgtcgacatcttctttcacttcttctacatcctcactatccccagcgacctcaagttcgccaaccgcctcccagacagtgccctcgctggcctagcctattcaaacctggtgtatgactgggtgaaggcggccgtcctctttggtgttgtcaacactgtggcatgcctcgaccacctggacccaccccagcctcccaagtgcatcaccgcactctacgtctttgcggaaacgcactttgaccgtggcatcaacgactggctttgcaagtgagtaggagtggggtgggggtggtcacagccatcttgccaggtgtctgagcagggcagtgccaagatgggtccacattttaaaagatcacccctgggccaggggaagcaaagagggcagtgaggaggtatttgcagagggtctggtgaaagatatagaagttaggac

SEQ ID NO: 61510 - DNA, 1883 bp, Homo sapiens
  misc_feature (1)...(1883): n = a,t,c or g
actcaccaaccctccccttccaaccagagaaactcactgcagtatctccttgaaagtctggtgacgtgtctgtctaagtgctggtgagaggcacaggaccaactgagggcctcacgcagtacccctggccacagggtgcccgcctaagcccacacctgctgactgcaacaagcccatggccaggacggaacacagagaagggtctgaggcctggagcgcgccatgaaggccatggggcaagtgaggtctgctgagatagcgcaggtctgcggagctgaagtgcagctgcagaggctggtctggtgctgcgagaactggaagaagctgggagctgtggtccctgtccacagagatgctggaaactgtggctgggagtggctctgaggccgtggagagagagcatctctgccccacggcatctgcgggtgagggcaaggtcctcaccagacaagtgcagctccaagtcccagatgttgggctttttcttggtactgagacagcagtggggcagggtggggcagtggcaggaaggcagggagcctctcttgctacctcttctccatgctctgcatctgcagactgagggaggtgaagctggccaggaggtcagtcacttcatccacctgctctttggtactggtcatctgcaggcgggtgcagaggtcatccaggcgttctcgctgctcatgttgccctaggcgctccagatactccctcagcatatggatgatctgcttcacctccagacgcacagcctttaggcactgggcatggccctcctgcaggatattcagctttgacttggccaggtgcaggggtgtgcgaccagctcggtccagggcatctacacgggcccctcctcgtagcagtgtggtgatgacaggaacgtggttggtgcaggccgccaggtgcagtggcgtgttccccagcccatctcgctggttaggatcagcaccatggtccaggagcagctgcacaatctggtcattgccattgcatgaggcaaagtgtagagctgtgcggcccttgtcatcagctgcacagggatccgcgccatcttccagcagctgctgcactgtttccacatcattggcattggccgagtccctcagtctcttcagagcgtgcacctccttgcccgtgggaggatgcatttcctggctctgaggtggcctggactctgtggcttgagctgccctcctcaactccagtttcctgctccatcgctacacctccaacctcctctcccgtcacctgctcttctgttatacagacccgggtgaggacatcaagccctcctgaacaagctgggataatcttcctggcgaaagatccttaacttcattacatctgcaaagcccctttgggccatacaaggtaattttgacaggttcctgggattaggacatgggcatcttgggaggccactactggcctaccacaactgggggnagcaaaactaattacaccctccggtataatagtttttggtgtttcaatgactgggaggaaaaggggttggaattttttttgctttgggggtccctcttaaccttgtatttttaaggtctgggactcaccaaccccttccccttccaaccagagaaaactcactgcagtatctccttgaaagtctggtgacgtgtctgtctaagtgctggtgagaggcacaggaccaactgagggcctcacgcagtacccctgggagtggcttcttgaggccgtggagagagagcatctctccccacggcatctgcgggtgagggcaaggtcctcaccagacaagtgcagctccaagtcccagatgttgggctttttcttggtactgagacagcagtggggcaggacggaacacagagaagggtctgaggcctggagcgcgc

SEQ ID NO: 61511 - DNA, 1633 bp, Homo sapiens
ggataaacatctgtagcacgcttacgccaagcttggcacgaggggagattgacgcggcagtgcacacctgctggtacgagcaaaagtagccgacaggccagagtttccagtttcggtggcttcgtaggcttttagcttctgaaatccgctaaaagcggcggttcattcatcttcaagtacctagcctgactggtagggctgctcagcattccgaaacatttcgacctggggaggggggcggcggtgaaagaatactttctgtagagagtgcccctcgcgtcgcccctgctttgaaggctttatgtattaacggaatgccgaacatttgtgtcctacttgctgacagcgcacaggatccttctaacagtatttctcaagtacttaacaaaaagatgaaaacttgaagtccaagccgtgctgctgattccgtctcacagtttaaagactgtccagaaactttaagctttcaaaactgtacattttaaaatcctgtgcgtttatcttcattttgctgggcagaaagccaaagtactggactgcctggttcagggctgaacgcctagtacacctgctaacttggagcttcagagccatggcaaccaaggagtcaagagacgccaaagcacagttggccctctcctcatcggccaatcagagcaaggaagtgcctgaaaacccaaactatgctctcaaatgtactcttgtgggacacacggaagcagtgtcatcagttaagtttagtcctaatggagaatggctagcaagttcttctgctgataggctaatcataatttggggagcatatgatggaaaatatgagaaaacactctatggtcataatttggaaatatcggatgttgcctggtcatcagattccagtcgtcttgtttctgcctcagatgataaaactctaaaattatgggatgtgagatctggaaaatgtttgaaaacactgaaggggcacagtaattatgtctttcgttgtaacttcaatagcatgtatattttacacactttcatgaccattaatcatctcctaaaactggggaaagctctctaaaacctcttaagagtaaccttatccgttaccctattccaccaacctctttgtccttttctgtttcaagcaactttgagataccgacttctctatggaagcttaagccgtagatgctaaaacaaacgtttgctcgttactcccagcagagcaccggcttttaaaggacctcaacagacacgtttcttaacctttacgaaacttttccaggggaaacttaaaccaggaattttacaatctggcataaattctgtcacccgccccgtgactccatcgccacacatgccacctggctccacaccacaacaaacaggagggagcggaacccatgcaaagcaggagcttcccccgtttccggcgtctgggtggatctacgttagctgccgtttaggcagcttacgcgtcaggtgtgggcctacgcctgcagctaaggtaggcatccgcaaatctagtccttctctgtgacaatttccaaaaagaaatggtttttgaaacaacgatccactgcttcccacactatccagttaggtccgggacagaccctacccagctaatgcactcacccaagaaggcagt

SEQ ID NO: 61512 - DNA, 821 bp, Homo sapiens
ggcctctccggaagcctgtggcattcctggcacctccaagccatctgctcttcagcctctgggcccaggactagactagtgctaaaatagctgctcctgggaggggctggacccccaccgtgggcagagagggcctctgctttttggggcaggaggggccaccctggcagggtaaaaagagataaacagaaaaacaacagcaacaataatagtaacaatccggggttgttgccatggggcctgttctgaacaggctgcgcccagctcactgcgaggaaggacgcttagccaggccctggctgaagcctgcagctgggctggacacagcagtcattggcctgtgttgtgggggacttgggcctgccatggctgcagtggggaccctgcctgagacagacagagctggggtggtgaccaacaccgtcggggcaccctcgcaggaactgggcctggtgaactgcccagggacggggaaggagcagggtgaggcatggggaccccgacacaggttgagcagcgggagaggaggctgaggaggggaaggagggggcccgcagagtagcccccagaccccaagtccggtcagggacaagcttgttagctccaggttcatgtcacaacctgcagggctcctaagttcaagcttttttaaacttaatgggcaaactgagacgcaacacaaataggcttctgaccttggtgtctgagtcctggatctgaagtccttcacggcactcactgtgagcccctcttagacgcactgcacgaagtgagcttgccagctcttcctttaagaaacgtgttaggccgggcgcggtggg

SEQ ID NO: 61513 - DNA, 2245 bp, Homo sapiens
aacttccgtgtcgacgatcccgcggggcttggcctctgcccggccacagagccggagctggaggtgctgtcccgtctggcggcgatccccgggcagggcccggggccggggtttgaagatgctgaacgtcccttcccagtctttcccggcccccaggtcgcagcagcgtgtcgcctccggggggcgtagcaaggtacctttaaaacagggcagaagccttatggattggattcgactgaccaaaagtggaaaggatctaacgggattaaaaggcaggttaattgaagtaactgaagaagaacttaagaaacacaacaaaaaagatgattgttggatatgcataagaggtttcgtttataatgtcagcccttatatggagtatcatcctggtggagaagatgaactaatgagagcagcaggatcagatggtactgaactttttgatcaggttcatcgttgggtcaattatgaatccatgctgaaagaatgcctggttggcagaatggccattaaacctgctgttctgaaagactatcgtgaggaggaaaagaaagtcttaaatggcatgcttcccaagagccaagtgacagatacacttgccaaagaaggtcctagttatccaagctatgattggttccaaacagactctttagtcaccattggcatatatactaaacagaaggatatcaatttagactcaataatagttgatcatcagaatgattcctttacagcagaaacaattattaaggattgcttatatcttatacatattgggctaagccatgaggttcaggaagatttttctgtgcgggttgttgagagtgtgggaaaaatagagattgttctacaaaaaaaagagaatacttcttgggactttcttggccatcccctgaagaatcataattcacttattccaaggaaagatacaggtttgtactacagaaagtgccagttaatttccaaggaagatgttactcatgatacgaggcttttctgtttgatgctgccaccaagcactcatcttcaagtgcccattgggcaacatgtttacctcaagctacctattacaggtacagaaatagtaaagccatatacacctgtatctggttccttactctcagagttcaaggaaccagttcttcccaacaataaatacatctactttttgataaaaatctatcccactggactcttcacaccagagcttgatcgtcttcagattggagattttgtttctgtaagcagtcctgagggcaattttaaaatatccaagttccaagaattagaagatctctttttgttggcagctggaacaggcttcacaccaatggttaaaatactgaattatgctttgactgatatacccagtctcaggaaagtgaagctgatgttcttcaataaaacagaagatgatataatttggagaagccaattggagaaattagcatttaaagataaaagactggatgttgaatttgttctctcagcacctatttctgaatggaatggcaaacagggacatatttcaccagctcttctttctgaatttttgaaaagaaatttggacaaatccaaagttctcgtctgcatttgtggaccagtgccatttacagaacaaggagtaaggttgctgcatgatctcaacttttccaaaaatgagatccatagttttacagcataatgaagagctgtcattgtcctttattcaactagtttatctaaatttgtgattgcttagggttttttaagagaacatttttgtacataacaaaaggttaactagaatccagccttcagtttcttaaatgaaatcaaatgttccttcagtacagggtaacttcttgggctttcttttggtaccacaacttatttttactactgatatttgacccgggaaagttaatcatggcaacaaatacatacaggattctttgttatgaatcacaaatttccttgccatttaaattatatcactgttctacaataagcacttgtgttttatgacatgataaagtaaatgatcacttcgatcatgtttctatgctgtaaaatgtcttattagcaatacagattaaattttaccttgcactgttaactcaggaaatgatcatttatgtccttgttattaatgttaaaacatagaatgttataacttattaagtgatccaaacatttttttgtgtgtgtatggcattgatgcagaatagaataaaattatacttaagttctttttaaaaaaaaa

SEQ ID NO: 61514 - DNA, 1948 bp, Homo sapiens
gccccttctcctgtaaacttgggtcgcctctagcttagcgagcgctggagtttgaagagcgggcagtggctgcacacgccaaactttccctatggcttcggtgaccagggccgtgtttggagagctgccctcgggaggagggacagtggagaagttccagctgcagtcagacctcttgagagtggacatcatctcctggggctgcacgatcacagccctagaggtcaaagacaggcaggggagagcctcggacgtggtgcttggcttcgccgagttggaaggatacctccaaaagcagccatactttggagcagttattgggagggtggccaaccgaatcgccaaaggaaccttcaaggtggatgggaaggagtatcacctggccattaacaaggaacccaacagtctgcatggaggagtcagagggtttgataaagtgctctggacccctcgggtgctgtcaaatggcgtccagttctcgcgcatcagtccagatggtgaagaaggctaccccggagagttaaaagtctgggtgacatacaccctggatggcggagagctcatagtcaactacagagcacaagccagtcaggccacaccagtcaacctgaccaaccattcttacttcaacctggcaggccaggcttccccaaatataaatgaccatgaagtcaccatagaagcggatacttatttgcctgtggatgaaaccctgattcctacaggagaagttgccccagtgcaaggcactgcattcgacctgagaaagccagtggagcttggaaaacacctgcaggacttccatctcaatggttttgaccacaatttctgtctgaagggatctaaagaaaagcatttttgtgcaagggtgcatcatgctgcaagcgggcgggtactagaagtatacaccacccagcccggggtccagttttacacgggcaacttcctggatggcacattaaagggcaagaatggagctgtctatcccaagcactccggtttctgcctggagactcagaactggcctgatgcagtcaatcagccccgcttccctcctgtgctgctgaggcctggtgaggagtatgaccacaccacctggttcaagttttctgtggcttaaggaagtgtgaagatatgatccagtccagggctaggctcagccacctgtctcctgtccagaaaaaaggtgaagattaagaagctttcagaatgattctatggattaaaatcatacaaatggtggctgttctgagaatcagtctgggtattgatttccttttccagtgactggctccaggccatgtctaatgaccagctcgattccctgtgcagttcagagagcaagtgaacccaaccaacaatgtcgtcatctaagccctgaccctagccagggactcccatgctgctgttggctccatctctccacactgcctctttcttttcaactttttgcccttcctttctttaaagctattctcacattgcttttatttcctcctccttcacctccaaccactgtcagcagcactctggagttttcaaatgtcacattagcctcaccctgcatgctaggagatggacctgtctctatacagcagtagatgattgataagtgaggaaactgaggcttacagaggttgaagaccaacaagctaataaataaaaagttgaggccgggcacggtggctcacgcctgtaatcccagcactttggaaggccgaggcaggcggatcacgaggtcaggagatcgagaccatcctggctaacacggtgaaaccccgtctctacataaaaaattagctgggtgtggtagcacgcacctgtagtcccagctacttgggaggctgaagcaggagaatcgcttgaacctgggaggtggaggttgcagtgagccgagatcatgccactgcactgggcaacagagcaaaactcgatctcaaaaaaaaaa

SEQ ID NO: 61515 - DNA, 1214 bp, Homo sapiens
tttttttttttttcctagagaagagacgaaggtgattcagggccgagcagggctccctgggaagccccctcttcctgccccaactttattttggttctagaatcattccagttggcatacccggtccccaccacggctgtcctgggcacacagttaacatgtcatgcagttagggggagggagagaggggagagggcagggggggagtcagtggcctgcaccgcacagccactgggttagagaaagtcggggtctcccaggctgcaaagccttgtccagccatgtgtctcctggccctgggctgacctcctgctgtggccatagggtagacagcctggccttggggctgggccatggctgtgtcaggtagggaaagccaccatcctgcctccagtcccctgggcccttgttctagcccctcctccccccatatcactggggataatttgttggcctgggtctccatagctcaccagttatggaccaaggaacaggggcagccagcctgagggtccatgctgtcacctgtgggtggccccaccgagcagatgataccccacctgctggcctgggtgagctcagcccttcccagcactcagccatgaaggcaagaagcggcttcctgggactgcgggacaccaggctggggatgacaagctctgcctgctctcctcctactggggctggggggtaaccaaagactgatgccagtagaggtgcaacagcccagcccctctgcttctgggtgggagcccccagggtgcccctcgtactccaggcccctgcccccacagcgatcaggccaaggcgatggatcttgaagccacacttgcgtggcttcctccatccagcctgagctccctttcttgatctggtaagtttctctgagaacactcacccgcaagaaactacttgccccagaatccccctctcagatttcgcttctagggaactcaagctaggagacccggtgtcgggggcacccaccccgtgatcgagagccgcctccttcctagcctggcattcagtcttctcctggcgtccctcaagccgcccttccaccctggccttccccggcttcccatcaggcctcagccacctgggctgtccttccgctgccacccctccaaggcccagcccgagagcctccttgtccaccacatattggcaggcacgtacagcccaccaagacctctgctgtcagtattctctct

SEQ ID NO: 61516 - DNA, 2069 bp, Homo sapiens
caaggagcacaggtcctcgttcaggacgatgtaatccttgccatcgtaagcaagctggtgatacccgcggagtaggcgcccgtccgaccccacgtcgcagacagacatcctctagatgggtgtgagaccctggccccgcccccgcggccagccccgcccaccgagccccgccctcgccaggaccaacctgcggggattttggctgaaaatgaaaccgggtaacggctcctgggcctctcccgggtcaagggtctccacggtcccgctgcctcggcgtggatctcggacccagagactcggggagacccgggcggtccgtgggggatgtggaggggtagtgacctgcgcccccggccggtgtcactcacaggcctcactctggtttgtaagtaagccgctcagggtccgcaagtttcactcggtaaaactgtgctttggccttggcggttccctgtctccttcttcccaatattccggcccctcctgctccatccacggcgcccgcggctccatcctgggactcgtggcgtcgctgtcgagccgcacgcactgcgtgtcgtccacgtcgcccacggagaggaagcggggatccgcgcggccgggccgggacatggtggtgtggaaatacctcaaggagtggaagcctgggagcaaggagggggctgagaccctcccgaccctcctcccggcaccgcaaccgggttcctgcgcccccgccgggcaggcccctagctactccccacagacgccgtttccctcccgaccccgcactcacctgcccaggtctgggtcaggaccagggcccccgagagcagcagaagcagggttcggggcgccatgacaccatcctcggcgactggggagaatcggagtcccggtgggtgcgtgggaactttagaaccgggaccgcggctacattgattggcttctctaggaacccgacactcaatgggagtgagaactggggcagcctggtgagtatccaggaagaaggacccgacacaggttgggagagggagaagagaaaccctgcggagatggggaatccccagcgctgggcctccccaatccatacaccgcctttggggcctgagatcctgagagccatgcctgaggccctgagagccatgcctgaggccctgggacttcgccctgaccccgctacttctgtgccaagcgctctgtctcaacgtttccgagtcttggcccaggagctgtctgagaaaccagggagaaaccctcggaatgggccccgtccctctctcttcactttgcatcacggaatccccgtcccagaactggactccctgcctcctactccttacctgtccccgtggactcttctagaagaaaaatcaccccagggagcttgttgccagagagtgagcttgccctgggaatggaggtgtagagacagggttttttgttgttgttgtttgtttgttttttaaatctggaaaagttgtgcctgagtgcatgagatagaatagagaccagtttgctttttgtttattaactacagtgggtagcagaatcttggtaactcctaatgatcaggaatctaatcggccaaaaatgtgactttggtcccttgacatataaatgtgtctaaaagcattacaacaggaatcacaaagctcctaagtttcactttcccagacaatgtatctgtgactcccgcttgtagtattttaaatttaccttcattccatagccctggagtttctgtgtgagtccaggacatctcctaatacaaggtagccactgtgttactatatgttgtaaccaggagccagtacggactttattcatctcacagtggcaagcactcaatgcagtcacaatgcccctcaccagtgctcatgcactgcctgtttttaggaagtatccacttctaagtgttgtgtatattttatatgaacacttagtattttttaaacctgattaacataaaaaaattagtttttaggcagacccacataaggtattaaaggccaactgcaaagatcaccctgcaaggctctgtagattgatgtattaaaatatataaaacaatgtgtttaaacctg

SEQ ID NO: 61517 - DNA, 1089 bp, Homo sapiens
taattgaaatcgtacagcgttgcggaattcgcaggattaatcacataaggagactgtttcatgcttgaggtaaggagtgcttagataaagtgagagaaatgggaatagaaagataggcacatacattttccaagaaagaatgatctgaattgagttattgattgaatacaggatataaagaagaaagtaacaaagaggactgagtttttcaaccatgacacctggaaggaaaaatagcagagacagggaaaagagacagagacaaggaaaaaaaaagagacagagacaagaaaaccatttagggaataaagtcttaagtctggttttggacatattgagctggagtagatggcataaaatctatcctcaaggaaaagtgactgttcttgaacacagggagccgtcctgatctgtcatccttcttgaatctgtctagtgctgaaagtacttactactggaccctgttttctctgagcagtataatatggcttctttactattaatctaaatttgggctaattttatatatttttcaaaaggcattgattttttaaagagttttttaatcattaattcactctggtaatataagtaatacctttatatagtcatctaaactttccaaagcacttttacctattattctcagaacagtccaggaaagtaggcaaaacagacattatcaccattttatgaggtactggatgctaaatgacttgctcagcgtctcataactggtaagtagcaggatcaggtctgaaatccatttcacctggccttagatccatctttgagggtctctttatctgataggcttctcgtcttggataggcaaaggaaggatgaactggagcagaggatgtcggccctgcaggagagcaggcgggagctgatggtccagctggaagagctgatgaagttgctgaaggtaagagcccgtggcccacgctcagttcttgtcattcttctcccaccacagcctcagctgctgcctccagtaaattttcatgccacagagagttctttcattctgctgcttcaggaaactattatgtactttatcttctatccattcctgagacttcctag

SEQ ID NO: 61518 - DNA, 1596 bp, Homo sapiens
ctccggcggcgcgtcccccgagcttggtacggctcagcccgtctcccccgaagccgcgcgcccgcgcccgcgcccctcagtcggtggagcccgcagccccccttgtggcccgcggcagctccccgcccgctcggcccgcgcccgccatggtccgtccgcgccgtgccccgtaccgctccggcgccgggggccccctcgggggtcgcgggcgccctccgcggcccctcgtggtgcgcgccgtccgctcgcgctcctggcctgccagcccccgaggcccgcagcctccgcgggatccgggcccgctcggcccctcccatggaaggtgctcgggtcttcggggcactgggtcccatcggtccctcctcacctgggctcaccctcgggggtctggccgtgagcgagcaccggctcagcaacaagctgctggcttggagcggcgtcctcgagtggcaggagaagcgcagaccctactctgactccactgcaaagctgaagcggaccctgccctgccaagcctacgtgaaccaaggcgagaacctggagaccgaccagtggccgcagaagctgatcatgcagctgatccctcagcagctgctgaccaccctgggccccctgttccggaactcccagttggcacagttccacttcaccaacagagactgcgactcgctcaaggggctctgccgcatcatgggcaacggcttcgcgggctgcatgctgttcccccacatctccccctgtgaggtgcgcgtgctcatgctcctgtactcgtccaagaagaagatcttcatgggcctcatcccctacgaccagagcggcttcgtcagtgccatccggcaggtcatcaccacccgcaagcaggcagtgggacctggtggtgtcaactcaggcccagtccagatcgtcaacaacaagtttctggcatggagtggtgtcatggagtggcaggagcccaggcctgagcccaacagtcggtccaagaggtggctgccatcccacgtctacgtgaaccagggggagatcctgaggaccgagcagtggccaaggaagctgtacatgcagctcatcccgcagcagctgctgaccaccctagtgccgctgttccggaactcgcgcctggtccagttccacttcaccaaggacctggagacactgaagagcctgtgccggatcatggacaatggcttcgccggctgcgtgcacttttcctacaaagcatcgtgtgagatccgcgtgcttatgctcctgtactcttcagagaagaaaatcttcattggcctcatcccccatgaccagggcaactttgtcaacggcatccggcgtgtcattgccaaccagcagcaggtcctgcagcggaacctggagcaggagcaacagcaacgagggatgggggggtagtggttaccccgggctgggcccctccaggagtcacagatgaggcccccgcagagactggtgacacgcttctgagcaggggcccctggggacttcaactgcccagcaacatggaggatggtgtcctgaggcctccaaggacggtccccacccctctacgtttccccaataaagccttttaaaaacctgccaaaaaaaaaa

SEQ ID NO: 61519 - DNA, 3681 bp, Homo sapiens
cacttctgtaatatgcttccccctgaacagatctctccctcccccctctccacccccaaaatgcttaaaaggtaacctgactctttgttctgggctcagtcctttggatattaatctgactgggttggctggtgcacctaaataatacatatatcctcctcaaccccatcggtctctctgattcctaaatcatccccaaacatttctggtggcccatatggggattggagataacagatttactgtctcctttgcccatgggactagggccctggggctgtggaagacctggcatccaaggcatgccatgggggagtttcacccggatggagactggctctccccgcatcctgcccagcagtgcaactgaacctgagatggggctgcaggatgacaccagcacttcaggaaccgcggtgtcacaccttggattcaccatagctggctgaaactagcagcagcagtgactcccgactatgaccagtggattaaccaacaagaccctgattgccccacccgaatagacctacggcgaatcccaaccaccagtaagaaggacaactgccctgctctgaccacactggaggctggtcagtctacacatggctgaagcttgaagatcttgcaagctcttgctcttagtcacatcctggaagctgactagtctacacacagccgaagctaagaggaccatctctagataagtaaatgtagataaaatttataagcctagttataattgttctgttgttacattattactgcaaatgctgcaaatgtccatgcccagaggaaggtttgccattcctgtgtgtagtgtaagcatgtttctattacatacactaatgttgttaccatttctgcctatactagaaggggagaaatctctagaaggatgcccacactgtgtacatactacctgggtaaggaataccatagttaaaactctactgtaccatacctacagtacaggaaccaagttaggaacctgcacatacaaccagaccacctattcggtctgtgacccaggaaataatcagctatatgtatgttatgaccctaagctcttaccctatgaattctggtttgaaatacatattaaatcagagggagaaaaagaaggagagttatagctcgaacaaaagaagcccctccctcctgtaaagggcctatttccttgtactttgatgcctgctatgctgcatatgttcacaatcctaaaaaaaaaccagaagccagtctgcaatggtgtaacacaagagaggcttagcaggagcagccctaagcatctgtacaaagaaccacaaatcggatgcccagactgtaacattcagtggtccacactaacacaactccaatatttatattcaggaaggagtgctctgctaagtagtatgttaaccaaaccaaactgtaagacaagaacatgcaatcctttacattttactatcttaaagccagagatacctttctggtctacaggacagacagcactataacgacttgatagactaggagcaggccttggagttccactactaattgtcaaaaagactaaaaggactcaaatgcatccaaccccgcaattctgggtccataatcattctataagcatttggataagccagtgcctgagcttcccccaccaaccaaaaacttatttgctcaactagctgaaaacatagctggcagcttaggaatttcctcatgctatgtacgtggaggaactaatatggggaaccagtggccatgggaggcaaaggaattaatgccacaagataacttcacttcgcttaaccctgccagtgaaccaacagcctcagccagtgtttggttgttaaaaacctccataattggaaagtaccgtatcgccgttgggaaaggctttcacagaggcagtaggagaaataacctgcctaggcaacagtattatgatgagactaaaaacaaaactctatggagaagcacccagaattactcctacttaccagatccaaatcctttatctccattctctaccctaagccacacttggcatcaactagaggttccaaatgcttcgaaagcaccctctggcctatattggatctgtggagcatgggcatattggcaactgccagctaaatggacaggagcatgtgtgtagtaacaatcaagccattcttctttctaattcctctaaagcaaggggaactcttatggtatccagttgatgatgaaaataaaagaagaactagaagagcataatcacaaaaatagacacaaatgtcaaaaaggatgtggacataggagactggaaagataatgaatggcctcctgaaagaataattaaatattattggccagctacctgggtgcaagatgggtcatggggttaccacaccccaatctatatgctcaactgcatcataaggttgcaggcagtctttgaaattataaccaatgaaacatcaagggcactagatttattggcaatacaagcaacacaaatgagaaatgctatatattgaaatagattggcattagattatcacttagcctctgaaggaagagtatgtggaaaatttaatttaaccaactgttgcctagaaattgctaataatggccgggttgtcatggaaatcagagctagaatgcacaagttggcccatgttccaattcagacttggtcctaatggtccctggattctttgtttggaggatggttctcaacctttggaggattcaaaaccctcactggtgggtttttgtttattcttggcatctgcctcatcctcccttaccttttacccctgtttattaggaggattcagtcaactatagaggcagtaataactcaacacactaccgcacagttgatggcattaaccaaatatcagccactgccagtagaagaagctcagctctgtgaagaggtggcaaatagtggtgctttctattaacacctttgttataaaaagcaacaaaggggggaaatggaacaggaattaaaagaaattaaagaatgcataagcaaaaactcaattgtatgtagggaaacccaattcctcctgaggaagagaaagaggtggagtcctttaaaaattcactgcctgtttttccgtctgtagctagtgagccttatctctccctttcccaggcattgtgaagaccctgtttctccagctgtgcagctgcatggtcactagacagataaactcaagttgtaaaacatgtttttccttgaaaagtaagaaatgatgtaatacatgtctcaactgaataactgtctttgtttctcacttctgtagtaagcttccccctgcacagatctcccctctcaccccatgaaatgcttaaaaggtaacctgactctttgttcagggctcagtcctttggatgttaatctgactgggctggtgcacctaaataataaatatctccctgaactccatcagtctctctgattccttaaaaatcccgctacattttgtgtaatgaactggcaacaagagaaagttggtcgaagaaaggcagaggaactgtgtcttgtaagaattagaatcgaggggctccataatcatctggcatccgttcaatgttgtatctatggttagaaatgtacatgataggaactccaggaatcttacggattcttcttttcaggtcccggtcaactgtggccacaatgtaacactttcc

SEQ ID NO: 61520 - DNA, 2004 bp, Homo sapiens
agttttcaacgtctatttcattccctgcttcagaggacctctttaatctttgattttggtccctgtttctaagaaaagcaactgaaaaggtcgtaataccgcccctgagaaaaaaggagcagcgctaaataatcgagaaaatgcctcctcttgaaacggatatagagatggaaacaagatataagaaggattgagaatcatataatacaggagcttaaacacctatgcgcgatgataaagagggtactattagagcgcttggaaaataccaggaagttgagagagttaacagaagggcgcacgctggattggccacaaaatcgaattactgaagtaagtgcaaaacgacaaattgtcacagaatacagagaaaaggggaaaagaaattaagaggagaaaaagagagatctagagggccggtccaggagatacaatctatgcataataggaatacctgaaactgaggacagagcaagtggagctgaaacaataaaggatctacttgaaaaaattttccagaattgaagaacgaactagatctacaaatggaaaaggctcataggatacctttaaagtttaatgaaaagaaagcagcatctagacatatccgggtgacgtttttgaatttcaaagacgaaacattttacaagcatccagtcagagaaagcaggttacttacaaaggggcaaaagtcaggctgacctcagatttttctcctgcaattctaaatgccagaagacagtggaacaatatctagagtgttaagggaaaataattttgagccaagaattatatactctgccaagttatcatttctttacaaaggaaactggaagacattcttagatatacaggggttaggaaagtatatcaaccaagaactttccctgaaaattttgctgaaggatttactgcagctaacagagaacctgaattaaaataagaatagggaggcaattgtatgaaagaactgatggtatgcattaaaactagttaaggagcattaagtttaaattgttatgtatagggcattaaaactaaatacaaaaatagaaacataagctgggtgtaaaatttcagtttacgtttaaactggaagggcataccacatgttcaatatattggacaaatactgttttatttttagcatgtagtattgtagatacaaatacgcatgttcttaagctaaacctaagtaaaagggctttgtcactgtagatttgacaaataacattctaaatgtcaaatctgacaattggaaaacagtacagttttatttcccttatttttaagtatagcaggaaaaaaataacaagtttgtccatgttactactgatactgtaaagaaacttccaaatcactggtttgggagggggtggatacatcctcattttctgtacatgatgcatggggaaaaacagtagttactgcatcatatagttccaagtaaatcatatagttccaagtaaatttgacatggaaataagtgttaactacaaaaatagaatatatacattccaatgtttggaaaagaagtggtaaaaagaaaaatagcaaaaagacactaaaattagcaaaaagtagattgacagtacagatgacctataaactggttaaatagccctattacaattgaaattgggtcaaaaatcaatctctaacctgagatacatttgtataaaacaaatgatcaaagagtttaaagataatggaaactataaatcatagaaatagcaacatttttcttaaaatctaaacataagacattttatgtaaaacatacaatataggatgtaacatttaacaaactatatggtaaataatatgacattaatatataaaatatatgttccagatcttgatgtgggtgatagttttacttatgtacatcgatatacatctatttaaaaacatgtacatttaaattgttgcattttatgtatttaaaatttattgagtaatccttctgtatgtattattaaagagaatatagcaaaaaaaaaa

SEQ ID NO: 61521 - DNA, 2785 bp, Homo sapiens
ctggggacgctaggttccggaacctgacctgagctggggcctgtgcttccagcgggtggtggggggcctggtgtgctggcatcaagtaagccgactacctcggcaaaggcttagggacaagagaccagcagcctgaactggctggggcatccggaaggcttagatcttgtggccaagagttcagaccgtggcgaagtggagagtgacatgcagttggatggcggtgactgcgtggtcctgcaaccctggttccagtctggcaagcattgtagacctggctgctgaagactgacggggcccagggtccgctgcccccaccgccatcaccacctcggaacccagggtaacgctgtcagtctttggaccaacctcgctgtgcctaacaagaattccagaagtcacccatccgaaaggcactggcccatgacactctccacttccaatcttaaatcttttacttcataccttgtctcagatctctcctggtaccccttccccacgcccttagataatccatctcaattcctcatgctaattgaggagctatggctgcaaggcaccttccaggatttcacacctacacaaatctcctttttctccttttgccttctctgcttatgggatattctgagtccccacccccaatcactgacagctgggcccccttcatcagcctcacacaccacgtattaagtcagtcacaatctcccctctcctctaactgctggatttgtctttctacacacacccaatgattcacggctcttccggctgacctacttacatggacacagtccaacgtgagcttacacatttcttacttggctataccattcttggctgattcattcctgaaaccggttcataacctggaaactcagctaaacacctttccttcaaactcagctctctcagcatggtttcaggtagggctgttgccctccttcacctaatagcttctggactaacatccatacaaaccaacacagcatcatctaaaccaccaatatgggggtaccatttctactcaaacttccttcatatccccaccccccttatgtctcagccgaacctaccctaatccagcccacgccacaatggtgggacaggttccccagtccctatgtgggcttatttttacccttgcactccctgtagaccatcaattctacaccctaattacaaaatcatatccacctctgcctggcagaaggtgttatgcttttctggctcgcctaccatccacacatccctacacctcaccaccggatcctcttttctttccttccatccaattcctggcttccccgctgccaactctgctctctatgtctccagtttaaaggggccccctggaaaaaatgtaacaattccctcacctgtgactggtacctgacagccaccacaccggggcagcaatggctaacggttgacaaagacaatttctttctctctccaaaaccaaacagccttcatcaactccctagccaagactccctatcaggcccttacaggtgccgctctggctggcagttacccaatttgggaaaacgaaaataccctatcatggctacctaccttcacctacaacttctgcctgtccacccccagtctcttctttttgtgtgatacaaactgatatctttgcctaccagccaactggtcaggaacttgcaccctggtctttcaggctccaaccatcaacatcctaccccctaaccaaactattctaatttctgtagaagcctctatctcctcttcacccataagaaataaatgggctctacatctcatcaccctgctaacaggattaggcatcactgctgcacttggcactggaatagcaggcataaccacctcaatcacctcataccaaacactattcacaaccctttctaacaccgtagaagatatgcacacttccattaccagtctccaacgacaattagacttcctcgtgggagtcatccttcaaaactggagagtcctggacctcctaaccactgagaaagggggtacctgcatatacctccaggaagaatgctgtttctgtgttaatgaatctggcattgttcatatcgcagttcgtaggcttcatgacagggctgcagagctttgacatcaagtcgctgactcctggtggcaaggatcatcccttctaagatggataccctgggttgcccccttcctaggacccctgatcttcctcttcctgttactaatgattgggccatgcatatttaaccttgtatcccgcttcatttcccaaaggctgaattgttttatccaggcaagcatgcaaaaacacattgataatatatttcacctttgccacgtctaataccagagcctacgaggaaaccattcggaagctccagaacccaggccctaatcacaacgcccctatccagcaggaagcagccagatgatcaacgacgccctttttcctttttatactaaagtaagaaataagaatgttagcccaaactgcactattttgcagacccctaccattttacaaactggtcagagtggaaaattccaccagggcctgagctgtgagaaacatcctgtcaggcaggtcccaggcctaacccctggctgcactaaattccttcattatcagcagccaaacacaccgcccccaccccattttcacaacaatcccagacctctcctgcccgggactgtaactggtccagcctgtaagcgggaagggggctctggcactagctggtaccccctctccgcaggtctttctcccaataaatctgtgttgccattg

SEQ ID NO: 61522 - DNA, 1726 bp, Homo sapiens
gagttttttttttttttttttttaaaattaagacaagtttattgagtaaaaaaatgcatacattggaacggcaaaacatcaataaggccctaaaacaaaaaatacagttatgctttaacaaattcttagcaatgtggcccacgctttttaaaaaattgacgtgttggcagtgttggttaggaacactgacgtacatcccaaatagtaataaattcagtatgaaattatacgcataaccttactcaccatactactttttctcccaaactattgtgacttctttttgctctctgattaaaacaaacaggtaacatccttacacctttgctccatcccttgggctttaaaaagaatggctgtagttagttttgattcactatatactctctgtacttgaggaagagtaagctgtgtttaaaagtgcccttttccatgtcgtcatgtaccaataccctctgcatttcaaaatgttgactcagatgtttttccctctacagaactagaaaattgtccccccactttggtctatttactcatttgaagacaaacagggttactaagagttttacataagttatttctttagagtgacgaagtgttagtttacttcttgcttagtggagacaaaaattgtgagataaagaggaaggaataggatgtacacatttacccatcaatatagcacccagtgttatttgagcaggacccttctgttagcatctaaggtaaggttaggacagtcaagataaaatactggatgttggccaggagcagtggctcaagcctgtaatcccagcactttgggaggctgaggcaggcagatcatgaggtcaggagatcaagaccatcctggctaacacagtgaaaccctgtctctactaaaaatacaaaaagttagttagttagttagccaggcgtggtggtgggtgcctgtagtcccagccattcgggaggttgaggcaggagaatggtgtgaacctgggaggcagagcttgcagtgagattgcaccactgtactccagcttgggcgacagagcgagactccatctccaaaaaaaaacaaaaaaacaacaacaaaaaaaaaacactgtatgttaagggagactccttcagtatctaagagcacttgggggtggactgggggagaagggatgacttcatttacccccatagttatggagtcttgagttctaagaaaattttcatccctattgatttttatgctaaaaacagaatcttacaaatgtgatagctatatatccaaatgaggtggtctagtacaagcatttctgaaaaaatttttgaatgacaaaattttatcctaagcgatatgttttccaagtgaatataattctagtttaacacaacattgcaagtcaggtgtgcacattttactaacaaacatatatccaatgtgatttccagggccttctcccagaagcaaaaggagttggaaagtagtctcctgcctttagctgaaaatcaagaagagagttttggttcttcattttaaatgtagaaaatcaaatccttcacatttgatttgtggtcttcccaattattaaaaatgtgctcactggctcaactgtatttttcaaatagcctagatttacttatttttttaaatgctcattaaaaacttgtatactatgtagtaaaatgctgtacttgttctatacaataaaacagatacttcttttgtaaaagcttagtagtaaaaaaaaaa

SEQ ID NO: 61523 - DNA, 1138 bp, Homo sapiens
aaaaagcgccggcaattggggtcgcagctggagatgctgcggccggcagggctctggcgcttatgtcggcgaccttgggcggcgagggtcccagcggagaatcttggccgtagggaagtcacctctggtgtctctccccgcggtagcacctcgcccagaaccctgaatattttcgaccgggatttgaaaaggaaacagaagaactgggcagcccggcagcccgagccgaccaaatttgactacctgaaggaggaggttggaagtcggatcgcagaccgtgtatatgacatacccagaaatttcccccttgctttggatcttggttgtggaagaggttacattgcacaatatttgaataagcttcagttattccattgcaggaaactattggaaagtttttccaagctgacattgcagaaaatgctttgaaaaattcctcagaaacagaaatacctactgtcagcgttttagctgatgaagaattccttcccttcaaagaaaatacatttgacctggtggttagcagtttaagtttgcattgggtgaatgaccttcctagagcacttgagcagattcattatattttaaaaccagatggagtgtttatcggtgcaatgtttggaggcgacacactctatgaacttcggtgttccttacagttagcggaaacggaaagggaaggaggattttctccacacatttctcctttcactgctgtcaatgacctgggacatctgcttgggagagctggctttaatactctgactgtggacactgatgaaattcaagttaactatcctggaatgtttgaattgatggaagatttacaagtgtatttgtaggtatgggtgagagtaactgtgcttggaatagaaaagccctgctgcatcgagacacaatgctggcagctgcggcagtgtacagagaaatgtacagaaatgaagatggttcagtacctgctacataccagatctattacatgataggatggaaatatcatgagtcacaggcaagaccagctgaaagaggttccgcaactgtgtcatttggagagctaggaaaaataaacaaccttatgccaccggggaaaaaatcacaataaatatttattcagtgtaaaaaaaaaaaaaggggcggc

SEQ ID NO: 61524 - DNA, 1940 bp, Homo sapiens
gtgcaattcatcgagacgtgctggcctatctggccgaggcctggggcatggacatcgaggccaccaaccgagactactagcggcctctgcacgaggcggcctccatgggccaccgagactgcgtgcgctacctgctgggccggggggcagcggtcgactgcctgaagaaggccgactgggtcctcacagaaggcacagaggttgccggtcaaagctgttttcctgcctgccagacccctgaatcctctaggttttccatctgtgccaaggatgtgtgtgttttgaagacctggcccctggcttctaatgtctcagctgcctccatctgacagcttctcctggttggccttaggactcctctgatgatggcctgcacaaggaagaacctgggggtgatccaggagctggtggaacatggcgccaatccactcctgaagaacaaagatggctggaacagtttccacattgccagtcgagaaggcgaccctctgatcctccagtacctgctcactgtttgcccaggtgcctggaagacagagagcaaaattagaaggactcctctgcatactgcagcaatgcatggccatttggaggcagtcaaggtgcttcttaagaggtgccaatatgaaccagactacagagacaactgtggcgtcaccgccttgatggacgcaatccagtgtggtcacatcgacgtcgctaggctgctcctcgatgaacatggggcttgcctttcagcagaagacagcctgggtgcccaggctctgcacagggcagctgtcacagggcaggacgaagccatccgattcttggtctctgaacttggcgtcgatgtagatgtgagagccacatcaacccacctcacagcacttcattatgcagctaaggaaggacatacaagtacaattcagactctcttatccttgggagctgacatcaattctaaagatgaaaaaaatcgatcagccctgcatctggcctgtgcaggtcagcacttggcctgtgccaagtttctcctgcagtcgggactgaaggattctgaagacatcacgggcaccctggctcagcagctcccaaggagagcagatgtccttcggggctctggccatagcgcaatgacataaggatgtttccaagaggaggcaataaagtgcatgagttgctgggagcctgagcacctttcgtttttcggctcagagaaagccaagtgcaacttgcttcagtcatcctgaacctgagttcaaccaaccgcagccacctacgtttgaccccagcgagatcaaagttgtatatctgaggtgtaccagtggtgaagtcagtgccacatctgcactggcccccaaggtcagctccctgggtctgtctccaaaaatggttgctgatgacatcaccaaccattgactggaagagtctgaggatgatagtgaaactgaccagccacagcagacaggcccagattgaggtggtgccttctgcctctgccctgatcgtcacaaccctcaggaaccaccgacagaaagaaagaaacacaaaaacatgaaacacagtggtagcaccacttctgatgagattgtcaacattgcctaacagatgcagcagcagtctttagccagagaactctctggaaccattaaagaattcctgggggccggttgcggtggctcatgcctgtagtcccagcactttgggaggccgaggcgggaggatcatgaggtcaggagatcgagaccatcctggctagcgtggtgaaaccccgtctcttactaaaaatacaaaaaaattagccaggcatggtggtgggcgcctgtagtcccagctactcaggaggctgaggcaggagaatgctgtgaaccctggaggcagagcttgcagtgagccgaatatgcgccactgcactccagcctgggcaacagagcaagactccgtctccaaaaaaaaaa

SEQ ID NO: 61525 - DNA, 1524 bp, Homo sapiens
ggcacgagatcagggatcgcgattgcgaatcctccgctgaggtgatttggatatccctagaacgttgagggcacgagtcgggtcctgagaccaggtcctcagccagcagagccacgttccttatgagcaccgtgggtttatttcattttcctacaccactgacccgaatatgcccggcgccatggggactccggctttgggagaagctgacgttgttatccccaggaatagctgtcactccggtccagatggcaggcaagaaggactaccctgcactgctttccttggatgagaatgaactcgaagagcagtttgtgaaaggacacggtccagggggccaggcaaccaacaaaaccagcaactgcgtggtgctgaagcacatcccctcaggcatcgttgtaaagtgccatcagacaagatcagttgatcagaacagaaagctagctcggaaaatcctacaagagaaagtagatgttttctacaatggtgaaaacagtcctgttcacaaagaaaaacgagaagcggcgaagaaaaaacaagaaaggaaaaaaagagcaaaggaaaccctggaaaaaaagaagctacttaaagaactgtgggagtcaagtaaaaaggtccactgagaaaagaattagagattccaactgacagaatctgccagaagctcccagggaataatggtggcgagttccatcaccagcattattatagtgcttcaaaagaaatatttttgatgaacttaaaagacaacaaatttatttaaatggtgcactaaactgtagtgaacagagacatgcacgattcaagaataaaactcggccgggcacggtggacggtgcctcacatctgtaatcccagcactttgggaggccgaggcgggcggatcacttgaggtcaggagtttgagaccagcctggccaacatggtgaaaccccgtctctactaaaaatacaaaaaattagccaggcatggtggcgggcacctgtaatcccagctactcgggaggccgaggcaggagaattgcgtgaacctgggaggcggaggttgcagtgagctgagatcgcgccactgcactcaagcctgggcaacacctgggtgacagagcaagaccccatctcaaaaaaaaaataaaactaggtcaagtgcaatgacacacgcctataatcccagcaccttgggaggctaagacaggaagatcacctgagcccaggagctcaagattgcagtgagctatgaacaccactgcactccacctgtccacttgttcttgtgtgacagaacaagaccctgtctctaaaaaataagataaaaccataaagaaacacagtcagtactatacaagaataatggctacttctagagggaaggagttgtcattgtgatgaggcacttggaggggttctggggtgcctgacaaagttctgtttcttcacctgggtggtagttagaagggtgtccccgtatttcaaattgtacctttgtgagattgtatgttttgtaataataaaattttttttgtaaaaa

SEQ ID NO: 61526 - DNA, 963 bp, Homo sapiens
ttttttttttttgccgctgtcaacagacagtttattctatatacaaacacaattttgtacactgcaattaaatagaatggaatgagcgctcctccgcattcctccccgagtgactggtttggccgccggcccactccatccccgagtgggactggaccacggccctggctgctgccactgatgttggcgcctgcaccccacgtccctatgcccgaggcgcaagctctgctctcccggggaccccaggcctggcgcacacgcggggagggcggggccatggagaaggcactgcagggagcaccaggcagagccgggctgaggccggccggcactagggcgcgaggccccaccccaagccggcctctcctccacacctccgccttgctcagagacctgcaccatgggaccccactccatcctcaggacggttcactgcagacctaccaagacccctccagaaccttccgcggaaccccaccccctctccttgctgaccagctcaaacacctcactagcgggtacaagcctcgggcgcgacctcacaccagggggaggaaagccgccttccgggcaaaccccacgaaaccctgaaagcccccgacacaggctgggcagtcccagaggaaggaggtggctggcctcccccacccccacgggctcgggaaggtcaggcccagccagcaggggtcagaggcggctcagctgtgcggctcaggaccccacctccgagggcgcctccgttggggccatggaggccgggctaggcccgcctaccgcagcccccaggggagttgtgtcagaagctgcggagtcactcggggggacactgtcctggggggcgtgggggaggcccccagcagggcccagcgggctggctggacgccgctccaggagggaggcgctcaggccggacaggaaggaggcgtctgtgatgatggcagcggtctctgccatccaacccag

SEQ ID NO: 61527 - DNA, 1521 bp, Homo sapiens
tttgagatgtatttcccagaaaagcaacatgatgaaaatggtcagaaaaggcaatttccttcctcttttctaatttggctctggagccaccagcagaacctcttcaatatcttgcatgttacagatttcactgctcccaccagcttggagacaacatgtggttcttgacaactctgctcctttgggttccagttgatgggcaagtggtagacaccacaaaggcagtgatcactttgcagcctccatgggtcagcgtgttccaagaggaaaccgtaaccttgcactgtgaggtgctccatctgcctgggagcagctctacacagtggtttctcaatggcacagccactcagacctcgacccccagctacagaatcacctctgccagtgtcaatgacagtggtgaatacaggtgccagagaggtctctcagggcgaagtgaccccatacagctggaaatccacagaggctggctactactgcaggtctccagcagagtcttcacggaaggagaacctctggccttgaggtgtcatgcgtggaaggataagctggtgtacaatgtgctttactatcgaaatggcaaagcctttaagtttttccactggaattctaacctcaccattctgaaaaccaacataagtcacaatggcacctaccattgctcaggcatgggaaagcatcgctacacatcagcaggaatatctgtcactgtgaaagagctatttccagctccagtgctgaatgcatctgtgacatccccactcctggaggggaatctggtcaccctgagctgtgaaacaaagttgctcttgcagaggcctggtttgcagctttacttctccttctacatgggcagcaagaccctgcgaggcagagacacatcctctgaataccaaatactaactgctagaagagaagactctggggttatactggtgcgaggcttgccacagaggatggaaatgtccttaagcgcagccctgagttggagcttcaagtgcttggcctccagttaccaactcctgtctggtttcatgtccttttctatctggccagtgggaataatgtttttagtgaacacttgttctctgggtgacaatacgtaaaagaactgaaaagaaagaaaaagtgggaatttagaattctctttggattctggtcatgaaaagaaggtaatttcccagccttcaagaagacagacatttagaagaagagctgaaatgtcaggaacaaaaagaagaacagctgcaggaaggggtgcaccggaagtgtaccctagggggccacgtagcagcggctcagtgggtggccatcgatctggaccgtcccctgcccacttgctccccgtgagcactgcgtacaaacatccaaaagttcaacaacaccagaactgtgtgtctcatggtatgtaactcttaaagcaaataaatgaactgacttcaactgggatacatttggaaatgtggtcatcaaagatgacttgaaatgaggcctactctaaagaattcttgaaaaacttac

SEQ ID NO: 61528 - DNA, 789 bp, Homo sapiens
aggcagccactttctagagacagttagcttcattggactaatctggggaatctgaagttcaaggacctcaccctgttactaatgttgctaacttcctctccacctctgtttatgattcctctgcgtgtaaacagagcagctccacccagctccacactccagctaccagagaagcctctggaacaaacatggaatatccttacccccttcaccaagaccctacctgtctccaatctcagcagaaaagtaacaagctgggccggggtggggatcccggtgacatgtctaccagaggcaggaagcggaggggagaggagagcagagtgtgggctgggggtcccaaccactaggggaccccccagaagtcagcatcattcgggagcctgaggcgctgggaattccaaggcctggccagaaagccccagtctaagggacgcatcccagtccccagggagccccaatctaagggatacagccccatcctcagggagccccagtctgagggagacacagactcgtcctcagggaggcccagtctaagggacacagccccatcctcagggagctccaatctaagggatacagccctgtcctcagggagccccagtctgaagggagactcagtgctctcctcagggagcccccgtctggatcagggaaggagctctgtttccctgtggaggtgactgctcaggaggaaagtccttttccatggcactccctgacttccccttccctttctctcctgcagccagcagggctccagcgggggagcggttgtctttgggg

SEQ ID NO: 61529 - DNA, 1045 bp, Homo sapiens
  misc_feature (1)...(1045): n = a,t,c or g
ctggccccaggctttcccacatggaaggtggctgcatgccaaggggaggagcgacacctccaggcttccgggagcccagagagcatgtggcaggcagtggggcctcttcatcagcagcctgcctggctggctcccttggctgtgggcaggtagcacgcctgctggcagaggtacctggtggctgccctgttcgcatcagtggcgatgactttatttgcggagcatttctgcaagcgttgcctggatgcggtggtgcattgtgggccctctgggctcctgcctcagaatgtcagtgagcaccatgctggaggtcacccagcactgtggcagcgcccaggagggcatagggcagcctaccacctccaagggggcaggcgccctcatctggggttgggtctgtgctgagctggagggcctctagggaaccgtggggcagggtggccagctgctggctcccagagcgcagcccaggcgtcctcaacggggagccccaaatgtccacgcccagaacaacagttggcaggacaggtgtgacacagccacagcagaggcaaggggtgccaggagtccccagcggcatcctcggggagatgctggtgaggggtccgtacagggtggggtccccacccctagccccttactgaggggggagtgcagcagttggcctgcttgtctggcggagaaagccagctccctgcaccctcggggctgagtcagatctgggtctgccgcaaaggccttgcctagaccaggtcacactgatgccctggtttccctatctgtaaaatggggccaatgacacctacctcactgggtcaccatcgagatcaatccttctccctgccccgacacctcgggcacatcgcatgcactcagagcacagagccgggcagacgcagcacctgcatggggagcccagtgcccggcacagcacaggggctttcagggaggccacgcagggccgtggggctgaaccacgctctcgttttgtcaggcagctatgcagnagctcttccttggtattgggttgttntggttttgtatt

SEQ ID NO: 61530 - DNA, 928 bp, Homo sapiens
ttttttttttttgcgtgagcaataaagctttttaatcacctaggtgcaggcaggctgagtccaaagagagtgtcagcgaagggagataggggtggggccgttttataggatttgggtaggtaaaggaaaattacaatcaaagggggttgttctatggcaggcaggggcgggggtcacaaggtgctcagtggggaagcttctgagccaggagaaggaagttcacaggttaatcgctcagttaaggtggggcaggaagaaatcacaatggtggaatgtcatcagttaaggcaggaaccggcccttttcacttcttttgtgattcttcacttgcttcaggccatctgggatgtatacatgccaggtcacaggggatatgatgggctttgcttggggcttcagaggtcttgacacacatcactaagcttactctatggattcgcctcaaattctttcttgcaagagatccaagaatgctctcttggggtctggatagggacccctttccgttgacaagacctccccgcctccgcttttaattgtttggccttcattcctcttctacagtgctccctgcaatcagtactggtgctgtacatatttgctagcttcgtacatacggcacgaagtagatgctcagtaaatgttggttgactgagtatcctctgcatctcggtgacatcacatcctgcgtgccgtggcgtcattctgcattcctctgcgggaggctcagatccggagggtttaagtggttgtttataacatgcaccgaacatatccaacggaggctgtggtttccgaccgcccacaaaaagcgcggttggcgggagtgcgggttcggggtcggctggcagctgggagactccagctctgggcggaaacacactgcctcggaggcgcccggacgcgtgggtcgagccagtaataacga

SEQ ID NO: 61531 - DNA, 3918 bp, Homo sapiens
gcgcggaggagggggcgaccacaagatggcggacctctcgctgcttcaggaggacctgcaggaggacgcagacggatttggtgtggatgactacagctcagagtctgatgtgattattataccttcagccctggacttggcctccacaaagatgaaatggttgaacgccccctgggaagattgggacaaagtatgctgcaagtgagaaccatatttaaccagacaaaatggtggccccggagtttgcctcgatacccttgagggaaagtctgcgatgatgaaagagattgtattgctgttttgggaaagaattagccagattgggccgatgattcagaaccaacttgtgagagcggctgaattggaacaggtgcctcacatcgcactgtttttgttcaagaaaacccgcctttcaattaccatatgctttttttcaaaattcttactaccctattgtgggttagataccttggcagatcagaattaatcaggtgaggaaaacaagtcaggcagctttgcttggctctgttggagcaggagctcattgaacgatttgatgtggagaccaaagtgtgccctgtcctcatagagctgacagccccagatagcaatgatgatgtgaaaacagaagctgtggctataatgtgcaaaatggctccccatggttgggaaggatattacagagcgtcttatcctccctaggttttgtgagatgtgctgcgattgcagaatgtttcacggttcggaaaggtctgtgctgccaattttggagatatttgcagtgtagttggccagcaagctactgaagaaatgttgctgcccagatttttccagctttgttctgataatgtatggggagtccgaaaggcttgtgctgaatgcttcatggcggtttcatgtgcaacatgtcaagaaatccgacggaccaaattatcagcactttttattaatttgatcagtgatccttcacgttgggttcgccaagcagcttttcagtctctgggacctttcatatctacttttgctaatccatctagctcaggccagtattttaaagaagaaagcaaaagttcagaagagatgtcagtagaaaacaataaaaggaccagagatcaagaagccccagaggatgtacaagtcaggccagaggatactccttcagatctcagtgttagtaattccagtgtcatactggaaaacacgatggaagaccatgctgctgaggcatccgggaagcctctaggtgaaattagtgttccactggacagctctttactttgtactttgtcctcagaatctcaccaggaagcagctagtaatgagaatgataaaaaacctggtaactacaaatctatgttacgaccagaggttggcaccacttcacaagattcagctctcttagatcaggaattgtataactccttccatttctggaggactcctcttcctgaaatagatctagacatagagcttgaacagaactctgggggaaaacccagcccagagggaccagaggaagaatctgagggccctgtgcccagttctccaaacatcaccatggccaccagaaaggaactggaagaaatgatagaaaatctagagccccacattgatgatccagatgttaaagcacaagtggaagtgctgtccgctgcactacgtgcttccagcctggatgcacatgaagagaccatcagtatagaaaagagaagtgatttgcaagatgaactggatataaatgagctaccaaattgtaaaataaatcaagaagattctgtgcctttaatcagcgatgctgttgagaatatggactccactcttcactatattcacaacgattcagacttgagcaacaatagcagttttagccctgatgaggaaaggagaactaaagtacaagatgttgtacctcaggcgttgttagatcagtatttatctatgactgacccttctcgtgcacagacggttgacactgaaattgctaagcactgtgcatatagcctccctggtgtggccttgacactcggaagacagaattggcactgcctgagagagacgtatgagactctggcctcagacatgcagtggaaagttcgacgaactctagcattctccatccacgagcttgcagttattcttggagatccaattgacagctgcagatctggttccaatttttaatgggtttttaaaatgaccgtcgatgaagtcaaggataggtgttcttaaacacttgcatgattttctgaagcttcttcatattgacaaaagaagagaatatctttatcaacttcaggagtttttggtgacagataatagtagaaattggcggtttcgagctgaactggctgaacagctgattttacttctagagttatatagtcccagagatgtttatgactatttacgtcccattgctctgaatctgtgtgcagacaaagtttcttctgttcgttggatttcctacaagttggtcagcgagatggtgaagaagctgcacgcggcaacaccaccaacgttcggagtggacctcatcaatgagcttgtggagaactttggcagatgtcccaagtggtctggtcggcaagcctttgtctttgtctgccagactgtcattgaggatgactgccttcccatggaccagtttgctgtgcatctcatgccgcatctgctaaccttagcaaatgacagggttcctaacgtgcgagtgctgcttgcaaagacattaagacaaactctactagaaaaagactatttcttggcctctgccagctgccaccaggaggctgtggagcagaccatcatggctcttcagatggaccgcgacagcgatgtcaagtattttgcaagcatccaccctgccagtaccaaaatctccgaagatgccatgagcacagcgtcctcaacctactagaaggcttgaatctcggtgtctttcctgcttccatgagagccgaggttcagtgggcattcgccacgcatgtgacctgggatagctttcgggggaggagagaccttcctctcctgcggacttcattgcaggtgcaagttgcctacacccaataccagggatttcaagagtcaagagaaagtacagtaaacactattatcttatcttgactttaaggggaaataatttctcagaggattataattgtcaccgaagccttaaatccttctgtcttcctgactgaatgaaacttgaattggcagagcattttccttatggaagggatgagattcccagagacctgcattgctttctcctggttttatttaacaatcgacaaatgaaattcttacagcctgaaggcagacgtgtgcccagatgtgaaagagaccttcagtatcagccctaactcttctctcccaggaaggacttgctgggctctgtggccagctgtccagcccagccctgtgtgtgaatcgtttgtgacgtgtgcaaatgggaaaggaggggtttttacatctcctaaaggacctgatgccaacacaagtaggattgacttaaactcttaagcgcagcatattgctgtacacatttacagaatggttgctgagtgtctgtgtctgattttttcatgctggtcatgacctgaaggaaatttattagacgtataatgtatgtctggtgtttttaacttgatcatgatcagctctgaggtgcaacttcttcacatactgtacatacctgtgaccactcttgggagtgctgcagtctttaatcatgctgtttaaactgttgtggcacaagttctcttgtccaaataaaatttattaataagatctatagagagagatatatacacttttgattgttttctagatgtctaccaataaatgcaatttgtgacctgtattaatgatttaaagtggggaaactagattaaaatatttgtcttttaactagttaaaaaa

SEQ ID NO: 61532 - DNA, 1933 bp, Homo sapiens
ttttttttttttgttagttgtttttgtttttaatttgtctccaataagcaatgtcttctgccccatccagccatgggaagtgggtcccacgtgaagggggccccaccaccccactttgggaagctgaaggctagagacttcgggagccccccccggctcaagactcccccctacgctgggtgtgggggttagattcagaggcccgacacccacactggggtaggttaggtattgggtttacttaggccacaggccccccgggggcagggagacagagtgggggggcccgaagctccctggtcctggggaagagttaaaaagttctgggggtaggccctgggccccgtgggggcaagtttaagagatgaggggaggtttactcctttaggcccagggagttggttagaagacagttgggggctggtagaaaatgcctggtttaaagccttggcctctaggaggtttttagagatttgctggggttgggggcccagggttgctgggacccccagtttttggggaagggagctgtaagagattgggggatgttctgagctccccagacaagaactgctggttaagagggggccaggcccggttggggctcagctgtccctgaggagctcggcatcccgcctgggagatgcagctgtcactggggtttctccctctctgttgtcctggcctcgtccttggcaggtggcggggacttcttgggggaagctgaagtgctggggttggggacccccgcccccgactgggcatctatgctggcgtgcctccttgcggacaaggtcctccagctccttcttccatccaaggagctcagcaagggccaggcagccctggtcgcattcacccagccaggccacgtccctgcaaggaggtacccatgaccaggaggaggtccaccttcaggaagtctgactgcatacaggagaagaaacgcgctgggaggctctcaccaaaaaagacgattatcaggcttcaccaggctctgacagtcttcacacttgggcgtcacctcagagaagatcttctctttcatccagcttagcgggtattcgtgccggcagctggcgctgacgcagtgtgatgtgtagaagggtgccgtgcgcctccaacaaagtcctcctgttccagcccggctattcgctccagggtatctatgttctgcgtgtagcagcgcaggagtagccccttgtccttcagcaggcgccatgaagtagtgaacaagatggttggccttgaaactgccccaggataagagttcccttggcgagggcgaagaagggttccggatgtttcttgaaaatagctgatctccaaagaatggcctctgggttagggaaagatggtcacttctctaggttgttcaataagaggccggtggatggagaagcgaaaagtcggggatgcctgcggatgtggagattccagctcccaccaaacagatgactctgcgacagcgttcgctctgcatgtaccgggccaccccttccaaggtcagctcgtccagcagacgctccttctggctgcccaggctgagcgtctgggagaataagttccgcaggaagtccatgtctgcttctccaccagcggctcctccctcagagtctgaatctgagtcctggaaggggtggggtggagtggccaggcccgagaggtgggattagggagggaggagagggggtgataccaggtttggggaaaaggctgtggcaggaaggtggcctgaggaagtgcggggtggtggagagactgcactggggctagctccagggctctgggacaggctgccggggttggagtcctggccatgcccgtccccaggagcaagacctcatgtgagtggctttgctttgcttttcttttttgagacagtgtctcgctctgttgcccaggctggagtgcactggtgcagtcacagctt

SEQ ID NO: 61533 - DNA, 4268 bp, Homo sapiens
aaggagaaaagagtgacagtacaattgcctacagaatccatacagaagaaccaggaagataagctcaagatggttcccaggaagcaaagagaatttagcggatctgacagagggaaacttccaggaagtgaagaaaaaaatcagggaccatcaatgattggtcgaaaagaagagagattaataactgaaagaaaacacgaacatctgaagaataaatcagcaccaaaggtcgtcaagcaaaaggttatcgatgcacatcttgattcacagactcagaattttcagcaaacacaaatacagaccgctgaaagtaaagctgaacataaaaaattgccccagccatataatagtctgcaggaagaaaaatgtctcgaagtcaagggcatacaagagaaacaagtcttctctaatactaaagattcaaagcaagagattacacagaacaaatctttcttttcctctgtgaaagaatcccagcgggatgatggaaaaggtgccttaaatatagtggaattcttgagaaaacgtgaagaactgcaacagattttgtcgagagtgaaacagtttgaagcagagccaaataaaaggggccttaaaacatttcagacactattaaatactatcccaggatggctgataagtgaagataagagagaatatgcagttcacattgccatggagaataatttagaaaaagtaaaagaagaaataacacatattaaaactcaagcggaagatatgcttgtgtcctatgaaaatataattcagacagccatgatgtcctccaaaacaggaaaaccgggaaataaacccactagtcttgatgaaacatcatccaaagtatctaatgttcatgtcagcaataataaaaatagtgaacagaaagaaaataaaattgccaaagagaaaacagtacagcaccaagtaacagctcatcatgaagcaactgttcgtagtcacgtgaaaacccatcaggaaattaaacttgatgatagcaacattcctcctccctctttaaaaacacgcccaccgtcaccaacttttatcacaatagaatctactgcccgacgaacagaaaaccctactaagaacgagctttctcagtcccctaaaaaggacagttatgttgaacccccaccaagaaggcccatgtcgcaaaaatctgaaattcacagagcaaacacttccccttctccacccaggagtcgctctgaacaacttgtcagactcaaagacaccactgcaaagttatccaaaggggccatcccatgtccagcagcaaccccggttccaattgtagagaagaggtctgaaatcatcatgtctcctgcaacacttcgtcgtcaaattaagatagaaactcgcggtacggactctccacctacaatcacaataccagtaaatataaatcatgctgctagtggttccttcagagaatctgtggacgctcaagaggaaatcaggaaagtggagaagagagctacttatgttcataaagatggactaaattccactgatcacatggtgcccgacactgaaagttatgatgcagttgaaatcatccgcaaggttgcagtgcctcctcgcctgtcagagcacacacagagatatgaagcggccaaccgaactgttcaaatggctgaaaatttcgtgaatgaccctgaaaatgaaataaacagatggttcagggaatttgagcatggcccagtttctgaagcaaagtcaaatagaagagtttatgcaaagggagaaacaaaccataacatacaacaagaaagtcgtacattttgtaaggaggaatttggattaacatctttaggaaacacgagttttacagacttttcttgcaaacatcctagagaactgcgagaaaagattcctgttaagcagcccaggatctgctctgaaaccaggtctctaagtgaacatttctcaggcatggatgcatttgagagtcaaattgttgagtcgaagatgaaaacctcttcatcacatagctcagaagctggcaaatctggctgtgacttcaagcatgccccaccaacctatgaggatgtcattgctggacatattttagatatctctgattcacctaaagaagtaagaaaaaattttcaaaagacgtggcaagagagtggaagagtttttaaaggcctgggatatgcaaccgcagatgcttctgcaactgagatgagaaccaccttccaagaggaatctgcatttataagtgaagctgctgctccaagacaaggaaatatgtatactttgtcaaaagacagtttatccaatggagtgcctagtggcagacaagcagaattttcataagtcctgcttccgatgccaccattgcaacagtaaactaagtttgggaaattatgcatcacttcatggacaaatatactgtaaacctcactttaaacaacttttcaaatccaaaggaaattatgatgaaggttttggacataagcagcataaagatagatggaactgcaaaaaccaaagcagatcagtggactttattcctaatgaagaaccaaatatgtgtaaaaatattgcagaaaacacccttgtacctggagatcgtaatgaacatttagatgctggtaacagtgaagggcaaaggaatgatttgagaaaattaggggaaaggggaaaattaaaagtcatttggcctccttccaaggagatccctaagaaaaccttaccctttgaggaagagctcaaaatgagtaaacctaagtggccacctgaaatgacaaccctgctatcccctgaatttaaaagtgaatctctgctagaagatgttagaactccagaaaataaaggacaaagacaagatcactttccatttttgcagccttatctacagtccacccatgtttgtcagaaagaggatgttataggaatcaaagaaatgaaaatgcctgaaggaagaaaagatgaaaagaaggaaggaaggaagaatgtgcaagataggccgagtgaagctgaagacacaaagagtaacaggaaaagtgctatggatcttaatgacaacaataatgtgattgtgcagagtgctgaaaaggagaaaaatgaaaaaactaaccaaactaatggtgcagaagttttacaggttactaacactgatgatgagatgatgccagaaaatcataaagaaaatttgaataagaataataataacaattatgtagcagtctcatatctgaataattgcaggcagaagacatctattttagaatttcttgatctattacccttgtcgagtgaagcaaatgacactgcaaatgaatatgaaattgagaagttagaaaatacatctagaatctcagagttacttggtatatttgaatctgaaaagacttattcgaggaatgtactagcaatggctctgaagaaacagactgacagagcagctgctggcagtcctgtgcagcctgctccaaaaccaagcctcagcagaggccttatggtaaaggggggaagttcaatcatctctcctgatacaaatctcttaaacattaaaggaagccattcaaagagcaaaaatttacactttttcttttctaacaccgtgaaaatcactgcattttccaagaaaaatgagaacattttcaattgtgatttaatagattctgtagatcaaattaaaaatatgccatgcttggatttaagggaatttggaaaggatgttaaaccttggcatggtgaaacaacagaagctgcccgcaataatgaaaacacaggttttgatgctctgagccatcaatgtacagctaagcctttgtttcccagagtggaggtgcagtcagaacaactcacggtggaagagcagattaaaagaaacaggtgctacagtgacactgagtaaaatatctatggccactgacagtccacacttaggcactgagagatattgatgttctgaaataagattttatgaatttggatacccttttgaggaacttgatgtaaacatggtgttcagaaatctcgtgtctatctcaatgggatatttcttgtattacaccttgtcatttttttcacaatttatttacatctacttttgtttgaactggaatgaagagatgaaacactatggatatgttttccattcaaatggcactttagcatattggtctgttttcctgtaaaacatcatgggtgtgatttttatactgctgctgcttgtcacaattattataacttctctgtaatttcctctgaaataaaattgaatcacctgaggtgcaaaccaaaaaaaagtc

SEQ ID NO: 61534 - DNA, 1817 bp, Homo sapiens
gcggtggaattcgaggagcgacggaagcgacgcgggggtacgctgctgcgcggcgcccggtttcgtgcccgcggccgactgcgcagcctgtccgcgagtctgagatacttacagagagctacaatggaaaagtcctggatgctgtggaactttgttgaaagatggctaatagccttggcttcatggtcttgggctctctgccgtatttctcttttacctttaatagtgacttttcatctgtatggaggcattatcttacttttgttaatattcatatcaatagcaggtattctgtataaattccaggatgtattgctttattttccagaacagccatcctcttcacgtctttatgttcccatgcccactggcattccacatgaaaacattttcatcagaaccaaagatggaatacgtctgaatcttattttgatacgatacactggagacaattcaccctattccccaactataatttattttcatgggaatgcaggcaacataggtcacaggttgccaaatgcattacttatgttggttaacctcaaagttaaccttttgctggttgattatcgaggatatggaaaaagtgaaggagaagcaagtgaagaaggactctacttagattctgaagctgtgttagactacgtgatgactagccctgaccttgataaaacaaaaatctatctttctggccgctcccttgggtggagcagcggctattcatctggcttctgacaattcacataggatttcagccattatggtggagaacacatttttaagcataccacatatggccagcactttattttcattctttccgatgcgttaccttcctttatggtgctacaaaaataaatttttgtcctacagaaaaatctctcagtgtagaatgccttcacttttcatctctggactctcagatcaattaattccaccagtaatgatgaaacaactttatgaactctccccatctcggactaagagattagccatttttccagatgggactcacaatgacacatggcagtgccaaggctatttcactgcacttgaacagttcatcaaagaagtcgtaaagagccattctcctgaagaaatggcaaaaacttcatctaatgtaacaattatataatgtttccctttttgattattgcattgtattttaatttgtgcagaatgataaagaatgttccttttagaagtgtgttatgtctgtacctgtctgaagagtgacattaaactttgaaaggacttcactgctcctttacgatattccaaatagttttttacattggaaaagctaattcttgggattctttcatacattttcatcaaaactttcagtgtgattatgtattcatatcttcagtttaatatgtcagtataatagatattgttcaaaagtttcttgttgctaaagtggtgtaatctgttacacagatgaatagctagatgtggaaagagatatgtaaacaagaaacctttgggtattgtttcttaagtaaatattgggacaatcatggtaagcaaacttagttctgtaactgcatttttcaccttaaaagttaaatgaaatgcatgatggtattttattccttgaattatgcaatgcaacattttacatgtaaatagcactggtcatatactgatgtatatggttatctgggttatatctatttttatgtaaactctattttgtttttggcaagaagtgaaattgagacttatgtgcaggttgccattgaattttgctctggtgaatgctgagatccagctttttcttacaaataaatgggaccctgttttccaaa

SEQ ID NO: 61535 - DNA, 2311 bp, Homo sapiens
gggaccctgcgccggaacttccgggtcgacgatttcgtcttgtgggaagagctgaagcaggcgctcttggctcggcgcggcccgctgcaatccgtggaggaacgcgccgccgagccaccatcatgcctgggcacttacaggaaggcttcggctgcgtggtcaccaaccgattcgaccagttatttgacgacgaatcggaccccttcgaggtgctgaaggcagcagagaacaagaaaaaagaagccggcgggggcggcgttgggggccctggggccaagagcgcagctcaggccgcggcccagaccaactccaacgcggcaggcaaacagctgcgcaaggagtcccagaaagaccgcaagaacccgctgccccccagcgttggcgtggttgacaagaaagaggagacgcagccgcccgtggcgcttaagaaagaaggaataagacgagttggaagaagacctgatcaacaacttcaccctgaagttgttgatcagggtgaagggaaaataattgatagaagaccagaaaggcgaccacctcgtgaacgaagattcgaaaagccacttgaagaaaagggtgaaggaggcgaattttcagttgatagaccgattattgaccgacctattcgaggtcgtggtggtcttggaagaggtcgagggggccgtggacgtggaatgggccgaggagatggatttgattctcgtggcaaacgtgaatttgataggcatagtggaagtgatagatctggcctgaagcacgaggacaaacgtggaggtagcggatctcacaactggggaactgtcaaagacgaattaactgacttggatcaatcaaatgtgactgaggaaacacctgaaggtgaagaacatcatccagtggcagacactgaaaataaggagaatgaagttgaagaggtaaaagaggagggtccaaaagagatgactttggatgagtggaaggcttattcaaaataaggaccgggcaaaaagtagaattttaatatcccgaaaacccaaatggaaggtgctgaatgggcaagtggaaagaagggatttgttcttcataaatccaaagagtgaagaaggctcatgcctgaagattcggttaatggacccatcattttccggaagcccagccaaatgatataacgtctcagctggagatcaattttggagacctttgccgcccaggacgtggcggcaggggaaggacaaggtggacgtgggcgtggtgggcgcccaaaccgtggcagcaggacccgacaagtcaaagtgcttcttgctccctgatgtggatgacccagaagcattccccagctctggctttaactgggatgcccataagacaaccctggttccttttgtgaaccccctcctgttcaaagcttttgcatgccttaaggattcccaaacgacctaagaaattaaaaaaaaaaagactgtcattcatacccattcacaccctaaagactgaattttatctgttttgaaaatgaacttctcctgctacacagaagtaacaaatatggtagcccagttttgtatttaggaaatgtattggtagcagggatgttttccataattttccagagattatgcattctttcatgaatactcttgtattgctgcttgcaaatatggcattttcccaaacttgaaatatagggtgtgaacagtgtgtacccagtttaaagctttcacttcatttgtgttttttaattaaggatttagaagttcccccaattacaaactggttttaaatattgggacatactgggttttaatacctggctttgcatattcacacatgggtcaactggggacatgttaaactttggatttgtcaaattttatgctgtgtggaatactaactatatgtattttaacttagttttaatattttcattttgggggaaaaatcttttttcacttctcatggatagctgttatatatatatgctaaatcctttatatacaggaaatatccaggtacttggaaccaaattcaaaggcaccatttgggttttaattaacccttgctccttgcatggctcattagggtccaaattataactgatttacattttcagctatatttactttttaaatgcttgagtttcccattttaaaatctaaactagacatcttaattggtgaaagttgtttaaactacttattgttggtaggcacatcgtgtcaagtgaagtagttttataggtatgggttttttctcccccttcaccagggtgggtggaataagttgatttggccaatgtgtaatatttaaactgttctgtaaaataaaaaaaaaa

SEQ ID NO: 61536 - DNA, 4188 bp, Homo sapiens
agtgtcgtggaattcctgctcgggctgcgtgagctgaccccgctctctgtgcacctacttttgctgcgtttggtgctgagcctgaagtcccaggacaggcggctgagggggaaagatggtgtgaattgggtgggcagagacaactgaaagccacaggacccggttggcacctttttggccgcctgcgcctttgcctgcagccccgctccctgggtcacccgaaggaggagctggcgctctttccgggcgcagaagcacccgacccacgctggaggaaacggtccctctgggcaggagaagctttgggcctggctggagcacactcacggaaccacgccaacgcctggcctgtagccagctcccacctcccctcccaccttctaaaatgcttgcggatctcacgtggccgaccctaaccagatacacatggggaaaggaatcaggtggcacacataccgcctttactccatagagaacttccaattgtgggtaagaacaaagccccacctctgcctaatagatgcagttttccacctgcagccaaaaagacaacctgttattagcttttttcccagaggacaggcatctctatgaaactgccattgcaaaatttgccgacagtgagataaccagctccattttgcttctaacctccatgccctccttgtttactgctgcacgcaggttgaactgtgggaggaacttagtttaaaacaaagatgataacagccctttcccaaaggaaacctttcctggggattagcctgcttttgtgggaccaacagattagccacaagattagaaactacggttgaagagtcacgcagcgggaggctacaggattctgaccctccccaaactgctcctggcgataacatcaccatcgtaaagcctaagatcagcacttggtgggtcacctggcaccacccaggctcatctgatgttgtggcacccaggaactgactcagtgcgaaaacagcttcgactccctgtgatttcatctctgacctgaccaatgggtacttctgactcactggctgccccccacccaccagcttatctttaaaaactccaaaccccagatgctcagggagaccgagtaataataaaactccagtctcccacacagctagctctgcgtgaattaccttttctctgttgcaaatgccctttcttgataaattggctgtctaggtaacagggaaggtgaacccactgggcagttacacttttatccacccttccagctggatcacgcgccctcttcaatgacatgacacgcagctaggagtgtatgagcttgctggccggcaccttccgtcctgggatcgcataggcaaggcctcaatggacagccagggtgcctgggtccggttcccacttttttttctgtcctgttctcgtttcctctttgcttgggccaaagagggttgggccagggtcctgagtgcaagggcttggcttggtgaattaaagtggcagtagccgtgtggcagagaaaatttgtagatgggtgaaatcctgggcctacacagtgacaaagtgtatatagacagccagcctagttggtggatgtgacaaccccagactcttctagatttgtggatccgtgcacctgccagacctgtctctgagccatctggggaggctgggtaagatttcccccgtcagggcctgagcctcatctccaagctgctggcttcagcccagctgccaccagcgctgtctctgtcttgcgctttccagagagagactgactcattttgagctccaggcctaccaggcagcccaaccgcggcagtaactgcctctcacactgaggatggctcatgctctggtccagccatggcttgaacacctcccaacaagaacaaagccagactcattctccctagcatcttcttccttgctcaaagatcccacaccccgttagaagctggaactgggtccttgtcaccttcctcacctccccagtcgtagtctggttaatccttacatctcaccacggtcaccgtggctagatgtgacctccgcgatgcttcaggcacgtactagggcagcctgggcagggctggtcactgtgatctcatgaggtgtgaacttgaccccggccttctttcctgggatgccggctaaggacacaagttcagtgtttgccctggcttgtagcccagcgggggctccgtcatcccctggggaatgcctcggcctgcaagaccgcataccgcattggaacagggaaaccacctacttcagcacctccctcagcaaggtggcaggtcccaacaagccttgcaccacgaggaagtggcagtggcattcgggataatggctccctggccagcttgtgaagttcaaggggcctcgttaccttccttacagcctcacaagatcctcccgggtcccagcacaccctgagggctgaccctcccctcttgattagtgcaggggaaaagcactttaaaaagctgtgtcatgccgtaacttgcacatcttctgattctgacctgaaactgcatcccaggtcggcacagacgcaacccagtctcctcccacctccgagagtgcagtgtcctgaatggagaaccccagcacccagaagcatccactgaaggacgtaagtaggacaaggccaactgtggctgttccagcagagggactgtgggtgatgtttcccttctctgatttctaaaatatctgcaaacttgtttcatttataattgaaaatataatttgcataacaacagtaaattctacacatgaaggcaaacgtccgtggttgacagaaattacactggccagaatccccagtccccatgaggcttgtccagacgcagtgaaccagtcgcagctgataacacacagaccattcccgatcccagaggtgcatttcaggattcattctatttcatcagagacggggtcttcctgtgttgcccaggctggtctcgaactcctgggctgaagcaatcttcctgccttggcctcccagagggttggaattgcagatgtgaggtacttctttgatagtgcctccatgcatgcagaagatgacgtggagagctccgcgcggcacagggcaggaagctggtgtgcactctcatggatccgaagccaacacacgcctctcaactgaggactctgcccctctggcattcttccagccaccagccctgggggccaggagccactgagtgggtcacacagccttagagggcaacgagggcaggagctcgccctggcggtccccatgcagacaagagggtcactggcttccttgctttgctcttcctggacatcttcctcgacattcatctttccatcctaccaagagcgtggaaaccacagggcatgaggacaggcggagacaacgctggaccatctcacagccacatcaagaggctgcccacatcagggctttctacgtggttgcaaggaacacaaacctgtgtgctccatttgcccactggcactaggcctcctgcccaccacccgcttctaggctattcgagccgcaggagctacaggctgctagagaaccctgcggcaggatgctgggcgcggttcagcttttgccagggagcagcatgggactgggatttggaaggtgtacagtggctgcgggctttagcaggaggagtgtctacagcaccttctgctcctccaggtaacctagtgtttttatcagtatccattttcctgtgtggatctcttctgcttgaaacctgtcctgcctatttttcttccctggaccctgactgatacactcttaaaacgagaaaagggtaccgatttataaagttcgtgaattaaaaactacaccagtcatggaaactcaatgacatcactcaaagaaaattcacaactctagccttgagttagctccctcaatagtatgatgaggtcatgcagatagaatcatacagttattaacaaaagtagttgatgttaaccgagtaatcagttttatctgtgttcctttgagacagagagagagagtgagaaagagagcgtgagcaagtgagtgcacatactattgttaaagtcttctctctaaagttttaatatctgatataccataaacacccagataaagaactttagagaaactggttaaaaagatttaaaattcccaactgtaataaatccctaaaatgaatacccaaaaaatgtttttaaaaaaaaaaa

SEQ ID NO: 61537 - DNA, 728 bp, Homo sapiens
atttgtaacctttgatgacattcttacgccaagcttggcacgagggggaggaggtggctggtcagcagtccacatctctgcgtcccccctccccacgcatccactcccctcacgccgtggggcaaaaaggagggtgctggttgcgcgcggagagcgcggtatgggtggcgaagtcccagcctctacctagccccgcgctagtcgtgggttccctccagccacccctctggcccttcattccggtccctccccagacgggccctcctcctttctcatggacccccaagaggcctctcgcgttctcccccgaaggacccctatgcctagccatggatcctccattccccaccctcccgttttcccgtcccgcagacggagccggtccccagccgccgccagtctccggcctcggatgttgacacaaacccgaggcggtttacactgagcgggtctggaagctttcagggccccggcaacacctcctccccgcacttgggggtctccccacagcccgggccggccgcctgggctgcactggcgtctgagagctcctgacacaaggctgtgggaaggaacccttttaagccaaactgggggcaaaaggggagccagacatccccgggctgggccacgtgcggggcagggacttctaaggatctgtcgaaagtcggggcggacggctggggattggcctaatcggagcgcggacgctgaagagcagcggtgga

SEQ ID NO: 61538 - DNA, 2892 bp, Homo sapiens
ttttttttttttggatttttatggactctttattagggtattaagatattgaaaataatacacgtaaaccacaaaagagtagcattccattttcttgaagtgcacatgatattatgaacaatacaaatgcattatttttatcattaatagtttaatcattaattatctcataagtcaatgcagagagtgaaattactatgaattaaacttctgttcacaatgtacagtattttgcatatgttgactttacttaattgtacatttttgtttccaaagttaatgttaaatacctggtgcataggttgttgtcaagcaattactctcattgtcttgtcatacatgctaacattttgctaaatataaatctacaagtatcacagctgcatatatttctgaagtggttagaacagaggaggatgctggaaagttgagttctttaaaatcttcgttcaaaacaagagattttcatctatgtcctcttctttaattccaaagcagtggccccactccttcagggtgatgtgcttatccttgttggggtcacactcctcaaagaaacgggttatgcagtgttccatgggcaccagagatgctcgcagaggagcaagttcagaatgtgtcaagactctatccatagggtgttggtcaagttcactaaactgccagtgcacaggatacacatacatgtggtagtttttcttaaagtcccttaagagaagatcaatgggatggtccccagccaaaagcctcttttcatcccaggtaaattttcttgactttatttctctggcttctcatttagataaccagcatgttcagagttggcttcataaagctgcatgaggatattcttgagcccagtctctcatccgtagaggaaacttgaatcacttcaaagtcccgacaaagtaggaatagatttggaggcttccaaaataatccagctggagttgatgcccctttttggtcccctccagtctgcatttagtagcgaatagatgacaggaactagcataggtctgattgtcagtgccgcaaacttgatcaaggggttttgttggaggaccaagtcactggatcctggcaagacacaagtgaggtttttccctgttggtctgccttacagatgtggcctcttttacactggaagctcatgcaagaatccacagcatgcacccctcatgttgccttcacttgacgtttcctcctcatttgatgagttctctgctttcttggcctcttggtgctctccaggctcagtggtacctatattttcattttcatgtactttttctctttgctccctcaattttgaaggtgaataggcaatggaatgaagctctctcggcctcccagaaaaggcctggcttgggatgaaagtagtcatcactttgcactgtgcctggggccatcagtgccgccatcatcgccatcatcatcgccatcatcatcaactccatgatttctgggcgtggtattaccatcatcagtaggttccatgagcagagcctcagaaacagtcttttcttctgtctctttgtggttgctgatagcttctaggccagttttaccctcttgactctgccattcagtttcttgaatgtgcttattgacgttcgatgcattttcctcttccatttctgcattggagttatcttcttgttcttggttaccctgatcaaattcatcctcctgcatcttgcttacttgagttggttgatcagactcttccaaaatatcatcagattgggtattgtcttcctcctgcttgctgttagcatgctccctgggcaatttctgtctttctttcttggttatcattgtgggtaccaacttcacctggctctttttcttcttcctcttctccattggaaatatttggatcctgctcttggtttccttgatcccttaggccttggctatgtttactgctcctgttcaactgatgatgtgaataatttctaggttgttcttggttttcctctctctttgtgatactttcttgttggttagaatctgtgaaggaactaacaccaggagccaaaaaatcagtgttctctgagagttttttctcctgaggctcactcatatcttcttttatgtccaatgtacccttcaagttggtgccatactcccaaattccacacttaaagtgacccatcactgtccctcttgaatccttcaatccccagctcttggcctagaactcttgcccctgttctgctgactgttcatggctttcctcttttgactttagtactgatgatttttcagccttatggtgggaatcgtcttctgtggatactgctgtttctttttcattttcttcagcttcagcccttaaactggggattgcagtgttgtcgggtgctaccgtttcagcagttggtttggaatgatcagataataatcttgcatttgtcgggattgcagctgcagttcccaagagacataggaaaaaaagcccagtcttcatgctttccagatctttaagtaaggggctggacccagagccactgcagaaaaattgaagttgaatcccctctgcacacagacagggaataaaagtttgacaaacacccaagaaaaactctttaaatccctttcctcgttagctctgcttctttgcccagaggcatattcaagtctactggagttgaaattctgctgctctgtcaactagtgggggtctgaagtgacagacgagaatttggaggttggcaccagagagtatttcagactgtcatcgtttttgttgcagattcctggatttccctagcaggctggcctctcatgcgagggctttacaggcagtgcttgcaaaccaaaagggaaagagctaattctggtggcgtggatggggttaacagtcttcccccggacgcgtgggtc

SEQ ID NO: 61539 - DNA, 1979 bp, Homo sapiens
aattcccgggtcgagggagtccagctctgcagctggaggtgctcatctgcctggggctcatgggtttggaacgggcactcaatgtgttggcgcctatattctataggaacattgtgaacttgctgactgaaaatgcaccttggaactctctggcctggactgttaccagttacgtcttcctcaagttcctccaggggggtggcactggcagtacaggcttcgtgagcaacctgcgcaccttcctgtggatccgggtgcagcagttcacgtctcggcgggtggagctgctcatcttctcccacctgcacgagctctcactgcgctggcacctggggcgccgcacaggggaggtgctgcggatcgcggatcggggcacatccagtgtcacagggctgctcagctacctggtgttcaatgtcatccccacgctggccgacatcatcattggcatcatctacttcagcatgttcttcaacgcctggtttggcctcattgtgttcctgtgcatgagtctttacctcaccctgaccattgtggtcactgagtggagaaccaagtttcgtcgtgctatgaacacacaggagaacgctacccgggcacgagcagtggactctctgctaaacttcgagacggtgaagtattacaacgccgagagttacgaagtggaacgctatcgagaggccatcatcaaatatcagggtttggagtggaagtcgagcgcttcactggttttactaaatcagacccagaacctggtgattgggctcgggctcctcgccggctccctgctttgcgcatactttgtcactgagcagaagctacaggttggggactatgtgctctttggcacctacattatccagctgtacatgcccctcaattggtttggcacctactacaggatgatccagaccaacttcattgacatggagaacatgtttgacttgctgaaaaagggagacagaagtgaaggaccttcctggagcagggcccttccgctttcagaagggccgtattgagtttgagaacgtgcacttcagctatgccgatgggcgggagactctgcaggacgtgtctttcactgtgatgcctggacagacacttgccctggtgggcccatctggggcagggaagagcacaattttgcgcctgctgtttcgcttctacgacatcagctctggctgcatccgaatagatgggcaggacatttcacaggtgacccaggccctctttcggttctcacattgggagttgtgccccaaagacactgtcctcttttaatgacaccatcgccgacaatattccctttacgggccgtgttcacagctgggaatgatgaggtggaggctgctgctcaggctgcaggcatccatgatgccattatggctttccctgaagggtaccaggacacaggtgggcgagcgggggactgagcttgagcggcggggagaaagcagcgcgtcgccattgcccgcacctcttcaagggctccgggcatcattctgctggaatgaggcaaacgtcaacgctggaaaacatctaatgaaagggccacccaggcttctctggccaaagtctgtgcccaaccgcaaccaccatccgtaagtggcacacaggctctccaactgtggtcaatgctgaccagatcctcgtcatcaaggatggctgcatcgtggagaggggacgacacgaggctctgttgtcccgaggtggggtgtatgctgacatgtggcagctgcagcagggacaagggaagaaacctctgaagacactaagcctcagaccatggaacggtgacaaaagtttggccacttccctctcaaagactaacccagaagggaataagatgtgtctcctttccctggcttatttcatcctggtcttggggtatggtgctagctatggtaagggaaagggaccttgagggaaaaacatcttttggggaaataaaaatgtggactgtgcgaagaaaaaaaaaa

SEQ ID NO: 61540 - DNA, 1686 bp, Homo sapiens
ttttttatcattgacaatgtttattatcaagaaactttaggttttttaaaagaatgctcgttttagaatacaccaagaggacactctgtgacaggacatatacaaacaaggataattaaaatattaaatactatctaaattaaaagaccataattcaaattgctaattataatatttgtgtcggtagaaataactatagttccccttcatgaaattcacccccacgttctcatgaagactatgacgtctcaccacaatttcagttatttaatttacaataatcaatgctgagttttctgtgctgaagcatgcactgttacagaaagcacaaaatcctatttacagggatttttagttttctttaaaatgtatctcaagcatcttttaaagtgcgagctacaaataggttgtatccttaatgaaaaaggcttctttctaaaagaagtatgagatagctatccaatactgcaggaacagttatataactaaccgaaggaaccagcagcactctgctaactctgttttagtgtagcaacctccttcttggtgttctactaccagccaaacatgtactccattgctttggatacaagactttcatctttttttggcgtttgtctgtcagaaataacctgataatcactagtagaggctttgtatgctgtagcaagaggtctcatggtagaaatcctaggagtacttccaggttgtgttggtgtacctagagttttgattggtggtgtaaaggctaaagatggagatgataaagcacatctgtcactgctttccataacacttttgtcaatacatggttttacaccaatcatgatggattctccaaaaatcctcccatctttgcttaaggctttccgagcctgcagtttagattgataacgaatatgcatccaatttcctgtattagacatccacatgttttaagatattcccccatactgtgcaaattgtaagtaatatgtaggaaagcagatgccttgaggaaaccccaaatacagtcaccccaagagtcatcgagggtgatcttctgaagtcaaagaatctccttgagtataaaaaggatccaactgggcaggagataatgtcgtctttcgtggctgaccgatacttgctggactaaacatactttgccctgttccaggagtagatgtaactccaacaagaggactctgcattactgaaatgtttggctgtcttcttgaagttaaaggtgttgatccaagtcctgggctagaaatgtcatcatatatacttctaactggtggagcgccacttttatctttatgagctggtacaactggttgtggtggtgacccacctgcaagtaaaggtgatctcatttccattactcctactgaagggccactaattgatcgaggttgtggagtcaccggagctggcaaatcccccattaaaaatccaggtaagaactgggcattaactcctggctttggagatgtgggtgaacccagcatcattggttcagatcctaacgcgggcccctgaggttccactgcaaaggctgccattgcgtcggcaactacacttaaaaccagtaccttcccaattaattttcaaaaatggcggaaaccggacgcgtgggcggacgcgtgggcggacgcgtgggtcgttccagggttatcagtcggtacgcaggctttcagtggcaag

SEQ ID NO: 61541 - DNA, 3593 bp, Homo sapiens
  misc_feature (1)...(3593): n = a,t,c or g
acgccgccgcctgtgtcatccgccattttgtgagaagcaaggcggcctccacgtttcctgagcgtcttcttcgcttttgcctcgaccgccccttgaccacagacatgtctcgggatcggttccggagtcgtggcggtggcggtggtggcttccacaggcgtggaggaggcggcggccgcggcggcctccacgacttccgttctccgccgcccggcatgggcctcaatcagaatcgcggccccatgggtcctggcccgggccagagcggccctaagcctccgatcccgccaccgcctccacaccaacagcaagcaacaagccaccaccgcaagcagccaccgccgcagcagccggccaccgcatcagcccgccgccgcatccacaagcncgcatcagcagcagcagccgccgccaccgccgcaggactcttccaagcccgtcgttgctcagggacccggccccgctcccggagtaggcagcgcaccaccagcctccagctcggccccgcccgccactccaccaacctcgggggccccgccagggtccgggccaggcccgactccgaccccgccgcctgcagtcacctcggcccctcccggggcgccgccacccaccccgccaagcagcggggtccctaccacacctcctcaggccggaggcccgccgcctccgcccgcggcagtcccgggcccgggtccagggcctaagcagggcccaggtccgggtggtcccaaaggcggcaaaatgcctggcgggccgaagccaggtggcggcccgggcctaagtacgcctggcggccaccccaagccgccgcatcgaggcggcggggagccccgcgggggccgccagcaccacccgccctaccaccagcagcatcaccaggggcccccgcccggcgggcccggcggccgcagcgaggagaagatctcgggacctcggagggggtttaaagccaatttgtctctcttgaggaggcctggagagaaaacttacacacagcgatgtcggttttgtttgttgggaatctacctgctgatatcacggaggatgaattcaagaagactatttgctaaaatatgggagaaccaggagaagtttttatcaacaaaggcaaaggattcggaatttattaagcttgaatctagagctttggcttgaaattgcccaaagcccgaactgggatgatacaccccatgaggaggtagacagcttccgagttcgctttttcccacacatgcctgcctgcccctttcctgttccgtaatcttttcaccctttatgtttccccaatgaaactgttggggaaggaagccctttaggcccaatttgggtccccatttgaaaggggctgtttgtaataggtgggatgatccgtgggaaggtcctacagggaaaggccattgtttgaattttgcttcctaagcccagccagcaaacaaaggcattttggaacgatgccagtgaaaggtgtttttctttacttgacggacaactccctcgtcccagtcattggtggaacccacttggaaccaactagatgattgaagatgggtcttccttgaaaaacttgccccagaaagaaatccaatgtatcaaaaaggggagagaaacccctcctcggtttttgccccagcatggcaccgtttgagtacgaatattctcagcggatgaagtcctttggatgaaatggaaaaacagcaaagggaacaagttgaaaaaaacatgaaagatgcaaaagacaaattggaaagtgaaatggaagatgcctatcatgaacatcaggcaaatcttttgcgcccaagatctgatgagacgacaggaagaatttaagacgcctggaagaacttcaccatccagaaatgcagaaacgtaaagaaatgcaattgaggcaagaggaggaacgaccgtagaagagaggaagagatgatgattcgtcaacgtgagatggaagaacaaatgaggcgccaaagagaggaaagtttacagccggaattgggctaccttggatcccacggggaanagagacatgcgaatggggtggcggaggagcaatgaacatggggagattcctatggttccaggaggccagaattttccacctcctaggaggtggtgggtggcataggttattgaagctaatcctgggcgttccaccagcaaccatgagttgttcccatgatggggaagttgacatgcgtactgagccgctttggacaggggaggtncggggccttgtgggtgaacaggtccctagagggaatggggcctgggaacttcccagcaagaatatgggtagaagggagagaaggagtccgaaggccccaaacaaaaaaaccccgattttagatgtgatatttaggctttcattccaggtttgttttgtttttttgtttagataccaatcttttaaattcttgcattttagtaaagaaagctatctttttatggatgttagccagtttattgacctactatttgtaaaatggtctgtttgggcaggtaaaattattgttattgcagtttttggaccaggggaatttttttttcctttttatttctttaatttttccttttttactgtaataatgtccctcaagtttatgggcagtgtaccttgtgccactgaatttccaaagtgtaccaattttttttttttttactgtgcttcaaataaatagaaaaataggttataatattgatcttcaactttgccattcatgcttctatgcatattaggctacgtattccacattgaaagcatgagagtgtctaggcctttgaatggcatatgccatttctgggaaatgcatctggaggctaagtattgctttctacaaataattgccccctttgttttaaaaagaagaaatgcatattgaagtagtttgatgatttgtttggcatataggaagcacgctggtgctaagtattttttaaatggttatgtaagcaaagctgaactgtaaatcttcaggaatatgtattaagattgtggaatgggtgtaagacaattggtagggggtgaaagtgggtttgattaaatggatcttttatggccctatgatctatcctttacttgaaagcttttgaaaagtggaaaggtcattttgttgcatttccccatttcttgtttttaaaagaccaacaaatctcaagccctataaatggcttgtattgaacttttacatttgaattaaagatgttaaacatgaagtcttttcatgtattcaagtgatttataaagatggggtgtagtctaaaaaacaatacttgaaagtaagaaggtttagccaccacgcctggcctcttaatttcttttagcaacattttgtagttttcagtgtatgagtctttcacctcctgggttaagtttattcccaagtattttattttatcttattatttatttatgtattttgaaacagtcttactctgtcacccaggctggagtgcagtggctcaatctcggctcactgcaaacctccacctcccaggttcaagcgattctcctgcctcagccccccaagtagctgggattacaggtgcttgccactacacacggctaatttttgtatttttgggtgacagagcaa

SEQ ID NO: 61542 - DNA, 9654 bp, Homo sapiens
cagcgactcctctggctcccgagaagtggatccggtcgcggccactacgatgccgggagccgccggggtcctcctccttctgctgctctccggaggcctcgggggcgtacaggcgcagcggccgcagcagcagcggcagtcacaggcacatcagcaaagaggtttattccctgctgtcctgaatcttgcttctaatgctcttatcacgaccaatgcaacatgtggagaaaaaggacctgaaatgtactgcaaattggtagaacatgtccctgggcagcctgtgaggaacccgcagtgtcgaatctgcaatcaaaacagcagcaatccaaaccagagacacccgattacaaatgctattgatggaaagaacacttggtggcagagtcccagtattaagaatggaatcgaataccattatgtgacaattacactggatttacagcaggcgttccagatcgcgtatgtgattgtgaaggcagctaactccccccggcctggaaactggattttggaacgctctcttgatgatgttgaatacaagccctggcagtaacatggctgttacagaacacggaagccctaacgccttaaccaaattaatccccggaattggggcaccgtcaaaatgcccaagattgagtaggtcatctgcacttcattttactccaagatacaccccttagaaaatggagagattcacatctctttaatcaatgggagaccaagtgccgatgatccttctccagaactgctagaatttacctccgctcgctatattcgcctgagatttcagaggatccgcacactgaatgctgacttgatgatgtttgctcacaaagacccaagagaaattgaccccattgtcaccagaagatattactactcggtcaaggatatttcagttggagggatgtgcatctgctatggtcatgccagggcttgtccacttgatccagcgacaaataaatctcgctgtgagtgtgagcataacacatgtggcgatagctgtgatcagtgctgtccaggattccatcagaaaccctggagagctggaacttttctaactaaaactgaatgggaagcatgcaattgtcatggaaaagctgaagaatgctattatgatgaaaatgttgccagaagaaatctgagtttgaatatacgtggaaagtacattggagggggtgtctgcattaattgtacccaaaacactgctggtataaactgcgagacatgtactgaaggcttcttcagacccaaaggggtatctccaaattatccaaggccatgccagccatgtcattgcgatccaattggttccttaaatgaagtctgtgtcaaggatgagaaacatgctcgacgaggtttggcacctggatcctgtcattgcaaaactggttttggaggtgtgagctgtgatcggtgtgccaggggctacactggctacccggactgcaaagcctgtaactgcagtgggttagggagcaaaaatgaggatccttgttttggcccctgtatctgcaaggaaaatgttgaaggaggagactgtagtcgttgcaaatccggcttcttcaatttgcaagaggataattggaaaggctgcgatgagtgtttctgttcaggggtttcaaacagatgtcagagttcctactggacctatggcaaaatacaagatatgagtggctggtatctgactgaccttcctggccgcattcgagtggctccccagcaggacgacttggactcacctcagcagatcagcatcagtaacgcggaggcccggcaagccctgccgcacagctactactggagcgcgccgcgtccctatctgggaaacaaactcccagcagtaggaggacagttgacatttaccatatcatatgaccttgaagaagaggaagaagatacagaacgtgttctccagcttatgattatcttagagggtaatgacttgagcatcagcacagcccaagatgaggtgtacctgcacccatctgaagaacatactaatgtattgttacttaaagaagaatcatttaccatacatggcacacattttccagtccgtagaaaggaatttatgacagtgcttgcgaatttgaagagagtcctcctacaaatcacatacagctttgggatggatgccatcttcaggttgagctctgttaaccttgaatccgctgtctcctatcctactgatggaagcattgcagcagctgtagaagtgtgtcagtgcccaccagggtatactggctcctcttgtgaatcttgttggcctaggcacaggcgagttaacggcactatttttggtggcatctgtgacccatgtcagtgctttggtcatgcggagtcctgtgatgacgtcactggagaatgcctgaactgtaaggatcacacaggtggcccatattgtgataaatgtcttcctggtttctatggcgagcctactaaaggaacctctgaagactgtcaaccctgtgcctgtccactcaatatcccatccaataactttagcccaacgtgccatttagaccggagtcttggattgatctgtgatggatgccctgtcgggtacacaggaccacgctgtgagaggtgtgcagaaggctattttggacaaccctctgtacctggaggatcatgtcagccatgccaatgcaatgacaaccttgacttctccatccctggcagctgtgacagcttgtctggctcctgtctgatatgtaaaccaggtacaacaggccggtactgtgagctctgtgctgatggatattttggagatgcagttgatgcgaagaactgtcagccctgtcgctgtaatgccggtggctctttctctgaggtttgccacagtcagactggacagtgtgagtgcagagccaacgttcagggtcagagatgtgacaaatgcaaggctgggacctttggcctacaatcagcaaggggctgtgttccctgcaactgcaattcttttgggtctaagtcattcgactgtgaagagagtggacaatgttggtgccaacctggagtcacagggaagaaatgtgaccgctgtgcccacggctatttcaacttccaagaaggaggctgcacagcttgtgaatgttctcatctgggtaataattgtgacccaaagactgggcgatgcatttgcccacccaataccattggagagaaatgttctaaatgtgcacccaatacctggggccacagcattaccactggttgtaaggcttgtaactgcagcacagtgggatccttggatttccaatgcaatgtaaatacaggccaatgcaactgtcatccaaaattctctggtgcaaaatgtacagagtgcagtcgaggtcactggaactaccctcgctgcaatctctgtgactgcttcctccctgggacagatgccacaacctgtgattcagagactaaaaaatgctcctgtagtgatcaaactgggcagtgcacttgtaaggtgaatgtggaaggcatccactgtgacagatgccggcctggcaaattcggactcgatgccaagaatccacttggctgcagcagctgctattgcttcggcactactacccagtgctctgaagcaaaaggactgatccggacgtgggtgactctgaaggctgagcagaccattctacccctggtagatgaggctctgcagcacacgaccaccaagggcattgtttttcaacatccagagattgttgcccacatggacctgatgagagaagatctccatttggaacctttttattggaaacttccagaacaatttgaaggaaagaagttgatggcctatgggggcaaactcaagtatgcaatctatttcgaggctcgggaagaaacaggtttctctacatataatcctcaagtgatcattcgaggtgggacacctactcatgctagaattatcgtcaggcatatggctgctcctctgattggccaattgacaaggcatgaaattgaaatgacagagaaagaatggaaatattatggggatgatcctcgagtccatagaactgtgacccgagaagacttcttggatatactatatgatattcattacattcttatcaaagctacttatggaaatttcatgcgacaaagcaggatttctgaaatctcaatggaggtagctgaacaaggacgtggaacaacaatgactcctccagctgacttgattgaaaaatgtgattgtcccctgggctattctggcctgtcctgtgaggcatgcttgccgggattttatcgactgcgttctcaaccaggtggccgcacccctggaccaaccctgggcacctgtgttccatgtcaatgtaatggacacagcagcctgtgtgaccctgaaacatcgatatgccagaattgtcaacatcacactgctggtgacttctgtgaacgatgtgctcttggatactatggaattgtcaagggattgccaaatgactgtcagcaatgtgcctgccctctgatttcttccagtaacaatttcagcccctcttgtgtcgcagaaggacttgacgactaccgctgcacggcttgtccacggggatatgaaggccagtactgtgaaaggtgtgcccctggctatactggcagtccaggcaaccctggaggctcctgccaagaatgtgagtgtgatccctatggctcactgcctgtgccctgtgaccctgtcacaggattctgcacgtgccgacctggagccacgggaaggaagtgtgacggctgcaagcactggcatgcacgcgagggctgggagtgtgttttttgtggagatgagtgcactggccttcttctcggtgacttggctcgcctggagcagatggtcatgagcatcaacctcactggtccgctgcctgcgccatataaaatgctgtatggtcttgaaaatatgactcaggagctaaagcacttgctgtcacctcagcgggccccagagaggcttattcagctggcagagggcaatctgaatacactcgtgaccgaaatgaacgagctgctgaccagggctaccaaagtgacagcagatggcgagcagaccggacaggatgctgagaggaccaacacaagagcaaagtccctgggagaattcattaaggagcttgcccgggatgcagaagctgtaaatgaaaaagctataaaactaaatgaaactctaggaactcgagacgaggcctttgagagaaatttggaagggcttcagaaagagattgaccagatgattaaagaactgaggaggaaaaatctagagacacaaaaggaaattgctgaagatgagttggtagctgcagaagcccttctgaaaaaagtgaagaagctgtttggagagtcccggggggaaaatgaagaaatggagaaggatctccgggaaaaactggctgactacaaaaacaaagttgatgatgcttgggaccttttgagagaagccacagataaaatcagagaagctaatcgcctatttgcagtaaatcagaaaaacatgactgcattggagaaaaagaaggaggctgttgagagcggcaaacgacaaattgagaacactttaaaagaaggcaatgacatactcgatgaagccaaccgtcttgcagatgaaatcaactccatcatagactatgttgaagacatccaaactaaattgccacctatgtctgaggagcttaatgataaaatagatgacctctcccaagaaataaaggacaggaagcttgctgagaaggtgtcccaggctgagagccacgcagctcagttgaatgactcatctgctgtccttgatggaatccttgatgaggctaaaaacatctccttcaatgccactgcagccttcaaagcttacagcaatattaaggactatattgatgaagctgagaaagttgccaaagaagccaaagatcttgcacatgaagctacaaaactggcaacaggtcctcggggtttattaaaggaagatgccaaaggctgtcttcagaaaagcttcaggattcttaacgaagccaagaagttagcaaatgatgtaaaagaaaatgaagaccatctaaatggcttaaaaaccaggatagaaaatgctgatgctagaaatggggatctcttgagaactttgaatgacactttgggaaagttatcagctattccaaatgatacagctgctaaactgcaagctgttaaggacaaagccagacaagccaacgacacagctaaagatgtactggcacagattacagagctccaccagaacctcgatggcctgaagaagaattacaataaactagcagacagcgtcgccaaaacgaatgctgtggttaaagatccttccaagaacaaaatcattgccgatgcagatgccactgtcaaaaatttagaacaggaagctgaccggctaatagataaactcaaacccatcaaggaacttgaggataacctaaagaaaaacatctctgagataaaggaattgataaaccaagctcggaaacaagccaattctatcaaagtatctgtgtcttcaggaggtgactgcattcgaacatacaaaccagaaatcaagaaaggaagttacaataatattgttgtcaacgtaaagacagctgttgctgataacctcctcttttatcttggaagtgccaaatttattgactttctggctatagaaatgcgtaaaggcaaagtcagcttcctctgggatgttggatctggagttggacgtgtagagtacccagatttgactattgatgactcatattggtaccgtatcgtagcatcaagaactgggagaaatggaactatttctgtgagagccctggatggacccaaagccagcattgtgcccagcacacaccattcgacgtctcctccagggtacacgattctagatgtggatgcaaatgcaatgctgtttgttggtggcctgactgggaaattaaagaaggctgatgctgtacgtgtgattacattcactggctgcatgggagaaacatactttgacaacaaacctataggtttgtggaatttccgagaaaaagaaggtgactgcaaagggatgcactgtcagtcctcaggtggaagatagtgaggggactattcaatttgatggagaaggttatgccattggtcaagcccgtcccattcgctggtaccccaacatctccactgtcatgttcaagttcagaacattttcttcgagtgctcttctgatgtatcttgccacacgagacctgagagatttcatgagtgtggagctcactgatgggcacataaaagtcagttacgatctgggctcaggaatggcttccgttgtcagcaatcaaaaccataatgatgggaaatggaaatcattcactctgtcaagaattcaaaaacaagccaatatatcaattgtagatatagatactaatcaggaggagaatatagcaacttcgtcttctggaaacaactttggtcttgacttgaaagcagatgacaaaatatattttggtggcctgccaacgctgagaaacttgagtatgaaagcaaggccagaagtaaatctgaagaaatattccggctgcctcaaagatattgaaatttcaagaactccgtacaatatactcagtagtcccgattatgttggtgttaccaaaggatgttccctggagaatgtttacacagttagctttcctaagcctggttttgtggagctctcccctgtgccaattgatgtaggaacagaaatcaacctgtcattcagcaccaagaatgagtccggcatcattcttttgggaagtggagggacaccagcaccacctaggagaaaacgaaggcagactggacaggcctattatgtaatactcctcaacaggggccgtctggaagtgcatctctccacaggggcacgaacaatgaggaaaattgtcatcagaccagagccgaatctgtttcatgatggaagagaacattccgttcatgtagagcgaactagaggcatctttacagttcaagtggatgaaaacagaagatacatgcaaaacctgacagttgaacagcctatcgaagttaaaaagcttttcgttgggggtgctccacctgaatttcaaccttccccactcagaaatattcctccttttgaaggctgcatatggaatcttgttattaactctgtccccatggactttgcaaggcctgtgtccttcaaaaatgctgacattggtcgctgtgcccatcagaaactccgtgaagatgaagatggagcagctccagctgaaatagttatccagcctgagccagttcccaccccagcctttcctacgcccaccccagttctgacacatggtccttgtgctgcagaatcagaaccagctcttttgatagggagcaagcagttcgggctttcaagaaacagtcacattgcaattgcatttgatgacaccaaagttaaaaaccgtctcacaattgagttggaagtaagaaccgaagctgaatccggcttgcttttttacatggctcgcatcaatcatgctgattttgcaacagttcagctgagaaatggattgccctacttcagctatgacttggggagtggggacacccacaccatgatccccaccaaaatcaatgatggccagtggcacaagattaagataatgagaagtaagcaagaaggaattctttatgtagatggggcttccaacagaaccatcagtcccaaaaaagccgacatcctggatgtcgtgggaatgctgtatgttggtgggttacccatcaactacactacccgaagaattggtccagtgacctatagcattgatggctgcgtcaggaatctccacatggcagaggcccctgccgatctggaacaacccacctccagcttccatgttgggacatgttttgcaaatgctcagaggggaacatattttgacggaaccggttttgccaaagcagttggtggattcaaagtgggattggaccttcttgtagaatttgaattccgcacaactacaacgactggagttcttctggggatcagtagtcaaaaaatggatggaatgggtattgaaatgattgatgaaaagttgatgtttcatgtggacaatggtgcgggcagattcactgctgtctatgatgctggggttccagggcatttgtgtgatggacaatggcataaagtcactgccaacaagatcaaacaccgcattgagctcacagtcgatgggaaccaggtggaagcccaaagcccaaacccagcatctacatcagctgacacaaatgaccctgtgtttgttggaggcttcccagatgacctcaagcagtttggcctaacaaccagtattccgttccgaggttgcatcagatccctgaagctcaccaaaggcacaggcaagccactggaggttaattttgccaaggccctggaactgaggggcgttcaacctgtatcatgcccagccaactaataaaaataagtgtaaccccaggaagagtctgtcaaaacaagtatatcaagtaaaacaaacaaatatattttacctatatatgttaattaaactaatttgtgcatgtacatagaattctttctgtattcagatggtgctaattcagactccagactgaattttaattcaagttctttctcaagtctataaataatattaaactgattatttcattctaaaaaaaaaa

SEQ ID NO: 61543 - DNA, 2165 bp, Homo sapiens
gctgcgccccacgccagcccgcgccccgcatggctgccgccggggccaggcctgtggagctgggcttcgccgagtcggcgccggcgtggcgactgcgcagcgaggcagttccccagcaaggtgggcgggcggccggcatggctgggcgcggccgggctgccggggccccaggccctggcctgcgagctgtgcggccgcccgctctccttcctgctgcaggtgtatgcgccgctgcactggccgcaccggacgcacttccaccagctgcatcttcctcttctgctgccgcgagcagccgctgctgtgccggcctggcgagtttttaggaatcagactacccaggaaaaaccgatttttactcatatgagccaccttctgagaatcctcccccagaaacaggagaatcagtgtgtctccagcttaagtctggtgctcatctctgcagggtttgtggctggttaaggccccaaaacgtgctccagatgccacaaagccatattactggcagcaaggagcatcagaccctagactggagattgggacataagcaggcttgtgcacaaccagatcatctggaccatataattccagaccacaacttcctttttccagaatttgaaattgtaatagaaacagaagatgagattatgcctgaggttgtggaaaaggaagattactcagagattatagggagcatgggtgaagcacttgaggaagaactggattccatggcaaaacatgaatccagggaagataaaatttttcagaagtttaaaactcagatagcccttgaaccagaacagattcttagatatggcagaggtattgcccccatctggatttctggtgaaaatattcctcaagaaaaggatattccagattgcccctgtggtgccaagagaatattggaattccaggtcatgcctcagctcctaaactacctgaaggctgacagactgggcaagagcattgactggggcatcctggctgtcttcacctgtgctgagagctgcagcttgggtactggctatacagaagaatttgtgtggaagcaggatgtaacagatacaccgtaaaggcatcttaaagccttgaaaaatgttaataatcttttataccttgcaattccatttctgggattttatcctaaggaaatacttataccaaaaatagaggtgcagagatgttgacggattgcttacacagtgtctacttattagtgaaacaaaagtgtccagtgacagggaattaaataaattttggtacatccacagaggaaggctacacagtcttaattataacacctatattgacaacagacataccattataggtggtattcatggtatgatcctattcttgtaaaaatatttgtatgtatgcacagaaatctgcaaagatgtacacttagtgaactggttaccaacgaatggtgggactaactaaaatggtctttttacttatatgtgcatttctttttataataaaaatgggttatatgcctaatgaagtcaaaccatctcactctgagcatttcccaccctaggtttttaaaacacaaaaatacttaggtaaaactcccaacaaacttgtctgatcattagctgattatcacaggctctagtatgtactggaagcccagaatatttgagaaataccaaacctcaggttggtgagtatgatgaacaggaaacccagtaattctgaagcagcagtatcacagttggcaggatgaggaacaacagtggctttgtgatcacagaactggaatttaaagaggctggaccttcagaactgatcttggtcagccagcggccctgcttacagatgagacactgaaaggcaaaaggcgatggtcttccctttccgtgtcagcattgtatacaggttccctatcgcacatacaagggttatggaatgtaagccaaaataagggtctggcctaggaggcagcagcctgaaggaaaggaaggccctgaagtcagttttcaaaggggctgacccttggcctattatgtttctgatacatctgtttaagcaaagcggctcctaagactacactaaggtttcttccatcccctagcaagctcacagttgacaattcccagttctctcagcacccagtggatgcctgccctttaagacacattgctgttgatcagtgg

SEQ ID NO: 61544 - DNA, 743 bp, Homo sapiens
tttcgtcgggcctgaacttccagggccggctactcctcggcagagcgaccgcgcggtgtctcagagcgcggcccggagccgcactaagagcgctggacggcgggagagaggctcggaggaccggtagctcccagcaaagcggcccagcggatgtcgggagctatcttcgggcccctggagggcccgagctccctggatgccccgagcatccacccgctggtgtgcccgctgtgccacgtgcagtacgagcgcccgtgtcttctggactgtttccacgacttctgtgccggctgcctgcgtggccgcgcgaccgacggccgcctcacctgcccgctgtgccaacaccagacggtgctgaagggtcccagcgggctcccgccggtggaccggctgctgcagttcctggtggacagctcaggggatggcgtggaggcggtgcgctgtgccaactgtgacctggagtgcagcgagcaggcaggggcggcagggcgggtgggtgaggagcaaagggtacccggttgcacagtccccaatgcttgcacatgcactcagcatgtcttcagaggacgacctggcagtggattctccagcacctccctagggcaccttggccccaaatgtgaaccccattataccggtggggagactgaggtccagaacaagggacttgagccagtgtccagacagtggcagaggctaaggccattcgatctggggagagctcactggtccccaattcaggg

SEQ ID NO: 61545 - DNA, 946 bp, Homo sapiens
  misc_feature (1)...(946): n = a,t,c or g
ccgccgggtgcgcggcttcgccgcccgaggtcgttcggctcgggtaccatcctccgcgccatggacaccagcgacctgttcgccagctgcaggaagggggatgtgggccgagtgcggtgaggacctcgcagtcccggggagggtgcgggaggtggccgccctcggaacgcctcgggccctgggacgggcggctgggcggccgcggagaggcgggcgcctctgccgggtcacagccctcggagcgcccccgcggggcagaccacccggacccccgccgcagccccccagcggaagcgcgctggggcggggacactgatggccattgacccccggagggcttcctgtaagaagggactgctcagcggaggtccgaaggcgcagaagtgggcggagagaaggcgggccactgttcgccctggtagggcccggacgtcagaccccccgggcgcagggcgcgggtataggcctgggactccagacgtggcccctttctctcgtgctctctggacctggcgcggggaacacctagagcccataatcggcctccggtccctgaggattcggaaactcctgacgcagctaaagtgaatctggcgctgagatgccccctccatgggccggacgcggagggaaggggtgcccagttgggttctggggcccttcccctccttgggcttccactatcccgtttgacctccttttttcttggcccttcctcccccttgacctggtgctgactgactgcttccacctcccctgggctggcgccgggctgctgtactcccgtagcctccctgggccgctccctgacatcccgtgccactcaagagttagtgcatagtgtcaacgctgagtgggttcacagcacttccaggtgcagcctggaggcctcctttgggctgcccccgccacgaaatcgtcgacccggaaattccggncgttgtat

SEQ ID NO: 61546 - DNA, 2338 bp, Homo sapiens
tcctgaattcccgggtcgacgatttcgtcggcggcccgcggcggaccatggccctggcccggcgtcgctgggctttcctcacggcgtccccgagcagcgtcgcagagcgggccgacttccgggaaggaactgaccagcgactgagcggcggccggcgcgcttagcgccctgaacatgcggcagtccctgcgggcgaccccgggctccggacaggcggcggcggaggcggcggctcgggagggaaggaggcggcggcgccggcggaggtggcggcggagacggccggcgcccggcgcggagccctagggaggcagttcagcgcggcctcgggcctcgtcgagaaggatgctgtcccgaaagaaaaccaaaaacgaagtgtccaagccggccgaggtgcaggggaagtacgtgaagaaggagacgtcgcctctgcttcggaatcttatgccttcattcatccggcatggtccaacaattccaagacgaactgatatctgtcttccagattcaagccctaatgccttttcaacttctggagatggagtagtttcaagaaaccagagtttccttagaactccaattcaaagaacacctcatgaaataatgagaagagaaagcaacagattatctgcaccttcttatcttgccagaagtctagcagatgtccctagagagtatggttcttctcagtcatttgtaacggaagttagttttgctgttgaaaatggagactctggttcccgatattattattcagacaatttttttgatggtcagagaaagcggccacttggagatcgtgcacatgaagactacagatattatgaatacaaccatgatctcttccaaagaatgccacagaatcaggggaggcatgcttcaggtattgggagagttgctgctacatctttaggaaatttgactaaccatggttctgaagatttaccccttcctcctggctggtctgtggactggacaatgagagggagaaaatattatatagatcataacacaaatacaactcactggagccatcctcttgagcgagaaggacttcctcctggatgggaacgagttgagtcatccgaatttggaacctattatgtagatcacacaaataagaaggcccaatacacggcatccctgtgctcctacgtgtacctcggtatgatcaaccacctcctgtcacataccagccacagcaaactgaaagaaatcagtcccttctggtacctgcaaatccatatcatactgcagaaattcctgactggcttcaggtttacgcacgagcccctgtgaaatatgaccacattctgaagtgggaactcttccagctggctgacctggatacataccagggaatgctaaagttgctcttcatgaaagaattggagcagattgttaaaatgtatgaagcatacagacaagcccttcttacagagttggaaaaccgaaagcagagacagcagtggtatgcccaacaacatggaaaaaatttttgagctgattttttaaaaatttaagttttgtaagagctttaaaatattttcacagataaaaaattgcaaacaagtactctggttaataaatgctgcttcctttgtggaaattataaaattctaactttacatgtattttgttattagaaattttcttttattgaatgagaaaaattagtctatcattttaagagccaatatggcaaacactttcaaatactgtatattaggaaactgttttggtattcttgatggaaaaaaatgcagcggaaatgtcattatgaacagatgttaaataggaaattattacttgttaacttcttacagcagtagtaccttctttaaaaaaaaaaaagaatctgcggtatttttttaaaaaaaaagtttactgctgtagtgtgaaatattgtctggaaagggatggtttaaatattaccatgatgtagttgaaatataaaataggatttggaaccttattgtgataaatatttatatatgatgtatgtttgtctcccctctccaaagtaaggaacccagctgggcgtggtggctcactcctgtaatcccagcattttgggaggccgaggtgggtggaccgcttgagtccacgagtttaagaccagcctgggcaacatggtgaagccccatctctacaaaaaatacaaaaaaattagccgggtatgatggtgtgtgcctctagtcccagctacttgggaggctgaggtcagaggatggcttgagcccaagaggcagaggttgcagggtcaagatcgcaccacttgcactgcagcctgagagagagagagccagaccttgtctcaaaaaataaaaaaaaaaaa

SEQ ID NO: 61547 - DNA, 1055 bp, Homo sapiens
aagtcagcaggcagtaagcaagatgaggaatcaatatagcaacagtttggatcagactgtacagtttttttttgtttttctgagatggagtctcgctgtgtcacccaggctggagtgcaatgacgtgaccctggctcactgcaacctccgcctcccaggttcaagtgattcccctgcctcagcctcccgagtagctgggattacaggtgcctgccaccacgcccggctaattttttgtatttttagtagagacggggtttcaccgtattagccaggatggtctcaatctcctgacctcgtgatccatccgccccgccctcccagagtgctgggattacaggcgtcacacgcgctgaccggctcagactgtactcttctagccatctgaaatacgttttctaggtagagatagattgtgtaagggtacagttatgaggataacagaaacgtggcagattatttaaaatcatcctgaaagtggtgctttatctgatgaaagtgattgtaatccataggaaaatgtttcaacgtgcgcaagagttgcggtggcgggcagaggactaccacaaatgcaaagctttttcagatcaccccctctgcaagaaagcctctttgcaactgggtcagaatggcggcagcggagcatcgtcattcttcaggattgccctgctggccctacctcacagctgaaactttaaaaaacaggatgggccgccagccacctcctccaactcaacaacattctataactgataactccctgagcctcaagacacctcccgaatgtcttcttattccctttccaccctctcctcttccaccctccgtggatgataatctcaagactcctcccttagctactcaggaggccagaggcagaaaaatcactgaaacccaagaggcagaggttgagtaagctgagaacaggtcattgcactcaagcctgggcaataagaagaaatgtgtgagtggaacaaaagaaaaaaatcaaaaaacaaaacaaaacccacactccaaaaacaaactaacaaagaataaataaataatataaaaat

SEQ ID NO: 61548 - DNA, 1632 bp, Homo sapiens
tatggcacgagtcagaatttatctatttagagataacttaaatacaacacagaagctaagcaggttcttaaaattactggtgtctacaaactgcctgaatttttgtctttgctagttagtttcaccctgcactgctagaaagaagcaacaacagtcagtatgtcattcttcaacatttaatggtgccacagggttaaataatggccttacttttttggcctgaattttgccaaaattagcttcaaactctttttttgatccatttagatttgctagatgtccatcctttattctgtagcctgaggaattcagtttccttatcctgtactgtactatctgtggtgttaattcaagaaccattggcgtctctcttatctgagctatggaaattccttctctcaataatccttgcattctctcttctaaaactggaacagaataatataaaagggcaggacatttcaaaactaattgcttcaggtcatgatctgtgcatttaaaagcatttttagagaaggaaatactattctgtatacttcttgggcaaagttgaaaaagaaatcctttgagtttggatagaagctggagaatttcaaagctggtgaaaccttgctcctggagaaattctagtgtttcctttatagctgtgggagaatttaacaaaataaatgggttttggcttaacaattttagtagccaaactttcatgttggcctcagagccacctacatctagataactctcttggagaattcttaccatttgcttattcttctcaacaggattatgaaaaacattaggtgcagctgtcaaaagtctgctaatgaccacattttttagtcccaactcttgaaagaactgaacattcagcttctggttctcttggtctttaatagtaaagaaagattctggaaactgctctattaacttgattaactcttcctcatttttgcagaccaactgccagagttttctctgggtgttaacagcggttggactacagacaattgcttccgggcagcgttccaaaatactggctacagcagtctcatcggcacctagttcttgtaaaatattcgcaatttcttcaacataggtttcatcttctaaaagtacccatccttttaatctacgaattttcctaatgtcaactgaacatttatagagcttttccactgttcttgtattttctttgctcgactgtttatcagttgtataggtgaagcatgctaagaaaggtctgtattttggaggtgatcgcatctttctgaaagaacacagcctgcaggactgggatctcagcagcagcttccacaacatggctgcaatctactagctagtttccaccgtcctgggacttaaatggactcattctatcttacagtctctccccacagatcttgtcctcatccagatattcagttcatccacttgggattctttccaacttcttctcaaaatgtgatcttgtcagttccctgcaataaaccgtcggcgtcagctccaagcaaggcacagggagtcccgggggccaggccccgtccttccctctctctccggccagcctccccacagtccgcagtccccgaggcctggagccgggatttcggctcgtgccgaattcgaatcgat

SEQ ID NO: 61549 - DNA, 3005 bp, Homo sapiens
  misc_feature (1)...(3005): n = a,t,c or g
ttgaagtttaggtaacatttcctttcctcaaaggataaatgattcagaaggaatatatggtaattatgtaaaaaaacaaaaacaaaaaaccctcatgtttcccagttttaaccgtaaaaacagaaatccttaaaacacatacatacacttaggaggaaaaaggagatgaatgcccaatgtccattagcaagtgttaccgactaattctataatctagttttttctagttatatcccaaagttcccaagtttagtcctaaaattttctttctgtacatttacccatttgaacaacatcaacattaaataactaaaacaagatggtccataaaattctttctatagattgttggctgaaagtctcatttctaaaactagtacttcagtattccgaaaagctctctctgcgtcttttcatttctattagtatgtttaggacataaagcattaaaataaggctactgctaatgtaccaaaatccatgttccagaaaggaaaaaaaaaaactaataattatcatgtttgaaaggtatgtattttattactcttgcaggtattttggacaaaaatattgaccagctaattatgctcttccacacatcatgttcactgagtttactaccacagttttagtgcaacaaaatatctttgaaaagccactctacagtaattatggcaaggctcattaatatgcagaggtaaagatttcatttgtatagaaacttagaaaataatgtttgaaaaggaaagccattccatcaggctaaatattttttgtatattaaaaaatatatataaatatttcttgaattagttttatagtcaattttgatgcagtgtcattgagtggtgataaattttgagaggtatatgttaaacaaacaccatacctggagattatagtcttaggtaaacatttaaatacacaatgtcaaggtagtcccccttttaaaaaatttttgtacccaagtaagtcatacatttaatgttgacatttcttcttacctgtgtgcctcacaccaataaagtactctgcattaaaatttaaatcttgagacagtagtacagcattgaaaaaaaattgtaaagcagcttagatacactgaactcagattttacattttcatttgtcagattagaatataaaaagtaagcttgaaaatcaacttgaaaaagcttattcttcctcaagaaaaagtatgaacaatctgaaaatgatcaactagtgtgaatgaacattgtacatagttaagtcacattcagtggttgctaaacataccactccctcctggaaattacggaaccatctacatgtgaaactaagtcatcttcgttttcatcataatgttcatcactgacaaacttcattcccatttttagatcttcataataatccattggtctttcaaacctattgagattttctacattgttccactgagttttttcaggctcttctaaatagtctttacgtattagattgttcactggatttttgttttctttttttacactgtctgggtaaggatcaagctcatcttgttgaagaacatctatttgtgattctttttgcatatctgatggtggaatgtagttcttggcaaagtagtctccacgaaacgtccgtcttctcctatagcagaatatccccagcccaaaacacttaacaagtaactatgaagagagcccccaccccactacactaggcaatgatcgtgggcaattgtgtccatcccttaattgttgcccaaagttgacaatggggaaggggcaattttttagggttctgttgctaggatccctcgatgttcaggcagttgagggggatgcccactggaattgtagggctggaaggggtgggtaggtaggtagggagggatcttgaaatgtaggatggactttttgggtcacttcttttgacccaggggaatttggtcactttacagatataaacaccagaataattgaaagtcaatggatggacaaaatgaagagtattgtctgaagccaataaaccatcaggccattgtccatccaacctgctccacacagatttgaagggtggtggatttgcatcagcattacatttgagattaacaccttttcttcctacaaaccaatttccatcatatcctgttaccgaaacttcaggagcatactgtatgtctaatatgaaagagtatcggatgtccttttccaaggctggatgttttacaacacaagtaattcgccttcctctagcaaatctggttggaaatagcttgtactggctgataatcgttgccgtttcatttggaaaagaagttgtagtggattccatttcaccaagatcaccttcccagtcaatatgtgcaacgggttttccagtggctgcgatgcaaatggctgctactgtttcatttcctccatcaattaaagaatctggcccttttatcaggctcacagtgggttcaactaacacagttacagttgtagaggactgggcatttccaagcgggaatgtaacagctttgcagatgtattttccagaatcagagaatcctatgttatgcagagtaattgttgcatcattaagtgagtaatttttaaacaagactcttccctgatattctccttgaacagagaatccatattggggatggtgaactgcaacagtctgtgaacttttgccatgtatcttctcccatgaaatctgtgttatggtttcatttacttcaattaaacactttaatgaaacattctttccccatactgctgtgacatgtggctccacaataattggtccagctaaggcaccacagagcctggagaagagcagcagcgggaagagcagcagcagcagcggaggtggcgtcgggggctgcagcaggagcccggctccgaggagagaagcggaggaaagttgtgctttgccgcctccaggacacagcgggaattcctccactctgatagtgntctcaaaannnnnnnnnnntnnnagggtttcctaaannnngggggctggcg

SEQ ID NO: 61550 - DNA, 2716 bp, Homo sapiens
gcctttctcttctagctttgggatctcaggaggaggagaacccaagaaactgtggaatgatgtgaggcactaagtgaccgcttcagcgcacgatccccgatgaccagatggcgcacactccttttttccagatgagtatttcacctgctcctccttgtgcctcagctgtggggttggatgtaagaaaagcatgaatcatgggaaggaaggagtgcctcatgaagccaagagccgctgcagatactcccaccagtatgacaaccgagtgtatacctgcaaggcctgctatgagagaggcgaggaagtcagtgtagtgcccaaaacatctgcttccactgactccccctggatgggtctcgcaaaatatgcctggtctgggtatgtgatcgaatgtcctaactgtggcgtggtctatcgtagtcggcagtactggtttggaaaccaagatcctgtggatacggtggtgcggacagagattgtgcatgtgtggcctggaactgatgggtttctgaaggacaacaacaatgctgcccagcgcctgttggacgggatgaacttcatggctcagtcggtgtccgagcttagccttggacccaccaaggctgtgacttcctggctgacagaccagatcgcccctgcctactggaggcccaactcccagattctgagctgcaacaagtgtgcgacgtcctttaaagataacgacactaagcatcactgccgagcctgtggggagggcttctgtgacagctgttcatcaaagactcggccagtgcctgagcggggctggggccctgcgccagtgcgggtctgtgacaactgctacgaagccaggaacgtccagttagctgttaccgaggcacaagtggacgatgaaggtggaacgctcattgctcggaaggtgggcgaggccgtgcagaacactctgggagccgtggtgacagccattgacataccactaggtctggtaaaggacgcggccaggcctgcgtactgggtgcctgaccacgaaatcctccactgccacaactgccggaaggagttcagcatcaagctctccaagcaccactgccgggcctgcggacagggcttctgtgatgagtgctcccatgaccgccgggctgttccttctcgtggctgggaccatcccgtccgagtctgcttcaactgcaataaaaagcccggtgacctttaaccccagccccctctccgagtccttcacaattccttaggttctcagggttagaaacagtcttgcgaggtaggccctcctcccagtcacctgctgtggtgtgtgtcctctcctctccgcatccagggccactttccctcagtgggggtgagcctggcggcaggcccgaaggtgtggacccctcagggcaggggaccttgcaacttatcgcaaaggggaatgaacctgaatccgttgcatttatttcagttaaaaataatgaatatatatgtgtatatctctctctcatatatacatatgaaaggcactcggggcgtatcgaggctgctgctggctgtgaagacttcgcacagtctcctccgcacagggtgaggtggcagtggcagcacgtcttcctcatgagccgagccaggtccatggccaccacgtggctggccccttcctctgctgctcttggagccttggaagcctctcctgtccttggctcttccctccatgcctgtcagctgcctggggagtgagcctccctggtccttcctgcctgaaacagcctgaagggaattctccctaggtctcctgggagtcgagtcccaattcttggcttaagcctgttttagtcagagaccacccaacttatcgtgcaggtcaccggagtgggtggagggtcagaggtcgggtcttcggccctgagaagcagaaatgcaggggccgtgctgtccctggtcccccagggaacagcaaggaaggaactgagccttctccagcagggcttcctgtcccgatgcttctgtctccactcggctttcccaaaaggcggcacccagctcctcaatcgaagcatctgcctcccacccctcggccccctcaagcccaccatctgcttctgagtgtcgcactaggattttcattgcttattttaaagtgtcttaatcctttgttcccagacacacaacccctctagctctcggaggggcgatcatgagaaaccttccagggaaactgagcacaggatgaactgttagttgtttttaaaagtctatataaatatttcaacagatcgtaaagaaaaaatttatctctttggtccttgcaagagaagtcaaaggaacttttgtttctcctcaagagcctggacatctctgtctgtcatgactggaaagggcccgttgtgctgaaatcctatcatcatggtggatttgatcttcagtggccaaacacgaattaaagtataattcttaactgaactggtgggtgggttgagctttagggaagtatatggcggtcattcctggtgcgcctatcggtgtgacatgagccctggagtgtgtcgtccctctcagccctgctcctcctgcctcctggggtccagtgactgggaccctactctagaactgtgtaccatccaattcgccatcataaaggaatcttcctgctgattttaaatgctttcttgattgaggaaggtatgttaaataaagagtagattttcccagtagcctaatactcaacacatgggattttacc

SEQ ID NO: 61551 - DNA, 2022 bp, Homo sapiens
ttttttttttttggagagaggttgtgtttattcaccatgtcataccagcatatagggaacctctatttaggagctggtggcctgcactcagcaccgcacagataaaaatatacgaactttcaacacagatccaaataccctcacattttaaaagtcaggattccctacacaagttttaagctgacggggattcaagttctgaagttttcatacatagctttaacttgtattaaacacattgtttatttacaacggtggagagagaataaggggcagttaaggccacttttctcctgtgaaaacgctgccaaaatatgtgacatagagtacaacctaatatagccaaaggttctcaaaaatcatcttttcttggcttcaacgtaaattgaataatcaatcggggagtgggagagcggctgccgaatagcaccagggccatgccagggccacgcccaacaatgggcgtgtcgcattcacctttttcattgagctgcccctcagagctgctggccgaactgacgcccctgcactgggccgcagggtgtgcgccgcaccccagaccgggtctgaaagcacgtgtcaaccgggtcccttcagttcccatttcccaaatccacccaaggtccagtccgacagacatttccaaaaagaattcctgttctaggacccacttgcgcttgaggagcacacccgggggttcaaaggggcagccaccggggggtcaaagggcagccatcaggtactccccagggaagggcttgcggccaccagtcacttgcaaccccgcctcacctccgatgcctgctgtgcccagggtggtcccgctcatagcgacggccctgtgcgttcatacgacctcgagcgcttctcgtcgctgatctctgtagtaaatgacttttcttcttgtattttcccggattatccgcccgctcccgtgacctgcttcgagaacggggaagaactccggctcccgaaaacttgtgtggcttactgggggtacttgcagtccttggacttcccgggagccccgaatctcaagagcctttgtaagggagcgctgcgggggggcctgtctcggtggggagtcactcctgctccgggagcggctctgcgacttggacccaccagatgtggagccgctgtcacttttcctcctcttaggagacgctgatcgggatggggacctcgagtagctctgctcacggctccggctccgactccgactctctcgcccctttggcaagccgttcacggggctgtccgccttggctttcttggcgccctccagcctcctcttggtgttcttcacagacagtggggaaggcttgctccctttaccttctttgggggattccactagaatcagaacaagaggttaaaagccaaccacaaaacactctcccaataagaaacaagttcgtagagcgagataaggcccctctacaggtcatacagcgacgcaagcagactgtaacttccggctcccagctgggacccagaacttacacagacatcacagaaatgcagatggggctggacgcgggggctcacgcctgtgagcccagcacttcgggaggccgaggagggcggatcacaaagtcaatacattgagaccatcctgcccaacatggtgaaaccccatctctactaaaactacaaaaattagctgggcttggtggcacgcgcctgtagtcccagctactccagaggctgaagccagaagaatcgcttggacccaggaggcggaggttacagtgagccgagatcacgccacagtactcacctggcaacacagcgagactctgtctcaagaaaaacaaaacaaaacaaaaaaaccccaaaacatgtgagtgtgtgtctctctctctctctctatatatatatatacatagacacacactcacacacaaattacctgagcgtggtggtgggcgcctgcaatcccagctacttgggaggctgaggcacaagaatcaccagaatctggtaggcggagcgtgcagcctcgtgccaagcttggcg

SEQ ID NO: 61552 - DNA, 1980 bp, Homo sapiens
cgcaggcacgtgctaccaccacgcctggctaatttttagtttttttacagaagcgggcttttgccatgttgtccaggctggtctctactcctgggctcaagcagtcctcctgcctcagtctcccaaagtgctggaattacaggggtgagttgctgcgtctggtgttggtgactttctagagattactttttggtttacatcattttccttgtgactatttttacttttttggggggcggggggacagtcttactctttttagtttacatcattttccttgtgactattctatttttacttttttagggggcggggggacatgagtctcactcatgttggtcaggctggtctcaaactcctgacctcagttgatccacgcccttcggcctcccaaagtgccgggattacaggcgtgagccactttgcccggcctgtatttttacgttttaataaatccccgtatttttgttaaaggctgggtaacctgactcctcccctcatttctactgcaaaataggagtacactggggcctcccagtggagctgttctctgctgttttaaattactttctactcctccctttctaacgtccactcctggactcatttgttagatcaatatatactgggactgttgtgttttctttgagtgtactagatctctttccagaagagcttcccttgatccagatctccctaattgggaatgatgatttcacagactagagtctccgatgctggtcatgatgtcaaaactaagttctgactcatttagggaactggatacttgggtctccagaagggccaatgggagggccataattctgtttattttcaaattgtcttgttttcaccttgttagaatgaactctggaagcccagccagggacaatgcaccttcacagagattctgcactaatctgagtgaaggtctaaggtttggaatctccccctcatggagagaagctttgtatggctgtcatgcttagacagtgattcctgcaacttgaccttcaggctgggagaggtggagagccatgcctgttctccttccttgctatggaatttgctgacacaatatcttccgcctggtgctgggcatatcctaagaacttacaactttcctgtattatcctgtgtgagcagctgtcaccttattgggggaaaaatgcctgaaaattagggggcacttcaagtagatagcttctatttcctatatttgtcttatatacaagtatttgcttttatcaaaataattccaataaagcattttaaagtaaagaataatataggaaatagaagctatcatacttgaagtgccccctaattttacaagcatttttcccccaataaaggtgacagctgctccacacaaggataatacaggaaagtttgtaagttcttaggatatgcccagcaccagggcggaagatattgtgtcagcaaattccatagcaaggaaggagaacaggcatggctctccacctctcccagcctgaaggtcaagttgcaggaatcactgtctaagcatgacagccatacaaagcttctctccatgagggggagattccaaaccttagaccttcactcagattagtgcagaatctctgtgaaggtgcattgtccctggctgggcttccagagttcattctttactcaaggataacacggcgatgaacgtcttacaactcagttgttttgagtcagcaggggctgtggggccgctagccgagttccccctgccacgagctaggtcagttccaagcaaagacaccagaaactccagtgtgcaacggtagttcacccaactgcactggggaccgccctctcctaccccagccaggccgcgacgtggccgcccgccggctgctgcgcaaaggcagcgcaagccgttgggatcccctgctccccctcactcaacagtcgggccattacaactctcatactgccaacccacgagcccacttcgcaaaaaaaaaa

SEQ ID NO: 61553 - DNA, 1671 bp, Homo sapiens
caaggattaaaagaatatgatcaagcattggtaaattttgttccaaatgtttaattttttaaaatagacaactacctttataaatcatacacctaacttaaatgtttttttccaattaaaggctgatcttaagaaagctcaggggatagcaccagaagataaaggtaagttggcagcttttgtagtgaaagttaattttgttatttaaatacttatcctcaggaaccattgttcactttgccagattttagatgtttgttcaacagacactacagaatgcctgctgttgggccaggcattatcatatagcaatgaacaagacagtcaaagtccctgccctcaaagagcttacattctactcccattcaagaatatagtagtttttcacgttatttattcttcaagttatcatctctgtagttttttatatgtctaaatactgtttgtcttatggtatcctttgagactgtgttcctattctggttagtctaggtcgagaggctcagcattgtaagacacagtattccatggtaaatttaaccatttgggacccattcaagttgaatgtggctataaccttagtattgatgtactggttatatgttttaggaaactatgacaaaaataagcttgtttttcaaataaaccaactatgaatagtgacactagatctgggtattacaaaatgtctttggtctcttattactaaaatgaaacaagggaagcaattactgttctctaatgtagaggcagaaggcaaatcttgatgtacttgagttctctcagttgacatcctctaaaattacgtttcatttctgtgtttgtgtgattgctcagattttctgttactagggcttagttactttgtagagaagttttttcaaggggtagttaacattaaaatagtttgttagtcaccataattttttggatattttgagaaataactcacattgcatatttattttacagctatccaggcagaattgctgaaagtcaaacaaaagataaaggcacagaaagataaagagaaggcagtatatgcaaaaatgtttgcttagaaaggattcagttttgcttattgtgtgttgattgtataaatgcaataagaaaatgtaaaggtttttgtctatgaatatgatccctaatgtgtttcttttgacaccttagttccttactgtttacagtttaggagtactgataggggttcatgcttaataaacatgtcacaatacagtaagtaaagtggttttgtttgtttctttgagatggagtcttgctctgtcacccaggctggagtgcggtggcgcaatctcggctcactgcatcctctgcctcccgggttcaagcaattctcctgcctcagcttcccaagtagctgggattacaggcacgtgccaccacgcccagctaatttttgtatttttagtagagatggggtttcaccatattggtcacgtcacgttggtcttgaactcctgaccttgtgatccaccccgccttggcctcccaaagtgctgggattacaggtgtgagccaccgtgcccggccaagtaaaatgttttttaaaatggttatgtgcattattcataaaaaataatggtgtccagtctttttaaacttgtaaagacacatcttattgaataaagagatgagagcttaaaaaaaaaa

SEQ ID NO: 61554 - DNA, 3035 bp, Homo sapiens
caccttcaaatgcactcaagacccataaaataataaaacatactagctgctccattttcatttcaccactttgaaatcttggaaccactgatgtgatatcccacagagagggcaagacttcactgtgaagtcaccaaaggaactcctgcccttctaggtgccacttgagtaataactcccaactcactggtcctctaaacctgcagcagggagatggtgtgctaggtagctacatgggcaggagaagaaatggaaacaaattcccggaggatgtttttggccatctcgatgttgttctgggcaatgaccaaagctttctggatgtcctggtaggagtacccctgactcatgaggttctcgatctcactggagagctgaggtgagggcggtggcagcagaggcggcaggaccactaccttgctgacagctgccagctttccgttcagagttgattctccgcgggaatggttttggaggcctctcgggaacttgggaaccttcagtgacattttgtggttagggatccctttccaggacaaacagaccaaggaagagctcgcatttgagatatctgagagagttcggcgggccatcccggccggcacaggtggctttgggacatcatacccatcatcctcattttctgactcctcgggaccagtgttggcttgggctgcggccaaattcccttcaccaaaggtgctgctctcggtgatagatggcgcctgggactgaatattatacattgcttcatacgtacagctatcaatctgctggtcgcaatcacatgctcgtgaactctgggatgtatccaaaggccgtagaggcctggaagagggagtcatgtactctgtgtcctcttcaccctcacattgctccccaggtggcagttttggcacaggaagaggtctggcagccagagaataaatggcattggcagatgaggaaggtttgattttggggtggtcacactctggacctactaatgggctgctattcatactcatggaggtatccagactgaacgtgcttccgagcctaggcacatctggtctgggctccatttgtgagggcaatgaaaatggaagtgagtgccggttggttaattctcttcctgtccagggatcactggaacttggggcagatactggtactttggggattggccggggcagccatgagtctccaaggcggctagaggggacagggggcagtttgtctctggagggacagtcgcctggtgtacaaggcaaggggcgtctttgaggtcgggattctgctccaacagaatatggccggtctggaggcggtggtggtggaagatctcgaagtgtgggaggtactggcaatggtttgtctttatgaagggagccagaagcagccttagaagcagttccaagagcagaagcacttgagggaacacatactcgctgcggcagaaggtcaagtcgtggtggcaccgggggaagggaagcttgtggggccatggagaatggagaaggcggccgttccaccttggcaccagccaattccttcatcatgaagagagtatcatcagctcgttcatcatcatcatcatcataatttggggagggagctccctctgctccttgcctcaacaggctgccactccctctaggatcaaacggatctaccacgatgggttcagtacctttaatttcacatcggcagaaaggacagccctgaccttctgattcctgccaggatgtaagacaggatgtgcacatgaggtgtccacagggctcaatctttacatccttatcattttcagcacatattttacatagttggaatgtggagcccatctcacagtataattcatattgttcctgggtcactttgatatggtcttggggagttggttcacataagccagtcagatcaggattctgatttcgtccatcaggaaacaaatagaagccttccctgaagccatcaatcagtgcttggaagagaggtttattgtgagggattgtctggagaatgttcccatcagcagtaacatacccaatagcccactgacccagacgagtacagctcagccggaagatataactgccaggtttgtgaatgaatttctggagccgagctttcacttcgtcatacgtcaaaaaagccatgtagccaggatgagttacagcaaggctgttccaattcctgagcaaagaggaccagggctgaaagagtcgggtaaagatgtcaaattcaaaaaccgaaatataatcattgcaggtcagatcaatagtggatttcagagccatggcctccagcccagaactgatgggatgcacttcatgtagagcctgtcgaaagctcttccaagggactattgtcttttccccaaaagcttttctccaaaattccgcagcatctgctttagtaatccgaaatgtgtctccctgaaagagtccacttggaaagattccttttagttctgccagcatgtggctgaagatgagggacagtttggttaggtttcgcctaggctgagaattctcctcatacattctttcttttccctccttgaagaggcttatggtttgcttagttttcttcatcaaattctccataaacaccctaaaatactcattttctccaagtgtctccatcttcccctcatatcttgacaagatagtacggagatgctggtaggtatctggtagcaggtctaagatataaggtgggctattctttagcgccagctttgggttctgacacaaccgcaccaccttgtccatgagcttccagcacttctccaccatcttcttgtccaccgtccccggcgggtgggggctgaggtggtggtggtggtggtggtgcggctggaaggcgtccttcatgagcccaatcaggccacccgaacccgagcccccggagccgctgccgcccccggccccagagctcttcttcacgttgccggccatggcctgggcagggtcggagcccaggcgggtccgccggctcggctcgactgcgagcgagggagagaagcagggcgtgaaggagggacgaaa

SEQ ID NO: 61555 - DNA, 1832 bp, Homo sapiens
ttttttttttttgaaggaaaggaactttcaatgagaaatcaaaacacaggggaaccaaagtgcaaatcatccaccccccatgggggggccaatcctgaaccccacatcatcccctcagcccccttcaggcccccagcgcaggcccagggctcggatgcttctgcctcaggtagctcttgagctgggggcaggcctctctgggactccagttcctcgaagggtagacggcagggagcttgaagcccattcaggcctagggtgccgttccctcaggggcccttcgagcccagtcaggcacccgggccgtcccggcagtaaatgcccagccgttcccgcaacaccagcaccaccctctgggcaagggtctcgagtagtggcgctagaggcagcctgggccctgtgggcaggacccttggtgggtatggcaggaaggggtcctgggtcctcacgggaagcacagcaccagagctgctggcgcacagcaggaagtctgtgcagtagcctggaggcacagtcaggtcctggcggtatttctcctcccccagcagctggcgcaacccctcagctactatgtccttgtgactgtacttgcagcgggcacggtcggtgatgagaggctggggaaagatgggcacttgctgccttcggggaaggcggggaccccggtatcctgggagctccagctccacggccgtgtccagcagggagaggtagcgacgcacaatcagagcatgaggggtgccactgatgtagttgatgaagccaggggaaaaaacaaagtgcagggctctgaagggcaggcaccgcagttggcacagtgacatcaagatgttgactgtagccaggggtgccacccctgcttcccgagccaggatcctctcaaggcagggcataaactgctgttccaggggcaggtagttcagtcgcccaaagggcaggaccaacttctgtaccaccttgctgctgagttgcgtttcctgaaccaccaggaagtgggcaatggcttccagaagctggggctcccgcaaccggtgccgggccaggtgctgggccaggagcaccatcacgtggggagtcagttcctctggccttgcctctgccaggctgctgatcagatgctgccgtggataccgcagaaaacgggggcagcttagagcagcttccaacccttgcccacctcggagaaggggctgcaaagggggaggtggcttcggagggaggcggagccttcgctcctgttccagggcacacaccaggggaccatcagatggaaagccaagtaagactgcaaggtgcagacacacgtggatggtgtgaatgtcaaaggaggggcagtttcggatgatgagctgactcaagtcctgcagtgtgacctgctccacaggagggggccgtggccgagaccccaagagctggcccagacgacgaagcgccaccgagtagtggtgggcgcgcaccttgctggggttctggcccagccagcgcagcagctccccagggctcttcgcctgttccagaagccgctgcagtccttgcacaggacctgcactggggcctcctccaacaggccggtccccccatttgctgggccccaaacagcagggctgtactggagggatcagcagcaggccagacagccgagcaggggaggtctgagcagagagcaggactcgaagcatggagttgggtgatggagaccatgactccccgggccctgcgcaggtcgctccctcagtcggtctcggggcccgggggccgggttccccccgcggcctcctcatcggctagccaccgagtccgccatcttccccctcgtgccgaattcgaatcga

SEQ ID NO: 61556 - DNA, 1713 bp, Homo sapiens
ccttcgatcttctgtccagcgtggaggaatgcgggtcccgagtgctccgccgcccgccccgacccgggcccagccgcctccacggcccgcgctcgtactggagcgaagagcggcctcctgaaggaggggaagggacgtgggggcggccacggcaggattaacctccatttcagctaatcatgggagagattaaagtctctcctgattataactggtttagaggtacagttccccttaaaaagattattgtggatgatgatgacagtaagatatggtcgctctatgacgcgggcccccgaagtatcaggtgtcctctcatattcctgccccctgtcagtggaactgcagatgtctttttccggcagattttggctctgactggatggggttaccgggttatcgctttgcagtatccagtttattgggaccatctcgagttctgtgatggattcagaaaacttttagaccatttacaattggataaagttcatctttttggcgcttctttgggaggctttttggcccagaaatttgctgaatacactcacaaatctcctagagtccattccctaatcctctgcaattccttcagtgacacctctatcttcaaccaaacttggactgcaaacagcttttggctgatgcctgcatttatgctcaaaaaaatagttcttggaaatttttcatctggcccggtggaccctatgatggctgatgccattgatttcatggtagacaggctagaaagtttgggtcagagtgaactggcttcaagacttaccttgaattgtcaaaattcttatgtggaacctcataaaattcgggacatacctgtaactattatggatgtgtttgatcagagtgcgctttcaactgaagctaaagaagaaatgtacaagctgtatcctaatgcccgaagagctcatctgaaaacaggaggcaatttcccatacctgtgcagaagtgcagaggtcaatctttatgtacagatacatttgctgcaattccatggaaccaaatacgcggccattgacccatcaatggtcagtgccgaggagcttgaggtgcagaaaggcagccttggcatcagccaggaggagcagtagtgtgtctctcgctgtcaatgatgagttgacccggtgtgttcttgtatagtcagtggcatcagcacccgtcagccggccttttccttcaggttcgtcaggctcaccggttctcactgtgtctgggaagtaggactgatggtcatcttcatgacaggcggcatctccactaagcctgtgtaactgttccctctttggttttcttagcttttgaatttgaagaagtacttttgaagactcccattttaagaaccgtgcagattttgctaccaaaagtcttcaccactgtgttcttaagtgaatgttaatttctgaggtttgggactttgtggtggtttttttcttcttttcttttccattcttctttctttctttttatgttgtttgctgtaaatgctgcacatccagattgcatatcaggacattggttattttatgctttcttggatataaccatgatcagagtgccatggccactaccccactgtttgctctcctgcaaatcaactgcttttaatttacacttaaacaaattgttttgagtgttagctactgcctttctagatattagtcatttggaataaaaattcaatttcactgaaaaaaaaaa

SEQ ID NO: 61557 - DNA, 3019 bp, Homo sapiens
  misc_feature (1)...(3019): n = a,t,c or g
ttttttttttttgtggaaaccattgatttttattaatttcataactgcggaaattccatgtgaaagtgaaacaagcgatgagtcaagtcaaccagggaaggaatctggggacaggccaaaggagcgggaggtggggcagcgaggcagtcctgctggtaggagccctgaacatttcccagacttgtgtgccgctcgctctggcatcctagagacccggatttactcagctaggagagaggattggatcacaaggttctaagggtggcccattcagaaggtagaaaatggaggggccggcagattctggcagggcaagcaaaagggctcaagtggccattggctaggaggggtaaaaaaattcaggacatccccccagggtgctgcctcagccaagggcttcattgcgggaagatgattgatgtgaaagttctcgtgggcggcgggacctttgctacggaggggcccttttttggggagtttttgtccagcagagccaaggcagggggttgtaaaagaccccagctgcaccagaccccacctgcagataacctgaatctccgctcaaggaaaacctgctcccccagaattctcacttgcaggggactctcatcctcctggggtcacactgcataaggaactgggtctgtcaccaccttccctgacatcctgtcaagttggggaaccatggtttttttcttgggagacaaccctcggcaacagcttgtccactccactcccattcttaaggttaaatgttccagtttgctcccattccaaggcgaccaaaatgtgcagagaacactctgtttgttccagccagttcattctcatggtcccctacaggtgctgcctttgaaggtctcccgcaagaagccaagattggcctcccatcgtgcaagggaaggcaagatgggccctggcaatgggtggaacatctttactttctgggccagcttcaagcagagctatgtcaatcaccatagaactcccaggattccctggttctttttggcaaagacatcaaaccctggggagatcaccgccttctcaataaggaattctttgccccactgggatttggggtctcccacattgaccctccacagggagtggtcgttgccatcgcggaagcaatgagctgctgtcaggacccattggtcggagatgagggccccccgggcagggtctcttggctcttgggcttaatagtgacatgccagggtgtcctctcctggtcagaggcgtttgctgacatgttccccaccccgcagatggtgtctgtgagcttggagacatccagcatatgttcaaagacctggtgcagagcctttgtgtcctgcagaatgaaggcatgcctctcaccatccttcttggaccctagctcattcagttctctccagtccacatccagcttgcccaccccgatggcatagatgtccagatagtcattcctcttctggttgatgttcaggatctctctgatatggtcaacagctgtcttgggagagccacccatatgggactttcccatctgtcaagaaggatgatggcatgtcggatttcctgcccagnccatcgtttccatgccgaggagtcgcatttggttgttcatcatgagatagacactgtttaaggccgcataggtgttagtcccagttccattttcatgatctttatagttggcattttccaggctgctgatcacctcagtcatatcccgggagttgtcgttcaggacagacatgaggactttgggctctgaggcaaaggtgataatggcaacgctcacattgatctcaaagctgaagatcctgtccaccatgagggaggcgctctccttgaagatgagaaagtcattttccgacacactctgcgaacagtccaggagcaggtagaggttcagatgaccagagcgctggatttggattttacggcccaggctttcctttgtcttctgggtgggattggtggccccaagcatgtgggagaaggaagtgcccagggcaggggccacgtcctcagggaagtcataagagtagggttggcggcagatgggctccgttccactccagaccccgttgccctggcactcccgctccgaagaccccgtgagcacaagattcgaggagcagcgatagcggaccttgtccccatgaccaaagcggaagcctgtccgcacttggcccaagtgaaatgcctgggttggggcagtggccagccccattatcacacacagctgtttctccatcccacatgccgttggggcgacactgacgcacaggcgagccccgcaattatgaagccatcctcacactcgaagctcacattgccacccacgggataggaccccagccgtggggtataaatgccattctcaaaggagacaggggctggacagcgcacaggtttgcagaccgccttagacagagaccgggtggctcctggggtctgccactgtccgctgctcttgcacagccgtgatgctggggatgggtacaggccctgggggcaggagtaggtgagaaggctcccaggagcccagccatggctgagggtgaaggtgccacccgagatattcacgttctgagggcaggagggagccgagtctgccagacctgggtacaggaacagcaggcaaaaaagaaccatcagtgggcccatggtgtcctccctaggggcggcgagaggtagagagccgcgggagggaaaaggtcatctgacttcccgaaaactagagctgggtcagcagctgcttcattgctgccagagaagaaaaaccagggagtggcaagggggatggtcttctgttagggaaataataagcagggattggggactgaactgaagggtgaaacctttgccctgtctccctgatgctaatatatctatagggtcaatagatctcccccacaggctttgtgtactgcctccacgctccacccacccatgcgtgcacatgtgcaccatacacgcatgctctcaaacacgcaggcaagcacatattggggagttccccagc

SEQ ID NO: 61558 - DNA, 1617 bp, Homo sapiens
ttagcagcaagtgctgtttcctggggcaggggcaagtacccctcaaccccttctccttcacccttagcggcaagtcccgctttcctagggggcaagaaccccccaatcgcttatttccgccgcaccccaacctcttatctctgtgccccaatcacttatttctgcaccctgacctcttatctctgtgccccaatcccttatttccctgccccaaccccttctctgctttcctggagggcaagaaccctccgccccttctccctgtctctactcttttctctgggcttgctccttcactatgggtaagcttccaccctccattcctccttcttctcccttagcctgtgttctcaaaaacttaaaacctcttcaactcacacctgacctaaaacctaagtgtcttattttcttctgcaacaccgcttggccccaatacaaactcgacaatgattccaaatagccagaaaacggcactttcgagttctccatcctacaagttctagataattcttgtcataaaatgggcaaatggtctgaggtgcctgacgtccaggcattcttttacacattggtccctccctagtctctgctcccaatgtgactcatcccaaatctttcttctttctctcctttctgttccttcggtctccaccccaagttccgagtcctctgaatccttcttttctatggactcatctgacctccccccttctccccaggctgctcctcgccaggctgagccaggtcccaattctcacttagcctctgctcccccaccctataatccttttatcacctcccctcctcacacctggtccagcttacagtttcattccgtgactagccctccccctcctgcccagcaatttactcttaaaaaggtggctggagctaaaggcatagtcaaggttagtgctcctttttctttatcccaaatcagatagcgtttaggctctttttcatcaaatataaaaatccagcccagttcatggctcatttggcagcaaccctgagatgctttacagccctagaccctaaaaggtcaaaaggccgtcttattctcaatatacattttattacccaatctgctcccgacattaaataaaactccaaaaattaaattccggccctcaaaccccacaacaggatttaattaacctcgccttcaaggtgtacaataatagaaaaaagtttcaattccttgcctccactgtgagacaaaccccagccacatcttccagcacacaagaacttccaaacggctggaccggcagcagccaggcggttcctccagaacctcctcccacaggagcttgctacacgtgccggaaatctgggcactgggcaagggaatgcccgcagcctgggattcctcctaagccacgtcccatctgtgtgggaccccactgaaaatctgactgttcaacttcacctgggcagccactcccagagccccgtggaacctctggcccaaggctctcttgacttgactccttcccaagatctttgggcttagcaagctgaagactgacacttgcccgatccgccttcggaagccccggagaccatcacggacgccgagctgccagtaactctcacagtggaagctatctggtc

SEQ ID NO: 61559 - DNA, 867 bp, Homo sapiens
gatttttcaagtactgctatttttaaaaaatccaccagaggcagaggctcctgcctgtaataccagcactttgggaggctgaggtgggaggatcgcttgaggccaggagtttgggaccagcctgggcggcgtggcgagagaccctgtctctacaaaaaataaaatttaaaaaattagctgggcgtggaggaggcatgcacctgtggtcttggatacttggggggctgaggcaggaggatcacttgggcccgggagatcgaggctgcagtgagccgttattgtgccactgtactccagcctggacagcagaacaagaccctgtctcaaaaaaaacaaaaacaaaacaaaaaaaatcctggcattttcatcacatttcatcattggaatagccttactgtatggatagtgcccataattttaaaataatttttaaataattattgcttaatcagataattgctaaagtaaaatttcccaaattttgctttcacatcgacatttatttgctatcactgagtttgtacccctaatccattaaaaagtagaaaacagtgaaatagggcatttgttctaagtaatgggagaagatgtaactggagaagatggaaaaaagttgtaagaaccactgctctgtataggttgtaaaagcagtattaaatatggtgcctgcccttgctaaaggtaacatgaagtaataggtagggtaaatgcactcagctgtgtgggttgcttgaaagatcttgtgagcctgttcactcttgcagttgaaagactggatcacttctttctggcgttgtttatttttatgcagactccagcctggacagcagagcaggaccctgtctcaaaaaaaacaaaaacaaaaca

SEQ ID NO: 61560 - DNA, 9502 bp, Homo sapiens
  misc_feature (1)...(9502): n = a,t,c or g
atgcagtggtcagtgataatggaatacttgaaagtaatcccctcactccaggaactagtgctcagctagcagaactaatagccctcacttgggcactagaattaggagaagaaaaaagggcaaatatatatacagactctaaatatgcttacctagtcctccatgcccatgcagcaatatggaaagaaagggaattcctaacttctgagagaacacctatcaaacatcaggaagccattaggaaattattattggctgtacagaaacctaaagaggtggcagtcttacactgccggggtcatcanaaaggaaaggaaagggaaaatacttttgcctgcaactatccaatggaaattacttaaaacccttcatcaaacctttcacttaggcatcgatagcacccatcaaatggccaaatcattatttactggaccaggccttttcaaaactatcaagcaaatattcagggcctgtgaattgtgccaaaaaaataatcccctgcctcatcgccaagctccttcaggaaaacaaaaaacaggccattaccctgaaaaaaactggcaactgattttacccacaagcccaaacctcagggatttcagtatctactagtctgggtaaatactttcacgggttgggcaaaggccttcccctgtaggacagaaaaggcccaagaggtaataaaggcactagttcatgaaataattcccagattcggacttccccgaggcttacagagtgacaatagccctgctttccaggccacagtaacccagggagtatcccaggcgttaggtatacgatatcacttacactgcgcctgaaggccacagtcctcagggaaggtcgagaaaatgaatgaaatactcaaaggacatctaaaaaagcaaacccaggaaacccacctcacatggcctgctctgttgcctatagccttaaaaagaatctgcaactttccccaaaaagcaggacttagcccatacgaaatgctgtatggaaggcccttcataaccaatgaccttgtgcttgacccaagacagccaacttagttgcagacatcacctccttagccaaatatcaacaagttcttaaaacattacaaggaacctatccctgagaagagggaaaagaactattccacccttgtgacatggtattagtcaagtcccttctctctaattccccatccctaggatacatcctgggggaagggacccttacccagttcatttttattttaccccaattgcgggtttaaagtggctggagtggtcttggatacatcacacttgagtcaaatcctggatactgccaaaggaacctgaaaatccaggagacaacgctagctattcctgtgaacctctagaggatttgcgcctgctcttcaaacaacaaccaggaggaaagtaactaaaatcataaatcccccatggccctcccttatcatatttttctctttactgttcttttaccctctttcactctcactgcaccccctccatgccgctgtatgaccagtagctccccttaccaagagtttctatggagaatgcagcgtcccggaaatattgatgccccatcgtataggagtctttctaagggaacccccaccttcactgcccacacccatatgccccgcaactgctatcactctgccactctttgcatgcatgcaaatactcattattggacaggaaaaatgattaatcctagttgtcctggaggacttggagtcactgtctgtcggacttacttcacccaaactggtatgtctgatgggggtggagttcaagatcaggcaagagaaaaacatgtaaaagaagcaatctcccaactgacccggggacatagcacccctagcccctacaaaggactagttctctcaaaactacatgaaaccctccgtacccatactcgcctggtaagcctatttaataccaccctcactgggctccatgaggtctcggcccaaaaccctactaactgttggatatgcctccccctgaacttcaggccatatgtttcaatccctgtacctgaacaatggaacaacttcagcacagaaataaacaccacttccgttttagtaggacctcttgtttccaatctggaaataacccatacctcaaacctcacctgtgtaaaatttagcaatactacatacacaaccaactcccaatgcatcaggtgggtaactcctcccacacaaatagtctgcctaccctcaggaatattttttgtctgtggtacctcagcctatcgttgtttgaatggctcttcagaatctatgtgcttcctctcattcttagtgccccctatgaccatctacactgaacaagatttatacagttatgtcaatatcctaaagcccccgcaacaaaagagtacccattcttccttttgttattggagcaggagtactaggcggactaggtactggcattggcggtattacaacctctactcagttctaccacaaactatctcaagaactaaatggtgacatggaacaggtcgcccgactcccctggtcaccttgcaagatcaacttaactccctagcagcagtagtccttcaaaatcgaagagctttagacttgctaaccgctgaaagagggggaacctgtttacttttaggggaagaatgctgttactatgttaatcaatccggaatcgtcactgagaaagttaaagaaattcgagatcgaatacaacgtagagcagaggagcttcgaaacactggaccctggggcctcctcagccaatggatgccctggattctccccttcttaggacctctagcagctataatattgctactcctctttggaccctgtatctttaacctccttgttaactttgtctcttccagaatcgaagctgtaaaactacaaatggagcccaagatgcagtccaagactaagatctaccgcagacccctggaccggcctgctagcccacgatctgatgttaatgacatcaaaggcacccctcctgaggaaatctcagctgcacaacctctactacgccccaattcagcaggaagcagttagagcggtcgtcggccaacctccccaacagcacttaggttttcctgttgagatgggggactgagagacaggactagctggatttcctaggctgactaagaatccctaagcctagctgggaaggtaaccacatccacctttaaacacggggcttgcaacttagctcacacccgaccaatcaggtagtaaagagagctcactaaaatgctaattaggcaaaaacaggaggtaaagaaatagccaatcatctattgcctgagagcacagcgggagggacaatgatcaggatataaacccaggcattccagccagcaacggctaccctctttgggtcccctccctttgtatgggagctctgtttccactctattaaatcttgcaactgcactctcttctggtccgtgtttgttacggattgagctgagcttttgcttattgtccaccattgttctttgccgctgttgcagacctgccactgacttccatccctctggatcctgcagggtgtccgctgtgctcctgatccagcgaggcgcccattgccgctcccgatcgggctaaaggcttgccattgttcctgcacggctaagtgcctgggtttgttctaattgagctgaacactaatcactgggttccatggttctcttctgtgacccacggcttctaatagaactataacacttaccacatggcccaagattccattccttggaatccgtgaggccaagaactccaggtcagagaatacgaggcttgccaccatcttggaagcggcctgctaccgtcttggaagtggttcaccaccatcttgggagctctgtgagcaaggaccccccggtaacattttggcaaccaacgacggacatccaaagtgatgggaaacgttccccgcaagacaaaaacgcccctaagacgtattctggagaattgggaccaatttgaccctcagacactaaggaaagaaacgacttatattcttctgcagtgccgcctggcactcctgagggaagtataaattataacaccatcttacagctagacttcttttgtagaaaaggcaaatggagtgaagtgccataagtacaaactttcttttcattaagagacaactcacaattattgtaaaaagtgtgatttatgcccctacagggaagccttcagagtctacctcccctatccccagcatccccgactccttccccaactaataaggaccccccttcaacccaaatggtccaaaaggagatagacaaaagggtaaacagtgaaccaaagagtgccaatattccccaattatgacccctcccaagcagtgggaggaagagaattcggcccagccagagtgcatgtgcctttttctctcccagacttaaagcaaataaaaacagacttaggtaaattctcagataaccctgatggctatattggtgttttacaagggttaggacaattctttgatctgacatggagagatatatatgtcactgctaaatcagacactaaccccaaatgagagaagtgccaccataactgcagcctgagagtttggcgatctctggtatctcagtcaggtcaatggataggatgacaacagaaggaaagagatgattccccacaggccagcaggcagttcccagtctagaccctcattggggacacagaaatcagtaacatgggagattggtgctgcagacatttgctaacttgtgtgctacaaggactaaggaaaactacgaagaaaatctacgaattactcaatgatgtccaccataacacaggggaagggaagaaaatcctactgcctttctggagagactaagggaggcattgaggaagcgtgcctctctgtcacctgactcttctgaaggccaactaatcttaaagcgtaagtttatcactcagtcagctgcagacattagaaaaaacttcaaaagtctgccgtaggcccggagcaaaacttagaaaccctattgaacttggcaacctcggttttttataatagagatcaggaggagcaggcggaacaggacaaacgggattaaaaaaaaggccaccgctttagtcatgaccctcaggcaagtggactttggaggctctggaaaagggaaaagctgggcaaattgaatgcctaatagggcttgcttccagtgcggtctacaaggacactttaaaaaagattgtccaagtagaagtaagccgccccttcgtccatgccccttatttcaagggaatcactggaaggcccactgccccaggggacaaaggtcttttgagtcagaagccactaaccagatgatccagcagcaggactgagggtgcctggggcaagcgccatcccatgccatcaccctcacagagccctgggtatgcttgaccattgagggccaggaaggttgtctcctggacactggtgcggtcttcttagtcttactcttctgtcccggacaactgtcctccagatctgtcactattctgagggggtcctaagacgggcagtcactagatactttttcccagccactaagttatgaactggggagctttattcttttcacatgcttttctaattatgcttgaaagccccactaccttgttagggagagacattctagcaaaagcaggggccattatacacctgaacataggagaaggaacacccgtttgttgtcccctgcttgaggaaggaattaatcctgaagtctgggcaacagaaggacaatatggacgagccaaagaatgcccgtcctgttcaagttaaactaaaggattccacctcctttccctaccaaaggcagtaccccctcagacccaaggcccaacaaagggcttccaaaagattgttaaggacttaaaagcccaaggcttagtaaaaccatgcataactccctgcagtaattccgtagtggattgaggaggcacagaaacccagtggacagtggagggttagtgcaagatctcaggattatcaatggaggccgttgtccttttatacccagctgtacctagcccttatactgtgctttcccaaataccagaggaagcagagtggtttacactcctggaccttaaggatgccttcttctgcatccctgtacatcctgactctcaattcttgtttgcctttgaagatacttcaaacccaacatctcaactcacctggactgttttaccccaagggttcagggatagcccccatctatttggccaggcattagcccaagacttgagccaatcctcatacctggacacttgtccttcggtaggtggatgatttacttttggccgcccattcagaaaccttgtgccatcaagccacccaagcgctcttcaatttcctcgctacctgtggctacatggtttccaaaccaaaggctcaactctgctcacagcaggttacttagggctaaaattatccaaaggcaccagggccctcagtgaggaacacatccagcctatactggcttatcctcatcccaaaaccctaaagcaactaaggggattccttggcgtaataggtttctgccgaaaatggattcccaggtttggcgaaatagccaggtcattaaatacactaattaaggaaactcagaaagccaatacccatttagtaagatggacaactgaagtagaagtggctttccaggccctaacccaagccccagtgttaagtttgccaacagggcaagacttttcttcatatgtcacagaaaaaacaggaatagctctaggagtccttacacagatccgagggatgagcttgcaacctgtggcgtacctgactaaggaaattgatgtagtggcaaagggttgacctcattgtttacgggtagtggtggcagtagcagtcttagtatctgaagcagttaaaataatacagggaagagatcttactgtgtggacatctcatgatgtgaatggcatactcactgctaaaggagacttgtggctgtcagacaactgtttacttaaatgtcaggctctattacttgaagggccagtgctgcgactgtgcacttgtgcaactcttaacccagccacatttcttccagacaatgaagaaaagataaaacataactgtcaacaagtaatttctcaaacctatgccactcgaggggaccttttagaggttcctttgactgatcccgacctcaacttgtatactgatggaagttcctttgtagaaaaaggacttcgaaaagtggggtatgcagtggtcagtgataatggaatacttgaaagtaatcccctcactccaggaactagtgctcagctagcagaactaatagccctcacttgggcactagaattaggagaagaaaaaagggcaaatataatacagactctaaatatgcttacctagtcctccatgcccatgcagcaatatggaaagaaagggaattcctaacttctgagagaacacctatcaaacatcaggaagccattaggaaattattattggctgtacagaaacctagagaggtggcagtcttacactgccggggtcatcacaaaggaaaggaaagggaaatacaagagaactgccaagcatatattgaagccaaaagagctgcaaggcaggaccctccattagaaatgcttattaaacttcccttagtatagggtaatcccttccgggaaaccaagccccagtactcagcaggagaaacagaatggggaacctcacgaggcagttttctcccctcgggacggttagccactgaagaagggaaaatacttttgcctgcaactatccaatggaaattacttaaaacccttcatcaaacctttcacttaggcatcgatagcacccatcagatggccaaatcattatttactggaccaggccttttcaaaactatcaagcagatagtcagggcctgtgaagtgtgccagagaaataatcccctgccttatcgccaagctccttcaggagaacaaagaacaggccattaccctggagaagactggcaactgattttacccacaagcccaaacctcagggatttcagtatctactagtctgggtagatactttcacgggttgggcagaggccttcccctgtaggacagaaaaggcccaagaggtaataaaggcactagttcatgaaataattcccagattcggacttccccgaggcttacagagtgacaatagccctgctttccaggccacagtaacccagggagtatcccaggcgttaggtatacgatatcacttacactgcgcctgaaggccacagtcctcagggaaggtcgagaaaatgaatgaaacactcaaaggacatctaaaaaagcaaacccaggaaacccacctcacatggcctgttctgttgcctatagccttaaaaagaatctgcaactttccccaaaaagcaggacttagcccatacgaaatgctgtatggaaggcccttcataaccaatgaccttgtgcttgacccaagacagccaacttagttgcagacatcacctccttagccaaatatcaacaagttcttaaaacattacaaggaacctatccctgagaagaggaaaagaatattccacccaagtgacatggtattagtcaagtcccttccctctaattccccatccctagatacatcctgggaaggaccctacccagtcattttatctaccccaactgcggttaaagtggctggagtggagtcttggatacatcacacttgagtcaaatcctggatactgccaaaggaacctgaaaatccaggagacaacgctagctattcctgtgaacctctagaggatttgcgcctgctcttcaaacaacaaccaggaggaaaaatcgaagctgtaaaactacaaatggagcccaagatgcagtccaagactaagatctaccgcagacctctggaccagcctgctagcccacatgctccgatgttaatgacatcgaaggcacccgtctcgaggaaatctcaactgcacaacccctactacaccccaattcagcaggaagcagttagagcggtcgtcagccaacctccccagcagcacttgggttttcctgttgagagcggggactgaaagacaggactagctggatttcctaggctgactaagaatccctaagcctagctgggaaggtgactgcatccacctttaaacacagggcttgcaacttagctcacacccgaccaatcaggtagtaaagagagctcactaaaatgctaattaggcaaaaacaggaggtaaagaaatagccaatcatctattgtctgagagcacagcgggagggacaatgaccgggatttaaacccaggcattcgagctggcaacggctaccctctctgggtcccctccctttgtatgggagctctgttttcactctattaaatcttgcaactgcacactcttctggtccgtgtttgttacggcttgagctgagctttcgctcactgtccaccactgctgtttgctgctgtcgcaaacc

SEQ ID NO: 61561 - DNA, 1682 bp, Homo sapiens
tccttccgccatgcttggcacgaggcgcagaaggctgcaggccctataggggacgacgggctggggacgccctgagcttcctggctgtgtggcaggtgctggggaagctctctgggccatagggacctggctcccctctgagaggcccgcctgccctgggacacccagggctgtgctggtggcctgaggctgggaacttgggttcctgggctctgctggcgcctgggctttgtgggggccgaaggtggttgccccgccgggcagggggctgtgtgggccctcgtggggccaccttcctgtcagtgcccgagggacggtgggacagttgcccctgcgccaagggagcccactgccatcccccgtgggctggcgctgcagtcgcgcaccctgtgttgcctgctgacttgcttatgtctgtttggaagctgcttctgtttggccacaggcctgtgttcctgggttgatggccacagagctgacacttggggtttgagttccagacttgcagaccctgggatccgcttactcctccgcgccacggctgctgtgcttccagaggtggcgtgatgcctcccggggccacggtggggtgaaggatggcgagccggacataccattgttggatgtattttttttaaaacagcaataattagccattttaaaggagggatgtacctgtgtgtgtgcatgtgcacgtgtttgagcgtgtgtgtgtgtgtgcaagtgggttcttggatatgtgtagtgtgagcatgtgtgcatgtgtgagcctgtgcacgtgcatgttgtaggtgcataagcatgtacacgcgtgagcatgcatgtgcgtgtacacgtgtataggtgtacatgtgcatgagttgtgtacatgcgtgagcacgtgtatagatgtacgtgtgtgtgcgcatgtgtgcgtgtacatgtgtttgtgtcttgggtatgcataagcatgcacgtgtgtatgaatgtgcgtgtgtatgcatgagcacgtatgcatgtgtgatgcgcatgttcttgtgtacttctctgagggggcacatatgtatgagtgtatgagtgcatacatatgcatatggtgtacgtgtgtgtactttgtgtgtgggcatgtatgcgtatgagtacttgtgtgtggctggtgtatgggtgagcatgcacatgtgtatggatgcatatgtgagctgtacatgtagagtgtacatgtgtgttgcatgagcatgcatgcgtgcgagtgcctgtgtgtgtacttgcatatatgtggctgtgcaggtacccggcggtggtgggctggcagtgcccggggaagcaggtcctgctcacggcttccctgctgggccccaggccccgggctgagcctccctggcccctcttgcccctcagtggagcagggcctgggtggagggcctgggcagctccagggcaggtccggggaggccaggcttggggagcacagggggtggggttcacctgctgctgtttgttcccgaaactgtactgtgagcccacggcggggggcagattgttttgaggccccagatgtgccaaaacagcccccagggtgggggcgagcgagttttgaggagaggggctgcgggggccgggggtgggtgtgtgcccctcccctgaatggcccccaatgctgctgtttttcaataaaaccagagttgaaggcaaaaaaaaaaaaa

SEQ ID NO: 61562 - DNA, 1145 bp, Homo sapiens
aactgttccctactgataccctaggcagtgtggtggaattcattgcttaatccccaggagcccagttcctgtgggcagcgcctgacatgcctgatcctctcttttctgcagttcaagggaaagacgagatcttgcacaaggcactctgcttctgcccttggctggggaagggtggcatggagcctctccggctgctcatcttactctttgtcacagagctgtccggagcccacaacaccacagtgttccagggcgtggcgggccagtccctgcaggtgtcttgcccctatgactccatgaagcactgggggaggcgcaaggcctggtgccgccagctgggagagaagggcccatgccagcgtgtggtcagcacgcacaacttgtggctgctgtccttcctgaggaggtggaatgggagcacagccatcacagacgataccctgggtggcactctcaccattacgctgcggaatctacaaccccatgatgcgggtctctaccagtgccagagcctccatggcagtgaggctgacaccctcaggaaggtcctggtggaggtgctggcagaccccctggatcaccgggatgctggagatctctggttccccggggagtctgagagcttcgaggatgcccatgtggagcacagcatctccaggagcctcttggaaggagaaatccccttcccacccacttccatccttctcctcctggcctgcatctttctcatcaagattctagcagccagcgccctctgggctgcagcctggcatggacagaagccagggacacatccacccagtgaactggactgtggccatgacccagggtatcagctccaaactctgccagggctgagagacacgtgaaggaagatgatgggaggaaaagcccaggagaagtcccaccagggaccagcccagcctgcatacttgccacttggccaccaggactccttgttctgctctggcaagagactactctgcctgaacacttgcttctcctgggaccctgggaagcagggacttggtttgaggggagttggggaggttgtaagaacaccttgacaatttcttgaatattttggacattttaaacacttacaaataaatccaagactgtcatatttagctggaaaaaaaaaa

SEQ ID NO: 61563 - DNA, 1242 bp, Homo sapiens
ttttttttttttctatttaatagtgtctgacatttattaaaaataaggaaaaaacctttgtacaggtagtgtattagagcagggaagggagcagggcttactgtgttgaacaaaaggcacccatcagagagacagctgcaaattcagaagaaaacaggattctaggcaaaactaactggtccacaggagaaaatgagagattcgatttggttgccaggcacacttaagccctggcagctatgtggcaggaacacaagaggtctctggggatggggaggaaatgggtctcgctgaaggtgacaggctccttgggggacggccagctgtctggatcactgtccaggggctgtgtccagctcggatacctccgaggtgagtccacatcactaggagccacagtctgttggtgagatgcggtggatggcgatggcagtggtagcgtaggtctgtgggcagaatgatgtagttggctggcagtctggaggagtggaggtgggttggcagcagcggctgtgggtggtctgtccagtatgtaacaggagcccagcttgcacctgaagtgcaggacagcgtccaaatgtgcatggaggggctgggctggcaaaagagggcggaggcagcgcgctctagagtgcggcccaggagctgcagcaggagcctggagcgctattcctggaacaaaggcaagcactacgcgggaggggacaggagcgcaggggacatcgcggcggctcgagggggagggaggcgcggagggagggcgcctgtggagaccctagcggtggccactggcacagcgaactcttcccagagcacccgcccccaggcccaagggtctcccggcctagaagtcctcgtcctcctcccatccaaagacccgcttcatctcggccaggaagccccggtaatcattgagcagggggctctccttcctgatgtaggggatcacccactgcagggctggccccgtgaggcgggtgatgaggaacgtcaccttcagggcgtcgttggagaacgtgttctcgtccacgaacatgtaggagctcgtctgcacgatgaactccgggagtcggtcggtatctccgtcaaacgtctcgggaaagggaatcgggttcctccagcgacgcgccgcgggccggaggggcccggccaggagggccttcatcagctgcacccgaccgtccatcgtgccgcgcgcgctccgaagagttacgctgggttgcgtgggggtcagcgctaagg

SEQ ID NO: 61564 - DNA, 922 bp, Homo sapiens
  misc_feature (1)...(922): n = a,t,c or g
aattgagaccctttgcatgtgatggcattcacaaggcaaattacttgctgaaagaatgccaagggtcggagcagttggagctctatatgatggtgccagctgtgggcagcatggtgactaggttggaagtggcatgtggagttgtcaggcaccacctgccatttaacttctcatttttctagtttgaaaatggtatgagcttcgttcttcctttcagatccatgagacaatagaaaccatcaaccagctgaagactcagcgggagttcatgctgagctttgccagagaccctcagggtttcatcaatgactggcttcagtcccagtgcagggacctcaaggtaaagaacctangagaggtctgaagggacttangtcagtgaggtgcacagctgctttattcatgtagcagctggtaggagacccagaggaaggagtgaggggccagatttttctttagcatgttccagggtccattttgcaattaagcagggaaatgggggcagagccatcaagtgttgatttagtgcttactttgtctgtcactgtgcttcatcttgtcagggatacagagtggaagacctgatctctgctttcaaagcagcctacattctgtctgaagaaactaggctagtatagccgggcatggtggctcacacctgtaatcccagcactttgggaggccgaggccgacggatcgcttgaggtcaggagtttgagaccagcctggccaacatggcgaaaccccgtctccactaaaaatacaaaaacttagctgggcgtggtggtgcacccttgtaatcccagctactggggaggctgaggcaggagaatggcttcattgaacccagggaggcagaggttgcagtgagccgagatccgtgttactgcgctccagcctggggtgacaagcaagacttcag

SEQ ID NO: 61565 - DNA, 3556 bp, Homo sapiens
cgacgatttcgtgtgggaccaacggacggacggacggacgcgcgcacctaccgaggcgcgggcgctgcagaggctcccagcccaagcctgagcctgagcccgccccgaggtccccgccccgcccgcctggctctctcgccgcggagccgccaagatgggggacaagaaagatgacaaggactcacccaagaagaacaagggcaaggagcgccgggacctggatgacctcaagaaggaggtggctatgacagagcacaagatgtcagtggaagaggtctgccggaaatacaacacagactgtgtgcagggtttgacccacagcaaagcccaggagatcctggcccgggatgggcctaacgcactcacgccaccgcctaccaccccagagtgggtcaagttttgccgacagctcttcgggggcttctccatcctgctgtggatcggggctatcctctgcttcctggcctacggtatccaggcgggcaccgaggacgacccctctggtgacaacctgtacctgggcatcgtgctggcggccgtggtgatcatcactggctgcttctcctactaccaggaggccaagagctccaagatcatggagtccttcaagaacatggtgccccagcaagccctggtgatccgggaaggtgagaagatgcaggtgaacgctgaggaggtggtggtcggggacctggtggagatcaagggtggagaccgagtgccagctgacctgcggatcatctcagcccacggctgcaaggtggacaactcctccctgactggcgaatccgagccccagactcgctctcccgactgcactcacgagaaaccctttgaagactcggaacatcaccttcttttccaacaactttgtagaaggcacggctcggggcgtggtggtggccacgggcgaccgcactgtcatgggccgtatcgccaccctggcatcagggctggaggtgggcaagacgcccatcgccatcgagattgagcacttcatccagctcatcaccggcgtggctgtcttcctgggtgtctccttcttcatcctctccctcattctcggatacacctggcttgaggctgtcatcttcctcatcggcatcatcgtggccaatgtcccagagggtctgctggccactgtcactgtgtgtctgacgctgaccgccaagcgcatggcccggaagaactgcctggtgaagaacctggaggctgtagaaaccctgggctccacgtccaccatctgctcagataagacagggaccctcactcagaaccgcatgacagtcgcccacatgtggtttgacaaccagatccacgaggctgacaccactgaggaccagtcagggacctcatttgacaagagttcgcacacctgggtggccctgttttgacatcgctggggttttgcaatcgccctgtcttcaagggtggtcaggacaacatccctgtgctcaagagggatgtggctggggatgcgtctgagtctgccctgctcaagtgcatcgagctgtcctctggctccgtgaagctgatgcgtgaacgcaacaagaaagtggctgagattcccttcaattccaccaacaaataccagctctccatccatgagaccgaggaccccaacgacaaccgatacctgctggtgatgaagggtgcccccgagcgcatcctggaccgctgctccaccatcctgctacagggcaaggagcagcctctggacgaggaaatgaaggaggccttccagaatgcctaccttgagctcggtggcctgggcgagcgcgtgcttggtttctgccattattacctgcccgaggagcagttccccaagggctttgccttcgactgtgatgacgtgaacttcaccacggacaacctctgctttgtgggcctcatgtccatgatcggcccaccccgggcagccgtccctgacgcggtgggcaagtgtcgcagcgcaggcatcaaggtcatcatggtcaccggcgatcaccccatcacggccaaggccattgccaagggtgtgggcatcatctttgagggcaacgagactgtggaggacatcgccgcccggctcaacattcccgtcagccaggttaacccccgggatgccaaggcctgcgtgatccacggcaccgacctcaaggacttcacctccgagcaaatcgacgagatcctgcagaatcacaccgagatcgtcttcgcccgcacatccccccagcagaagctcatcattgtggagggctgtcagagacagggtgcaattgtggctgtgaccggggatggtgtgaacgactcccccgctctgaagaaggccgacattggggtggccatgggcatcgctggctctgacgtctccaagcaggcagctgacatgatcctgctggacgacaactttgcctccatcgtcacaggggtggaggagggccgcctgatcttcgacaacctaaagaagtccattgcctacaccctgaccagcaatatcccggagatcacgcccttcctgctgttcatcatggccaacatcccgctgcccctgggcaccatcaccatcctctgcatcgatctgggcactgacatggtccctgccatctcactggcgtacgaggctgccgaaagcgacatcatgaagagacagcccaggaacccgcggacggacaaattggtcaatgagagactcatcagcatggcctacgggcagattggaatgatccaggctctcggtggcttcttctcttactttgtgatcctggcagaaaatggcttcttgcccggcaacctggtgggcatccggctgaactgggatgaccgcaccgtcaatgacctggaagacagttacgggcagcagtggacatacgagcagaggaaggtggtggagttcacctgccacacggccttctttgtgagcatcgttgtcgtccagtgggccgatctgatcatctgcaagacccggaggaactcggtcttccagcagggcatgaagaacaagatcctgatcttcgggctgtttgaggagacggccctggctgccttcctgtcctactgccccggcatggacgtggccctgcgcatgtaccctctcaagcccagctggtggttctgtgccttcccctacagtttcctcatcttcgtctacgacgaaatccgcaaactcatcctgcgcaggaacccagggggttgggtggagaaggaaacctactactgacctcagccccaccacatcgcccatctcttccccgtcccccaggcccaggaccgcccctgtcagtccccccaattttgtattctggggggaggagccctctcttcctgtggccccaccttggcccccaccccctccactatctcctgccgcccccactctggctggcttctctcccctgccccaaacctctctcctctctcttttctgtgtcagtttctctccctctcctcacccctctatccattcctcccgccccagccacctccctgggctcttttttactccccttcagccccccggctgatgccatctctggttctggacaattatcaaatatatcaggggggaaaaaaaaaa

SEQ ID NO: 61566 - DNA, 2242 bp, Homo sapiens
tgctgccagggcgccgggcccggggaggccggggtctcgggtggccgccggcccaggcgctggacggcagcaggatggggaaggcgaaggtccccgcctccaagcgcgccccgagcagccccgtggctaagccgggtcctgtcaagacgctcactcggaagaaaaacaagaagaaaaaaaggttttggaaaagcaaggcgcgggaagtaagcaagaagccagcaagcggccccggtgctgtggtgcgacctccaaaggcaccagaagacttttctcaaaactggaaggcgctgcaagagtggctgctgaaacaaaaatctcaggccccagaaaagcctcttgtcatctctcagatgggttccaaaaagaagcccaaaattatccagcaaaacaaaaaagagacctcgcctcaagtgaagggagaggagatgccggcaggaaaagaccaggaggccagcaggggctctgttccttcaggttccaagatggacaggagggcgccagtacctcgcaccaaggccagtggaacagagcacaataagaaaggaaccaaggaaaggacaaatggtgatattgttccagaacgaggggacatcgagcataagaagcggaaagctaaggaggcagccccagccccacccaccgaggaagacatctggtttgacgacgtggacccagcggatatcgaagctgccataggtccagaggcggccaagatagcgaggaaacagttgggtcagagcgagggcagcgtcagcctcagcctcgtgaaagagcaggccttcggcggcctgacaagagccttagccttggactgtgagatggtgggcgtgggccctaagggggaggagagcatggccgcccgtgtgtccatcgtgaaccagtatgggaagtgcgtttatgacaagtacgtcaaaccaaccgagcccgtgacggactataggacagcggtcagtgggattcggcctgagaacctcaagcagggagaagagcttgaagttgttcagaaggaagtggcagagatgctgaagggcagaattctagtggggcacgctctgcataatgacctaaaggtactatttcttgatcatccaaaaaagaagattcgggacacacagaaatataaacctttcaagagtcaagtaaagagtggaaggccgtctctgagactactttcagagaagatccttgggctccaggtccagcaggcggagcactgttcaattcaggatgcccaggcagcaatgaggctgtacgtcatggtgaagaaggagtgggagagcatggcccgagacaggcgccccctgctgactgctccagaccactgcagtgacgacgcctagcagtcctgccctgctgctgctgccgccccgctacagaggcaatgtgaccagtcacagggacagatcacatctccccagagtggcaactctggtgaaaccttttcagaatcatggcagaggggcgtggcgtggtgctactgagaaggtcctccttcctcttgactttgtggtctgaaacctggtcttactgtccatgtgtgtttgggcccggatggtcagggtggggagcagggacggccatgggcacgcctggccacgctttaccgactgctgaccccctgggccaggtgaggttggggcctgtgggccgccagtccatacggtgctgtcactgcccatcttcggtgacaccctggggtgaggtgctcagcaccttcctctcgaggagccacattttcctcctttgtgttaggggacataacaagctctgctgggcttgagggacccagaccaggtgtctgcagtcagctcctgagacacagctggccggcacaacaggtgttacatcaggggtttcctgtggccgtttgaactttgagcatttatctaaattaaattggcccagggttggctggtgggtcacccagcagaggcttctccccatagcacgaggatgtgttgcctgggcacggtgactgcggttattcctggaggtcggcagacatgccaaccttgggctatttgagctggagaagctatgtgatgctagccggtggctttctgggctaggccccagtttgaggctcccctgggaactagagccaggaacagccagtggcactgacaaggggacggagtccaaggcgttattgggccacctgacagctggacagaaaaggggcagacacaccgaggatgcgatttaaaataaatgcagatgtttacttggaaaaaaaaaa

SEQ ID NO: 61567 - DNA, 2166 bp, Homo sapiens
  misc_feature (1)...(2166): n = a,t,c or g
ttttttttttttattttaacaaatccaaagtttaattattaaggattacaaatatttttagcagtgtagttaggcaatccaagcctggacttccacttcattcctactaaactacttgcagagctgaggaggcaggagactagagtacagagagcattttagttctatcacaaaggtctagaactgtctctacagtcacaggaagaaacaggtatggcaccgtggccagaagggggtaggtattcacagagagtgggtatcaaggtgtcaaactttgtcttctgatagttttccagagattcctgtagagaagggagcagggagagcctactatccgaaaccattccctgaaccctctgaattctgaagcatgtggatttctcagtcttgttctacccatcccctttcccagctttctgctccttcccactcacctttccttccccctggccattttcttcctcatcagagtctaaaaccaagtcccctatggtaatgacggagctgcacagagacggaggacacactgtaggagggaaaccagaatcaaactactacttctagatgaacacaggctcttgagagtccccaagagaggaggctgttgatccaatcctgactcagactacctacctggcttcctggccctaggaggtaataatgatagtctcagggggtccatgtagcaatccaagcaattcctgaggtgagagcaagcaaagaggataggatgaagggaaggcaggcaaagaatgtgctcctagtaagaagcaactctgttccactcactccttttgctctgtggcaggcaagtcaactgggttctccttcagagcccttccccccagggtctggcatggactcttagacttcccagtggaggctgctcttgtgcccatggctaggtctgctgtgtatatcgcatgttcttccttgctctcaggcttagatatgacctgggttggtgagccgagattcctaaagggaaacagcatgactgtggggcgctccttatggcctcccctagtggaggcccattgggactgaactcttcgtcggcctagaggggccagattgaagtgtcggccagctagaggttctgggtgcgtccttgaagatggtccctgaggaagatgtgtgccaggcttggcttttggcaggggattgtggagtgctagtctttgttgctgaggaggattctgttccatgggctcagccaggttcactgagtcagtaacagagcactctggaagcagccaccccatgtccacaccatattgtctccaggcaagagaagaggtgatagagactccaggctgcatccaactcagcacatcctgaagctgctgtgcctgcggtgtaggcagtgctttctccagctgacacaagtactcaaaaagcagcttttccatggcagccagaaagggttccccatactcttgttcaagttcctgcagcttcgaggccaaatccacaggagcctctgacagctgcttcacctgctggtaaaaagtttcctgtgcctccaaaatcttcctcagatcctgctttgtagccttgggatcccgcactataggtccagattctggaaagtggtgattcagggctttcaggacttgggcccaaggccggccctgcaggatcagctccaccaccaccttggcctttaggcccatacaaaggcgttcgtggtgccggtagcgaaccaagccaggggcaacagcgcgcagagatcgcagaaactccagtactcgcggaaaatgttccacgcagcgtccgcgcacaacctgccagctagccgcggcggcgaagcgtagagctgcgggacccgccaccaggggcgtagccatggtcggcgggctccgcccggaggcggtccctccgggttcctcacccggatgggtgaggctttccgatcactcctaggggcggggcttctggcaactccctgtcgctccggtctgtcggctctgggtacctcgcgatctgactcggctcccttccatcggcccccagaattctgggggagggggtcttctggctcgggctggaggagcctgagtggagaagctgaccgtctccagtggcactgggtcgctcagctttaaacgtcgccgctgtctcgagcccgagggtgcctcacttccnnnncgctactagcttccc

SEQ ID NO: 61568 - DNA, 3137 bp, Homo sapiens
  misc_feature (1)...(3137): n = a,t,c or g
ttttttttttttagattttccaactacacagtttattaagtaaagtatctcaacaatatctcagagcagtaaaaaccaaggcatccccaaacactgcatgcgtgacttagaccagcaaagaagtcctcaaactttgcaccaagtcccaacattggccagcagggggcaagtggtgaagtcttccggaacccaagtgccttggcgctgactggcccccattcgatgagtgagcttggatgacagggccggcttggagataggacaatcggcttcacagggtccttttcatgtccgatccccttaagcattcccgagggagccacaaggaacttgggggcggtccgtgcaaagcgtcggcattgaacagggggtctgttttggagtctgaatggctctggctggcctcttgggtggccttcaagccaaactgggaaacgacttgtctataacccctggggaactcgaagtgttccatgctcactcgggaagcactgataaccttccccataggggaaacggactcacaaacacaggactccgtcagtagtttctgcagagaaacttaaaatcatgaaaagggtcatcaatcaacagatctcagaagtcactgtgcagggactactgagggccgcgagaggaagtgcaaacctcagctgaaaagcaactcagggtggctgagtgagccctcacttcccggaccacccgcacgtgcagccaacacctcccaactacttgggccaagtcggctcttcgcctccaagtggaggctgctgggtctcttcggtctcctcctcgccccaagtcctgtttctccctctgggcgtcggaaccaacctctgcggtgcggatcattttcctttcgnccatggggcggcgggccaatgagagcctcaatgtccctcaatagtttatcacttccttttccagaagggcgtttgccagcgcctgcaacttgtcccaggttgtcctgcagcaccttctcggtgtgtctgtaggccttggccaccagcagtcttgcttcatggtccatcatctgctgcaggccttggctgaaggggcgccgcccgatgcccatgaggccctcctgcgcctcagggaaggagatgggcccgatgccaggtgccatcccaaactgcttcaccatggagtaggcgatgcgggtgaccttcctcaggtcgtcctgtgccccagaagtgacctcgttgaaggacagtgcttccgaggcccgtcctcccaaggccatgcacatccgctcaaacagctgctccttggtgaagaggtgctggtctctggggagcatctgagcaaagcccagggcggcgtttgtccgaggggttatggagaccttcatcacggcctccgtgtgctccagcatccagcccaccaaggcgtggcccgactcatgaaacgcaaccactttctgttcttccttggacaggatcttgctctttttggcagtccctgcgaggacgcgctccacggcgtactcgaagttgagagtgtgcacgagaagtgtgtccctaccgcgccgcgtgcagcacagcctcttgccagatgttggcgatgtcagccccactgaatcctggtgtcagctctgccagacgctgggagtaaaaggtgctggactgggtcagcttcaggctcttcaggtgctgctcaaaaatctcccgcctctcctgcagcgtggggagatcaatgaagacgtgccggtccagtcggcctggcctcatcagagcaccgtccaaaatgtcagctcggttcgtggacgccaggacgatgacatggtctgtggtacccattccatccatttaaaccagaagctggttgagcgtctgctcctcctccgtgttggagaagccggacatggtggtggagcgcttcttgcccaccgcgtcgatctcatcgatgtagacgatgcagggggcccgggctcgggcttccttaaagaggctccgcacacgggcagcgccgaggcctccaatgacctccacgaactctgggccggccatcgccaggaagggcacctgagcctccgtggccaccgccttggccagcagcgtcttcccacagccgggggggccgagcagcagtgcgccctttgggaccttggcgccaagctggaggaagcgttctgggctcttcagataatccacaaactcgcggacttccagtttggcttcgtgcattcctgccacgtctttgaagctgactcctttccccatcttcccatccacaatggtgaaacgagccattttaagctgattaaaagcactgaatccaccttcccttccagtcatcccggccagacggaaaacataccacaggatggccaggcccactgccgtcatccccacagagtacagggcatttccaaagaatcctgttcgcttgtaggaaactgggatcctgtccttggcctcgatattcagctcatcttcagctgctcgaagcttctcttcaaacttgtcaatatttgcaacctgcattcggtacatcaaggctagccgaggccgcccaaacaccacggctccagggtgcaggtagacttccaccacgtcgctctcaggcaccacctggacgcgctgcacctcgcccttggccagcatctcgtggacaaagtcgttccaggaaatgctgcctccgctggtgctgagagcattcaggaggctcatgacaaccgcgatgaccagcaaggtgcgcagccgctctcggtacatctggtcgtcccgctcacggcgtctcctctcctcttcgtcctcttcaggcgccttccccttcgacttatccttctccttattcttctgcttcaaccttgaggtgttaaaatagaaagtaccacctaaaagttgccagagtctgactggattctgaactaaatgttgtttcaacaacaatccgttgatcccttcaaaggtaggggttagcagtctcaattgtaagctctgcagagctcggcctccagcctcggcgaggtcccccggaggcctgctggccatgtacggccgccccctcccgggcctggcggggaaccctggactccaggccgggcctgggccccacagcggccgaggacccgggcctggaccccggcggagggcacggagcagcagcagcagcacggccatgttggcctgaaa

SEQ ID NO: 61569 - DNA, 824 bp, Homo sapiens
ggggatggggcctctatacttgcaagggagaggaacagggaccaggctgccccacggtccctgaagggtccaaggaggggccctccccatggccctggagagtgggcctgggtggtacctgctccaggcagggaaactgggggctcgcccttctcctgtgaggggagccaggcacacagggcccattggtgtttgggatgtggacagaggggcagggggctgggagaaggctaagccgaggggtcctgtttgtgcctccctggcattttttgcagacaagggcttgggatggaccctcagccccatggtacgccctgcccagtttccagatgccctgtccacttaccctaggtagccccccaccccatcagtgccgagtccttgtccctacctccagcttcctccagcctcaaaccgcctctggatctagctgtccttctccgagtggcacgcctgccccagggatgccccctttccctcccccccatgcccagagccccgcctgcctcagcgggtcaggccttcagaacactgccacccacccagttttataatcccgctccctctccaggcaaccccacccaccagcctaggcctgctcctccacccttcccgggaggcagccccgggatgctgagagttggtggaggggccaggctggacgcttcctgtgggagtcccctccagacctggctggcccctggcagccacagaaaccacgatggcaaaaaatctcattggttctcaaggactaacctgtgggggaaagcaatagagacactctttttctctctttttttaaagatttatttcttgaaataata

SEQ ID NO: 61570 - DNA, 1212 bp, Homo sapiens
  misc_feature (1)...(1212): n = a,t,c or g
ggccataggaaaaggcccggcgtccacgcctacctacagccctgcacccacccagccggcccctagaatcgcgtcagccccagagcccagggtcaccctggagggaccttctgccaccgccccagcctcatctccaggcttggctaagccccagatgcccccaggtccctgcagccctggccctctggcccagttgcagagccgccagcgcgactacaagctggctgccctccacgccaagcagcagggagataccactgctgccgctagacacttccgcgtggctaagagctttgatgctgtcttggaggccctgagccggggtgagcccgtggacctctcctgcctgccccctccacccgaccagctgcccccagacccaccgtcaccaccgtcgcagcctccgacccccgctacggcgccctccacaacagaggtgcccccacccccgaggaccctgctggaggcgctggagcagcggatggagcggtaccaggtggccgcagcccaggccaagagcaagggggaccagcggaaagctcgaatgcacgagcgcatcgtcaagcaataccaagatgccatccgagcccacaaggctggccgagccgtggatgtcgctgaattgcccgtgcccccaggcttccccccaatccagggcctggaggccaccaagcccacccagcagagtctggtgggtgtcctggagactgccatgaagctggccaaccaggatgaaggcccagaggatgaagaggatgaggtgcctaagaagcagaacagccctgtggcccccacagcccagcccaaagccccaccctcaagaactccccagtcgggatcagccccaacagccaaagcgccccccaaagccacatccaccagagcccagcagcagctggccttcctagagggccgcaagaagcagctcctgcaggccgcactgcgagccaagcagaaaaacgacgtggagggtgccaagatgcacctgcgccaagccaagggactggagcctatgctggaggcctcgcgcaatgggctgcctgtggacatcaccaaggtgccgcctgcccctgtcaacaaggacgactttgccctggtccagcggcctggcccgggtctgtctcaggaggccgaccggcgctatggtgaactcaccaagctcctcgtgccaagcaggccgtnntcatnttacagaggtattcaggttcctag

SEQ ID NO: 61571 - DNA, 756 bp, Homo sapiens
gctcaagtgatcctcctgccttagccacctgagtagctgtgactgcaggcatgtgccaccacgttcagctaacttttacattttttttgtagagataggctctcagtatgttgccctggctggcctcgaactcctggggtcaagcaatcctcccaccgcagcctcccaaagtgctaggatgacaggtgtgagccactgcactgcaaaaatacagaagaccaaattattaaaactagaaatgagaggggacattactattgttcttagagacataaaaaggattataatatgaataaaaaggattatacatataaacaatatatgctaataattggatagagctggatgaaagacacattaccagaaagatatgaactactgaatctgacttgagaaaaaaacagaaaagctgaatagacagacctatgtcaagtaaagagattgaggtagtaatcaaaaaactttccactaagaaaagctgaagaccagcaggcagcctcactggtgaatctaccaaatacttaaagaagaattaacaccaatccttcataaagtctttcaaaatacagatgaggaaagaacatttcctaacttattctatgagggtgatattaacctggtatccaaactaaagacatcacacacaaaaaattacagaccagtatttcttatgaatgtagatggaaaaatgcttgacaaaatctggcaaaccaaattcaacggagtattctgtaaacatgaagcagataataatag

SEQ ID NO: 61572 - DNA, 2932 bp, Homo sapiens
agaaccacccgtccggccgcctcgagcgcggtcctagcgttcagcggactcgcgcggcctcgatctctggactcgtcacctgcccctccccctcccgccgccgtcacccaggaaaccggccgcaatcgccggccgacctgaagctggtttcatggcagcctcaaagaaggcagttttggggccattggtgggggcggtggaccagggcaccagttcgacgcgctttttggttttcaattcaaaaacagctgaactacttagtcatcatcaagtagaaataaaacaagagttcccaagagaaggatgggtggaacaggaccctaaggaaattctacattctgtctatgagtgtatagagaaaacatgtgagaaacttggacagctcaatattgatatttccaacataaaagctattggtgtcagcaaccagagggaaaccactgtagtctgggacaagataactggagagcctctctacaatgctgtggtgtggcttgatctaagaacccagtctaccgttgagagtcttagtaaaagaattccaggaaataataactttgtcaagtccaagacaggccttccacttagcacttacttcagtgcagtgaaacttcgttggctccttgacaatgtgagaaaagttcaaaaggccgttgaagaaaaacgagctctttttgggactattgattcatggcttatttggagtttgacaggaggagtcaatggaggtgtccactgtacagatgtaacaaatgcaagtaggactatgcttttcaacatgtcattctttggaatgggataaacaactctgcgaattttttggaattccaatggaaattcttccaaatgtccggagttcttctgagatctatggcctaatgaaaatctctcatagcgtgaaagctggggccttggaaggtgtgccaatatctgggtgtttaggggaccagtctgctgcattggtgggacaaatgtgcttccagattggacaagccaaaaatacgtatggaacaggatgtttcttactatgtaatacaggccataagtgtgtattttctgatcatggccttctcaccacagtggcttacaaacttggcagagacaaaccagtatattatgctttggaaggttctgtagctatagctggtgctgttattcgctggctaagagacaatcttggaattataaagacctcagaagaaattgaaaaacttgctaaagaagtaggtacttcttatggctgctacttcgtcccagcattttcggggttatatgcaccttattgggagcccagcgcaagagggataatctgtggactcactcagttcaccaataaatgccatattgcttttgctgcattagaagctgtttgtttccaaactcgagagattttggatgccatgaatcgagactgtggaattccactcagtcatttgcaggtagatggaggaatgaccagcaacaaaattcttatgcagctacaagcagacattctgtatataccagtagtgaagccctcaatgcccgaaaccactgcactgggtgcggctatggcggcaggggctgcagaaggagtcggcgtatggagtctcgaacccgaaggatttgtctgcccgtcacgatggaagcggtttgaaacctccagattaatgccggagggaaagtgaaattccgttattctacatggaagaaagctgtgatgaagtcaatgggttgggttacaactcaatctccagaaagtggtattccataaaacctaccaactcatggattcccaagatgtgagctttttacataatgaaagaacccagcaattctgtctcttaatgcaatgacactattcatagactttgattttatttataagccacttgctgcatgaccctccaagtagacctgtggcttaaaataaagaaaatgcagcaaaaagaatgctatagaaatatttgggggttttttttttttttaaacatccacagttaaggttgggccagctacctttggggctgaccccctccattgccataacatcctgctccattccctctaagatgtaggaagaattcggatccttaccattggaatcttccatcgaacatactcaaacacttttggaccaggatttgagtctctgcatgacatatacttgattaaaaggttattactaacctgttaaaaatcagcagctctttgcttttaacagacaccctaaaagtcttcttttctacatagttgaagacagcaacatcttcactgaatgtttgaatagaaacctctactaaattattaaaatagacatttagtgttctcacagcttggatatttttctgaaaagttatttgccaaaactgaaatccttcagatgttttccatggtcccactaattataatgactttctgtctggatcttataggaaaagatactttcttttttcttccatctttcctttttatattttttactttgtatgtataacatacatgcctatatattttatacactgagggtagcccatttataaattaagagcacattatattcagaaggttctaacagggctggtcttaagtgaaccactgtgtatataaatatgttggaaaacagctgtatacatttttgggcaacggttatgcataatatttaccaggagaatttttttcttaacaagccaacatttaaaatttatgttttatgtcaataaaagaaaatatactttattgtgacttcaactatatttcttatcccttacatttttatttaattgtcttagcttaaaaaaagaagaaactgtggaatactacagtaaatattgttttcaaacacaagcaataattcaaatagttatttttcttttgaattaattttagacatattttggatcctattgaggggataagaggatgtcaaaaaagttaaatacctaagtagaaa

SEQ ID NO: 61573 - DNA, 6313 bp, Homo sapiens
gcgagcggctgttggaggaaggaggtgggggccgggagcgcaaatggcgttgagatggttcagggccctgttcaaactccagcactgaccattcaccggcggaagcggcggcgcaggaggcggcggcggcccagcgggggcacacagcaggctctgttaccagctccagcagtggcggccagcgagagctaggcccgcgcccggccggcggcgctcgaggcggggagggaagttgcggggccgccgctcctgcccccccaaccgggcttcctatttaccgaaagcagagtccctcgcctctctcggctctcacctgccggccctgctctcccgcgcgagggttccgcgcccgcccgcgggccgtaaggagcgggagaaggcggaagcggccccgtggccaaagcacccgccaggcttccgaggagaatatgaaactggttgtcaaaatgacatccagatttgggaaaacatacagtaggaaaggtggaaatggcagttcaaaattcgatgaagtcttttccaacaaacggactacccttagcacaaaatggggagagaccacatttatggctaaattagggcagaagaggcccaatttcaaaccagatatccaagaaattccgaagaaacctaaagtggaagaagaaagtactggagatccttttggatttgatagtgatgatgagtctctaccagtttcttcaaagaatttagcccaggttaagtgttcctcttattcagaatctagtgaagctgctcagttggaagaggtcacttcagtacttgaagctaatagcaaaattagtcatgtggtcattgaagacactgtcgtttctgataaatgcttccctttggaggacactttacttgggaaagaaaagagcacaaaccgaattgtagaagatgatgcaagcataagtagctgtaataaattaataacttcaggtaaagtggagaattttcatgaagaacatgaaaagaatagtcaccatattcacaaaaatgctgatgacagtactaagaaacccaatgcagaaactacagtggcttctgaaatcaaggaaacaaatgatacttggaactcccagtttgggaaaaggccagaatcaccatcagaaatatctccaatcaagggatctgttagaactggtttgtttgaatgggataatgattttgaagatatcagatcagaagactgtattttaagtttggatagtgatccccttttggagatgaaggatgacgattttaaaaatcgattggaaaatctgaatgaagccattgaggaagatattgtacaaagtgttcttaggccaaccaactgtaggacgtactgtagggccaataaaacgaaatcctcccaaggagcatcaaattttgataagctgatggacggcaccagtcaggccttagccaaagcaaacagtgaatcgagtaaagatggcctgaatcaggcaaagaaagggggtgtaagttgtgggaccagttttagagggacagttggacggactagagattacactgttttacatccatcttgcttgtcagtttgtaatgttaccatacaggatactatggaacgcagcatggatgagttcactgcatccactcctgcagatttgggagaagctggtcgtctcagaaaaaaggcagatattgcaacttctaagactactactagatttcgacctagtaatactaaatccaaaaaggatgttaaacttgaattttttggttttgaagatcatgagacaggaggtgatgaaggaggttctggaagttctaattacaaaattaagtattttggctttgatgatctcagtgaaagcgaagatgatgaagatgatgactgtcaagtagaaagaaagacaagcaaaaaaagaactaaaacagctccatcaccctccttgcagcctcccccagaaagcaatgataattcccaggacagtcagtctggtactaacaatgcagaaaacttggattttacagaggacttgcctggtgtgcctgaaagtgtgaagaagcccataaataaacaaggagataaatcaaaggaaaataccagaaagatttttagtggccccaaacggtcacccacaaaagctgtatataatgccagacattggaatcatccagattcagaagaactgcctgggccaccagtagtaaaacctcagagtgtcacagtgaggctgtcttcaaaggaaccaaatcaaaaagatgatggagtttttaaggctcctgcaccaccatcccaaagtgataaaaactgtgacaatacctactcagccctaccaagatatagttactgcactgaaatgccagacgagaagaccaagaattatatactgttgttcagcacgtgaagcacttcaacgatgttgtagaatttggtgaaaatcaagagttcactgatgacattgagtacatgttaagtggcttaaagagcactcagcctctaaacacacgttgccttagtgttattagcttggctactaaatgtgccatgcccagttttcgaatgcacctgagagcacatgggatggtagcaatggtctttaaaaccttggatgattcccagcaccatcagaatctgtccctctgtacagctgccctcatgtatatactgagtagagatcgtttgaacatggatcttgatagagctagcttagatctaatgattcgacttttggaactggaacaagatgcttcatcagccaagctactgaatgaaaaagacatgaacaaaattaaagaaaaaatccgaaggctctgtgaaactgtacacaacaagcatcttgatctagaaaatataacgactgggcatttagctatggagacattattatcccttacttctaaacgagcaggagactggtttaaagaagaactccggcttttgggtggtctggatcatattgtagataaagtaaaagaatgtgtggatcatttaagtagagatgaggatgaagagaaactggtagcctcactatggggagcagagagatgtttacgagttttagaaagtgtaactgtgcataatcccgaaaatcaaagctacttgatagcatataaagattcccaacttattgtttcatcagctaaagcattacagcattgtgaagaactgattcagcagtacaaccgtgctgaggacagcatatgcttagctgacagtaagcctctgcctcaccagaatgtaactaaccatgtaggcaaagcagtggaggactgcatgagggccatcatcggggtgttgcttaatttaactaatgataatgagtggggcagcaccaaaacaggagagcaggacggtctcataggcacagcgctgaactgtgtgcttcaggttccaaagtacctacctcaggagcagagatttgatattcgagtgctgggcttaggtctgctgataaatctagtggagtatagtgctcggaatcggcactgtcttgtcaacatggaaacatcgtgctcttttgattcttccatctgtagtggagaaggggatgatagtttaaggataggtggacaagttcatgctgtccaggctttagtgcagctattccttgagcgagagcgggcagcccagctagcagaaagtaaaacagatgagttgatcaaagatgctcccaccactcagcatgataagagtggagagtggcaagaaacaagtggagaaatacagtgggtgtcaactgaaaagactgatggtacagaagagaaacataagaaggaggaggaggatgaagaacttgacctcaataaagcccttcagcatgccggcaaacacatggaggattgcattgtggcctcctacacggcactacttcttgggtgtctctgccaggaaagtccaatcaatgtaaccactgtgcgggaatatctgccagaaggagacttttcaataatgacagagatgctcaaaaaatttttgagttttatgaatctcacttgtgctgttggaacaactggccagaaatctatctctagagtgattgaatatttggaacattgctagctgctttacctttgcttcaggtgctcggtaatgctggagctatccttagacaaagaaaagtcaagtcatgaaagaagtccttgaagatataccaagaacattcatcagtatcattcgtgtttggatttttaaggccacctgatttcttcgtcatgcattcggcatttgctaaatgacagttactacatcaatctgcaactatcaaaaatgaggggaaaaggttcaggctgttaacaattccatgcagtatttaaatacatttactttggcagagtttataccctccccttgttttcttgctttattctgggcaagtttgaaggggaaaatttgtgctgctgttagtgcaactgctgtgtatgttgagccactgttgtcatgccagccaggtgcaaaggcagcttagctactgaggtagcgaatgttctgaggacattctagacaacagcttagttcctttttcaggctcatttgcttttgcttttttgttgaatgattccaatcgtaaataaagcttttaataattttgtgaattttttggttgttgttccctgaactactgtctatatttaaaattagatggaatccaaagatacacgggattaatagtatatttttttattcttgattaggtttgggttattgaactattttttacttttgagaccacaaccatattcaatatcataccataatgtgtcatagctataggcacaagaaaaacaacagtttgagagaatattatataagatgatgtgccctgttaaaaggaggaggcaaaatagtcaaacccagggtagtttacacttaatgctagggaggctcttaaaacattattagattttgaggaaagactctctagatatattttctaatgttcagtacaataaatataaggaagctaaaacaccaatgtggaattcctgtttccagataacatgtatattcttctatagagtgacaggatcaattgcataagcgcaaagccttaaattgctggtttagagaagacccttttttcattcagattctttgttcgtagagcagttatttgaaaaacagttatggaacacaaaacattttatagatttaatatcataacattgcaaatttttcttgtattattgttcacaccactggttatacttttttttttccttttttattgatggggcctgaatacaggctttctagagatctttttcattaatacttttaaatacctttcaggtagttacatcatgtttcttcattggatttgtaaaacttgaagccataaaaatattagtttggtgtgtattggggaaaatagctaaaagtctaatttttacccatttagactttgttatttccttgtataaagtgacaaatcggggctcttgtatcagtgccagctgtaatgtttttaaatgcagtggctgccttctattgtcttcctatttttgataatgcagattgttgggaaatctgtaaggaagtaactgattccaggcaaattgttttcttccttctacccaccccaacccctacccatcaccttttaagaacatagtacgccagtgtaacgtgggaaccattgagattgtatttgccctgagtattaaagctagcttagcaaaatacttttaaaaacatattggtaaatgatacccataaaattaaattagttatattttattttaaaatgcaaaatacattgatatttattaatcattggatttagggaaagggacagatttttggtgaacctgacttgtggcagatggtaaggaatattataaaacatttggatgagaacaatcagggcgaactgcatttttctgttacactggtaatcatttgaaaattgatttacctcagtgtttaacagttttttgttttgttttgttttttaaataataactaattgtcgagcactgatagagatgcagattttggtggggggaggtggtgggggagataatcacttcaccaactgcagtgcatttgtgtgtttttaaccctcagagaactctgcattttagggtacttgaggctgacttaactaaaagttttaaagtaaccttttttccattgtaaatatttctgtaaatactaccaattggaaattagaacagtagagtacttttctgaatccaatcctatttttattttatacagtatttctcagctgtgatctttggagcaaaagccaacggcaggaaaaaatagtttgtaccagtttcatgaagtatgtctttgggtttttgtaaataattttaactcaaataaaattgctactttcaatacaaa

SEQ ID NO: 61574 - DNA, 2542 bp, Homo sapiens
ttttttttttgttggcccaaaaaaaaaatttattttcctttcaaataaaatgtacaaccaaaatttagggtttggagcagtagggaagacaggagataccagggagcccattttacagtagagatctgcatctgacccctctatcccatacctttgcaaaggaagggaggggtctacaagccagaactttcagaagagaagaaaatacatgctgtgctggtgctgtttctggagcaggtcatcctttaggtatagaacaccacctccacccgatgacatcagaaccactgactggtagagtccttggaaatcatacagtccacccatcccccgccagacacatggacacaccgaggctcagatggggaagggtacataccctagggcacacaccaaatcaaaaaggtgaagtcaggactagaacacctgagcaactttagcaggggactgtggccacaggcctggatgtgcacagtagatcatgaaatacattagtcctatgaatgacccccgtgcaaaaaaatggctgtggttgtcagggagcagcccctgctcaggggctcctgacctcagtgaaaggtgactgtgtaaaggccagaaactggatggtggtcatgaacctcaggacgttttttttttttagcaccaaatggtggagctctctgccagctcagcttcttggggcctctcaggtaaaggtgatgtttgaggaccccacgcccatatgaggggtggagaggagaagccagcagcactggggtgagccttggcctacacccttccttcttacccttcccccatcttcagtaaggccaagagaggatgtggggtggggaaggccagaatggtatcgtgtttcttgtttctgggcagtgggctgcgtcctcccaagcaggactgaagggttcagaatcgcttttcctcaggctgagaggttatgagcagctccttgttcccgaagtcccaccaggccgtcatgtggaacgccatgttggttaagacaacagtgtactccaggatggcaaagatggtgtacactccagcctcacaatacatgttgtgccgaaagtagacagccagcgccgagaagaaggagatgaagttgatgatgaagagccgctgtttccagctgtaggacttgcgatcctagggaatgggctgtctgatcactctgcagcttgctgggtatgagagcgtgggctcccctctcagccctaactcctaagggctgggccttatctcccttggctcccactagcggtcatggaagggagcacaggcaggggcagcaagaatgacgactatgtgttcacgtccctgcctctgggggagtgatgggccgaggagcagtggtattcctgccgcttccacttcagggggatggagtatgaaagttacatggagtcacccaccaaccccacctccaaatactgtgggggaaaagaaacccatgtacatgggtggggcgctggaattatgacagaccagtcctctgacactgttcctaactcactgccgcctagatgcgactcctcattctatccccatttgcagcctccatctcttctattctccagtctcccacactacccaaacacagtgctatagtcctagattctgaccaaccaccctcagtttgttcccaagccccagccccaaccccagcacccctctgccagggttcccattagaactcagttcccacctcaccattacccgaatcctgaggacagatgtccttgattttcttctgggctgccttggagcccccgctagggatagaccgtacctcctgacttactgtgtgcttcttggtcaaccgccagagaatgcaggtgaggagcatgtgcccgagggatgaggcaatgaacacaatgaaagcattttcgtggatggctggagggaaagaggattgggagccacattgcagggagtgcccacaccacgaagtaggaaggtccgaatgtggtaggggcaggcccgtcccctcagggaacacttccccactcctccctcatccaggcacccactgaagtcctcggaggaggagacataagtgagcactagcaacgcgaggttctccacgacattgaggccgaagttgaggcggcagagcgggcgatagcaggaacacggggaggtgcagctgaggtagtggttccagtaggcgaaggccaccaagaagcgaggcgccgagtgcaggccgatgcagaaacgccacacgtagcgctggggcacctccccgccgatggctgagctcaccgagggcaggtaattgggcaccccacagtgtgtggccgttgtctccttgaagtggaagagcagggaccagaggatgcagaagagggaggcgacaagtggacagcagaccgtgaccagggccaccatggtgaagcggagccgtaccagggtcccatcccgatccagtggtagtgggacctggtacatcttgtcagacctctcagctgcgttccatctaccatgccattctggggccgtccctctgattggcccgagctccctcagcccgagtcgcacgaaa

SEQ ID NO: 61575 - DNA, 4441 bp, Homo sapiens
ttttttttttttgccgcccactcagactttattcaaagaccacgggcgaccggagcgcgatggcgggggcggcgggactcacggcagaagtgagctggaaggtcttggagcgaagagctcggaccaagcgctcagttttaaaattgctatagcttagcctgcgacgcttatgattagagccaacaatttgaaatggcctgctcacctgatgcagtcgtctctccgtcttccgctttcttaaggtctggctcagtttatgaacctcttaaaagcattaatcttccaagacctgataatgaaactctctgggataagttggaccattattacagaattgtcaagtcaacattgctgctgtatcaaagtccaactaccggtctctttcccactaaaacatgcggtggtgaccagaaggccaagatccaggacagcctatactgcgctgctggggcctgggctttggctcttgcatacaggcgaattgatgatgacaagggaaggacccatgagctggagcactcagctataaaatgcatgagaggaattctctactgctatatgcgtcaggccgataaggtccagcagtttaagcaggatccacgcccaacaacatgtcttcactctgttttcaatgtgcatacaggagatgagttgctttcctatgaggaatatggtcatcttcagataaatgcagtgtcactttatctcctttaccttgtggaaatgatttcctcaggactccagattatctacaacactgatgaggtctcttttattcaaaaccttgtattttgtgtgggaaagagtttaccgtgtgccctgactttgggtgtctggggaaagagggaaggcaaatattattaatgggcagcacagagctacattcgagctcggttggtttaggcaaaaggcagctctagaagcaatttaatggattcaacctttttggcaaccagggctgttcgtggtcagttatatttgtggatctcgatgctcacaatcgcaacaggcaaactttgtgctcgctgttacccagagaatcaagatcacataatacagatgctgccctgctcccctgcatcagttatcctgcatttgccctggatgatgaagttctttttagccagacacttgataaagtggttagaaaattaaaaggaaaatatggatttaaacgtttcttgagagatgggtatagaacatcattggaagatcccaacagatgctactacaagccagctgaaattaagctatttgatggcattgaatgtgaatttcccatatttttcctttatatgatgattgatggagtttttagaggcaatcctaagcaagtacaggaatatcaggatcttttgactccagtacttcatcataccacagaaggatatcctgttgtaccaaagtactattatgtgccagctgactttgtagaatatgaaaaaaataaccctggtagtcaaaaacgatttcctagcaactgtggccgtgatggaaaactgtttctttggggacaagcactttatatcatcgcaaaactcctggctgatgaacttattagtcctaaagacattgatcctgtccagcgctatgtcccactaaaggatcaacgtaacgtgagcatgaggttttccaatcagggcccactggaaaatgacttggtagttcatgtggcacttatagcagaaagccaaagacttcaagtttttctgaacacatatggtattcaaactcaaactcctcaacaagtagaacccattcagatatggcctcagcaggagcttgtgaaagcttatttgcagctgggtatcaatgaaaagttaggactctctggaaggccagacaggcccattggctgcctcgggacatcaaagatttatcgcattctaggaaagactgtggtttgttacccgattattttcgacctaagtgatttctacatgtctcaggatgttttcctgctgatagatgacataaagaatgcgctgcagttcattaaacaatattggaaaatgcatggacgtccacttttccttgttctcatccgggaagacaatataagaggtagccggttcaaccccatattagatatgctggcagcccttaaaaaaggaataattggaggagtcaaagttcatgtggatcgtctacagacactaatatctggagctgtggtagaacaacttgatttcctacgaatcagtgacacagaagagcttccagaatttaagagttttgaggaactagaacctcccaaacattcaaaagtcaaacggcaaagcagcacccctagtgctcctgaactgggacagcagccggatgtcaacattagtgaatggaaggacaaacccacccacgaaattcttcaaaaactgaatgattgcagttgtctggctagccaagccatcctgctgggtatactgctcaaaagagaaggccccaacttcatcacaaaggaaggtaccgtttctgatcacattgagagagtctatagaagagctggcagccaaaaactttggtcggttgtacgccgtgcagcaagtcttttaagtaaagtagtggacagcctggccccatccattactaatgttttagtgcagggcaaacaggtaactctgggtgcctttgggcatgaagaagaagttatctctaatcctttgtctccaagagtgattcaaaacatcatctattataagtgtaacacccatgatgagagggaagcggtcattcagcaagaactggtcatccatattggctggatcatctccaataaccctgagttattcagtggcacgctgaaaatacgaatcgggtggatcatccatgccatggagtatgaacttcagatccgtggcggagacaagccagccttggacttgtatcagctgtcacctagtgaagttaaacagcttctgctggatattctgcagcctcaacagaatggaagatgttggctgaacaggcgtcagatcgatgggtctttgaatagaactcccaccgggttctatgaccgagtgtggcagattctggagcgcacgcccaatgggatcattgttgctgggaagcatttgcctcagcaaccaaccctgtcagatatgaccatgtatgagatgaatttctctctccttgttgaagacacgttgggaaatattgaccagccacagtacagacagatcgttgtagagttacttatggttgtatccattgtactggaaagaaaccccgagctagaatttcaagacaaagtagatctagacagactggtcaaagaagcatttaatgaatttcaaaaagatcagagtcggctaaaggaaattgaaaaacaagatgacatgacttccttttacaacactcctcccctgggaaaaagaggaacatgcagctatttgacaaaggcggtgatgaatctgctgctggaaggagaagtcaagccaaacaatgatgacccgtgtctgattagctagtggggaaggtgtaggaagctctgttgagacacatgttctgaagtgtgttgtgtttcatgttcaagcttaatcaaggcagccattaatatacgaactgagcatgctggggaggtgaatgccacatccttggcggggttatggacctcttgcatgtcatagccaatctaacggtaatggtaaatgcttttaatcaagcaggaaaaagttctcatgattatgccaactataatagtaatcctcactgagtgataaaaatagtttatgaattgaaaatttgccgctgcatgttgtatgatcaaatagttcatcaaaatgaatctttgctctttggactgaattcttaccatactgccattaaaataaatttgccaactagtaatgcatactggaaatcaaaagatactgaaagaatggtgaacttctcttagtggtattgtcatgctaaaagatgttaatatacatcataaaagcaaagtcagccagctgatattttggttctcaaaaactgcattattaataatattttagtatacagagctattctacagtttttacattgtaaacatgactgtggttttgtatttgctaaatataggggttggactaaaatataataaatctgtaccttatcaaacattttctttgagctcctgctaaaaataggacatgtctatgattgttcaaaaatatgttaaatttaggctcagcacagtagctcacacctgaaatcttagcacttcgggaggctgaggcaggtggatcacttgaggttaggagttcaagaccagcccagccaacatggtgaaaaccctgtctctactaaaaatacaaaaattagccaggcatgatggtgcatgcctttaaacccagctactgaggaggctgaggcatgagaattgcttgaaccaggagacggaggttgcagtgagctgaaatcctgccactgcacaccagcctgggtgacagagcgagactcc

SEQ ID NO: 61576 - DNA, 1105 bp, Homo sapiens
  misc_feature (1)...(1105): n = a,t,c or g
cctgggaattcttagaaatttctgaaataataagttatccttttaaaaaaaaaaacttttattttaggttcagggatacatgtataggtttgttataaagataaactcgtgttattctgaaaagacttccatttgcagacatcgctgctgcccagaactccctgccacccagccatggccaacccccactgtgttcttcaacattgcaattgatagtgagtccttgggctgcatcttccttcaagctatttgcagacaaagttctaaaagatggaagaaaaattttgtgcttctgaacactggagagaaagtattgggtgataaaggtccctgcttttacagaattattccggggtgtgtgtcagggtggtgacttcacacaccataatggcactggtggcaagtccctctacagcaaggaatttgatgatgagaacttcatcctaagcatacagctcctggcgtcttgtccacggcaaatgctggacccaccacaaatggttcccagtttttcatctgtactgccaagacagaggatggatgacagcatgtggtctttggcaaggtgaaagatggcatgagtattgtggaagccctggaacgctctgggtccaggaatggtaagaccagcaagaagatcacagctgctaactgtggacaactctaataaatttgattgttttatctgaaccaccagatcgttccttctatagctcaggaaagcatgcttccaccccatttgctcacagcatcctataatctttgcacagtcctttgggttccatattttccttatcctcttccatgtctagctggatcgcagagttaagtttataattacaaaatgaaaactaagtaacaagaagaaaataaaagacttccagcaatttttatactctttagtcattactgtggatatctaaaagaaattggtttaataaataagaaatattacatttagcaaatttataaacaactatagcctgagattnngggngntcaaactttagaaaataccagtgaacatttttgggtaatattcaaagaatgtgacattcagatctcntggnttccncgacggttactcaggtctctaangggacct

SEQ ID NO: 61577 - DNA, 1731 bp, Homo sapiens
atattgatctcctggagattcgaaatggaccaagatcccatgaatcattccaagaaatggatcttaatgatgactggaaactctctaaagatgaggttaaagcatatttaaagaaggagtttgaaaaacatggtgcggtggtgaatgaaagtcatcatgatgctttggtggaggatatttttgataaagaagatgaagacaaagatgggtttatatctgccagagaatttacatataaacacgatgagttatagagatacatctacccttttaatatagcactcatctttcaagagagggcagtcatctttaaagaacattttatttttatacaatgttctttcttgctttgttttttatttttatatattttttctgactcctatttaaagaaccccttaggtttctaagtacccatttctttctgataagttattgggaagaaaaagctaattggtctttgaatagaagacttctggacaatttttcactttcacagatatgaagctttgttttactttctcacttataaatttaaaatgttgcaactgggaatataccacgacatgagaccaggttatagcacaaattagcaccctatatttctgcttccctctattttctccaagttagaggtcaacatttgaaaagccttttgcaatagcccaaggcttgctattttcatgttataatgaaatagtttatgtgtaactggctctgagtctctgcttgaggaccagaggaaaatggttgttggacctgacttgttaatggctactgctttactaaggagatgtgcaatgctgaagttagaaacaaggttaatagccaggcatggtggctcatgcctgtaatcccagcactttgggaggctgaggcgggcggatcacctgaggttgggagttcgagaccagcctgaccaacacggagaaaccctatctctactaaaaatacaaaagtagccgggcgtggtgatgcgtgcctgtaatcccagctacccaggaaggctgaggcggcagaatcacttgaacccggaggcggaggttgcggtaagccgagatcacctccagcctggacactctgtctcgaaaaaaagaaaagaaacacggttaataacatataaatatgtatgcattgagacatgctacctaggacttaagctgatgaagcttggctcctagtgattggtggcctattatgataaatagaccaaatcatttatgtgtgagtttctttgtaataaaatgtatcaatatgttatagatgaggtagaaagttatatttatattcaatatttacttcttaaggctagcggaatatccttcctggttctttaatgggtagtctatagtatattatactacaataacattgtatcataagataaagtagtaaaccagtctacattttcccatttctgtctcatcaaaaactgaagttagctgggtgtggtggctcatgcctgtaatcccagcactttgggggccaaggagggtggatcacttgagatcaggagttcaagaccagcctggccaacatggtgaaaccttgtctctactaaaaatacaaaaattagccaggcgtggtggtgcacacctgtagtcccagctactcgggaggctgagacaggagatttgcttgaacccgggaggcggaggttgcagtgagccaagattgtgccactgcactccagcctgggtgacagagcaagactccatctcaaaaaaaaaa

SEQ ID NO: 61578 - DNA, 1474 bp, Homo sapiens
actacagcagtacataaagttttattaatattctgattctcgtgtcatagcttttatggcaggaaaggatgaggacatgccccacctgtaacgtagagcaagcaaaccaccaagtagaatcttgagattctctctcaactgttctctagaaacacgcttgtgcttttaatctgccttttaaaagggacacagaacaaaaaatggttgtttgcaaataaacatctgaaagaaagtaacagctgacctgggctgaggcatccaaacaaagcagtcattgtggaaggagacaatgcaaaccacactggggcaagaaacggggcagagaacgtgcggtcatttgtgcgttgggtatttctaccagccccaaaggccccatctggaacaagtatcaaccaggaggggctctatggcttgatttattaacctaactcaaaagaagtcactgccaccaacagcactgtgcagttttattaaccattcaagtccagtagcatctggtaagattgggacagaattgggattgaaaagtgaacagatattcagcatctaacagttcaaaagaagccactacatactcttttcacaaatatgttttcacagagccaatacagtactagccattaacccagtacaccaagtgtactgaagtagaaaagatgcaacaagaaaaatagctacattagaaagaccaacactttagaaaaagagtaaaacactttcagtttctcccctttagcccctaaaacaacatcttacagtctggatcctgggatcttaccttttacagtcctacattaggctttcttaaaatatttgtccaggagggggaaaaaataaaattggccactgggccaggtaccagtctttgggatatttaggaaggggggatggggaagaaagtcaagttcctcagaaacaaattagtcaggcttcaggtctcgtcgcggacagggtctttgggattccttggttcttccggaacttcttcaatgtgcttaacccttcctcctcgcaaaagttcccaatttggcaacccatttgtgccctctcgggttcctcctttaattagcttccgattttgtgggtgragtkttctcttctgcccatttttactgaagttgtttgttctcttctaattgcctttctgcaagcacttctttcttcggtgcctctcggtttctcagccagctgccttcaagacctcaagcttcatggggacttgcgtctttcttctggcagcttcctaattctctcggaatttccccccggggaagaacccttcttctttggggggggagagggggaattctggaacaaattcctttgcccgaggggctgagaatcaggctcaaaagcctggcctgaggcacgcttctccagttctttcacctggatatcagaagaagccatggtgaatagaagacaagcgacagggcagtgtattctgcacaatcaactgggataaggaaagtcc

SEQ ID NO: 61579 - DNA, 5716 bp, Homo sapiens
tgcgaccgccacccccttccccgctgccagcactcaccctctctccgctcctgctcgcaacctcgcggttcctggggtgcttgtgcccactgtgtggacagcgcgggcggacttttgggccggggcgtggcgtgcgggggaggctctctaaggcctccgcctctgcctctcccgcccccttacccgccccggagacgacagcgtcggaggctccgccatggcctcgggagccggaggagtcggagggggcggtggcggcaagatccggacgcggcgttgccaccaggggccaattaagccttaccagcaggggcgacaacagcatcagggcattcttagcagggttacagaatctgttaagaatattgtgccagggtggctacaaagatacttcaacaagaatgaagatgtatgcagctgttcaacagacacaagcgaggttccacgctggccagaaaataaagaggaccatctggtatatgccgatgaggagagctctaatattactgatgggagaatcacacctgagccagcagtcagtaatacagaagaaccttcaacaactagtactgcttcaaccttatccagatgtgttaacaagggtttctctttatcggagccatctgaatttttccatgttggaatcccctgcattacactgtcagccatctacatcctcggcattcccaattggcagttcgggattttcccttgtaaaggaaattaaagattctacctctcagcatgatgatgataacatctcaactaccagtggtttttcttcaagagcttctgataaagatataactgtttcaaagaacacttcattgccacctctgtggtccccagaagctgaacgttctcactcactctcacagcacactgccaccagctcaaaaaaaccagcattcaacttgtctgcctttggaacactttccccttcacttgggaattcttcaatccttaaaaccagtcagcttggagattctcctttttatcctggaaaaacaacatacggtggggcagcagctgctgtaagacagtctaaactacgaaatacaccttatcaggcaccagttagaagacaaatgaaagctaagcaactcagtgcacaatcttacggtgtgaccagttcaacagctcggcgaatattgcagtctttagagaagatgtcaagccctttagcggatgcaaaaagaattccatccattgtttcttctcctctgaattctcctcttgataggagtgggatagatatcacagattttcaggccaaaagagaaaaggtggattctcaatatcctcctgttcagagacttatgaccccaaagccagtttccatagcaacaaatcgaagtgtttattttaaaccatctctgactccttctggtgaattcaggaagactaatcaaagaatagataagaagtgcagtactggatatgaaaaaaatatgacacccggacaaaatagagaacaacgagaaagtggcttttcatatccaaatttcagtttgcctgcagccaatggtttatcttctggagtaggtggtggaggtggcaagatgagacgagaaagacacgcctttgttgcttctaaacctctggaggaggaggaaatggaaggtccagtattaccgaaaatctctctaccgatcaccagttcttcactgcctacctttaattttagttcccctgagatcacaacttcctctccatcacccatcaattcgtctcaagcattaacaaacaaggtacaaatgacctctccgagcagcactggcagtcccatgtttaaattttcatctccaatcgtaaaatctactgaggcaaatgtactacctccatcatctattggatttacatttagtgtgcctgttgcaaaaacagcagaactttctggttctagtagtactttagaaccaattataagtagttcagctcatcatgtcactacagtgaacagtacaaattgtaagaagacaccacctgaagattgtgagggtccttttagacctgcagaaatcctgaaagaaggaagtgttctagatattctgaaaagccctggtttcgcatcgccgaagatagattctgttgctgctcagcccaccgcaacaagcccagtagtttatacaagaccagcaataagtagcttttcttctagtggaattgggtttggggagagtttaaaagctgggtcatcatggcagtgtgatacatgtctactccagaacaaagttacagacaacaaatgcatagcctgtcaagcagcaaaattgtcacccagagatactgctaaacagactggaattgaaacaccaaataaaagtggcaaaacaactctttctgcatcagggacaggctttggagacaaatttaaaccagtgataggcacttgggattgtgatacctgtttagtgcaaaataaacctgaagcaataaaatgtgtagcctgtgaaacaccgaaacctggaacttgtgtgaagcgagcccttacattgacagtggtttcggaaagtgctgagactatgactgcttcatcttccagctgcactgtaaccactggtaccttaggatttggagataaattcaaaaggcccattggatcttgggagtgttcagtatgctgtgtttctaataatgcagaagacaataagtgtgtgtcctgtatgtctgagaaaccaggaagttcagtacctacttcaagtagcagcactgtacctgtctctctgccttctggaggctctctaggattggaaaagttcaagaaacccgagggaatctgggactgtgaattgtgcctagtgcagaataaggcagactctaccaaatgtttggcatgtgaaagtgcaaagccaggcacaaaatctgggtttaaaggctttgacacatcttcctcatcttcgaactcagcagcctcctcatccttcaaatttggtgtctcatcatcctcttctgggccttctcagactttaacaagcactggaaattttaaatttggagatcagggaggattcaaaataggtgtgtcatctgattctgggtatataaaccccatgagtgaaggcttttaattttctaaacacatagtaggttttaaatttggagtttcatctgaatctaagcctgaagaagttaaaaaagatagtaagaatgataattttaagtttggactttcttttggtttaagcaacccagtttttttaactccattccaatttggggtatctaatcttggacaggaagaaaagaaagaggaattgctcaaatcttcatgtgcaggttttaggtttggtacaggtgttattaactccacccgtgttcctgctaacaccatagtgacttctgagaacaagagcagcttcaaccttggaaccatagaaaccaagagtgtttcagtggctcctttaaaatgtcagacatctgaagctaaaaaagaagaaatgcctgccaccaaaggaggattctcttttggcaacgtggagcctgcctctctgccatctgcctcagtgtttgttttgggaaggacagaagagaaacagcaagagcctgtcacttctacttccctagtttttggggaaggaaagctgacaatgaaggagccaaagtgttcaaccagtgttttcctttggggaatttcagaggcaaaccaaagatgagaattcttcaaagtccacatttagttttagtatgacaaaaccatctgagaaggaatctgaacagccagcaaaagccacttttgcctttggagctcaaactaatactacagctgatcaaggtgcagcaaagccagatcttagttacttgaacaacagttcctctagttcaagtacaccagccacttctgctggtggtgggcatatttggtagttccacctcttcctccaatccacctgtggctacctttgtgtttggacagtccagcaatcctgggagcagctctggcctttggtaacactgctgaatccagcacctctcagtctttgctattttctcaagatagcaaactagcaaccacatccagcacaggtacagctgtcaccccatttgtctttggtccaggagccagcagtaataatactaccacctctggtttcggctttggagccacaaccacatctagctctgcaggatcctcctttgtatttggaactggaccctcagcaccatctgccagtccagcatttggtgctaaccagaccccaacatttggacaaagtcaaggtgccagccagcccaatcccccaggctttggatctatatcatcttccacagcattatttcccactggttctcagcctgcaccacctacttttgggacagtgtcaagcagtagccagccccctgtgtttggacagcaacctagtcagtctgcatttggctctggaacaactcctaattctagttcggctttccagtttggcagcagcactacaaatttcaacttcacaaacaacagtccatcaggagtgttcacatttggtgcaaattctagcacacctgcagcctcagcccagccttcaggctcggggggctttccatttaaccagtctccagcagcatttacagtggggtcaaatgggaaaaatgtgttctcttcttctggaacttcattctctggtcgcaagataaagactgctgttagacgcaggaaataaaggtcacattggtgttgtactcaattttaacaacagctggtgccctgctttcagatactggattgtactttgtgctggggttatctgaagtcagatctgcctaaggacttctttaattttggaattttcctcctttctctttcgttacagaagccccaccctgcctcacccacccttttttaaataaataaatagctagactggtgactgattcttcagcaaaaatattttatgatccagcagattattcactgatttgacatagtctggctgtacccaggaatggagcctgcacggtgaatggctttgtatagaacctctttgtctacaccattatgtgcgctgataagcgttcatggaacgcgttgaaattgtaattatatctgaggaattctgtatagattagaattctgtatagattagagagtgttgaaacggatgatttctatgctgagtttgtgctggtgtatgtgtgaagtgagtgagttgggtgtattgtgcgctaaacttttctgatagaggaagcctgattaaagaatggtccgtgctaaggacttgttagatctagttcactctccatttaataattatatgctatttctatattttcattctcctatcacctgtcttgcctttttcattattttattatgaaacttgtgtaaatacaattttgtttctgtactttttggcataacataaatctgtgaacttgaaatttgaattttgtgttagagatttttttgttgtttgtttagtcttgtctcagattttattatgtaaatcccattattcaaagttgcctaaatccatttggaaatctttaaaaaaaaaattggggattcttaaagttgaatttattggcttttctgatccagttttgtttggaccaaaaaccagtattgtacaaagtattaagcatatatttttatatttactaaaatggactgtggtgactttggataataaggaaaagtttaatattaaagccatgtttattacagtataattaacatgttaacccatgggataaatgccatcaataaaaattattatgacat

SEQ ID NO: 61580 - DNA, 2351 bp, Homo sapiens
ccggggcggatggctccggccgcctggctccgcagcgcggccgcgcgcgccctcctgcccccgatgctgctgctgctgctccagccgccgccgctgctggcccgggctctgccgccggacgtccaccacctccatgccgagaggagggggccacagccctggcatgcagccctgcccagtagcccggcacctgcccctgccacgcaggaagccccccggcctgccagcagcctcaggcctccccgctgtggcgtgcccgacccatctgatgggctgagtgcccgcaaccgacagaagaggttcgtgctttctggcgggcgctgggagaagacggacctcacctacaggatccttcggttcccatggcagttggtgcaggagcaggtgcggcagacgatggcagaggccctaaaggtatggagcgatgtgacgccactcacctttactgaggtgcacgagggccgtgctgacatcatgatcgacttcgccaggtactggcatggggacgacctgccgtttgatgggcctgggggcatcctggcccatgccttcttccccaagactcaccgagaaggggatgtccacttcgactatgatgagacctggactatcggggatgaccagggcacagacctgctgcaggtggcagcccatgaatttggccacgtgctggggctgcagcacacaacagcagccaaggccctgatgtccgccttctacacctttcgctacccactgagtctcagcccagatgactgcaggggcgttcaacacctatatggccagccctggcccactgtcacctccaggaccccagccctgggcccccaggctgggatagacaccaatgagattgcaccgctggagccagacgccccgccagatgcctgtgaggcctcctttgacgcggtctccaccatccgaggcgagctctttttcttcaaagcgggctttgtgtggcgcctccgtgggggccagctgcagcccggctacccagcattggcctctcgccactggcagggactgcccagccctgtggacgctgccttcgaggatgcccagggccacatttggttcttccaaggtgctcagtactgggtgtacgacggtgaaaagccagtcctggggccccgcaccccctcaccgagctgggcctgggtgaggtttcccggtccatggttgcctttggtcttggggttcccgagaaagaaacaagattctaacttcttcccgaggcagggtactactggcgtttccaccccagcacccggcgtgtagacagtcctccgctcccgcagggccactggactgggagaggggtgccctcttgagattcgacggttgccttcccaggatgctgatggctatgcctacttcctgcgcggccgcctctacttggaagtttgaccctgtgaaggtgaaggctctggaaggcttcccccgtctcgtgggtcctgacttctttggctgtgccgagcctgccaacactttcctctgaccatggcttggatgccctcaggggtgctgacccctgccaggccacgaatatcaggctagagacccatggccatctttgtggctgtgggcaccaggcatgggactgagcccatgtctcctcagggggatggggtggggtacaaccaccatgacaactgccgggagggccacgcaggtcgttggttcaccttgccagcgacttgtctcagacttgggcaagggaggcttttggcatgacttaagagggaagggcaatcttttgggcccgcttatgcaggtccttgggcaaaacctgggcttgccctgtcttccattccctgttcccttaagggtaaggcacccattgggcaggaactgggggaaacttggagtgtcctttgctgttatcccttgtttttgaggttcccttcccagggggctggcaactgaaagcaaagggtgctgggggcccccaatggcctttcagcccctggcctgagcaaactggggcttgtaagggcaagggccaacttccctgaaggtcaaggtccttgggtaaggtgccctgcactctgtcctgcctttctgggctgaacaatccctggaaaatctgttctcccagaatccccaggccaaaaagttcacagtccaaatggtgaaggggtattcttcatgccaggagacccccaggcccctggaagcttgcaacatacctcaaatcctgtcccaggtccggatcctcctgaaagcctttttcgcagcactggctatcttccaaagccatttgtaaatgtgtgtacagtgtgtataaaccttcttcttctttttttttttttaaactgagggattgtcaattaaacaccagttgttttcta

SEQ ID NO: 61581 - DNA, 2238 bp, Homo sapiens
ttttttttttttgatgatttggatattattattacaaagaatttaaatatacaagtttggctatgaaagacccagctaagccacttaggcaaaagtctatctttgatgtcatagtttccaagaagtatcataagagtcaaacagttaaacatttctctgtgctttttttttctattttctaggaaatgttgggtttagagagaagctcatcaacttacttatacaaatcaggatatactgagggggggggaggataaactcgacatttccatattttataatataatgtggaaagattcagaaatgactgagaagatacagtgatatgatatttaaagcaaatattggcatatgcttatacaagaaaggcatcttacaataatatttctgttggtacattacaatttttcagctagtaattctaaaatgccagaggtcctatgatgcaatatcaaaaaaaccagggaactgacatacaaagtcaaatataaagatagtaacattcagtcatccacagataaaaggctatctggacataagcctgaaacaagcaagacgccatccactgcgatttcgccggttttgcccttgccacgttctgcttcaaaaatgatgcttttggtagcatcagttccttgatacaactgaattttccctgtcttccacttttcatcctcactcgtggtcttctcccatgccagggcattgttactgtttttcacaaacactcgaagtttcccgactttgtctccggccagccggtaatcaaagagcaaacagaagttgctttggggttgcaggtcaggtaggagaagtttcaatcggccaatgtctttccttgtgaccctgccaaaggccgggaactgccaatatagaagccaaatagcattatctccgatcagcaggattcccagtcaaaatcatcttcgtctatcctgtttcccagtcacagatccccatgattgaagctgcagtcaaccgagatatttaaatctgctttatgttccagtttggaagttagcgctttcctttggaccgagaatcaggccgaattcacctgcttcattcaccttagggaaaaacacatctccctcgaaaaggtcgctccctcctatgtcaatccttcagggctttctcttctcttttctcatcctcaagcccctctttcattttctcttcattcccttttttaccctccatgagagttcccgcctctggaaactatctcttcatagttgaagggctgcaagttcaccttaggggtaggagtcctggtgggttctggggtaacatttttaatttttgccttctttttcatgctgtttttgtgagcaagcaacttcttgattctgtctttgatggtaccaggtgctctgaggacttccttcacagaattttcagggatagcagaacaccgaagtccattgcctttatatccctgcttgcatttacacttgaaggacccttgggtattgaagcaattggcatggtggctgcacgtatggctatccatagtacattcatttatatctatacagtcatatcgtccactgatatattgcagttcgaaaccaatgtgacatttgcagtagtagcttccaaatgtgttcacacatcttcgattgtagggacagatgactttaccagaggcacattcatcaatatctagacagtctcttccatttggggccaggcggagtcctgaggatggacacaggcactgtggcccttcttctgtgtcttcacagctgtactgacagtttatcatggcacatgtcctagagttcacacacgtagcatctggcatgagcatgtggccactgaggcaaaagcacttgtagcttccgtgtgtattcacacatctgtgttggcatggccggggtttcattccacactcattcacatcttgactgcaggttttcccggtgtatcctggaaagcatctgcatttgtttggtcccacgcactcaccaaacttacatccaggttcgcatgtagcttcacagactcccttgctgtttcttctccagccgtagcagcaggccagtttagttccatagtgacagaccccaggctgacgtgccgatgctaacaacccgtgatgccttgcactggccgcgttcccgaaaccacctgccacccaggagagcagcagcgggagcgcaaggctccagggcagaggcattctcgcacgggtcctccttcctcctcctgagcccccctcgggagggcgccggc

SEQ ID NO: 61582 - DNA, 2123 bp, Homo sapiens
tggctcaggagagcatttataaacttctcctccaaccacaatatttacttgaggatccagtccagccccatcaattcctagggttacatgctccctttttttccagcgaggatgaagggggttggttattactagttctaaggggttacactgaccactggtacaggaagggccacttttccttttctgaaggtggacaggatccttttcattttttgtccaagtagcctaagtgacacaagaccagtatccacgttcatttccacacagccctaattcatcacaaatgtacttattttctgccatatagcctctttcctaattaagagaaccacatcctattcctaacttattactattaatgacagcacaggcatcaaattttaaggtgacttgtttgggcacccctttttcttctgttttggctaacactttactcatatcatttatgagcccccaccagtcctcagtccttaatcttattttaaaaaccgtggtcatgggaggctcagatgggtcataacacacatcaggttggtcacttcctgggctacataccttgtacagaataacattatacaaacaagttatttttagagttccagtacacttataataaccataaaataataggactgtagcaaccttttgtcctacctcagtgacttgatgtatacactggaacagtcctcagtctgaggaaggtcagttgaagtccttactgtaaaagtccaaattttaaggaaaatgagttccgcaatgagttttctcatgcttcggccgtgcgtggaccagtcagcttctgggtgtgactggagcagagcttgtcgtcttcttcagagtcactttgcaggggttggcgaagctactcccgtccacgtacccctcacagtctactgatgtttaaggatagtctcggaggttgggcctgctagaataaactgagtccaacacctctacacagtatgttcaactaggctctctgataccaggagcaaggtggtggggtttagggtgttgcaaacttcagtggttatgtggggattttcacatagcaagctttggtacttggttaatctagcatttgtaaccaatgaggtcctttggtagtcattaaagttaccacagcatggggggcctttatattcaggttttcctaagggttagtttatctgcttcttgtgctaacagggctgttgctgctagggcccttagacctgggggccagcctttggaaatcctgtctagttgttttgagagataggccactggccttggccagggcctcacagtatgggttaaaactccaactgccattttttctctttctgacacatagagtgtaaagagttttgtcaggtcaggtagcctcagggctgggaccaacatgaggttttcttttaactcatgaaaacctcgttgttgttggttgtaatagatgtagtttatctaatctacatttttattaactgtcacccactaaaatattgacttaaatcctgcagctatttgatttcaagctttaaattgatctggtattcttcgtgggactccaattgcatctaaatagacatgagagtcgaaagacccataaggggcttctctcgctttacaatgtctttctttttttccttctggttgatgaaatgccagggtgaaagggatagccaattggactaaagtacaagtgccactccagttattcggcagagtgcccagtaaaggtccaccacaataccaccacacatctgctcggggatgaacaagggctgactgattgataagctcttgaaaattcttaagctaactgcatcctttcaggtctccaaggaatgctaagtttcctccctgttgtgagagacacgaagtgaacttagtgttgggagacagaggctggatggcccttgggggctgatccacagggtgctagactttgggatgtagcagagagagcttggcatgacttattactccaggctgtagaatcccagagaagggctaccatgcagcctacgcctggttgactggagaaccacgttagtggaaaggggacaatctgggcctctggcctgccatgtgtacacacataacaattgcttttgtttaatgtgcagatggaatat

SEQ ID NO: 61583 - DNA, 798 bp, Homo sapiens
ccagtgaagaaacgccagagtgtggaaagtggaggacgactgatgaaggatgcctgagtacgtttttacttcaggctctatgggagagaatcagcttcctgtctgggtacccacaagacatcttaagctgtgccatgagccagaatccaaggaagaggaaaagacctcggaatgtccctgcacccctggttcatcagatggctcagatgaacatctctgttgagcagatggaaaccagtaaaacttgccaagcaactccaccgacctgtgggcagatgaagagactagctcacattgcagacgagaacctgaggtctcagaacaagctgctgaccaccagtaatctaatgatagctatgatggcagtaatctccttggcggtgagtctccccgtagctggggcagatcaaaattacatttattgggcctacattccattcccccactgattaggtctgttacatggttagaccccctggtggaggtttatattaatgatagtgtctggatgcctggaccaacagataactgaggtcctactcatccagaggaggaaggaatgttaatgaatgtttccattggttatcgctttcctcccatctgcctggggccagcagcaggatttttaaattatgataaacaaatttggatggtttatgtccctgcacataatggatcaaaagcctctattcatgcaatcagtggaagaacatttcaatctttggacactattaaataccttgagcatggctatgttatgacacatcgccagattaataaatttaaacctaataagaa

SEQ ID NO: 61584 - DNA, 1169 bp, Homo sapiens
ttttttttttttttactcatttttagggctttttatgtggccttcaaagcacgttgcaaacaaatccctttcactcctcagaggaggagccattaggaaggtagggggcgacaggcacagcctacagcctctcctcaggaggacagagggggtcattgcatttgagccccctgccagtcatcttcgggggctcctgagggtccaggtccaacatgtttcgagggtctgcagcacatccacgggcgctgtaggacttccaggcctgcatgttacagctcttcaggatggctcccaagctgcctgccaagggcctacttcgaaagtttgggggaacccccttgcccttttttcctttcgtatatggcatgcatcgtcttgctcccactttcacttggggagaccaagctgctgggccaagcaactttgttggatgttgcccgggaatgcctgtaatctaatgcgcgtgggacgttgggagtagacagaaaccagaggcttcttaatgtcgactgcctttaaagcttgcgtcaggggctccacggctggctccatgaggcgggtgtggaatgcgccactaaccggcaacatcctggtgcgtctgaaatgaaacttagaggaattcttctggagaaaccgtagagccttcagcaaattccatggctccggcaaacactagggctgcaaactctcccacactgaatccagcagcagcaacacagttctcaatcaccgagggctgcaggtgatgtagtttctcgacagcggccagcgatgccacgaagatcgcgggctgacagtgcacggtgcggtccagggtctcctgcggcccgtgcaggctcagttccagcaggtcgtagcccagcacgcggcgggcggcggcgtagagttcgcggacgcgcgggtagttgagcagaccgcggcccatgcccaccacctggctgccctggcccgggaagagcagcacggagcactggcccggcattcgccgctccgtcgccgcccagggcgcctcctcctccgccccggtcgcatctcgcagcagctccgctacaccctgggcgcccggcggaggcaccgggaagctcgaggcgccgcggcggtagctggcgcccaagcccctgacccacgctacccgtgcgacccggacgctcatggtcggacacctgccc

SEQ ID NO: 61585 - DNA, 1624 bp, Homo sapiens
taaaagacagtgatctcacgcggaggggaagatgtttgccatcaaaatgtgacagaagagacacgctgcatggctcggaacgcatctccttggtggtgggggaaagagacttagaggagagaggctgcgccctggcccagcctggctcggctcagctccgcgcgccatggcaagctcggcttccctggagaccatggtgcccccggcctgcccgcgcgccggagcgtcgccggccacttccaagacactggccttttccatcgagcgcatcatggccaagacgtcggagccccgtgcgccctttgagccccggcctggagcgctagaggcggacggcagccagggcaagaaactgctcaacctctgctcgccgctgccctgtatgatccccctccagcccctaggctacgaggtgccgtcaaagacactgctcagttactcggagctctggaaaagcagcctccgggcgggcggcggcggaggcggcggcggcggtggcggcggcggcggcgggggggccccagtgtgcggcgccagcggcttgtgcaaaaccaactgtggcgtgtgctgcaaggccgagctgggcctggcgccgtccgcgctgcccgcgggcagggtcatcaagccgcaggtcatcaaccaggctgtggggctgccggccagcggctcgctctactacttcaactacctggactcgaccgcgtacccgccgtctgagctcctcagcggccacctcttcccgtctggcctcctcaatgcgcaggcccccgccgccctggctgctcaccccaagctctttctgctggagaacgccaagctggccggcctggctgcggacaagttcccccacccggctccctatccccataaggagcgcttgccggcgccgctggagcaggtactgaaggaaaactcggccctgactgccgagcgcggaggcgtcaagggccacagcaagctgccaggaggctccgcagatggcaagcccaaaaacttcacctgcgaggtgtgcggcaaggtgtttaacgctcactataatctcacccgccacatgccggtccacaccggagccagaccgttcgtgtgcaaagtctgcggcaaaggctttcgccaggccagcacgctctgcaggcacaaaattatccacacccaggaaaagccacataaatgcaaccagtgcggcaaagcgttcaaccgcagctccacgctcaacacgcatatccgcatccacgcgggctacaagcccttcgtctgcgaattttgcggcaaaggctttcaccaaaaagggaactacaagaaccacaagctgacccacagcggcgagaagcagtacaaatgtaccatctgcaacaaggccttccaccaggtctacaacctaaccttccatatgcacacccacaacgacaagaagcctttcacgtgcgccacttgcggcaaagggttttgcagaaactttgacttaaagaaacatgtgcgcaaactccacgacagcgtgggccctgctgccccctccgcaaaggacctgactaggacagtgcagagctgaagagctactgccttgcccttccttccctccctgtaccacctgaaaacagatcacacatataaacttatttctaaaatt

SEQ ID NO: 61586 - DNA, 1523 bp, Homo sapiens
  misc_feature (1)...(1523): n = a,t,c or g
cttttctaaacaaattttcacattgtaaacaaagcgtcctattttgtatttgagttttgcctttttcttcctagggaactataagagagtttctgtgaccattaagaggactccattttcaccgctgaaatagaattattgcccttatagtcttgctggcaaattgttagaaaaaaagtttatttacagtattttgcttttccataccaattctagtgagaagttcacattcttaaattcccagtcagcaactgcatttctcccctccaatgtcctctccatgacttatctctgaagtttcgagccaatgtttaaaatgtacactatttacaaatgaagtgtccaaatgccatattcccagctctccagtcagcagggggacccttctgaagtgttgtcatgtgctgggattcagaacttgaacaagttgataaagtcctggggtgaaagtgaaacggagcagctctctgggttattggcagtgcacggatggtcagtgcccttccaggaaaggatgtgacagtgtttgcagagctgaagggtatctccatactgctctttccttgggtaacatcggacaagtttgaaatacatcttcttccaatccagctgccctttgtctgacagaattaatcgtttgcggatctgccgctcggagaagtggtactggcagagtttcttccacagcagccggtcttcgctgagcacgtgcaggtcgggggcagcctggcccaggctgaccaggtcccgcccgtcgctcagcctctgcatgatgttcagttgtaggcacaaaggcaggtcagtgaaggtgaggcctttgaaggcaggcctggtgatctgaatgttgttcagctgctgctgccagtggagaatcgtctccatccgatacacccacatgttaatgttcccgaccagcacagacttgccgactctttggaccagtgtacataaggatgtgtagagggtctggagtagttcccttattagtctaatgttttgctggtcttcaaggactttcagtaccactttttccaaaatattcatgaagttcttttgggcgatgccactcagggatgtgagctgtgactttgctatcagctccaacagccggaccacgtagttaaatcttctggaatccagaatggcagttgagaagtccagtctgttgaaagcttcccccagggtgcaatatccatggcgctctttagtacttcctttgtgaacatagatccatttttcttggtggaaatactgagttttggttttgctattcagcatgtccttctttctcttcttggctgcaacatcatagttcaggctgttgaaaagattctccttattgtatacctccttgttgcagtaactgctgaggtcgctcacgaaactgccgctcttctcatccaggaagcgcttccagccgtcgaccgtcttcacccagttctgccccggggaccgccagtcctgcccgaggaatggcatggccccgcgagcgaattcaagcncnccaactaatggtctcgaat

SEQ ID NO: 61587 - DNA, 5405 bp, Homo sapiens
tgcatgtccccgcctcgcgcggcggcggcggcgggtgaggagcctgaggcggcggcgggggtggctccgcgcgcggtggtctcgggggcaaaataacatggcagccagacgaattacacaggagacttttgatgctgtattacaagaaaaagccaaacgatatcacatggatgccagtggtgaggctgtaagcgaaactcttcagtttaaagctcaagatctcttaagggcagtcccaagatccagagcagagatgtatgatgacgtccacagcgatggcagatactccctcagtggatctgtagctcactctagagatgccggaagagaaagcctgagaagtgacgtattttcagggccttccttcagatcaagcaacccttccatcagtgatgacagctactttcgcaaagaatgtggccgggatctggaattttctcactctaattctcgggaccaggtcattggccaccggaaattggggcatttccgttctcaggactggaaatttgcgctccgtggttcttgggaacaagactttggccatccagtttctcaagagtcctcttggtcacaggagtatagttttggtccctctgcagttttgggggactttggatcttccaggctgattgagaaagagtgtttggagaaggagagtcgggattatgacgtggaccatcctggggaggctgactctgtgttaggggcggcagtcaagtccaggccagaggtcgagctctaaacatcgttgaccaggaaggttccctcctaggaaagggggagactcagggcctgctcacagctaaggggggtgttgggaaacttgtcacattgagaaatgtgagcacaaaaaaaatacccaccgtgaatcgtattactcccaaaactcagggcactaaccaaatccagaaaaacactccaagtcctgatgtgaccctggggacaaacccagggacagaagatatccagttccccattcagaagatccctctggggctggatctgaagaatcttcggctccccagaagaaagatgagctttgacatcatagataagtctgatgttttttcaagatttgggatagaaataatcaaatgggcaggattccacaccataaaagatgatattaaattttcccaacttttccagactctctttgaacttgaaacagaaacctgtgctaaaatgcttgcctcattcaaatgttccttaaaaccagagcacagagatttttgcttttttactatcaaatttttaaagcactctgctttgaaaacacccagagttgataatgagtttttaaacatgcttttagacaaaggtgctgtgaagaccaaaaattgcttttttgaaatcataaagccttttgacaagtacataatgagacttcaagaccggcttctgaagagtgtcacacctttgcttatggcctgcaatgcctacgagctaagtgtcaagatgaagaccctcagtaaccccctggacttggctcttgccctagaaaccaccaactctctctgccggaagtctttggcccttttgggacagacattttccttggcctcttctttccggcaggagaaaatcttataagctgtcggcctgcaagatatagctccctcacctgctgcgtttccaaacttcgaagactccactttgtttgggcgagagtacatagaccacctgaaggcctggctagtcagcagcggatgtcccctccaggttaagaaagccgaaccagagccgatgcgagaggaggagaaaatgattcctcctacgaaacctgaaattcaggccaaggctccaagtagtctgagtgatgctgtcccccagcgagcagatcacagggtagtgggcaccatcgaccagcttgtgaaacgtgtcatcgaaggcagcctgtctcccaaagagagaactcttctcaaagaggaccctgcttactggtttttgtctgatgaaaatagtctggagtataaatattacaagctgaagttggcagaaatgcagcggatgagcgagaacttgcgaggagccgaccagaagccgacctcagcagactgtgcagtgagggccatgctgtactcccgggctgtccgcaacctcaagaagaaactccttcccgtggcagcggcgggggctcctccgtgctcaaggggctccgggggctggaaggcgaggagagccgaccaccgggacccagaccctcctattcctcagggcaccagggctgaaacaccacggccggcaggctccaggcctctcacatggcaaaaccatccctgccagacagaaatgattgctgccaaggacttgcccgctagacccagtttggaccttctcctcaggaccccagcttagaagcctcaggcccatcccccaagccagcaggagtggacatctctgaagcacctcagacctcttctccctgcccatctgctgacattgacatgaaagacaatgggagaactgcagagaaactggctagatttgttgctcaggtggggaccagagatcgaacaatttcagcataggaaaacagcaccgataaccctgacctgtggtttctacaatgaccaaaatagttctggctttcaaattctatccgaaagaaagtgtttgaactatgtccatcaatttgtttcacgtcatctccgcacaacctttcacactggtggtggtgacacccgaggttctcaggagagccccgtggacctcatggaaggggaagcagagtttgaagacgagccccctccgcgggaggctgagctggagagcccagaggtgatgcctgaggaggaggacgaggacgatgaggatgggggagaggaggcccccgcttcctgggaggggcgggccaagtcttgagggcagcacccctgccgacggccttcccggcgaggcttgccgaggacgacctgggcttggagcacctgccttgttcacaggcctccttcaggttacctgctttcccttcggaagaggattcagcagcaagtcattgaaggttggcatgattccagctcccaagagagtgtgtctcatccaggagccaaaagtccatgaaccagttcgaattgcctatgacaggcctcggggtcgtcccatgtccaaaaagaagaaacccaaggacttggacttcgcccagcagaagcttgaccgataaagaacctgggcttccaagatgctgcagaagatgggctggaaggagggccatggcctgggctccctcggaaagggcatcagggagccggtcagcgtgtacgcagcaggcagcctggggtgggagtgggtggggcctcagtccttccacctgcagcctgccgcttggctccttcacagccaagatggcttacagctggcagttgatttttgttttttaaacagaaggcatcttcagatgagaagctgatcatttacatgtgcaggtgtttacagggctcctttctgtcctggtgtagattttttaaccagcttgttggccctggtcattttggccacatttgtgaccatcataaaagctaagtggtatttctgtgtagtttccgtctggaactgctttcccattcccgggaacccatagccgggccagccaggggtcccgaacacaggcccaaagtttattaaaccccgattcataacctccaggcagggcattttcatttaattactgagcttagtttcctgctggggtaagggcatttccgagggtaaccaggggccctctgggcaccccctcaaaagccagctcttcgagggtgagtactccttgtttctactgtgagtcgcgtcttgattttccctttctttgatgtctcagtgtgtgtcccaaacacctgcatctcatggactgtttgtgcccatgcccagttcctggcatgccaggccctgggctcaggtgcacaactgactctctttttcactccctaggggaaccccctcggaaggggaagggttgggtgctgacgggcaggagcacaaagaagacacattcgatgtgttccgacagaggatgatgcagatgtacagacacaagcgggccaacaaataggtatgttcacaggccagtgtgtaaggccgtctgccctcgctggcgtgctggtatgcagagaaatttcccccaacaaagttgatgttccctgctcccccaaaaatgccacacacaaaaaaaatcacaaaattctgtgagggaaacaaaagggtctatggatgtggatatgccccattcttaccttccaggtttgctgaaggagcaaacctcacactggccaagggcagatgcgcatggcctgcctggtgccccggctgtgagcccctcaaggcctccaggccagcctccgtggatgtgcgtgtggaaataggccacgcctgtctcttctcttgctcaagttttctctcacagatgacagccacctaccacataacatgaccagcaaacggactgttcctagtccagagggccttgccatcatgcaagtggaagggcgactgtgacagccactgccacagaggatggcagttggctgtgtccctttgtgagggtcttcaaatccttttccttctgcagggccttgggcctgtaaatatcctcatctttctattcttttttttttttagtgccccctcacctaatttccacctcagttttgaacaaaatcgttctcttcctgaatagatcataaccactgatgtgaaagataagccttgaagcagcaattgcccttaaaacatcatccctgccctggatcggcctggagccagtgcccaagtacggtttggtgtgtacatgaaaacaaacgtctctgcagtctctggggcggaggtttcgctggcttttctttctctcaaagaaaaaaacatgcaccattttcaatgtgcttttgcctctcctctctgttcacatgcttttagcagcaagtcccctccaaatctgtcttggttccccttcagaaggtggcgctgcccccgaaaggcacctcagcctgtgagtgctgaggaaccagctcctctggctgattttccagttggactggccattgctctccagaagtgctctgttagcaaacgtgatgtggaaacgatcacagatggtgttttctcgttgttcgccagaatttatacgggggagacaaattcccgttccagggtcacccccgagaggacaacaggcatctggaagtgctctctcgccactctgggtgctttactgtctctggcttgtttccatcactggaaatcacttagagaattgtagtggttttggtccttgataaagcctagaagacatttgtgatgttacaaaatggaagttttcttttgtgtctgttttttaagatctaagaagttgtgaatgttgttaatcatttagccgttgcaataaatgtagaggaaatgcaaaaaaaaaa

SEQ ID NO: 61588 - DNA, 2107 bp, Homo sapiens
ttttttttttttaaaccacacttgtaaaaaagatgttgacaattcataggaaaaaaagctgaaaatgtttctcattaagtcagggttacacaaaggttatatttataatatatatatttgtatatttataatttagagacgaaaaatacggaatggcaaagtgatgcctgctgtagttagatctcaagatacctggatcgtttcccacaaacaagtgtttcttgacagaaggggttaacaagggaccatcccagtgtctctatagtcgccattggctggggagcggggctctgagagctgggtcctcagaggtttcaaggggactgggatctcccctggggcagctccacaggcatgcctgttggaaggtagtccctgggtgatgggtgttgttcccgtaggcttcaggttgttctccgggttggcggtcttcttcttcctcttcatgcagcacaccgtcagcaggacagagcaggaggagatgggcacgctgatggccaggatcacccaggcgatatccatcttgctcaggcagatggtggctctgtgctgcggtttgtccccctcggccacatgggagatgttccctgctgtcccaggcttccaggtcccggcggggaccaggcggttgaggaaattgcctgtggctgtggataccactgtggagagaggactgggcacccggtcggtcatggtgagggtggccacagtctcctccttggctccagaaatagtgctttctgagaccctggagggatgggttggagcttgtggggttgtggatgctccctgaggaatcccctgggaaggggctgagacactggtatcgaaggcagctggggtgggccccgtggcagccgtgaagaccccagagctggtagacagaggtctgctggtgccaggggtaacagtaagccaagagtcactatggctggggccatcctgtgggtcaccgtggtgggggcgctgagaaggcactggggcagcttgtggactgacaggggcacctgaggctgctgtggcatctggtgtccctccttggctggtgaaggtagaaccacccccctgggctgctctgcgaaggcctggcttgtcctttgcaggccccagggaggtggtggtgggtgcccatgaggtattgctgggcactgtggtcgcagccactgtctggggctgtggtgaagaggagtagccccagagtggggtcctgggggtgagggtagagggctccggttccacagaccctgtgaagttgcccttgtagatctgaaagattttccccaggggccgcttctgccccagaggtgtggagcttggatttcgtcctcgctgtccttctttactcctggagtggccaccaggtgcaggcgggacagggcgtgatgaattaccagccccttttcgggaagagcctgggggcctggggggcctgcgtgtggtagtgcgggggggcgctgtggtggggcggctggtggcccccggtggctttgtcagcaggatggtgggggcagcctgccctcgagggcggccctctggcttggaggatgtggttgccatggctgctggagcgggccctgtggacagggagctttcagaatggggggcggttactgtcgcagcgatggtggagatggtgtgcgtaggagggtgcccctctgcacggggtgtcggtgttgccatgggagctgcagcctgtgaggggggtccatcgggattgggggtcagcatcaccacagaagtatgtctggtagagctgtggggtgctgtcaccatggttcccgggggagtgcctgaagggaggacctgaagagattccctgggagatggttcctggatggcaaatgccagcgcttcggtcagtgccaagatcagcaggaaacttaacagttggcaatagagggcctgtaaacttctcttcatggtatcatctggtcctgcttatcctccagtttattcatgattctgtcctggagtagagggtgtggaagccttcaaacgcacttacatcctcatgacccatcggctctgctgcttttcactgctcattcatttctgcatgttggatgaccaccaatctatcaccaactcgggagaagcgctccggctc

SEQ ID NO: 61589 - DNA, 9401 bp, Homo sapiens
tagaggcaagtgaccagggtcgggacccgggtcctcgggagtaccacagccgctgttttcctttctgtggaggatgacaatgataatgccccccagtttagtgagaagcgctatgtggtccaggtgagggaggatgtgactccaggggccccagtactccgagtcacagcctcggatcgagacaaggggagcaatgccgtggtgcactatagcatcatgagtggcaatgctcggggacagttttatctggatgcccagactggagctctggatgtggtgagccctcttgactatgagacgaccaaggagtacaccctacgggtgcgagcacaggatggtggccgtcccccactctctaatgtctctggcttggtgacagtacaggtcctggatatcaacgacaatgcccccatcttcgtcagcacccctttccaggctactgtcctggagagcgtccccttaggctacctggttctccatgtccaggctatcgacgctgatgctggtgacaatgcccgcctggaataccgccttgctggggtgggacatgacttccccttcaccatcaacaatggcacaggctggatctctgtggctgctgaactggaccgggaggaagttgatttctacagctttggggtagaagctcgagaccatggcactccagcactcactgcctcggccagtgtcagcgtgactgccctggatgtcaacgacaacaatccaacctttacccaaccagagtacacagtgcggctcaatgaggatgcagctgtgggcaccagcgtggtgacggtgtcagctgtggaccgtgatgctcatagtgtcatcacctaccagatcaccagtggcaatactcgaaaccgcttctccatcaccagccaaagtggtggtgggctggtatcccttgccctgccactggactacaaacttgagcggcagtatgtgttggctgttaccgcctccgatggcactcggcaggacacggcacagattgtggtgaatgtcaccgacgccaacacccatcgtcctgtctttcagagctcccactatacagtgaatgttaatgaggaccggccggcaggcaccacggtggtgctgatcagcgccacggatgaggacacaggtgagaatgcccgcatcacctacttcatggaggacagcatcccccagttccgcatcgatgcagacacgggggctgtcaccacccaggctgagctggactacgaagaccaagtgtcttacaccctggccattactgctcgggacaatggcattccccagaagtccgacaccacctacctggagatcctggtgaacgacgtgaatgacaatgcccctcagttcctgcgagactcctaccagggcagtgtctatgaggatgtgccacccttcactagcgtcctgcagatctcagccactgatcgtgattctggacttaatggcagggtcttctacaccttccaaggaggcgacgatggagacggtgactttattgttgagtccacgtcaggcatcgtgcgaacgctacggaggctggatcgagagaacgtggcccagtatgtcttgcgggcatatgcagtggacaaggggatgcccccagcccgcacacctatggaagtgacagtcactgtgttggatgtgaatgacaatccccctgtctttgagcaggatgagtttgatgtgtttgtggaagagaacagccccattgggctagccgtggcccgggtcacagccactgaccccgatgaaggcaccaatgcccagattatgtaccagattgtggagggcaacatccctgaggtcttccagctggacatcttctccggggagctgacagccctggtagacttagactacgaggaccggcctgagtacgtcctggtcatccaggccacgtcagctcctctggtgagccgggctacagtccacgtccgcctccttgaccgcaatgacaacccaccagtgctgggcaactttgagatccttttcaacaactatgtcaccaatcgctcaagcagcttccctgggggtgccattggccgagtacctgcccatgaccctgatatctcagatagtctgacttacagctttgagcggggaaatgaactcagcctggtcctgctcaatgcctccacgggtgagctgaagctaagccgcgcactggacaacaaccggcctctggaggccatcatgagcgtgctggtgtcagacggcgtacacagcgtgaccgcccagtgcgcgctgcgtgtgaccatcatcaccgatgagatgctcacccacagcatcacgctgcgcctggaggacatgtcacccgagcgcttcctgtcaccactgctaggcctcttcatccaggcggtggccgccacgctggccacgccaccggaccacgtggtggtcttcaacgtacagcgggacaccgacgcccccgggggccacatcctcaacgtgagcctgtcggtgggccagccgccagggcccgggggcgggccgcccttcctgccctctgaggacctgcaggagcgcctatacctcaaccgcagcctgctgacggccatctcggcacagcgcgtgctgcccttcgacgacaacatctgcctgcgggagccctgcgagaactacatgcgctgcgtgtcggtgctgcgcttcgactcctccgcgcccttcatcgcctcctcctccgtgctcttccggcccatccaccccgtcggagggctgcgctgccgctgcccgcccggcttcacgggtgactactgcgagaccgaggtggacctctgctactcgcggccctgtggcccccacgggcgctgccgcagccgcgagggcggctacacctgcctctgtcgtgatggctacacgggtgagcactgtgaggtgagtgctcgctcaggccgttgcaccccgggtgtctgcaagaatgggggcacctgtgtcaacctgctggtgggcggtttcaagtgcgattgcccatctggagacttcgagaagccctactgccaggtgaccacgcgcagcttccccgcccactccttcatcacctttcgcggcctgcgccagcgtttccacttcaccctggccctctcgtttgccacaaaggagcgcgacgggttgctgttgtacaatgggcgtttcaatgagaagcatgactttgtggccctcgaggtgatccaggagcaggtccagctcaccttctctgcaggggagtcaaccaccacggtgtccccattcgtgcccggaggagtcagtgatggccagtggcatacggtgcagctgaaatactacaataagccactgttgggtcagacagggctcccacagggcccatcagagcagaaggtggctgtggtgaccgtggatggctgtgacacaggagtggccttgcgcttcggatctgtcctgggcaactactcctgtgctgccccagggcacccagggtggcagcaagaagtctctggatctgacggggcccctgctactaggcggggtgcctgacctgcccgagagcttcccagtccgaatgcggcagttcgtgggctgcatgcggaacctgcaggtggacagccggcacatagacatggctgacttcattgccaacaatggcaccgtgcctggctgccctgccaagaagaacgtgtgtgacagcaaaacttgccacaatgggggcacttgcgtgaaccagtgggacgcgttcagctgcgagtgccccctgggctttgggggcaagagctgcgcccaggaaatggccaatccacagcacttcctgggcagcagcctggtggcctggcatggcctctcgctgcccatctcccaaccctggtacctcagcctcatgttccgcacgcgccaggccgacggtgtcctgctgcaggccatcaccagggggcgcagcaccatcaccctacagctacgagagggccacgtgatgctgagcgtggagggcacagggcttcaggcctcctctctccgtctggagccaggccgggccaatgacggtgactggcaccatgcacagctggcactgggagccatcggggggcctggccatgccattctgtccttcgattatgggcagcagagagcagagggcaacctgggcccccggctgcatggtctgcacctgagcaacataacagtgggcggaatacctgggccagccggcggtgtggcccgtggctttcggggctgtttgcagggtgtgcgggtgagcgatacgccagagggggttaacagcctggatcccagccatggggagagcatcaacgtggagcaaggctgtagcctgcctgacccttgtgactcaaacccgtgtcctgctaacagctattgcagcaacgactgggacagctattcctgcagctgtgatccaggttactatggtgacaactgtactaatgtgtgtgacctgaacccgtgtgagcaccagtctgtgtgtacccgcaagcccagtgccccccatggctatacctgcgagtgtcccccaaattaccttgggccatactgtgagaccaggattgaccagccttgtccccgtggctggtggggacatcccacatgtggcccatgcaactgtgatgtcagcaaaggctttgacccagactgcaacaagacaagcggcgagtgccactgcaaggagaaccactaccggcccccaggcagccccacctgcctcttgtgtgactgctaccccacaggctccttgtccagagtctgtgaccctgaggatggccagtgtccatgcaagccaggtgtcatcgggcgtcagtgtgaccgctgtgacaacccttttgctgaggtcaccaccaatggctgtgaagtgaattatgacagctgcccacgagcgattgaggctgggatctggtggccccgtacccgcttcgggctgcctgctgctgctccctgtcccaaaggctcctttgggactgctgtgcgccactgtgatgagcacagggggtggctccccccaaacctcttcaactgcacgtccatcaccttctcagaactgaagggcttcgctgagcggctacagcggaatgagtcaggcctagactcagggcgctcccagcagctagccctgctcctgcgcaacgccacgcagcacacagctggctacttcggcagcgacgtcaaggtggcctaccagctggccacgcggctgctggcccacgagagcacccagcggggctttgggctgtctgccacacaggacgtgcacttcactgagaatctgctgcgggtgggcagcgccctcctggacacagccaacaagcggcactgggagctgatccagcagacagagggtggcaccgcctggctgctccagcactatgaggcctacgccagtgccctggcccagaacatgcggcacacctacctaagccccttcaccatcgtcacgcccaacattgtcatctccgtagtgcgcttggacaaagggaactttgctggggccaagctgccccgctacgaggccctgcgtggggagcagcccccggaccttgagacaacagtcattctgcctgagtctgtcttcagagagacgccccccgtggtcaggcccgcaggccccggagaggcccaggagccagaggagctggcacggcgacagcgacggcacccggagctgagccagggtgaggctgtggccagcgtcatcatctaccgcaccctggccgggctactgcctcataactatgaccctgacaagcgcagcttgagagtccccaaacgcccgatcatcaacacacccgtggtgagcatcagcgtccatgatgatgaggagcttctgccccgggccctggacaaacccgtcacggtgcagttccgcctgctggagacagaggagcggaccaagcccatctgtgtcttctggaaccattcaatcctggtcagtggcacaggtggctggtcggccagaggctgtgaagtcgtcttccgcaatgagagccacgtcagctgccagtgcaaccacatgacgagcttcgctgtgctcatggacgtttctcggcgggagaatggggagatcctgccactgaagacactgacatacgtggctctaggtgtcaccttggctgcccttctgctcaccttcttcttcctcactctcttgcgtatcctgcgctccaaccaacacggcatccgacgtaacctgacagctgccctgggcctggctcagctggtcttcctcctgggaatcaaccaggctgacctcccttttgcctgcacagtcattgccatcctgctgcacttcctgtacctctgcaccttttcctgggctctgctggaggccttgcacctgtaccgggcactcactgaggtgcgcgatgtcaacaccggccccatgcgcttctactacatgctgggctggggcgtgcctgccttcatcacagggctagccgtgggcctggaccccgagggctacgggaaccctgacttctgctggctctccatctatgacacgctcatctggagttttgctggcccggtggcctttgccgtctcgatgagtgtcttcctgtacatcctggcggcccgggcctcctgtgctgcccagcggcagggctttgagaagaaaggtcctgtctcgggcctgcagccctccttcgccgtcctcctgctgctgagcgccacgtggctgctggcactgctctctgtcaacagcgacaccctcctcttccactacctctttgctacctgcaattgcatccagggccccttcatcttcctctcctatgtggtgcttagcaaggaggtccggaaagcactcaagcttgcctgcagccgcaagcccagccctgaccctgctctgaccaccaagtccaccctgacctcgtcctacaactgccccagcccctacgcagatgggcggctgtaccagccctaacggagactcggccggctctctgcacagcaccagtcgctcgggcaagagtcagcccagctacatccccttcttgctgagggaggagtccgcactgaaccctgggccaagggccccctgggcttggggggattccaggaaggcctgtttcctgggaaggttcaaagaccagcagcattgattcctgaacaagggatttcgacagtgacctgtccttagaagacgaccagagtggctcctatgcctctacccactcatcagacagtgaggaggaagaagaggaggaggaagaggaggccgccttccctggagagcagggctgggatagcctgctggggcctggagcagagagactgcccctgcacagtactcccaaggatgggggcccagggcctggcaaggccccctggccaggagactttgggaccacagcaaaagagagtagtggcaacggggcccctgaggagcggctgcgggagaatggagatgccctgtctcgagaggggtccctaggcccccttccaggctcttctgcccagcctcacaaaggcatccttaagaagaagtgtctgcccaccatcagcgagaagagcagcctcctgcggctccccctggagcaatgcacagggtcttcccggggctcctccgctagtgagggcagccggggcggccccccttcccgcccaccgccccggcagagcctccaggagcagctgaacggggtcatgcccatcgccatgagcatcaaggcaggcacggtggatgaggactcgtcaggctccgaatttctcttctttaacttcctgcattaaccctgggccgtggttcctacgcccgaggctcccttcccttccccagccgcactcatgccctgctcctgtcttgtgctttatcctgccccgctccccatcgcctgcccgcagcagcgacgaaacgtccatctgaggagcctgggccttgccgggaggggtactcaccccacctaaggccatctagtgccaactccccccccaccattcccctcactgcactttggacccctggggccaacatctccaagacaaagtttttcagaaaagaggaaaaaaagaatttaaaaaaggatctccactcttcatgacttcagggattcattttttttatacgctggaaattgactcccctttcccttcccaaagaggataggacctcccaggatgcttcccagcctctcctcagtttcccatctgctgtgcctctgggaggagagggactcctggggggcctgcccctcatacgccatcaccaaaaggaaaggacaaagccacacgcagccagggcttcacacccttcaggctgcacccgggcaggcctcagaacggtgaggggccagggcaaagggtgtgtctcgtcctgcccgcactgcctctcccaggaactggaaaagccctgtccggtgagggggcagaaggactcagcgcccctggacccccaaatgctgcatgaacacattttcaggggagcctgtgcccccaggcgggggtcgggcagccccagcccctctccttttcctggactctggccgtgcgcggcagcccaggtgtttgctcagttgctgacccaaaagtgcttcatttttcgtgcccgccccgcgccccgggcaggccagtcatgtgttaagttgcgcttctttgctgtgatgtgggtgggggaggaagagtaaacacagtgctggctcggctgccctgagggtgctcaatcaagcacaggtttcaagtctgggttctggtgtccactcacccaccccaccccccaaaatcagacaaatgctactttgtctaacctgctgtggcctctgagacatgttctatttttaaccccttcttggaattggctctcttcttcaaaggaccaggtcctgttcctctttctccccgactccaccccagctccctgtgaagagagagttaatatatttgttttatttatttgctttttgcgttgggatgggttcgtgtccagtcccgggggtctgatatggccatcacaggctgggtgttcccagcagccctggcttgggggcttgacgcccttccccttgccccaggccatcatctccccacctctcctcccctctcctcagttttgccgactgcttttcatctgagtcaccatttactccaagcatgtattccagacttgtcactgactttccttctggagcaggtggctagaaaaagaggctgtgggcaggaaagaaaggctcctgtttctcatttgtgaggccagcctctggcttttctgccgtggattctccccctgtcttctcccctcagcaattcctgcaaagggttaaaaatttaactggtttttactactgatgacttgatttaaaaaaaatacaaagatgctggatgctaacttgatactaaccatcagattgtacagtttggttgttgctgtaaatatggtagcgttttgttgttgttgttttttcatgccccatactactgaataaactagttctgtgcgggtaaaaaaaaaa

SEQ ID NO: 61590 - DNA, 2746 bp, Homo sapiens
ttttttttttttagagcaaatcaacttttatctccaccgaaaagacccattccactggaggggcccgtgagctagacggacttgccgtccagccctccaagccccctgcggggcggccaggaggatccctgagtccagcttgtaaacaccagagccagccctggagcctcaggcctctggagtcacggcagcccctccagacccttggattggggacatctgaggcttcacgagcccgggcagagctgcaccctgggctgtccactcggtcaccccagtaccagggaccacctcgaagcccccctctggtcggcccacagagacctgctcaggcttcagcaatcgtgagtcatgattcgtgtcttctggaggaagcaggcggaggctccagcggcccagcccaccccgcatcacaccaagactgacggcctcacttgtcctcacggtgtcctgattaaagcagagacgaggaggagcccagagccagttcagagcctgggccacttggcggttgccggtgctacgtgggcccttggaaaatgccacagacccagcaaggtgcctctgcccacccgaagtccccacaccagcagccatccaccctaggcaggggtccagataggcagagggtgggcttcggtgttgaacacgtaggcgtccaggctgagcaggtttgggtcatcggagaagagcaagaacagatacttgagcgtctcccccaggaagaagctctccatcttgtccctaggctcgggcttctgaggatcctggacattgttgatggaagaatagccacccgaggggacccgtgtgaatcggctgaagctctgcagaatctcccagccccagtcctggtatttgcggtcccctgtgacgcggtacaggtagaacaggctctccacggtctctggccgcagcaggttgtgcctgtctgctggcttgacctccacgtcccgacggcccggctgggggtaaaggttgaagtgcacgatctcgggactcagccccgtctccatctgccggttcatctggtaacaagtctccatgagctcctgggccagctccatgtggctggcgggcaggccgtggtagacgcccagagccagcgtccctggcaggaagcacaccaggtggtccatcttggcactgaagcggccgtgggcaagctcccccacaaaggtgagcttactgggctcggagtgccgcagcaggtgcgttctgacaccctcgatggcttccacgtagtcttccagcagctgtgtctcctgcttcccgccctggatccactgcttcagcaggtactcatagtagctgtcggccctggcgcccagcgtgaatacgcccaggtgggtgaagaggccactgtgggtattgatgaacatgggcaccagcccatccttcttcccagacaggccgtggatgtgctgtgtcaccttctccactgcctcctgaaacttcttatcccctgtgagacgggagagctcccggaactccagctgaatgctggtcacctcggccacagtgctgtcggaggtccaccgtggcgggtgggcaactccagtaccgatgttcacatccgagtaaggaatcttggatggtgttctgaaggcaggcattagccgatttccaaaatcctcagctttcctcaggaagaggctgtccccagacaggtggtaggcactcaggagcccccccaggatgcggatcgtgctctcaaacaggttgacgtccacgtccttttcaaagtgtaacttcttcgacacccacttcctggcttcctcaaattctttcctcagacccaagatccacatggtgtccagcgcgtcgatcagtgtgagaccgaggccaaaccactcactgaaggacctggacacaggcttcagctcgtcatggccccatgcaaacttgcggtatcctttccatgcatgcaggagaacgtcaatcacgcccttctggcgatagttcagaatgcactggtgtgccctgtgtcctggccggtggcaggggaggcttggtgggcacttctgctcttcttgaagggagctcggtgccctgctcaggctcgatcaccgctcccctccagctgatgactgtcctctgcggatctccttccgggcggggatccacaggggcttcttgcctttttgtggcctcctcctgggtcccatccttcaggtcttggcttgggggtctaatctgcaggtgaggtggtccccgctggatgtgtctttgtgtcttctgtgacgaaatctcaggtaagttctcagggtcggtgtccgccttctgaggagctggtaagacgggtggatttgctggttttaacccagcaatttctggcctcatcttctgctcttcctctagcctgaaagccagagctttccaatggtcagccaagttgatgtagaagaggagtcctcagaaaagcagaaaggcaaggaggaagagaatcatattccgctgcaatctcgacagttgcttccatttcctccagcacgagcgccgccgccaactcttgctgttgtcatagctctcgccaaagctcagcgtcaccgagatgaagtcccgatgaggcggcggcggcggcggtgggtacatgactacagtggtggcgacggcccaaggggccccgcccactggcggcgtcaggaagtccgactgagaggaaccgagagctccgcttctcctgccctcgcaggcagccatcgcagcgccgtcaacacgaaatcgtcgacccagcaagtcggtc

SEQ ID NO: 61591 - DNA, 2553 bp, Homo sapiens
ttttttttttttaataagttaaagttaatacaaatataaaaaggggaaagtcctctagattcaatgacatccacaaattgtacattatttacaccaaaagcacagggctcgtgtgggtgaacagtctgcagtcaaagccgatgctgggtgtcctgtagtgtagcagcccccgcgccgggggctcaggctcaactgagggttttgtcattttcaagtctgaaagtggctgttctcctgcctttgttgtttcttcttttcctggcgtctgggtttttctcccaatggggtgggtggtttgtgtcccgattcactgctagtcccagaaggtgtccagccgagactctttcgggaggaggctcttcgtgctggtactggtgttgtgatcggaacgtgtcgatcccctcttctcatcactgctgctccaactggatttattactccgggaatggtcagagccttggttggagcctaagagaatggaggagggcgtctctctggagccagaaaggtcaagggtcgagccactctccttgcttttctcagctgacgtctccttctctttggaggcgctggccgtttctgaaggtgctgaatgtgtgctcgaggagctcccctgggaggacttatttagtgtttctgtgttcaccttcagcatccgcttcctgcttgaggagcagtagctgactgggtgcaggacttcaatgtgctcaggccagtgggcttgcttggcaggggtagtcacagtagctggtgttccaacagcagtaaaagatggcctccttcttgaagttggcgcaccactgcttcttcttggtctcatccaccgcctgctgcttctccaactccagctgcttcttcacctcggcgatgagccggtcccgctcctgctcccagctctgccgcatctccgccatggtcagctctaagttgtgtttcatttcggagaagctcttgctggtgcagccactggagcttctctatctcgatcctcaagccttgcgaatcttcagctaattgtgctttccaagtagtggtttttagaaagatcgttgtatatttctgtccattgtaccttttattgcatccatccaatttgctagtgtacttggcaatatcagcggcgacatcagctgaggcagtgccgatgggcaggtcaccgttgactgaggacacaagggtgctcatggaccccgagctggtgaccaggggcgatgactgtgtgctggtcaccagggtgatggtggacgtggatgggctctgtgtgatctccttctgctggacagttgatgaagttccacacgaccgctgcacggccggggcagtcctccttcggtaaaagcggcctctgctttttcactgggcttcctgtggcggcgggggccggggccgtgacggtgaccgtggaggacgtgctggtggtggctgtggcgccagccgcggaagtttgggcggaagagcgggtgagcaccggtgtttccgggggagaatggctgcccaccgtcgtggatggtggtgttttacctacaacatcctgtttgggagatggttctttgggttccttcttattttttcgaccctcccgcccagaatggtcttctcctaaatctatgacaagttcgttcctctgaatcagagtccaggcccaaatgaactgtgggggaatccgtctcatcttttcccttcagtttatccttaatggggtgaggtgaaggttttgcctttccggaaaagtccttctcaggctcagggctggccttgtccttgactgctccagggtctgccttctcgctggctggtgacgtgcttttcagctcctctttaatctccactgggtttgtaggcttgggcttttttttaacagcagatggctctttgtccatctgacaaccttctttgtcctctgtgtcttcctggctcgttccttaagacttctgctcatcatcactgatatactcactatcgctactatctgacttctcagaatcctccgaatcgctgtgctctacggccgtatagacatcttccgagatttcatttatgcctaattgtgctttgcaactctctatggtcttgtcaagattcagctggaacctgctacgaatctggcgcttgggagagatgagaggaacaggggtggactgttgctggaccgactcgctcagctccttcaaatccatctcagctttgcttcgatccaggttaagattcaggatgctgccggtggtggaggttttgtccgttttcgtcgtgataggagctgacagttgaggagagaagggctttgggctgccggataaactccctgcttgtcccgtcttggtggaggctggtgaagctgaaagtatggcattgttaaaagacaggtttacaaataaacaagtagaacgtgtaggtgtggtgtagggagagaatggagagattatgaaattgtgtttgatttcagcaaggccgctacagtatcacgaatggggtggggtggagcatagcaggttggccatttattttcagcaaagggctttaaccggatgtgaaaccgttaaagccacaaatgat

SEQ ID NO: 61592 - DNA, 2522 bp, Homo sapiens
aagcaacgaaacataaaacacacaagcgccccgtgcccccagtgactctgggcctcacagagcccccgccagccagcatggggccccgccctgcagccagtcacgcgcccccacaccgcagccccccgtggctgtccttccaaccccacgtgctttttctttctcctgcccgcttcttttcttcatcacaaaaggcgtggagactcggagacggacgtttttccccttttttaagttattgacgcccagcgcgcctcgcctcttcacccatcaacgctgtgctttgcccactggactcctgaagagggggtggggggctccctcggtcgcccaccctgggaagtgcctaaccttttattttattttatttttttgaggaaaaagaacgcctgactcacaggttgaagaaacaccctgggccctctctcatggccgggttccccgtccctctgcagaggctgggaagggtccccgggctggagccacgggggcttctctgggctgtgcctccggggccaacactggctgcttggggctgcccggggactccagagggctgcacggccaccctgccctggctagagcgcaccccaccggagcccacgtgggctgggcggctggagggatggtcccccggtgacactgggagaaaggccacttggatgggggcgtttctgttttgttccgctttgtgatgtcaccaatttggaaacagcgagggtgggtggggacttttacagaatattctcaggtgtgtacccgagaggcagagagagggacgtggccggcagctctgtgcgtggccttgtcccaagcacttgcgcccgcccccgagcgccgcccccggggagcgggaagccagcactcgcactttggccaggggcgcgtggaaggtggtggcaggcaccggcctgggcagcttccaggcctggctggccacgaccacggcccgagggggagcccgccaggccacgccgcactgagccacagccccgggggccgcctcccggggccccttgaggcactgaggcaccgagactggttctccccgagagactcggaaggtggggaacgaggggactgtgtttggggaggtggctttttcgtctgctgttgactgaacactacagcgccctgtggttccgggcttcgcacagctgtcccagggatgggtcgcctgtgctgccttcgcccgccgccacaccgggaccctgcacggctgcttctggcctcgacagatgacaaaagaaacagccccaaaatacgaccactccaaccagcagttcccgcctgcctgcccgccactgtcaggcctgccctggcctcctcgtccgcagggctgtctgctggcttctgggggcagaagagcggggagccccgtggaagggtcaggggagaccaggtcagggcagctacatttctggtgatcagccccatggggagacggggctggcgggataccgcccccccggcttccccacaccacttctgtctcacccggaagcgtcctttttttgtcccaggtgtctacctaagagggttggtgccagaagccccccatggcgagtgctggggcccggcggtgccctgggggagcagatggggccacccctggcagggccgctacaactttttccagcagcggagccctctggggggcctgtgcttgtggcatctctgagggcccagattgcacaaggtgacctggccgtggcctgagggtggagtcgcccagcacgcaggccggggcgctgcggggctaagtattaggccttcccagggagggggcgtgccaagcatcccagagccgggctgggaccgccaaaacgtcgtggcctggatcctctgggtctgagtgcctgatcccctgccccccaaaaaagcagaggtaggtgttgcaggcccagggcaggggtgcctgccccaggagagtcccaggcagtggttctcgtgccagtggcacccaggggcaaggacagccaacccccacccttgccacgtgtggggccacgtgggcatgtggggtgtgtgtttttaccttggtgaatctcacctgccaacgatttctcgtgagtgccgaccaccttctccgaccatgttacgcccgggcggcagcagcccccggccactgcaaacccatgccctgggtcccccggctcccccagggaggcatccccgtgccaatgtcccccagtggtggcagcagatcctgtggccggcctggcggacgggacccagtgatacttgtatattacacagtcctgatttcagacaatttcaaccttaatctatttaaaaaagaatattctatacaagctgtttttaagccttttaccatttgaaatgcatgtgttgtgcgcgttggggatgggaggaggggctgaggagcggctcagtgtcacctcccacagccaccggccctgacccttaatccagacaccgatggaagtcgacttttcatatctttctcctgaaatgaactctgttttaaattggaataaattttgttcctaaaaaaaaaa

SEQ ID NO: 61593 - DNA, 3152 bp, Homo sapiens
tttttttagttctttaatgtaaaaaaaaaaaagtatatatgagtcaggggtagggagtgggggtgaccaggaaaagagggcaaagcaaacaagcctctgtctctcagtttcattaaatgtccagatggagtggcataggcatgggtgagtggtaggtcttgtagggaggacctgagccgtaggaacatggccaggcactgacagcatcactcgtcgccttgttgaaggagcagaaggtggatttcttggaatgagggacggttcttcgtatctcttctccagcagctgagcatcagctttattacacaggagtcagggacaaatgggctggttgaggggaggtaagtctgccctcccttgggtcttcggaagaactctccagtatttcttcaataacctgtttcatctggacagctggggaataggggccttttctttgacaaaaggtgaaagttttcccacaaagtaacccccaaaggcccacacatcacttgctgtagtgaacttgcccagcaagatactctcccaagacatccagcggatagggagcactgcccggccctggatccggtaatagtcaccactgtacaggttcctgctcattccaaagtcagctatcttgattgtgtagttcttacccactaaacagtttcgtgtggccagatctcggtgaacaaaattaagagaggaaaggtacttcatgccagaggcaatttgggtagccataaacttcagattggtgtaactgacagtgcgtacatcgctggaggaagaattagggggctcgtggcgggaaagaaactgattgagatctccattctccatgtattcagtgatcatacagagagggtcatcagtgatacacacagataatagatggatgatgtttgggtccttgagccgagacatgatctttatctccttaagaaaatcattcctggcattcttgttggcatctgctcggagcattttcacagccaccaggacaggctggttggcactgacatctagggcaaaatctttgtctttgaatttttccattccctccacttcacagagatgaacctccccaaactgtccttctcccagcttctctttgaaagttaggagtttccctgggggaaactccctcccacagccacatcttttccctgagagcaggtccatggtgacggcaggcactgagtatgtgttgcctcctgtcactccttggaggttcactatgtcagcctctgcatagtggggcaccccctcagggccactgggctggactggcttcacaacaccgctgcagcctgactcctcctcccctggagcaaattctgggagttttcgtatcagcctggatggctcctggtagtcagggcgaaggggaaagatgcgatcgtaagtcgagttggacccttgttcactaggtgatgaggagcggttattgttgaacatgctagaatcacttggcagggaaaggctgactgtcatttcatcatccagcatcctccgagaagccttctccagcattttctgccagaactgcctccagaggatgatgacaatgattggcaggaggatgaagatgatggccaccaagcagccaatcaggatgcgagtgttgctgtcatcaactttaagcattggatcataggttgtgggtgccataggagaggtgggcagggcttcagagttgttgtacattgcagcatctgattggaaggtgatctcactgaacatcatccaggtatctgcaaaatggtattgacacttgatggcactggccattcggtggtggagaggcaccgtgacaaaccgagcactggggttgacgtcatccaggacaagggggaaggaaatggcattaggttcccactcactggcttcagagcggaagtagcactgtacctccttaaagatcttcacacctttagcaaacatgttgttgcagtggaccttcatggtagtgaaattcctgatgcggtcaaattcaaacatgatctcaatgtagccattggtggcactctcgttccgccagcccacatagtcatagccgggccacacgtggtattcatgggtctgggtgaaatcgtccaggccagacacaccatcggtcaattggcctagcccttctgtcatgctgtatccaacagctccatcatagacagaatcattcagataaatgatggaacctccagggagtacaaactgctgcccagctggagcattgtaagacaccaagccatctagccagacacagccgtaaagctccactctcatacacacattcatggagtggtcggtgactggaatgaaccggacaaatctggctacaatgggcggctccaagtcctttaggaaaatgtcataggggttactatttccatccagcacctgtttcccatgacggttccgccaagagatccagcgagtgccatcccgactgtaattgatcttgtacatgggggcaaactcgatgccatgacctcctgcatggcgcccctgggtccccaccagagtgataaaatggagggtgtgcaagtcaatctgcagaaactccttcaggtcatcaggttccactggaatctcagggcaccaggctccatccccttcttctgagtccagccttccatatttggcagctgtggactctgaccactgactggaagctgtgatgtcctcatctggaatctggcctcctgacatgcccagaggatagcggcatatagctggattaacctgagcttttgcagaactcaagataggcagcagcaggaacagcaccaagagcattctgggaatcaggatcatctcagaagatggtgttggaactggagtatcaacgggtgcagagcattctctgtggagcaggatcctcaaaaacagctggcctctgcttctcttcaattatttcagcttctttagaataattcaagccacaaaccttggaactttctagagcactgaaccccaggcaacttgtaggtctcccttgatggaggtttcatccaggggtgcacagttttggaaagaagaaaacagagctataatccactgcgtttccccaacccaaaaagaagaatttgttgtgaaacgcttctttttccactttgctggtgaaggagcccggtggtaggcatacatccacaggctgatgcaagatg

SEQ ID NO: 61594 - DNA, 878 bp, Homo sapiens
ttttttttttttatgagttggaatcaactttattgatacctgagaaaaagggcaggaaaaatattcctcctgaccaggtggcctgtcccctgaggccagatcattctctcgcctctcccttaagccctgggtcatttgggacctcactggccagcacccagaggctgaagacatccacagccagagcctgggaagccagacccagagaccaggagagggaatgtctacagcgtggctcctgaggtcagggccaaggtcagcgtgggaccctcatcggtcaagggccagcgcctcttggatcactgtccggagtccgatggaaaacagctcctcccatggttcccggatccaggcaagcagggctgtcagctgctcctgacacaccacacggagtgcccaaaagctctccagccgggacacctcatcgtagaagagcagccgcaagtcctcaggggctgagcggtagagcagcacggagctcaggctgctgagtggctgctgctccctgacacgcacagcagggcccggccccgagggaggcaccttctcagaggcttcgccagatgctgctggaggagagggctctgccggggaccctgcagcatcctcatctaacaggaacagggtggacggagtcagcaacagggatacgaggcaggtggaagggcctgcagggaaagaggcatccagtgtggaaggtcatggaggggcccagatccctggggccagcgtcccagtgctgctggggagaagaggtgtgaaccacactctgaggtgggtcacaaagcagcctgtgcccctggggccaagaccctccctttcccaagctccatgaatctctactctggaatacctctgcctcctgggaattccaccgc

SEQ ID NO: 61595 - DNA, 892 bp, Homo sapiens
  misc_feature (1)...(892): n = a,t,c or g
aaccttattattactgaagtcgccttgttacacacaaacatctacagtgcctcctggccactccttctggacttttctttcctagcccaggtcaaagtgggccttcgggaggaccctggaggagaagccccctcctcttcacttccaccctctctcttccacccctggaagtcagctttctgacctcagaatcccagctatcttctggactcaggtgacaagtcacctaagtgacagatccagcatgcactttatgaccatcactctgctcctcctgcatcagcgccccacccaacagagccgaccaggctgggaacaccgagaccgagagcgcgtggctgtgtctacaaaggcctcctctttgagggagacacgcgaggcacgggtggggcgatgagacaggatcggccggtccttgacagtctctgaagctgggagaacatgaccccatgctctcctgttggagtcaccacctctttgccaacagccaccaaacctccacctccaattaagctccacccccatgtccccactgccctccggacatctgttcagcacccccctcgacctggccaaggctccacgcaccgccctggtttcccgctctgcccagccccccgctgaagtctctaatgggttcttccgattccacctgtccaaggtaaaaccctgaggttgtccctcctccgcggcacctccaggtatctggttgctcaggctgaaatgtttcccaaggccctggctcctcttctttccaaaccccgaaggcagctgattagcaaattttgactctaacctcaaaacatgttccagaattcagccacattctccccacttccccgcctggccctgggccccgctattccatctcaatctctgcnccggcgcgcgg

SEQ ID NO: 61596 - DNA, 1207 bp, Homo sapiens
ggaggcaggaggtcgggctggggaggtgcacatagtgatgttaactttttcccgtgtgtaaatatggacagccgaagggtcgtgtaaatgttctgcaaaagtgggtctatacagagtgaaagctatttattttgtgcagagaaaaaagtctggagggatggaaccttcagggtttattcatatttaagatgtagctttttgttgtttcaggcattatgtataaagcaacgattattttatggaccaagttttcatgtaactgttgcagtgaaagtgcaatatctgacccccctgctcccagcaggaagttgcttggcccgacaatcacagcccctgtcaggggccctgtggccagtgcctcctcctctcttggccccaccttatcctgtcttgcctgctgcctgggagaccagccatccagagaagcacctggaagagtctcgggccctcctgcaataaaggccgggaggccctgtgggcagtgggctcagcctctccccaggggggcagctcccccacggctcctcactccccgcctgcctgcccagccgccagccatgccaaggacaacagcaatagtcccctggggctctcccagcggccctcagccatagatggcaaggtgggcagcctgcccccccatgggaagtctcttctgtatccaggtctgctttccacctcccttcagattccttttggcacattctcctcttgaggaagtaccagtctttctgaaactaagagagggagggcagcgtcctttaaaaataccaaaaatgtttacagagttgggtgctgagctgcagggctcaggcctgaccagtcataaccaaagggtgaggcaggccttgctgactgccaccccccaggcctgttagaatagaagccttagtcccactcccaccacacccccacgccccaccacctgccttctctttgatttctaaagagggggttcagcagagaccccccacccctccctggctcggtctgagtcccactgcccaccccatcacagccttcacgtctcagcccctcccgtctggtctgtccgtgtgccgtctgtttctctgggccatgtgtgagcagtgtccccatctccccatccgtccctgctgtccccgcatcattgggcctgagtgtgctctgtatacaacgtcatgtctgttacaccaattaaagaagcgggaaggcttcaaaaaaaaaa

SEQ ID NO: 61597 - DNA, 2131 bp, Homo sapiens
tttttttttacaaagaaggtataactttaataaccctatttacagataagaaaaccaagactcagaagttaaatggaaaggtgaggtctctgaactaatccagactctcccatgaggttcctttggcaagtcctgggcttctgtcctcatctgcaaaatcgaaagcattcctgaggtttcttccagctctgcatcatcagagttgggaagcccgcctccaagcccggaagacccgcctcctctgtaaggttaaaggaggaagaggcagagattggaggttcaggcagtgacgtaacttgctgccttaggtggccttccgctctggcggctgtcgcgacgggggttcagggaatatttactgggcctctccgctccctctgctcttggaggtgccatgaggtcagttagctacgtgcagcgcgtggcgctggagttcagcgggagcctcttcccgcacgcaatctgcctcggagacgttgataacgatacgttaaatgaactggtggtgggagacaccagcgggaaggtgtctgtgtataaaaatgatgacagtcggccatggctcacctgttcctgccagggaatgctgacttgcgttggggttggagacgtgtgtaataaaggaaagaacctgttggtggcagtgagtgctgaaggctggtttcatttgtttgacctgacacctgccaaggtgttggatgcttctgggcaccacgagacactaatcggagaggagcagcgtccagtcttcaagcagcacatccctgccaacaccaaggtcatgctgatcagcgacatcgatggagatgggtgtcgtgagctggtggtgggctacacagaccgtgtggtgcgagctttccgctgggaggagctaggtgagggtcctgaacatctgacagggcagctggtgtccctcaagaaatggatgctggagggtcaggtggacagcctctcagtgactctggggccactgggtcttcctgaactgatggtgtctcagccaggttgtgcgtatgcaattctactgtgtacctggaaaaaggacactgggtcccctcctgcctctgaagggcccacggatggtagtagggagaccccagctgcccgagacgtggtgctgcaccagacatctggccgtatccacaacaagaatgtctccactcacctaattggcaacatcaaacaaggccacggcactgagagtagtggctctggcctctttgccctgtgcaccctggatgggacactgaagctcatggaagaaatggaagaagcagacaagctgctgtggtcagtgcaggtggatcaccagctctttgccctggagaaactggatgtcaccggcaacgggcatgaggaggtagttgcatgcgcctgggatggacagacatatatcattgatcacaaccgcaccgtcgtccgcttccaagtggatgaaaatatccgtgccttctgtgcaggcctgtacgcctgcaaagagggccgcaacagcccctgcctcgtatatgtcactttcaaccagaagatctatgtgtactgggaggtgcagctggagcggatggagtctaccaatctggtgaaactgctggagaccaagccggagtaccacagcctgctgcaggagctgggcgtggatcctgacgacctccctgtgactcgtgccctgcttcaccaaacgctctaccatccagaccagccaccacagtgtgctccctcaagcctccaggatcccacctagctgtacttgcctcatagctggtgaaggattcttctgaacccccaccctaccccctaaaggcgtctttggatcacactgcgcggctgctggctccatcacaaaacaatgaaggaggaagtgggacgcagagagaaacgcacatggggagaacgccacgtgaaggctgaggtcgggataatgcatctgcaagccaaggaacacctaagaggaccagcaaaccaccagaagccaggggagaggcgtggaacagaccctgccttacagctgtcagaaggaaccaaccctgccaacaccttcctgttgtactttcagcttccagaactgtgcctgcagggcttgagagaaatggagacaaagaaggccgtgggcaggaggccaagagaagcccagcag

SEQ ID NO: 61598 - DNA, 1118 bp, Homo sapiens
  misc_feature (1)...(1118): n = a,t,c or g
ttttttttttttaagagaaaaggctttttaatatgaaaactatgtatttgggcacaaaaatgcaacacacagtaagaaaccatattctatcaattatgatattctgtaatctaagaacacagaaagttttgttattaggaaatgccaagaggaaaaagaactctgtaaagtcctattcaatttactttgttagggaaaaggatgtttatttggcttttgtcacagttccatcatggcttactcttcttgtaagttcagcttcaatgcctcgctagttctcagctttgcttcttcaattcttcactttgagcaatgagacggatttcggcattaagtctaaataggactccaattttttccttcaaaggtatagtctgttgctttaatcttggccagttttctctgatgagtgctactaaggactggatngagacagagaaagcatccctggcctctggccgaaagttgctcccctgcagccttgattccaaatctgaattcctctgactttgcttttagaaagtccatattctgacgacgattatcaactttggccctttctgtagacagatgcaactctgctttcttgacatcctcttgtagacatttttctaatactaaagttgcagttaaatttttttcaagtttttccagttcaatcttgatttcttcacttttggatttggtacgaaagagatcagaggtcaaatcattcactgcagggataaaactagctagcgaggtatcctttgtttcaagggccaccgcactgtcaaccaaagcattcagatacctggaaccagtgctagagagattggcgggggaaaaattcacactctccatgagaaggtcttgaagatacttggcttctgactcgtattcacttgctttctgcttcaagtcctctattaccaggtagacatccctgtcccggaccctgttgcgttctgaaaggtgatgtaaaatctctgtggtccgtgggttcacctcatactgtggaataggatgatctccaaatattttttttaaccacgcagcaacctgcgtttctctctcctcctgcggctccatagctgcggctcccgccactttactaggaactcctagcgggagatgcg

SEQ ID NO: 61599 - DNA, 3477 bp, Homo sapiens
  misc_feature (1)...(3477): n = a,t,c or g
acgccggggcccctcttctgaagcaatgcatgtaggtcacctcattccatttattttcacaaagtggctccaggatgtatttaacgtgcccttggtcatccagatgacggatgacgagaagtatctgtggaaggacctgaccctggaccaggcctatagctatgcagtggaagtcagcacagagcagtgccctggctgtgtccctggacgggtggacttagctagggagaaagtcgaggcagcagccctcgaggccctcacagatgtctaggcaggcctcatttcatcacgcagcatgtgcaggcctggaagagcaaagccaaatctcagggaagtccttggttgatgtatctgggtctcctctggagcactctgccctcctgtcacccagtagagtgctccagaggagacccagatacatcaaccaaggacttcccttaaaaattggctttgctcttcccaggcctgcacaatgctgcgtgattgaaatgaggcctgccctaaaacatctgtgaagggcctcgaagggctgcctgccctcgaactttcctcccctagcctaagtcccaccccgtcccagggacacagcccagggcactgctctgtgctgacttccacttgcagcccaagggtcaaaaatgaaggcatctgcggaaggccaaggactcctttggcaatcggacacagtccagggggaaaaagcccacccctgaactcctgcaaggacaaaagggtcctaagggtcaatttggcaaggagaaacactgggtgttgcccaagggaagccgaagcatgaatttcttggaagtggaactacatgcatgggtctggaagtttcagtaaacttggaaagttttcaccccccaagccttaattttaatccaaaattgctgaactctgttcaaccttcattgttaaaagcagctttaaatgctgggtgatttcttagtcaaatgtataccgaaggcttttccttatcaaattcctttttgggaagggggccatggggctgaaatacatccttgtgcctanaataaacctcccccacatcaatatttcaaagcactttcctaggttacaataatgacatttcaattcccatataccgcattacataggaatatatatttttaaaaccagagtgggtcttaagaggtatacttgggaacccctcggaagtccctcccatgggacaaggaaccagggtggccccatgggacttccaggccaaaggctcccactgtggggggctgcttttgggggagagactccacagctgggacttcttctatcccgacccatgccaatgttaagccagcaacccaattaccccaccaatgctttgccccataaggagataggaaataatgggaacttcacaggaagaaaccagtattggataacatacaccaggcttacaggaggccaggccccaagtaattacccatgagacagaaagcctacagggtgggcgggtgcttttgactggcgctgggattattgatacatttactgattacatcacttcttttataaggcatatgttaaaacgcagtgctacttgaaagtcgaaaggcacagctttccgggggagtcatggaactcctttcactatctcatccgtgacctcctttgcgccggggcctggttgctcttgcgatcaaggggctgcagaacctcctatgagtgcccttcttgaagctcaccaggtgagcatcggctccgctggtgtaaatccttccctgatctggctcgaacctggtcgtcggtcctcggagaagaaggtcaggtacctggagagcacagtcaacatcacagttgccgcccaaactggctgtggtccctcgatgggttctgtccctccagaaaacgcatgcttattggaccttgggtttgacctgtttggccctgtcggtgaggaagatggaggagttggggtcgctggcactcattttggtctgggcgccctgcagggctgggaagaaggtggagtgcaacagggctggtttaggatagccgatccctgggggcgacgtcccttgtcattctaaagtaaggatccctggtcaatggcacatgggataaggcaactggatatccgtcctgtctcggaagatctgtgggaaatgagttgctgaaaggagggagcagcctggatggcaggaaaacttgatctttcccaatggaagtcgctgtcagtgaagcccgaaaatgcctttcacttgggttgaaaggtacatgctttttgaatcttcaccacattttttgtagaaacctgagctcatccccatgtagtcccaggtcagagaatatgaaagtcttgttgatgtcaaagccacaggcgatgatgtccttggcattctccacagcatagctataggcctggtccagggtcaggtccttccacagatacttctcgtcatccgtcatctggatgaccaagggcacgttaaatacatcctggagccactttgtgaaaaataaatggaatgaggtgacctacatgcattgcttcaagaagaagggccccggcccgtgtacagataaaaatggcttcttaattttcataggcaatcaagaacctgattcatatctctgtgtgagaagaagatgcctctgcgcagggaagtggtgtggtctttggccgggtggctctctctattcgggtttattagctctttgtcaattttactacttccaaaaccgaaccaatggagcttaaccgtagtctaatgcccttttgcactgcttgtctgtactgtccatgggtccacaaaatcctcttcagcttctgtggcatctgggccatgattactggtaggtgctgggttccctggaggacagtcagccttgtaatcctcccccgcggcagctttgtagctcatttttaatgacaccaacatctttactgcagaatcaatttcatcctttgacgcatttcccgctttgagggaccttacgagctccccttgtgtggcgatgctgttgaacagctccagcagagatgcgggctcactgttgggcatgtttgctatctctcaggaactacgttcacagccggcctgaggtcagaggatttgttcagcagacgagtcaagaccaggttgtggaagacactgcagaggtggccactggtcacgctgggcagttgagctgctgagagtgccctgcccagccagaaatggtctttaatactcttcccctctttctttcagtttcccttctgaaaaaagatgcttttgtctttcgttctccccaccctgcattcagctaagggtttcttataaatcacccagattctcagaaacacttgagctcttgaccaaccttcttgatgagactgtccaatcaggggtgggttgcctggggggccaggttgagaccaatgaaaccctcttgagaatcgagccattagctggtcattgcatcagccacccctcaccccccgctggacgaaatcgtcgacccgggaattcc

SEQ ID NO: 61600 - DNA, 1829 bp, Homo sapiens
taacttttttatttataaattttgtttttcttgactaaataaactttcctttttattttaaaaatttaattcaaatcaacttttaaaataatttttcagcttagtaccatacagttgttgtccagtatttttagaaaagtaaagtcttagcatgaaacttccttaacctattttagcctcatgcttttgactaaaatagacttaaaaactgaattaaatttttatatacacttatatttaattaatctaaagagatagcttacatatagaaattaagtaaaggggagatctgtattttcattcaagatgttaaaggctagcacagaaattttctaggcattaaatcattgcttattacataatgtttttaatagtttgctttgatatcagtattgtgaataacggagcaaattcagccatattagttctgttgacttcatgctcataattttgagaagtccaggcgtaaactaaaactcttttggtgtacttgaatattctttgtttgttgatgtaaaatatgtaatctctgattttatagttaacaataaaaataaaattttaggtgagtgaaagcagtgatttaaatttaacagtgtcctcttgaaaaaccttaatcacagttaagtgatggcatgggcaatgaattttaatcatatttaggaataaaatactagatattagtgtataacaattagatatatgttaattgagcactacaaagcctgaaagcttaacaaagtggggctataactagtaattttttggtaaaaatatagtgatctttttctacagggtattattataagggacaaattatagttgtaaattagattaatgaattttgtgagttttaaagtttgtacgaaccatgtctcccttgtgtcatattttccaataatataattacctaacaatgacagaattatacattttccctttaattctctaagcattgagtaaacagaaaaatatagggatgaaatacacacatgccaacattcaaaactttgtactaactagaaacaaaaatagaaggggatttataaaggaaaatgatggagacattttagagaaattaagtataaatcgcaacattctgttttcttggatgtattctgggtagcttctagttacttgtaaacaaagtattcattgtttttgtaataaagtgataatgttttgttttatagttgagtggctttagggtaatttaatcacctggaaagtgatatttttttaattaccttttgttactaaatcttatctaatttaaaatactatgttttgaaagtatatatcttgtatagttatctttttatatgaaaatgaactctaatacatatctttctttcagtgttcatatcacaaagctcaattaaatggtcctggaaaaaaaaaatcgttccatgttgttccaggtcccgttcaagaagttcttccagttcgcagtcaagatctcgttccagttccagagaacgttcgagatctcgtgggtcgaaatcaagatccagctccaggtcccacaggggctcttcttccccacgaaaaagatcttattcaagttcatcatcttctcctgagaggaacagaaagagaagtcgttctagatcttcttcatctggtgatcgcaaaaaaagacgaacaagatcacggtcacccgaaagccaggtgattggtgaaaacactaaacaaccctgagcccagggccaacccctacggaacaccactactttacccagacgccacaggtcatcatctggatcatcccattctggttcccgttcaagttcaaaaaagaaataatgtattaaaatttacatcttaaa

SEQ ID NO: 61601 - DNA, 1327 bp, Homo sapiens
cccacgcgtccgcggacgcgtggggaaagaaggcgccgcagctaagcccaggtctctcctccgcaggttccagctcctttcctggagcgtgtgtgggggcaacaaggacccatgggttcaggaattgatgagctgtcttgatctcaaagaatgtggacatgcttactcggggattgtggcccaccagaagcatttacttcctaccagccccccaatttctcaggcctcagagggggcatcttcagatatccacacccctgcccagatgctcctgtccaccttgcagtccactcagcgccccaccctcccagtaggatcactgtcctcggacaaagagctcactcgtcccaatgaaaccaccattcacactgcgggccacagtctggcagctgggcctgaggctggggagaaccagaagcagccggaaaaaaatgctggtcccacagccaggacatcagccacagtgccggtcctgtgcctcctggccatcatcttcatcctcaccgcagccctttcctatgtgctgtgcaagaggaggagggggcagtcaccgcagtcctctccagatctgccggttcattatatacctgtggcacctgactctaatacctgagccaagaatggaagcttgtgaggagacggactctatgttgcccaggctgttatggaactcctgagtcaagtgatcctcccaccttggcctctgaaggtgcgaggattataggcgtcacctaccacatccagcctacacgtatttgttaatatctaacataggactaaccagccactgccctctcttaggcccctcatttaaaaacggttatactataaaatctgcttttcacactgggtgataataacttggacaaattctatgtgtattttgttttgttttgctttgctttgttttgagacggagtctcgctctgtcatccaggctggagtgcagtggcatgatctcggctcactgcaacccccatctcccaggttcaagcgattctccctggcctcctcctgagtaagctgggactacaggtgctcaccaccacacccggctaattttttgtatttttagtagagatggggcgctgagtggactgcaaggtggacaggagcatctgggcaggggtgtggatatctgaagatgccccctctgaggcctgagaaattggggggctggtaggaagtaaatgcttctggtgggccacaatccccgagtaagcatgtccacattctttgagatcaagacagctcatcaattcctgaacccatgggtccttgttgcctccacacacgctccaggaaaggagctggaacctgcggagga

SEQ ID NO: 61602 - DNA, 2029 bp, Homo sapiens
tttgatggaaaaatggaattctcagttcatttgaagaatacagattagcaattaaaaaatacagcagtatctcaggaaataaacattattctcattttacaaaaaagtgtatgtgaactttaaaaaaatctacactacaatatgaattgatattatctctgggtagaatgctaacaattttattttctcctttactgtattcactaaatgtttcacattaaatgttgtattacctttgaaatcagaagatacattgtctaaaactgatacatcaaggaaatagttgtataaggcatattacctaaacacagagggttaccaacaggaaattaaaagtgggttaaaaatgactcctggggggaactgtaaggaagagggaagggtgaaggggaaggaaatgggttgctttccattctaaatcttcacacaatctattcttaaaatcagacaagggctgtggtaaattttttcaattattaaaaaaaattatttcttctaataggaataggcctttgagaaccctattaattgtaataggtttcaattcagttagtcactcaagtattataaaatgcaactggatttacagaaataatttcctacctacactgacagtatatttaaactaaaaaaaaagcatacaatgtacaaacaaatttatttacaaaaattacaattacaaactgtacaaattgagacaatttcccatgcctccaacagaagccaagagcctttactgtcaaatggcagtttttgttacttttaaatgacacacaaaaagaaatatgatgcctattcagtcatccactgccagtttaaaaatgcttttctaaataattccaagaagcctattagtgatatgtatatggataatttccctcaactctatttctagaatggctatgtacaaatccagcaaaactggaacagaacagggtaagaaagcacatagcaactgctttttcaacagtaaattttgactattcccctaaatatctacctagtggcttaaaactaaaactatggtctttggctttaaaaagaaagtcaaaaaattttgacttttaatgactgcacaattctaccaaagccagtgtttacctgggtattttttgtcacctgtagtttacatttccctgctactgttaaagaaacagaattctacagtattcaattctgtatattgtcttttaaggtttttcaatcagactcactactactgcttgaggagtccgttgacataatctctacatcatcttcattttctttattatgcccaggaggttccaacaaaaagtcactactatgatttggtggtaacatattcatcgacatgtcatttgactgccatggatactgtggagcaaggacatctggcaatcttcctgctgcaagtgcatctcctggtaaatggccattcacgccattagtggaaggattgttcatctgacccagtaacccacttctcatctctaaatcagttgggtagggtctccgggggtcccctggaacccaggtcagtggagcacatacagcattacttgcactgatcctatgtgcatacttaattatttcttcagaggagatagcaccttttcttgctttttctattgacttgagtttctccttcgcttggtaaacagctgttgccagtatttgttctgcttcctttagctgtttttgtagctgctgaatatcactgtctctcttctctacttctttttctaaaacttgcatttcatgatgaatttttccctgattaagtgccaatttcattagttcttgaaattccccatctcggtgaattaacaactccaggacctggttttcctctccagcctgtaacaacttttggtttcttgaaattgccagcatttctataagttccctagacaggacctccaagtcctcaagcgcagacagcagccgctctcgtgtgctgttaccacccgccactcccaaaccgcctcccagccgctccttctccttctcaccactcgaagacgcagccattttccccagagtcccg

SEQ ID NO: 61603 - DNA, 3356 bp, Homo sapiens
  misc_feature (1)...(3356): n = a,t,c or g
ttttttttttttccagttctaaaaccaaatctttattctctagtttgaaaaggaggggtaaatggttgttctgtttagttccagagaacagaacaaggcccaataggtagaaattataggaaagcagaattcattcattataaggaaggatttctaacaattagaatttctaacaattagaatcatccagggcctcaggaggtgcggaagttcctgtcacctaagtgctcaagcagaggccaggtgtccatatgctagaaatggagaaaaggaaactcaccagcaacttcccctcagctggccctccatcaccaatgcggcagtccttgccgtgacatgctgagctctggaaggagcgaaggaggggctgcggtgttcagacaagagcctggacacagtgctgctgacagccaggggaggctctcagcgctgggaggggcgacagataaagcgagacagaccaaggagtaaatgccttggggtctgctctttgggaaggaagaggatggaagtactaacagcagacgggtctctccaagtctgggtgcctacgcagggggcaggtgggaggggaagggagaggtaagagtggcttcgcttcacctcttgctgctggcaaaggcccaagtgctgtctaacaaggccagcaggttctccaagctgtatctagcccagagcattcatttacaggactctaccacgcctgcttccaaaaatgatcttaagtaacttacagtaaaagacaggggcattaaggcgttaataccagaggatggagggtcttcctttccactggtggctcctctagccagagggctctaaggggcggatgctattgctgcttttccagggcacagggcagtcaggacggagccttagcacacaccagctggaggccggcgtccctgcgcttggaagtgggttccctggccaccggggttgacctctctcgctagcagggcccacccagctcactccccgcgtcttccatcccctctaggattcccattgtcccctactccagcactaggcaggcacccccagcccactgcgactcccaccacgaaggaccccagccctctctcagccaacacggccccgcccaccgtctcagacatcgtgcttcttctggtgggccaggagtctctcctcgtcgtcgaaggtctggccacagatggcacagcagaaggcgccgtcccggatgtggctcttgcggtgggtgatgaggttggacttctggctgaagctgcggtcgcagtcgggacaggcgtagggccgctcgcccgtgtggatgcgccggtgcgacaccgaggttggacttctggctgaaggctttgcggcagtcggggcagacgtagggcttctcggccggtgtggcaatcggccggtgcgccgccaggtagggtttgtggcggaaggccttgccgcagtcgggacacacgaaagggccgaatcggggggcgttgggttccgccgaattgcggccgccagattggcttgcccttggaagaaaacgccggccgcacttcctcgcaaggcgaaagggccgctcgccggagtgcacgcgcgagtgcgccaccaggtgcgtcttcttgccgaagttcttcccgcactcggcgcaggtgaagggccgctccccggtgtgctgccgctggtgggcccgcaggaagcgctccagccggaagctcctgccgcagtcgtcgcagctgtagagggaggggggggcttcgatcgggtcctgcgggtgctctggcggggcccctggcggcggctcctgggccggtttcagaggtaccgccggggtgggctcggccgcggactcctgggggccggctggcagctgggggctccccgggccgggggcggcctgggccgacccctcggatcgcttgtgaatcttgctgtgagacagcaggttgggtttgtgccggaagcggcggccgcactctttgcacgggtagggctgtctcgccgtgtgtgtgatgcgccggtgtcgaagtcagatagggcttattggtaaagcgcttctccgcactcgcggctacttggtggggtcgctcgcccgatgtgcacgcggcgtgtgagcngatcaagttgggctttgtgccggaagcgcttgccacaacaggcacacatggaaggggcggtcgacggcatctccaccggngccggggggcgtgtcacccgtgggggggcccctgggccgggggccccagaagaccttggctggcgggcctcgctcctagggccgtcggctaacgtgcacccgcttgtgggcaactttagctggtcccacgtgggcaaaatgctccggccacagttgccgcatatgaagggccggggccctctcgggcgggaagggtggcaccgccgcaggattgagctcgaagctgcctttcgtcgccagaaagcgtctctcgccattttgggacaagcgaatgggccggcttttgcagctgaatgggcccgcagatgcagaaccagggccacccagcctcggaagctctgcccacagaggtggcaggcaaagccccagtctggggtggcagcagcatggacctggcggtgcagtgctaagaagggggcatggcgaaagcgacggccacactcagggcagggcaagggcaggccggggcctggcaccggcgggtgtgaagccacagaggccacccagccagggaagtgccttcgacagtgggcacagcgatgggccctgcctggggcttgggcaccagactagggccactgacgtgccttgttgcctcagcccgcgggactccttccccagggtctggggtgactcctgggagggcccagaaaggagtcggggctgggccgggcccatggccagggggcccctgcaacgacgttccagcatcggttcttcctctgcaagaaaaatgtggcnactgctccctacagtgccttnatgctgccctctccctgtgtctgctgtttcctatgccacatccgagctgcacagcaactctgagaagctggacaaacagacactgagctcccctggagactgcagagctggggatgaggctttttccagctcctcttggggatgttcctggggatacttccgcggctgcagcgcctgcttcggcccacactccggtagcccccaggtgttagagaaaactgcagtaataaagacacccctatccccatggcagagctcagacctctgactgcagagaggccagccttacctctgcggcgggctgtgcagggacgcggcgcccgtccatggagcccgaaggccggcctccgcggcccactctcgctccccgccccgccgcggcgacagcggcaggttcgagcctcgtgccaagcttggcgtaatgagt

SEQ ID NO: 61604 - DNA, 2318 bp, Homo sapiens
ttttttttttttttaaagtgcaaatggcttttattgagggcctactgtgtgctgggcaacatgtctgcaagggtcctgctttacctccctgtactttgcaccggccagggaggagggtgctggggagacccaaacatcaagctgggggagggtgctgaggtggaggtagaagggggcagaggggcccctcagctgagtccttagggagggaagggatcctggggtctgcccagcttgaaacagaagctgggggccacaaggccctgaatcaggccaggcagggtacaggggcctgggagtcctgctcctttgctgtgagacctttagggaatgggatccatctctgagtggtttctcccgatgaaagacaggtccagagggcagagtggccatgcccaaggtggtggccaggtctgacaggatctgcagtccctgccaacaacctcctcctctgctctctgggcagtagtggcctgctcctggacactgctttgcagtcatcacctggacctagagctcatctcggggctggggttggaggctgtgcccgctgctgccagtcaggtccaggcgggggctgcgcagggtcttttgggagccgctccagctgatgaggcggccgctgtcatcatcccatggagaggatgtctccgtgtcactgagccactcggcgtccccggcatagtgggtaggggcagcgagcaggggctgggcggagaaggccaccaggtcccgtggccagaagtgtgccttgtactgctcgttggggtgctggtcgaacatgatgggcaggaactcgtccacgggcagcatgcggcgcagaggctgtgaggccagcagcttgcgggcacccgccagacgcagggcataggccagcgtccagtaggagtacccagccaccaccaggcccggcagcccctccacggccgtctccttctcagggttcacctgcttccgtccgaggtagatcaggtcccaagacagtttctctgcctccacatcctccatcagcccgctccagccgccccctgaagttgctctcaaagcgcacgtcattccttcaaacaaccaggaccccgggccaggccccctgggaaaccacctcttccccagatggagtaatggtctgaggaaagcaagcccacctccgctcttggtcagagtgcggcccgagtaagggtcctggtagcccgggagcaggtctacgccgaggttcctgatggcactgctgttgagcatccagccatccacagcgtccaccaccctcccagagatctccatctcccagagcgaggcgagcatgcgttcccgacggtcaggcctgcgagccaggctgatgacaaagacctcgtcaaaccctatcttgctgggcctcttagagggccgagtcacatgagctgaggcctgcatgcgggggccgtccactagtgcttctaagatcaggtggatgaagttgaccctctcgtcttccagcccctggtgggatttcaccggcacattcatgtacccataacggtgctcattgcacacgtggacggagaccccagcagcctggcaggcataggcgaagacgatgatgtcgtcgaaaggccaagtgtagttgggatgtggcgggtagaaagcaagctggtctgccccttcagcccgcagggatgcaaggaaggtggagtggaccatggggacacggaagcagccccggcgctggcggttcttggtggggaagtactcggctgtgcggcggtagtagccctggggggtgatcccacaccagaagttggagtagtaggtctgggagtccagcattggggccaccactggaagcccctgccccatgagaagccgcagagtctgattgttggtcagaatgttgtctgtgtctgcaaacaggatatagtcggccccccagttcctggcaaaggtgagggcttcctgcttcagctccatcagaaactggtgcctttctttggtccagtgcttgggaccctcttcatctgggtagaacctgggctcgccctcaggcctccagaccacagcagcatagtcatcgcccacagccgccagccactcctgcagcatctctgtggtgttgtccacattgtggtccgtggcacaccagagggccatcctggcccgggggtagtccagccgctccagagcgcccaggtagtggggcagcgagtgttcggcattgcgggccaggatggcaaggaccacggcgggcagcggcgactccgcaacgcccgcagcctccagccacggccccagcaggagcagcagctggagcaacggcgcggcgcgggcagcgcgcatggcgggcg

SEQ ID NO: 61605 - DNA, 3679 bp, Homo sapiens
gctgtgtatatggccacatataaaaggtcttttaactttattaagctttgttttctcatctgtaaaatggaaaagggcctgctctgcatggttgcagagatgagtgagtgttagtgtgcttgacactcttcctctgaggaaatagcacccgtggttgccagtttgtggctactggagcctcacatggcatttggaggtgtggctcactaccccacccccgcctggggctccaggctaacccatgcaaaactgtatgtgctctctgaccctcagtgtgctccctctcggcccacagcccccggtccctgagaagcggccccctgaaatacagcatttccgcatgagtgatgatgtccactcactgggaaaggtgacctcagatctggccaaaaggaggaagctaacctcagtagggtggcctgtcggaggagttaggttctgcccggcgttcaggagaagtgaccctgacgaaaggggaccccgggtccctggaggagtgggagacggtggtgggtgatgacttcagtctctactatgattcctactctgtggatgagcgcgtggactccgacagcaagtctgaagttgaagctctaactgaacaactaagtgaagaggaggaggaggaagaggaggaagaagaagaagaggaagaggaggaggaagaggaagaagaagaggaagatgaggagtcagggaatcagtcagataggagtggttccagtggccggcgcaaggccaagaagaaatggcgaaaagacagcccatgggtgaagccgtctcggaaacggcgcaagcgggagcctccgcgggccaaggagccacgaggagtgaatggtgtgggctcctcaggccccagtgagtacatggaggtccctctggggtccctggagctgcccagcgaggggaccctctcccccaaccacgctggggtgtccaatgacacatcttcgctggagacagagcgagggtttgaggagttgcccctgtgcagctgccgcatggaggcacccaagattgaccgcatcagcgagagggcggggcacaagtgcatggccactgagagtgtggacggagagctgtcaggctgcaatgccgccatcctcaagcgggagaccatgaggccatccagccgtgtggccctgatggtgctctgtgagacccaccgcgcccgcatggtcaaacaccactgctgcccgggctgcggctacttctgcacggcgggcaccttcctggagtgccaccctgacttccgtgtggcccaccgcttccacaaggcctgtgtgtctcagctgaatgggatggtcttctgtccccactgtggggaggatgcttctgaagctcaagaggtgaccatcccccggggtgacggggtgaccccaccggccggcactgcagctcctgcacccccacccctgtcccaggatgtccccgggagagcagacacttctcagcccagtgcccggatgcgagggcatggggaaccccggcgcccgccctgcgatcccctggctgacaccattgacagctcagggccctccctgaccctgcccaatgggggctgcctttcagccgtggggctgccactggggccaggccgggaggccctggaaaaggccctggtcatccaggagtcagagaggcggaagaagctccgtttccaccctcggcagttgtacctgtccgtgaagcagggcgagctgcagaaggtgatcctgatgctgttggacaacctggaccccaacttccagagcgaccagcagagcaagcgcacgcccctgcatgcagccgcccagaagggctccgtggagatctgccatgtgctgctgcaggctggagccaacataaatgcagtggacaaacagcagcggacgccactgatggaggccgtggtgaacaaccacctggaggtagcccgttacatggtgcagcgtggtggctgtgtctatagcaaggaggaggacggttccacctgcctccaccacgcagccaaaatcgggaacttggagatggtcagcctgctgctgagcacaggacaggtggacgtcaacgcccaggacagtggggggtggacgcccatcatctgggctgcagagcacaagcacatcgaggtgatccgcatgctactgacgcggggcgccgacgtcaccctcactgacaacgaggagaacatctgcctgcactgggcctccttcacgggcagcgccgccatcgccgaagtccttctgaatgcgcgctgtgacctccatgctgtcaactaccatggggacacccccctgcacatcgcagctcgggagagctaccatgactgcgtgctgttattcctgtcacgtggggccaaccctgagctgcggaacaaagagggggacacagcatgggacctgactcccgagcgctccgacgtgtggtttgcgcttcaactcaaccgcaagctccgacttggggtgggaaatcgggccatccgcacagagaagatcatctgccgggacgtggctcggggctatgagaacgtgcccattccctgtgtcaacggtgtggatggggagccctgccctgaggattacaagtacatctcagagaactgcgagacgtccaccatgaacatcgatcgcaacatcacccacctgcagcactgcacgtgtgtggacgactgctctagctccaactgcctgtgcggccagctcagcatccggtgctggtatgacaaggatgggcgattgctccaggaatttaacaagattgagcctccgctgattttcgagtgtaaccaggcgtgctcatgctggagaaactgcaagaaccgggtcgtacagagtggcatcaaggtgcggctacagctctaccgaacagccaagatgggctggggggtccgcgccctgcagaccatcccacaggggaccttcatctgcgagtatgtcggggagctgatctctgatgctgaggctgatgtgagagaggatgattcttacctcttcgacttagacaacaaggatggagaggtgtactgcatagatgcccgttactatggcaacatcagccgcttcatcaaccacctgtgtgaccccaacatcattcccgtccgggtcttcatgctgcaccaagacctgcgatttccacgcatcgccttcttcagttcccgagacatccggactggggaggagctagggtttgactatggcgaccgcttctgggacatcaaaagcaaatatttcacctgccaatgtggctctgagaagtgcaagcactcagccgaagccattgccctggagcagagccgtctggcccgcctggacccacaccctgagctgctgcccgagctcggctccctgccccctgtcaacacatgagaacggaccacaccctctctccccagcatggatggccacagctcagccgcctcctctgccaccagctgctcgcagcccatgcctgggggtgctgccatcttctctccccaccaccctttcacacattcctgaccagagatcccagccaggccctggaggtctgacagcccctccctcccagagctggttcctccctgggagggcaacttcagggctggccaccccccgtgttccccatcctcagttgaagtttgatgaattgaagtcgggcctctatgccaactggttccttttgttctcaataaatgttgggtttggtaataaaaaaaaaa

SEQ ID NO: 61606 - DNA, 4505 bp, Homo sapiens
ttttttttttttactgaagcagaagttgctttaatcaaggggtgaagtcctcaatcaaggggacctcacttaaccgtttggtgggtggggtctcagcctacgccccacaagccctgaggccccctcaagaaggagggagcagttgagcaacaaattatggcaaaaggcccagggaaatgggagtgggggaacccgggtccaaggtgaaaggggcaggacgctgaaagggtgggagtgaagctgaacggggccaggaagagcttaacccacgttttctaactggggggctggctgaggtggctgtgcatcgggcagagcgggcaccaagagggctgagaggtcgaaggggacagcaggggaaaggagtgcttaggagatgaggcgactgtgaagctggtgcagctgctcctgggtcagcaccagccggtgtcgctgtccaaaaccagccgcacatgagaaggtcactttgcccatgtagactgtgtcatcctgctgctcctccttggccctgaggaaggctgatgaagggaaggtggcaaagtcagtgggtactgtggctccagggcgctgagatactgtctccttgaggacctcatccttgagcttctcgacggtgtcactcagggacttaagctgagccacttgctccataagttgggccgacgggctcttggcagcagggctggtgcgagtgatgtctactacgtgcgtgtgtgtgctcaattgattcaatgtctccagcagctggctggtcttacgatacagcgctccagctggtaactcactgccagggccctcatgggatagctttgcaacatgcagagggggcagggatgccaaggatgccttcatctgggctcccttgaggatgctgttctcatgctggagctgggagatgtgcagcctcatggcagagatctgctgaagcagcagtggtgagtccttcaccagccctgggcctggcacagaccctggagcctgcccagggatggctcctcgctgctgttcttcaccagcaatgccagagaccagagtagcaatgcctgaaggaggagggccccggagtccctcaatcgtgcgtttggactggctgttcagacgctgctttagttctgccttctctgcctccagctggtcgatgtcagcctggagtgcatccattgtctcctcaaactctttctccttctttcgcagcagtgcctgggtctcctccagccgagtctggactttctcgatgcgctcatctgcatccttggcagcactgtccaacttcttctccaggagggtcagccgcacattggcctcacttagctcctctcccttaatcttgagtgacttcttcaactccttaataactgtctctcgatcttcgagcttcaaacccaggccttcagcatctgtgatctctgcacgaagggcagcagcccgcagttcaaccggggggaggcttgctggggggccgctctgcatcatactccccctcctgcatggctgtgaccaactttgttcatggtactgatgaggatgttgcatgactggcgcagacactcataggggctgctggagggggtcccatagatctgctcgcttgctttgaaagccagttcctccagagcagccacaagtagcccctcattctctgccagtggggcaatgagctgggcagcagcagctgccacctcctgcagcacagccacgacccacgtcaagtgtttcctgcagtctaggagcgtgtcagatacctgtggtccaaaggccagcgcagctgggatcccaggagcatctgtccctggcattcgccttcggatcttcttgcagaactggcggatgtgcactgcatgaagtttccagatcccggagcaggagggcaatatctgtagcctcctgcccaccctgcaagaaggcacgcagccgtcctacctccacactcatgcagtccagagcactctgcgtgaacttaatgtggtcagccagctgcatagtacagtcctcaggctgttcggcaaggtggatgctgtacagatgctgatagtacttgatggccttggtgagaggctccacattgacagtctcatccagctgatccttgtgcagcagttcaatgaggaaatccaaggagcgctcatgggcactcatctcagggtacaggctgcccactttcttatacacaatccaacctgcactgagagagggcatggcatcaatagcggtggtagcggtggcctgcagcaggcatcagcgaggtacaccagtcctatggctgcaaagctgagttgctccccagcagctcctcgcagcccaggccgctctgaacagttctcacttagttcaaacttctcctgggcctgcttccggatcagctctgccttgcaaatgagacgaggcatgagcaacagcaccagaacgcagtcatggtccccacctggccgaaggaagctgtcaggcatgaaggctgtcagcagggacatgtgtcgattggcctgggccacctccatctgcctcaattccatctcaattgccttggcatgggccttagtctcagcaaacttgattttgaagtcaaaggtctctggaggtggctgctgttgcctctccacagatgcttcctgctggtttgtcagttcccgattcacatcctgtagatgggcggtcagctggcggtacttcttgatggtctgctggtagtctgcaaccgtctcctgggctgcctccacacgcttctgggcctcacgaacccgcgcgcctgccatgtccagctgctcccgcagctccagttctgtctcacgtgcattctcctgcagctcatcgttcatctcattcatcgcttccaagtctcccacagtctccctcaactcgcgcactttctcttccagattcaggttccgatctgtcagcatctccaccatctcctcagcacccagagcagcatcgacctgctccttgagctcatcaatggtgctctctgcctggcttagctcctcctgcagacgctcccgctgttgcctcacaacttccagctcttggttcttcttttccatgagcttctggagctttaacatgctcctgcttctctgaggaagaaagatcccgcatcctcaccagggcatccttcaggcgggcattctgctcctcaagctgcttgagctgataactggatgcagcgccatctgagcccttctcttcaatctcagccttgaggatctctaagtcagtagtgagctcgtccacccgctccttcagtgcctccacctcctgctgcagggactcagcccgctcttcagccatctccttgtccaaagtggccatctcaatggcatcagcagtatcagccatctcctccatatagcgttcctttgcctccagcgcctccttggcttcctttctcgcctccttgaggcgccgctgcaggtcggcctgctgctcctgcattttgctcttccattcctgcacctgctccagctggattttgtgtttctccagctcttttagctttgctttgtcttctgcccgtttcagtctcagggtctctagtttctcctccaggtcccgcacctgagcccttagtccctcctcctccttggatggggaaggaagcggggggactgctccaggagaggtgaggaccggcgtggggatgatgggtgctgccagcggagtctgagccggggtgctgggctcactgctgctcagctcacctgctgacgctgagccagaggggcccagggagctactggccccagccaccccagtactggctgggcgcgtgggcttgggtcgccgagttgtggtctttcgggctgtcggtgccttcttaggcttcagtccccgcagtttgctagtctttgcagttgtatcagttccctctcttttgaggacttttgaagcagaagaatcaggtgtctctggggaagtagtatctgctccatcttcaaatacctggatctgggactggcgcacaaagatgccatgcccttcatcacaagtgaagtacttcctgccttgaacagttccatcatttttgccctttgcttcatccagaatcacgcctacccatttgccagtggcaaacagtgtggctccaacataggccacagtgcctcggtggccttttccaatcacctctacacgggagcccacccgcagaggccgggcgcttgcctccgcactcatcctgctgccgctgggcgtccggctgtacacgtgcctcttgctctgtgccatgttgctcacccggcctctaccccctcccccagctggccaaagacagagagaaaaggtagaaacctaggcaggagggtcagggcgctgggccctcatagagggacacaggagtcgtcaggcacagccctccccagtccatgggcctcactcggtggcctacacgggtaggggtgggggcagtgatgggggctgaggagcaagtcccctctgctgcctgaggattcctgaacccagagacacagaatcctgcttgccagctgatgagtctcactctgcgctagtgc

SEQ ID NO: 61607 - DNA, 786 bp, Homo sapiens
  misc_feature (1)...(786): n = a,t,c or g
ttttttttttttgactgaacgatttctaaactttatggaaaaagccaatgacaatcaattagccaaaaacgagacgccaaatcccatctcactccagcgccatgccctcttctcaaacgctcgccggctctaggacctctccaccagcacagttctcaggagtcctgctggtctcccagtgctgttctaagggtccacatgaaggcaggtcaggcgggactccccgggcaagcacttctgtacgcggaaagcacgaggcgcaggagccatggagagccggtcctttggagacaggaatacttaagaggattggcaaaccggagaaacgctgggagaggtgccccgcactgcggtggtaaggcagagtctcagttctcctcgggcttgtcggctggcggtccacaaggctgaagcatcttttccatcaagttgaagcggactcgcgctttgctctcattctccgcaatggcgaagtagttgagaaggtcgaagtggcccatgtaggagcagtacgagtcgcggtgttggttcaccagccactcccacttggtggtgtcggcgtggcccgtgccgatgtacttggactgcaggtgctccagctggctatggatggtgtagcggtcagtcatctcgccgctttccccttcgctctcaggtcagaggacgcaggtaacaactcgccgctctagcgttttacaggagagtgaagccaccgcgcggaagctccaggtccgcgccgtcgcagaagaatggcggaattccnccncatggggtagcgaactcgat

SEQ ID NO: 61608 - DNA, 1070 bp, Homo sapiens
tttcgtctcacttcagccagagagcggggttagggcttcattgccttgtgtcctctgctccgggagacttcggtgattctgccactccctccgtcgctctgtgacctgctggcattgaatgatttatagctaagactccaggacacccctgaagccgagaaatgaaatcccaagttgaccgtcaagtccaacgctcgctgcagacatctagtggacccggcgctcgcggacggaagcggacagacctagttggatccttatcccaccaatctggcccacctttgctgccatctaacaccgctgaccggcccaccgttcctccactgtccgctggttgacccgggcagcggagagaggagggtgttgtcaatggaaatatggattcttctacagcaaacatgtacatctatatcatgtggaacaaggatagtgggaaaacctctgattgtgaggacgtagaactgagaagagcatatgaaatgtcataagaaaaacacttctggagcatgtcgtcttcaagaaaatggtgcccagacagtcaggattgtgttacattttaataggaatggggatatttgtgatatactgacaaaccaagacaggtgactataaaactgcaatgtaaagtgtcagcttcttctcacacctttatagtagacatctgagaacctcactcctgtcagcatattcttggggttgaatctcaagtgatccatagaatcttagataaagcagatgaaaataggcttttctgtcttcctaagtaaacagcaatgaagttgagagaaagaagatattgctggaagtcatgataaagtctatcttctgtgaccatatgtttccttagagagttttagacattgaccctcatctaaaaaattgtgaaaaaggactctcaccagtctgttaatatgtatgtatatgaaagaaattactggtaaacttctaaggcaggcattggtgttacttttttttatctttattgtgtctgtaaaatgattgtgtgtattttttctttgattagacaatgagattcccaaataaattttattaaagccaaaaaacccttt

SEQ ID NO: 61609 - DNA, 1502 bp, Homo sapiens
ggctgtcaatgctgaacttacagtgttaaagttcatttatttttctctgtttgcttttttgttgaaaatgtagctgtcttggggtttggcccgattttacaaggaaaattattttctttcttccttttttattttaaatgagaaaaaataaaaaccctcacaacgtgagattcctttacttctgcagcataaaagcaaatgaaggtaagaaaatctcctggtacgaaaaatttgagtaagaattctctctagaataaacaaggtccccacagatagctgaaggaaagaggaagcagttcagtctggcacccggtactctttgggaaaacaaaaagggaggcagattgcattactgctctcttctcatagaaaacggtaagtttttgtggcatggtccattgtccaagagtgtaagaaaagaagtgagttggccattcagatagctaaaatgcagtttcatctgaccaaaaacccaagattatctgcacagtctctgcagtgccaggacaatgcaggtgagagaccaggagagcagggagtggccacgctgggctgcagaagagtccacctctctccggtcgggatccactgcgggggcctctgtggtgacaaactcaaactccgtgggacacacgtcatccatgcacccactgccactccctgagccactggattcatcacttgtgtcctggaaattgacatcattgccattgtaggcgttttttagtttgttggtcatcacacggagagccataatctgctgtctgatgaaagtgtcaggccgagtgatgtccacatcccacctcgggattgttgatctggttggtgagcccatcattcatgatctcaggcaagtatctggctttgctgtgcccgttccagcattcctcctcgttggacgtgcccgctgtctagctctcgtccttgcagatagtgtagggtaatgctgaccagacctttttagagagcttcaatttctcttttatgtctgtgaccagccggtccaagcttgtgcctgcagcagttgttggtctttcctcaggattgtagggcctgaaacgtgtattaaaattttcaggagctgagcgggcagatctgagggctggagcaggtttgggctgaccacatccctgaaagacctttgcagacacctgcatgctgttttcttgcatgttcataatggcttcagaaatcttgacatctatcgggtccatgaccgactcaatgttgaatggcccctccagtcgctctgccaccaagagcattgcatctgttaaaatacaggaacatgatttatttgcaaactgggagctccaggttcccaacctgtgtttaaacattgttaaaacaactggatgaaaaataatggtgcattcacgtttttaaatttgctttcatatagtccaaaatgaaatagatgactgaatcttaggacgactgtattttgtttgaagattcaaaattattttatatgtctagaaccagggctgaaaataagaaaa

SEQ ID NO: 61610 - DNA, 1143 bp, Homo sapiens
acgtcatatgcatcagaataagctgttttatttttgtattagtagcgggctaagttattaacaatcatactttcttggataagaacatttttaacaaggatatcttctaaagaatgtgtattcgtatagcataccaataccttttcacaactgtggaatcagaataatttatggcattcccgatagaggaggcagcattgtttttattgattggaataaggaaaattttgaaggatgtatatatagcttttagttccatctccgcttgctttatgattcgattatttgtttacttactttcatatgggcataacatgaatttaaatcaagcagatttaaaatttttcaacagttggaacctaagctttctgaggtgaaaaatgtttcttaaaaggtttgtaggaaagagatttaacgagtcttttcaatcgtttaataaaagtatacactgagcgccttctacagagttgggcaggtgctgccgagaagcttagcgctacgccggcctccaagaccgcacatccgggacattcgagagtcagtccgaggccccgccctcctaagggcggggccactgggcaatcggcgcaggcccttcgtcgtgccccgcctcgtctgccccgccagcgcgtcgagggaggggccagcgacacatggcctagtaactgtccggccgcggcgctggcttaagccatggctgagggtagccggattcctcaggcccgggcgctcctacagcagtgcctgcacgcccggctgcaaattcgcccagccgatggggacgtcgcggcccagtgggtggaggtaacgtcagcccggcagctctcgttatcctccggcgtgcggggcggttttttccgcgttgtctcggtgactcgtccgctctgtgtctccctctgagaccggcggtccggccgcggggataccgggtcagcttgaagctggccgcggtggcctgcctggctgcgcttgtcttttcggtccagcatcaccgttccccagcgccagttgtagcacccgagaggaagagcgtgtctcccttcttggggggaccacaggtccaaagaggactggtgatctacgtgtgctttttcaagggagctgataaagaacttcttcccaaaatgtgtaatacactgttaa

SEQ ID NO: 61611 - DNA, 1929 bp, Homo sapiens
cagacagcgattaggtctatttcaaggcattctgccaggagcacagcgactgggggcccacgtaatgagcccacatctgagcccacggaacccagccaggctggcgaggacctggaaaaggagaccctgcgcaagcagcggctgcagcagctatgaggaggacttctacgagctggtggagccggctgaggtggctgagcggctggacctggctgaggcactggtcgacttcatctaccagtactggaagctgaagaggaaagccaatgccaaccagccgctgctgacccccaagaccgacgaggtggacaacctggcccagcaggagcaggacgtcctctaccgccgcctgaagctcttcacccatctgcggcaggacctagagagggttagaaatctgtgctacatggtgacaaggcgcgagagaacgaaacacgccatctgcaaactccaggagcagatattccacctgcagatgaaacttattgaacaggatctgtgtcgagagcggtctgggaggagagcaaagggcaagaagagtgactcgaagaggaagggctgcgagggctccaagggcagcactgagaagaaagagaaagtgaaggcggggcctgactcagtcctggggcagctggcaggcctgtccacctcattccccatcgatggcaccttcttcaacagctggctggcacagtcggtgcagatcacagcagagaacatggccatgagcgagtggccactgaacaatgggcaccgcgaggaccctgctccagggctgctgtcagaggaactgctgcaggacgaggagacactgctcagcttcatgcgggacccctcgctgcgacctggtgaccctgctaggaaggcccgaggccgcacccgcctgcctgccaagaagaaaccaccaccaccaccaccgcaggacgggcctggttcacggacgactccagacaaagcccccaagaagacctggggccaggatgcaggcagtggcaaggggggtcaagggccacctaccaggaagccaccacgtcggacatcttctcacttgccgtccagccctgcagccggggactgtcccatcctagccacccctgaaagccccccgccactggcccctgagaccccggacgaggcagcctcagtagctgctgactcagatgtccaagtgcctggccctgcagcaagccctaagcctttgggccggctccggccaccccgcgagagcaaggtaacccggagattgccgggtgccaggcctgatgctgggatgggaccaccttcagctgtggctgagaggcccaaggtcagcctgcattttgacactgagactgatggctacttctctgatggggagatgagcgactcagatgtagaggccgaggacggtggggtgcagcggggtccccgggaggcaggggcagaggaggtggtccgcatgggcgtactggcctcctaactcacccccttccctgtcccaggccctgccctggtccccccacaaggcctcagcccagtcacaactgccatttccagtctctgctgagtgtcccagaccctcgaggctgccactccgtcgtggttttatttttaatatagagagagttttgaattctacactgttgtctttcctctgtgctggcctaggacattaggattccttccacggctccggccgctaggaccctgccaggtcccgcgcaccatccctgccctgcccacgtggtattgctgggctcctggctagatgcaagcaaggtggacaagagctcaggactccagcccactgccactgggtgacacagactgtcgtttgggcattatttcatggcagatgggccagtccagggcctaccccgccttgcccccagatcccactggggtccatttgaggggtcatgctacactccaccgatccccaagtgtatt

SEQ ID NO: 61612 - DNA, 2711 bp, Homo sapiens
tttcgtgcggaggtcgcggcgagccgggccgagcagtgagggccctagcggggcccgagcggggcccggggcccctaagccattcctgaagtcatgggctggccaggacatcggtgacccgccaatccggtatggacgactggaagcccagccccctcatcaagccctttggggctcggaagaagcggagctggtaccttacctggaagtataaactgacaaaccagcgggccctgcggagattctgtcagacaggggccgtgcttttcctgctggtgactgtcattgtcaatatcaagttgatcctggacactcggcgagccatcagtgaagccaatgaagacccagagccagagcaagactatgatgaggccctaggccgcctggagcccccacggcgcagaggcagtggtccccggcgggtcctggacgtagaggtgtattcaagtcgcagcaaagtatatgtggcagtggatggcaccacggtgctggaggatgaggcccgggagcagggccggggcatccatgtcattgtcctcaaccaggccacgggccacgtgatggcaaaacgtgtgtttgacacgtactcacctcatgaggatgaggccatggtgctattcctcaacatggtagcgcccggccgagtgctcatctgcactgtcaaggatgagggctccttccacctcaaggacacagccaaggctctgctgaggagcctgggcagccaggctggccctgccctgggctggagggacacatgggccttcgtgggacgaaaaggaggtcctgtcttcggggagaaacattctaaatcacctgccctctcttcctggggggacccagtcctgctgaagacagatgtgccattgagctcagcagaagaggcagagtgccactgggcagacacagagctgaaccgtcgccgccggcgcttctgcagcaaagttgagggctatggaagtgtatgcagctgcaaggaccccacacccatcgagttcagccctgacccactcccagacaacaaggtcctcaatgtgcctgtggctgtcattgcagggaaccgacccaattacctgtacaggatgctgcgctctctgctttcagcccagggggtgtctcctcagatgataacagttttcattgacggctactatgaggaacccatggatgtggtggcactgtttggtctgaggggcatccagcatactcccatcagcatcaagaatgcccgcgtgtctcagcactacaaggccagcctcactgccactttcaacctgtttccggaggccaagtttgctgtggttctggaagaggacctggacattgctgtggattttttcagtttcctgagccaatccatccacctactggaggaggatgacagcctgtactgcatctctgcctggaatgaccaggggtatgaacacacggctgaggacccagcactactgtaccgtgtggagaccatgcctgggctgggctgggtgctcaggaggtccttgtacaaggaggagcttgagcccaagtggcctacaccggaaaagctctgggattgggacatgtggatgcggatgcctgaacaacgccggggccgagagtgcatcatccctgacgtttcccgatcctaccactttggcatcgtcggcctcaacatgaatggctactttcacgaggcctacttcaagaagcacaagttcaacacggttccaggtgtccagctcaggaatgtggacagtctgaagaaagaagcttatgaagtggaagttcacaggctgctcagtgaggctgaggttctggaccacagcaagaacccttgtgaagactctttcctgccagacacagagggccacacctacgtggcctttattcgaatggagaaagatgatgacttcaccacctggacccagcttgccaagtgcctccatatctgggacctggatgtgcgtggcaaccatcggggcctgtggagattgtttcggaagaagaaccacttcctggtggtgggggtcccggcttccccctactcagtgaagaagccaccctcagtcaccccaattttcctggagccacccccaaaggaggagggagccccaggagccccagaacagacatgagacctcctccaggaccctgcggggctgggtactgtgtacccccaggctggctagcccttccctccatcctgtaggattttgtagatgctggtaggggctggggctaccttgtttttaacatgagacttaattactaactccaaggggagggttcccctgctccaacaccccgttcctgagttaaaagtctatttatttacttccttgttggagaagggcaggagagtacctgggaatcattacgatccctagcagctcatcctgccctttgaataccctcactttccaggcctggctcagaatctaacctatttattgactgtcctgagggccttgaaaacaggccgaacctggagggcctggatttctttttgggctggaatgctgccctgagggtggggctggctcttactcaggaaactgctgtgcccaacccatggacaggcccagctggggcccacatgctgacacagactcactcagagacccttagacactggaccaggcctcctctcagccttctctttgtccagatttccaaagctggataagttggtcattgattaaaaaaggagaagccctctgggaaaaaaaaaa

SEQ ID NO: 61613 - DNA, 1089 bp, Homo sapiens
ttttttttttttgctgcacttcccccaataaaatcctccctcgttttgctttattttattctgtgaaaataagcccttattataaatctcaatgaatatccacaaaccaaaccccaaattctctagcaaaacaagacccccttgatgtataaagtcatcgctgacaggacagtctttttcagttatatgcttttgtcgctagtttcttgagaacaagactccaataagggctcatggctgccaagcccatttcctgcaacgctttgcagcgagttatgacatctctgacactggtcactgcagggcgactccatagcgcagctcattcacaaagtgctcgcagttctcactgggtcagcttgtagagcacctcctgccccaccagctcctccgcccgctggatgattttgctgcagggcagcggcgagtacttgtcatcatgtttgttgttgacctggtacttgtcactcccggccacatcatacagcaattccttcttcacgatggccttgtcagtcagggcggacatgacactggctgcaccagctcctgcgacctcacttggaggggccagatgaaccacatatccatcgccaacatagatggcccagtgtctgtagaaagggcgaaaaatctcaatcaggtctccaggcttaggctctggaatgggcgcacgcatcttccctcgcggtgtggaccctcaaggccaggctcgatttcgctgcgtagatgtctgaggcagggggagcagggatttattgtcattaacaggaaactgcgtctccagaccccacgggactgcggcttctgttgggcagggcgtgagaggcgcgcctcggaccccaggaacaaccacctcgctccctttaacaactttctcgccggggcccggcgggcgcccaggaggctgcaggtgccagcgggcggctcggcaggctagtctacacccgccctacccaattagatctcttcctcgcggaaggggagaagcatcccaggcacctcgcccggccttatcgcacccttccaggaagacccgctccacccacctcgcggtctcggaggcagcgctgcagccccagcaatcgc

SEQ ID NO: 61614 - DNA, 5187 bp, Homo sapiens
  misc_feature (1)...(5187): n = a,t,c or g
ggcggtagtgcgtcggctgctgcccgggtctggcagaactcgggttttttgggctgagacagtggcagctgcggccccgaccccaagtgcggggacctccggcgaataaaggtcggcctgcgggtaggccggtagggcctgcggtccggcctgcgggagaactgggtcgtcagtcctccgagtggtggggctggggactttgagggagttggctctagggcacagtccctgcctggccaggtcggaggaacaagtgctgggatctggcgtgtgtgctccaggggctctttccgcggccctttccacctcttttcactttggggacggtaggcctttataaacggactaatgctgggtgatttgttcctgtggttgttgatgccgaggaaagactctgggccccaggactcacctaaactggagttcgaatactgttcgctcgctgtgtgaccttggaaaaaaaaacaagcttttctgaagtgagaagctgttctcagccacgagtcctgtgcaagatcactaatgattacctggcatttctgcgacacaggcaggtcctcagggtttgtgcaagtttgcaaacatgttcaccctgtctcagacctcgagagcatggttcatcgaatagagcccgtcaggcacgaaaagaaaggcttgtgcagaaggaacgggagcgggcagctgttgtgatccaggcccatgtccggaagttttnctactgtcggagtcgactgcagagagatatcaggagagagattgatgacttttttaaagcagatgaccctgagtccactaaaagaagtgcactttgtattttcaagattgccaggaaactgctgttcctattcagaatcaaagaggataatgagagatttgagaagttgtgtcgcagcatcctgagcagcatggatgctgagaatgagcctaaggtgtggtatgtgtccctggcttgttctaaggacctcaccctcctttggattcaacagatcaagaacattttgtggtactgctgtgattttctcaagcagctcaagcctgaaatcctgcaggactcccgactcatcaccctgtacctcacgatgcttgtcaccttcacagacacttcaacgtggaaaattcttcggggaaaaggtgaaagtcttcgaccagcgatgaaccacatttgtgcaaatataatgggacatctcaaccagcatggattttattctgtgctgcagatattgttaacccgtggcctggcaagaccccgtccttgtctatccaaaggcactttaacagcagctttttctctagcgttacgccctgtgattgctgcacagttctcagacaatctgattcggccgttcctcatccacatcatgtgtgtgcctgctctggtgactcatctcagcacagtgacccctgagcgcctcactgttttagaatcccatgacatgcttcgtaaattcatcatatttttaagagaccaagatcgatgccgtgatgtatgtgaaagtttagaaggatgccatacgctttgtctaatgggcaacctcctacacttgggctccctcagccccagagtgttagaggaggagacagatgggttcgtgagtttgctcacccagacgctgtgctactgtcggaagtatgtgtctcagaagaagtccaacctgacccactggcatcctgtccttggctggttctcccaatctgtggattatggccttaacgagtcaatgcacttgatcaccaaacagctgcagttcttgtggggggtgcctctgatccggatcttcttctgtgacatcctgagcaagaagctactggagagccaggagccagcccacgcacagccagcatcccctcagaatgtgctcccagtgaagagtctcctaaagcgtgcttttcaaaagtcggcatcagtccggaatattctcaggcctgtcgggggtaaacgggtcgactctgcagaagtccagaaggtttgcaacatctgtgtcctctaccagacctcgctgacaactctcacacagattcggctgcagatactcacaggtctcacttaccttgatgacctgcttcccaaactgtgggcatttatctgtgagctcgggccccacggagggttaaagctcttcttggaatgcctgaacaatgacactgaagagtccaagcaactcttggccatgctgatgctgttctgtgactgttcgcggcacctcatcacaatccttgatgacattgaagtttatgaagaacagatttcattcaaactggaagagctggtcactatctcctctttcctgaattcttttgtgtttaagatgatctgggatggaattgtagagaacgccaagggtgagaccttggagctgttccagtctgtccacgggtggcttatggtgctgtacgagcgggactgccggcggcgcttcacccccgaggaccactggctgcgaaaggatctcaaacctagcgtgctcttccaagaactcgacagggacagaaaacgggcacagttgatcctgcagtacatcccacatgtcatccctcacaaaaacagagttctactgtttcgaaccatggttaccaaggagaaggagaaactggggctggtggaaaccagctctgcctccccgcatgtcactcacatcaccatccgccggtccaggatgctggagagcttgtttgagtgcccctggccactggtgatcaatgccgagagctgctaggaaggcagtgtgtgctgaacagtggatgtttctgacattcttcaaggacggctacgagcagcttaggcagctctcccagcacgccatgaagggggtcatcccgtgtgaagtttgtcaatgacctcggggtggacgaagcagggattgatcaagacggtgtttttaaggagttcttgggaagagatcatcaagagagtttttgacccagcacttcaatctgttcaagacaaccaagtggggatgagaggctgtacccctcacccacatccatacatccatgagaattacctgcagctcttccgagtttgtggggaagatgctggggaaggctgtgtatgagggaattgtggtggacgtgccatttgcatccttcttcctgagccaactgcttgggcaccaccacagcgtcttctatagctcggtggatgaactgccttctctggactccgagttctataaaaacctcacctccatcaagcgctatgatggggacatcactgacctgggcctgacgctgtcttacgacgaggacgtcatgggtcagcttgtttgccatgaactgattcctggagggaagaccattcctgttacaaatgaaaataaaattagctacatccatctgatggcacattttcgaatgcacactcaaataaaaaaccaaacagctgccctcattagcggattccgttccattatcaaacccgagtggatccgaatgttctcaactcctgaactgcagcgtctcatctctggcgacaatgctgagattgatctggaagatttaaagaagcacacagtctactacggtggtttccatggaagtcacagagtcatcatctggctctgggatattctggcctccgacttcacaccggatgagagagctatgtttctgaagttcgtgaccagctgctccagacccccgctcctgggattcgcctacctcaagcctccattctccatccgctgcgtggaggtgtcggacgatcaggacaccggggacactctgggcagcgtcctccggggcttcttcaccatccgcaagcgggagccaggcggccgcctgcccacctcctccacctgcttcaacctgctcaagcttgcccaaactacagcaagaagagcgtcctccgcgaggaagctgcgctacagccatcagcactgaacacgggctttgaactctcctagctcctgtcccagccctgcctccagggctcctgggctgccagggaccttcagctcccagaggcagtgtggtcctgggaatgtgaccaacatgccaggtgacattggcccctagaccctctctatagccatgagactccttgtggcctcaagaaatttagacgcccacgacagcactacacagcatctccaggtgatgcccaaggcacagggctgcagaaaataaacctccagattccaccaacacgggtccattcttcctggtgatggcagaggggcttcttttagctagtttgatcttttgggagtctgtcttttccttagccgtctgagtgagctgtgtatgaacaagtcccaggagttccaagagtctagagtggtttttgcagcatgggttgagtgtacaaagcctactgtgcgtgagatcctctccttccgtttctgaaatctcttactcaggtaaggcctcgccaagcctctatgcaccccacaaagtttctgcctccatgccgtccacagcgcctcttcccagacagccaggcccatctgctgcccagggaagcgcaggcgcctgctagggacgctatggacaccgtgagtccaaggcgctgctcctgccttgaagccacgcgctccacgccgcggccctcccattttctgcgtcctcagcgggctgagctgccagagagccttcccggacctattcccgtcctatgcattcacattggcatcctggtttgggggaagaaaaacaacggcccttagcagcagccccgtttccagaatgtgctgcctgttccccaaagcctgcttgtcccgcggaggacggctgcctttgaccctgcttatttgtctcactggttatctaatgaggaacaaacactaacctaaggtacacatcccatctgggcggtggcttcactcctgagtctgcaaaatcccaggaaacttgggtcttgctgcccatccttcctcagcacagggaacccggaagcccgttgcactgacagaggctcacaccctctgggttttttgttttttttttaaacttcatttctcttccaacccattgggttcctctgccctcattctttacctttgttgtaagaactttagctccagggaactgaggcagaggccctgtttgtggtctgtgttgacagccacccaccctctcccacctcatgctcctgcacctgcaccaccaaggttgatgccggattcgaagccaggaaggcccagtccctcctctgctctcctcaaagacgcaaaacattttccaacaagg

SEQ ID NO: 61615 - DNA, 694 bp, Homo sapiens
cattaatttctgtctttatgccaatgtcacactgtcttgagtacttcctttgtaataggttttgaaaccaggaattgtgtgacttctacaatttcattcttctttatcaagcatgttttggctgttttgggtcctttgaaattacatatgaatttcatcagcttgtcagcttgtcagcttgatcagcttgtcagcttctgcaaagaagccagcttggagtttggtaggggttgcattgcatctccagatgaatttggggaatgtctccatattaacaatatttagtcttcctatccttgaacatgggatatattttcatttatctggcttcagttctttcaacaacattttgtagttttcactgtacaatgatctggtcttttgctttccaaaaccagaaactcttttaagttgaaggtttcttaagacttttggggaggcagttctgctaaacaaacagaaaagagaacatttggttagaaaaaaacagagataacaggaagattaattattttaataataaagcaaggaaccaatttattaaaattttttagaatatgctttgtaaccataatgcttgaatctgttatacatttgtctcagactggaagttcccctttgtgacttcaagatacttgagaaacaatcagtaatcaagtaatgggttgctgggtatagacaaacaacacagagg

SEQ ID NO: 61616 - DNA, 1372 bp, Homo sapiens
gggccgcctggacacacaggtcccctggcacaggtaacaacagaggaccctcagggagagaaggctcccagcttcctctacaccctgagaaccgctgccgagagacccaaaagacacctgggcatcagtgctgcagccctaccttggcctccaggtagatgctagtggagggcgcccgcctggcgacaaaggaagaggcaggcagcaagagacagcgcgcagatgacgaacagggagtcgctcaccaggacgcggacaagcagcagggcccagggctgtgccgccgcgccgcatgggagagcacagcacacagcacgttcaccagcagaaagagcagcgaggcccccacaaaggcccctcggacagcgagcaagcctcggctcatcttcgggcccgacgcttcactttggccttgaacaccacctggggcaaagtagaggttcataaggcgtcaaggtgaagaactgcaggcagacggggcagcagtagagaagccagaagggcaaagggccccagggttgtttggcgcggggagtatcttcggaaattagaaggagaaaaaggttgttacgcaagggggccccagaagcagacagagggccaggaacacccgtctgataagctgagacgcttgtgccccatacagaagcaccagccagagctgggcatagacggagaagaagagcagggcatacagggtggtgtaggcagctgtcagccccagggtcacagcaggtggcagcgcaggcaccaagcccggcaagcaggcaaccaggcccagacaggttactctccatgtcaagggagggaggcctgaatcccggagacagacaaggagggactgtcggcgggaccagggaaataaatacggaggggtgggaattgcagggtgcagagagggagatggggcgctcaggaggaaagaagttgtggctgacaggcccccctcctcaacagagagacccttgcccttggggaacacaggcagcctgggccccaggcccctcactcaggggcatggaagggcagtctcttttctccaggacagaccggataggggttgggggtgtctcctccctgggcctaccccagagccaaggatggggggatgcagaggcccaaggagaggactccctggcctcggtcgttcatgtcgtcctgggtggagggggaggctctctctcctccaataatgcggatggggagggcctctgcctcctgtcctcgtaattctcgaaagctgcccccgccccaccctcccccaccgcgtccacgctccagcctcaaggggagggaggaggcggacgccaggtcctcaggccgctgatgggagagccggctcaggtcgtggggacccggggctccgacgaaa

SEQ ID NO: 61617 - DNA, 1345 bp, Homo sapiens
ttttttttttttcacaggtgcaaagattcactttttatttattcattctcctccaacatttagcataattaaagccaagggactaggaggggggtgaggtgaaagatgagctggaggacccgcaataggggtaggtccccctgtggaaaaaggttcaaaaggcccaaaggatgggaagggggtcagcgctggaactagaggagcaggtgggggcaacttcctccccctcctaaaaactctccccctgttgaaacctctttgtgaacgggccgaacctcaggcccctgaatgggtgaacttccgcaggccgtaagagtttgtgtttcctccgtaggtctgctttgctcagcgtcaggggtgctgcttgagggctggtagggtgctgttccttgtctagtcctgctctgttgacactctttcctgggggagtttacccccatttggaagggcgttaatccacccttccactggtactttttggcctctttttggggatagaggttattcagcagggcacacaacagaggcagttccagatttcaactgctcatcagatggcgggaagatgaagacagatggtgcagccacagttcgtttgatctccaccttggtcccctggccaaaagtgtacaggtgaatcagcatactgctgacagtaataaactgcaaaatcttcaggctccagtctgctgatggtgagagtgaagtctgtcccagacccactgccactgaacctgtctgggatgccagtggccctgctggatgcatcatagatgaggagcctgggagcctggccaggtttctgttggtaccaggctaagtacttcctactaatagtctgactggccctgcaggagagggtggctctttcccctggagacaaagacagggtggctggagactgagtcaacacaatttctccggtggtatgtttgatctccagcttggtccctccgccaaaagtgtacgggggaggccagttggtacgctgctgacagtaataaactgcaaaatcttcaggctctaggctgctgatggtgagagtgaagtctgtcccagacccactgccactgaacctgtctgggatgccagtggccctgttggatgcatcatagatgaggagcctgggagcctggccaggtttctgctggtaccaggctaagtagctgctgctaacactctgactggccctgcaggagagggtggctctttcccctggagacaaagacagggtggctggagactgtgtcaacacaatttctccgggggtatctgggagccagagtagcaggaggaagagaagctgagctggggcttccatggttccctctgggtcctaactgag

SEQ ID NO: 61618 - DNA, 2173 bp, Homo sapiens
gctgttgcatcggctgtcatgaattcggcacgagctcatgctgccagattatctgggtgtggtggcactagaatggagatacttcatgggaataatactcattgttcttgaccccactgggtcagtgctgaccctaccaccacccactctgcagcagcacccagatgctagccttgtacagaaagccccagcatctctttacagtcaatgagctctctctttattgaggtatttcaaatatacaaacacttcagagctttttagatatgtgaaggtccaatttagtgaagcggattaacaaaacatgattctaaaagcctgcctcctctagaccaaggccatgtaaaagatttatgtaccaatcagcatcttttccttttaataatcttcaggatgttgtgttgggtccccagattcccatttgattttcttgcatcattttctcagactgtttgcttccttgcttcctccccagtgagtgccttgggcattttgtgtgtgcagatagagaagtacagagttactgcaggagccctcaggagtgagacaacaggaaatgacaaagtaatacagagctgcagtagctgggatgggtgaggaccccacttgggatgccccatggtagagtactggtgccttgggagggtagaactgctcaggtctagcacgcctcactgaagattggattcacctgctgggtgactcggatgaaggtagttctcctgctcaactctttgagcttagctgctcccacataggtacacgtagagcggatccctcctaggatgtctcggatggtatgttccacatctcctttaaaaggaacttccactgtctttccctctgaggctctgtactcagccacgcccccagcatacttcttacatggccaatttaagaactcattccatagaagagcttgtacttcttgccatccctctcgatgagctcaccacctgactcactgtgcccagccagcatgccacccagcatcacgaagtcagctcctgccccaaaagccttggccacatccccaggacagctgcaacctccatctgaaatgatgtggcctttgaggccatgagcagcatctgcacactccatcactgcgctgagctgtggataccccactccagttttcttccgagtagtacacacagagcctggcccaattcccactttgatgatgtcagccccagaaaggatgagctcttctaccatctctcctgttaccacattccctgccatgatggtgtgctgggggaagcgcttccgtacatcttttacaaattcaacaaagtgttcagagtagccatttgccacatccaggcatatatacttcacctggggaatagcttccaggatctgttccagctgctcaaagtcagaagagcctgtgcctgagctggcagccagatgctcaagacagtcaggattctggccagcaaactcttgccactgaacgaggctatagtgcttatggacagcagtgaagagagagaacttctcagcaacaagtatagaggcaggtaatagtactgacaggagcagcatcttccatttcaaagtgaacaacttgtatataagaaaaacacatcccatttggggcacatcccagaaactcccaggaacctaggacttacagagaaccttggccatctcaaaggtgcccacagtatccatattggcagcaatgatgggaaccccagagtatgtctgctttgagttccgaaatgaaaaggatcttgtgagatccacctcacttcgagacttaagggtactgcgtttgggcctcaaaaggacatccttgaagtccagtttcacatcgttgtcaatatgaggcatggcgcttagcctcggggtagcgatgaatctgagggctggaaggcaggaagtcataaggaccaatcttcccctgggctttaacgccctgttacggctggtggcctctcttcgcttaagttgtggaaggtcgggcaaaggccgaagtgtggtccctgaagcctgtcacctcgacccatcccgtggctgcgattaccctagggctccatcccaggtactgtttgttggggaggagagctgggaaagggttgtgagagaccctgacggtgcattccttaccccgctacacttccttcttctacccctgcaaagagcaatggggcaagaggct

SEQ ID NO: 61619 - DNA, 1857 bp, Homo sapiens
  misc_feature (1)...(1857): n = a,t,c or g
tttttttttttaaagataaaattaatttatttgacttcacaacttcattgggccacacaggggccccacagtcctagaagcacaaccttgtggaagtgggctggggaggccagttctctggactgcctgctcccttgtccagagctgccttgagccaggtccctcctgaccccatcatcctgttcccatatgcaagggctgctcaggtccacctgcaataaacccaggcctgcctctggcagcagaggacagggcctcgtgggtggcagcagcgctggtcctcgtggctgtgggtgtggggtgggtggggtaggtaggtggggaaagaggggcaggcaggagggtgtggttcagtgcagagagctgctgttctgctctttcaaaggccatcttgcccanaaagctggctgttccaactccaccccattttacaggcagctggaagaagttcatttcagctgctaaggctgccatggcagaagggtcctggccaaactgagctcgcaacatcatgtccattttctccagcctcctcttgagccgcttggcctctcgctctcggatgagccgggcctgccgcttttccggggtttcattggcccgcttcagcctcatggcctcccgatcccgctgcagccggcgtgcccgctgctcgtctgtctcctgcatgcgctgcaagcgcttggcttcacggtccctcatgcgcctcacctcccgctcctcgggggtctcattgtcccgccggctcttcttggccgtgcgctctcgttccagccgctgcagccgtacttccaaaggctcattctgtcgacgtagagcccacttgcgtacactgggagtctgggcttccagcagtttacggtaggcagcacagttgttgcacacaagcagaattccagcagggtacactggaggactaaaggcaatatccttcccctcagcactggagggaccctcattgtggactgtgggtagggattccatatttagtacttcaggaagtttctcactgttaaaagtggcatggctggtgaaccgggctccacacacagcacagttagatcgctggtcctccgagtggattaagaggtggcgacccaatgaccccggggagctaagggcccggccacagacaggamcacatgtagctcttggcgctcaccactgctgcagtgtgctggtacacgtgagcaatcaactgctcccggctcccgcagtctagctggcagaggggacactggcagagttcaagcaaggggtcagaattcaaattccctgtgacctcgtgctcttacccttcgttcccaccaacaggctgttctgtattttctaactctttctccaatttggacaacccctcccatcttccctctgaagtgtggggaaaaagattcatcttgtgtcgtctccctccttcatcaccctcaactgtcacagtgaaacttttatttggatttgtctgtttcccgaacgggacatgtttccctgatgcaagagctctggtctttccccagtttcacgactggatatgttactacctccttgcaagatgctaacctccagctctggtgcagttcccacggagcaaagcaaactcgactgaatccaagtgatctgtatctgccaaaaaggagaggacaagaaagctggtcacttagccgcctggctgttcacctgacccctggggttgggtctggggcgtgtctaatcagccgagatggtccctctgcttcttcaagcatgagcccaggtaaattcccaggaattaccaagacaagagcctgacaaagagccggaggtcttccgaggcggctcagacaaacccttagacaacacaatctccgaaatctaaattta

SEQ ID NO: 61620 - DNA, 1278 bp, Homo sapiens
ggcgcctgacggaagcggcggcagcgggcagcggctctcgggctgcaggctgggcagggtcccctcccacgctcctgccgctgtctcccacgtcccccaggtgcgcggccaccatggcgtccagcgacgaggacggcaccaacggcggcgcctcggaggccggcgaggaccgggaggctcccggcaagcggaggcgcctggggttcttggccaccgcctggctcaccttctacgacatcgccatgaccgcggggtggttggttctagctattgccatggtacgtttttatatggaaaaaggaacacacagaggtttatataaaagtattcagaagacacttaaatttttccagacatttgccttgcttgagatagttcactgtttaattggaattgtacctacttctgtgattgtgactggggtccaagtgagttcaagaatctttatggtgtggctcattactcacagtataaaaccaatccagaatgaagagagtgtggtgctttttctggtcgcgtggactgtgacagagatcactcgctattccttctacacattcagccttcttgaccacttgccatacttcattaaatgggccagatataatttttttatcatcttatatcctgttggagttgctggtgaacttcttacaatatacgctgccttgccgcatgtgaagaaaacaggaatgttttcaataagacttcctaacaaatacaatgtctcttttgactactattattttcttcttataaccatggcatcatatatacctttgtttccacaactctattttcatatgttacgtcaaagaagaaaggtgcttcatggagaggtgattgtagaaaaggatgattaaatgatctctgcaaacaaggtgctttttccagaataaccaagattacctgagtccaagttttaataacaagaataaacaactttgtgaaatatcatggattgtatggtttcttaaaatataacttgagacacgtggtatttgccagtatttgtgttcctcttgtgccagatctattttttacaagaactgtgcaaatatcagtaacttttgggtaggtattgattattaggaaaataattaggtgtattatctgggggaaaaaaaaacttttgctaagttttttttgaaacatgctcaaagctttttaaatcaatatttagaaattagtttaacgatttactattatacctgctagtgatatttatgtgatatctataaatgaaaataaatgcaaaattataccaaaaaaaaaaaa

SEQ ID NO: 61621 - DNA, 487 bp, Homo sapiens
agaattcggcacgagggttccggcgtggccattttcgttggtggtgttcagttgtggcggttgctggtcagtaacagccaagatgctgcggaatctgctggctcttcgtcagattgggcagaggacgataagcactgcttcccgcaggcattttaaaaataaagttccggagaagcaaaaactgttccaggaggatgatgaaattccactgtatctaaagggtggggtagctgatgccctcctgtatagagccaccatgattcttacagttggtggaacagcatatgccatatatgagctggctgtggcttcatttcccaagaagcaggagtgacttcagtcatcccagcaatcgcttggttcagtttcattcagctctctatggaccagtaatctgataaataaccgagctcttctttggggatcaatatttattgacttgtagtaactgccaccaataaagcagtctttaccatgaaaaaaaaaa

SEQ ID NO: 61622 - DNA, 2568 bp, Homo sapiens
ggcacgaggcgccctgcagattgtctcttgttgcgtaagtttttttgaccgtcactcgtgtcagcttcaaagtcagatagatttttctcccagcatgttctacttccgaggctgtggccgttgggtcgcggtttccttcaccaagcagcaatttccgttggcacggttgagcagtgacagcgcggcgccccggactccgcacttcgacgtgatagtcattggtggaggacatgccgggactgaggcagccaccgccgccgctcggtgcggctctcggactctgctcctcactcaccgcgtggacacgatcggtcagatgtcatgtaatccttcctttggtggcatcggaaagggacatttaatgagggaagtagatgccttggatggcctgtgttctcgcatctgtgaccagtctggtgtacattataaagtattaaaccggcgtaagggaccagctgtgtggggtctgagagctcagattgataggaaactctataaacagaacatgcagaaagaaatcttgaatacaccactgcttactgttcaggagggagctgtagaagatcttattcttacagaaccagagcctgaacacactgggaaatgccgtgtcagtggggttgttttggtggatggaagcacagtatatgcagagagtgtgattctgactactgggacatttctgagaggcatgattgtaattggattggagacgcatccagcaggacgtttaggggatcagccttctataggattggctcagacactggagaagttagggtttgtggtgggaaggttgaagactgggactccaccccgaattgccaaagagtccattaatttcagtattctaaacaagcatataccggacaatccatccataccattcagctttaccaatgagacagtatggattaagccagaagatcagctgccatgttacttgactcacaccaaccctagagtggatgagattgtccttaagaaccttcaacttaatagtcatgttaaagaaacgacaagaggacctcgatactgaccctccattgaatcaaaagttttgcgttttccaaaccgtctacatcaggtttggttggaacctgaaggaatggattctgaccttatctacccacaggggttatctatgacgctaccagctgagttacaagagaaaatgatcacatgcatcagaggcttggagaaagctaaagtgattcagccaggctacggtgttcagtatgattacttagatccccgtcagatcaccccttccttggagactcatttggttcaacgactcttctttgctggacagatcaatggcaccactggttatgaggaagctgcagctcaatgctcttgtagggtgtgatagccggaatcaacgccagtcttcgggtcagtcgcaagcctccctttgtggttagccgaacagaaggttacataggagtcttgattgatgacctcactactctgggcaccagtgaaccataccgcatgtttaccagccgagtagagttccgtttgtcactgcgccctgataatgctgacagccggctcacactgcgagggtataaagacgctggctgtgtgtcccaacaacgatatgaaagagcttgttggatgaagtcttctttaaaagaaggcatttctgtgttgaaatctattgagtttttgagctctaaatggaaaaaattaatcccagaggcttctataagtactagtagaagtctgcctgtcagagctctcgatgttctgaagtatgaggaagttgacatggattcattagccaaggctgttccagagcccttgaagaagtatactaaatgtagagagctggctgaaagactgaaaatagaagccacttatgaatcagtgttgttccatcaactacaagaaataaagggagttcagcaagatgaagctctccaactgccaaaagacctagattatttgactatcagggatgtgtctttgtcccatgaagttcgagagaaactacattttagtcgtccacagacgatcggggctgctagtcgcatacccggagtaacacctgccgccatcatcaatctgctgagatttgtgaagaccactcaacgaagacagtcggctatgaatgaatcatccaagactgatcaatacttatgtgatgcagacagacttcaagagagagagttatagctttcaattcataaaagattttttaaagagccatataaataatttggatcaataccaacagtatagataaaagaattatttagcacatgttaaaatagcctttattaggttacctatgggtttgcccattaatttcctgagtgggacagaaattataattgtgctttttcgtgtatatgaaaaaactagtcgtaaacaatttgtactctttctttaaggagctgtaatacaaataactttgtgcagtgttcatcaaagagagagacagtgaacctaaaactgaacctggaataaaactcaacatgcagatttgcctactcatagggactttgcctattaagtctaccaaattaaaagtcttatcattcagaaaaaaaaaaaaaa

SEQ ID NO: 61623 - DNA, 1569 bp, Homo sapiens
cccacgcgtccgggttggtgcttcctgttcgcagctgcggcaacagcgtcttgccctgtcgccacgctggagtccactgcaacctccgcatcctgggttcaagcaattctcctgcctcagcctcccaagtagctgggactacgggagaagatggtataaactggtccatcagtgacaaagacattgaggcccagatagctaataaccgaacacctggaagatggacccagcggtactattcagccaacaaaaacattatctgtagaaattgtgacaaacgtggtcatttatcaaaaaactgccccttaccacgaaaagttcgtcgctgcttcctgtgctccaggagaggacatctcctgtattcctgtccagcccccctttgcgaatactgtcctgtgcctaagatgttggaccactcatgtcttttcagacattcctgggataaacagtgtgaccgatgtcatatgctaggccactatacagatgcttgcacagaaatctggaggcagtatcacctaacgaccaaacctggaccacccaaaaagccgaagaccccttcaagaccatcagccttagcatattgctatcactgcgcgcaaaaaggccattatggacacgaatgtccagaaagagaagtgtatgacccgtctccagtatctccattcatctgctactatgatgacaaatatgaaattcaggagagagaaaagagactaaaacaaaaaataaaagtactcaagaaaaatggggttatcccagagccatccaagctaccttatataaaagcagcaaatgagaacccccaccatgatataaggaagggccgtgcctcatggaaaagcaacaggtggcctcaagaaaataaagaaacacaaaaagaaatgaagaacaagaatagaaactgggagaagcacaggaaggctgacagacatcgtgaagtggatgaggattttcccaggggccccaaaacctactcttctcctggcagttttaaaacccagaagccttctaagccctttcaccgttcatcacattaccacacgtcaagagaagacaagtctcccaaggaaggcaagaggggcaagcagaagaaaaaggagaggtgctgggaagatgatgacaatgataacttatttcttattaagcagagaaaaaaaaagtcttaagccgtcaggcagcctctgatgtggcttttcattgttcatttggcctttgtgtctataaccttctggcactgtgtttattatctatgattaaataaagtgagtttttggttttgtttttttaatttcagccattcctagagttactgaatatccatggagatctcaattctctgtgtccaacaggatattaggtaagaaagtacaaagataaacctggacttctcctattccaatatgtcatctttactcagaatcctagggataggtagaagaattcatcttttcaagaaagtgttttaaaaatactttgggaaaaaaactgcatcaaaggtaatttatcctcaaattaaatccttgcaggaagagaaattaacactaagaaaaagtcatcaatatttttcac

SEQ ID NO: 61624 - DNA, 1678 bp, Homo sapiens
tccagcgccccgcaccggggccgttagtcagcagaacgcgagctcttgtggaggagcagggccggcgcgaggcgagactcgggagcgtgagcggggcccctggggcgccgccgtccttcttcgccccggcgccgggggctagtagccatggtccccgctcctctgtcgggccagtctgcaggcggagagagtcggacggcgcccggagcgcggatctcgccttgtggaggacagcgcgtcggctgcggttctctctcgaccccttctgcccggcgcttcggcccgggccgctcaggtgcagagcatgaataatctttcatttagtgagctatgttgcctcttctgctgtccaccttgtccagggaagattgcttcaaaattagcgtttttgccacctgatccaacttacacactgatgtgtgatgaaagcggaagccgttggactttacatctgtctgaacgagcagactggcagtattcttctagagaaaaagatgctattgagtgtttcatgactagaaccagtaaaggcaacagaattgcttgtatgtttgtacgttgttcacccaatgcgaaatacactttactcttctcacatggaaatgctgtatgatcttggacaaatgagcagcttttacataggactaggatcacggattaattgtaatatattctcatatgattattctggatatggtgccagttccgggaaacccacagagaagaacctctatgcagacattgaagctgcttggcttgctcttaggacaagatatggcattcgccctgaaaaagtggattaaatatggccaaagtataggggcagtacccgtctgtggatcttgctgctcgatatgagagtgctggcggtaattcttcaatcccctctgacttcgggaatgcgagttgcctttcctggataccaaggaagacctactgtcttgcatgcattcccaaacattggacaaaatctcttaaggataacctcttccagttatttaattaatttcatggggacttgaaggatgaagtcctttggactttttcacatgggcctcgcatttgtttggaacgttggcccaaagacctgtggagcctctctgggttgaaggagcaggtcacaatgatgtggaactttatggacagtatcttgaaaggttgaaacagtttgtgtcacaggaactggtaaatttgtaaaatattctgtaaatttgctactgggttttcctttcttgctgaactgcactctttggtaaataacataaaacctgaaggttttgtttgcaaatcatgtcagttgccttcataaatgtacaggtaatgatttgttaacagacttaatgaaggttttaattaccagaactaaaaactggaaataacagtaccgtgcagtcaggctgtgtaatttatattttttctgtgaatttttttttaacatcaagatgagtactgtatgagattttgattctataaaatcaaatgctgtaaaagtattgccaaatgcttttgcatactagagacagatttataaatatttttgagacatctcaatatattagatcttatcctggaatacaactgtgcatattttgagagaagctatgtatctgcaggcactttcagtactcataatggaatgaactctaaaagcagatttgacaccatgcgagttcactag

SEQ ID NO: 61625 - DNA, 1649 bp, Homo sapiens
ctaaataaatgaatgcagaatggggacccctccctcctccccatgggagatgggcagctcagacactcagaaggttgtgtgggagcgagcaaacaaacacccatgcacacctgggtcccgtcagtcagatgcaggggacaggaagtgccctgccatctactggatgccagaagacaagacgtgacccacgagtaagtcacggtttctgtgaggtgctggtggcactggcacagggtcacagtgaaaagcctctacgcagaggacagcagaaaccccccgcagcctcaggaggcagcatcagatttatttattcctactcaacatgacccgggaacacaggagcaactctgtacacttctagaaactcacagctagctccaaaacaatagaaattttaaactacaaaagatgagttgtattcagcaaatataaagggtaattttagactgtgtgaacgtttatcagactatttacagcacccgggagacgggttcagatctcgccggcctccttctcttctgacctccgtgaagccatcttcccgttggagctctcaagcctccagtccgggggccctcgctcgctccgcccgctctcccaggactcctctctggatgcccgctctctggagaacttgtatttcgcacttcggtcccgggaagcccgacgatgtccccggctgtggctccgggaacggctgcggtggcgccgatgtctatctcgggaccgggaccgggacaatttccgtcgctctcgggaggtagatcttgaccgcctccgacgccgatcccgggagcgtgacctcctgcgatctctggttcttgatcccgacctcctgctcagacgctcctcccgttccctctcctctctcctcctcaagcgatcctgatttctcttctcctgcttttcagcgacagttttctcagcttcttttttcttcgcacgaactttttccacttccataagaatcttctgggattcatccacattaccttcagcccctagctgttcggctttagcaaggagttttcctatttcttcatttaactcatgtactttttctgcctttgcagaaacttccgcactgatttcctcctgtgtttctgccagccgcttcttggcgagctcagttctccgatcacattcagcaataaaggactccaagtgatccattgcctagcacgggaaaagcacagcgctataatcaatgatgtgtaaagcgtaaagtcttagaacccatttgcttgataggaaatacactcctaggttcgtttctttaaagcctgtacattcaagggaaagatcttaaactacactaccactaacgcattcataattgcattaaatcaaggggatctgttaaacagaatgattgtttggaagcatggtcttctcatttgatttacttatttccaaaatttgtaaaaggacctccaaccctcaataacattacaaagaaattctgaggaaaattaaaacacttggcagcaattcatagagttctcggagggacagaaaaggctgagcctagactcgtgctggaggccctcttctggggagttgtgagagatgcatatgatgtactcactggtctttgtgagccacgtaaatattattccctcatgttctgagggtagggtccccccttt

SEQ ID NO: 61626 - DNA, 443 bp, Homo sapiens
agggtatgagttttgtacttctttcataagtttattcctaatcatgttattatttttgatagtattgtaaatgaaattatcttaatttcatatttggattgttcattccaagtatatagaaatacaactgatttttgtatattgatcttgtactctgcaacctgctgaacttatttgttccaatagtattttaatgaattccttaggattttctacatagaaaatcgtatcatctgtacatagagatagttttccttcttccttcctaatttagataactattattattgtcatcgagatcttgcttaattgccctgactagaacctctggtacaatgttgaatagaagtagcaagaatggataccttgtcttgttcctggtcttaggggaaaagcatctagtctttcaccattaataatgttgtcagctttggttttctata

SEQ ID NO: 61627 - DNA, 2756 bp, Homo sapiens
ttcatattaaaaaaatagctggtaaatctttctaggtagtaacttatccaaacaatactttgagtatcatattttgtgaatgacttgcttaaactgggaaactgaatattctttttaaatcatataattcctgtattaaatgtgaaacacacagtctccaaagtcacctgattctctgtggaaaatgaaaggcattgaaggaaaccagatacattaatacttagttttggttgaaagtgcaacattactgtacttagaaggggcttggtttatttttagatatttaagctatcattaattttagaccaatggctaataataagagagatttttggttgctcatttatggagagacaaagaacagcatggcataaacaaacatcccagaaataaatgaaaagttttaagtgataaaattgtgttttctatgaaccagtgttgtacatgaaccaacattgtgtttcttagctctgacctgtacagtgaggtacctgtcaggacccctagtcttggcactggaaatgacaaagttctcctattactaaattctcatgccttcccttttctgacttaagtagattgaaattggtaggtaccaaatgatttatgtttgataaacttaagttctgctgatatcctgttactggtaattctggtaccaaaatttcaaacggtttgattattagtagcattttgagtacctaggtgcatataatacagttagcagacccttacagagtcaaaagagattttggaatctggtgatactgttgtttattacactagcctattacattttctttctttataataactgtttatgtgagtttcattgaaaatcgtggctctattgctttattcatggtttccacaactctttttgtaacaccttaattttctctcttaggtattttcctgttaaataagatatcaaaagcatcaatcacaagacagagaaaacgtattaggaaaaacttgtattagtatattctaaactgaaatggaaaaactcattattcatattttaataaataaaactcccaaatgatcttgctaaattatcccactatttagaagtagaaaataagagaagagtgctttcaaggaaatttgtcatattctcccttctatctagaagttgacaatgaattgcaataaaactaagaaataactgaatgctgaaaaataccatgaattaatgttatggcttctttatttttgtatatccattcccacaaaattgaatttaagattattaatgaaaattctatattaagtaataatgcttgtattagtaatgggcaaagaagtctttctttgttacattaaccgttagtaaaagatgtactttgacatttctgatgtaaaacctatatgtaaatattgtaatttaaatatgattggacagctgttaagttttggggagggaagcagatgccagcgttctctgctgaaaagacaagatggcgcttgacggaccacagcagatggagctggaggaggaaaaggcaggcagtggactctgccagtattatctgtccaagattgaagaactccagggtcaactgcaatataaattggatgggggaaagccacaaggaacagttctgaactccaggtgcatttgcagctgattttgaatgataagacccaaaacctctggaggcggcaggtgcacgggaatgaactaaatgttaaagtgtgcctattacaggaggagctacagctgctgcaggaataggactcctgtgtcagggaagtagtccaggccatgggtaagaagaaagtgttggtcaaggtgcatctcaaggacaagtttgtcatagatgtggacaaaaatatcagcatcagtgatgtgacacccagttccttggtggttctaagaaatgacagctacactttgcacaagatcctacccaacaaggtggactcattggtgtcactgatgatggtgaagaaagtaccagattcagcttatgaaatgattggtagactggataggcagatcaagaagatcaaagaagtgatcgacctgcctgctaagcatcccgagctcttcaaagcactgggcattgcacagcccaagggaatgctgcttggaagagactgttggcctgggctctggctcatcatagggactgtgtacctttattcatgtctctggctctgaattggtacagaaattcattggggaatttctgtgatggcagagaaaatgctcatctgtcatcttcatggatgaaattgactcttttggctcctcagagctggagggggatgctggagggaacagtgaagtgcagcagatgatgcttcgagggtggctttgaggccaccaagagtatcacggtttatcacggctgctaatacgattgatatcctggactcggcactgctttgcccagggcacattgacagaaaaattgaattcccaacctgcaatgagtaggcctggctggtcactttgaagattcattctcagaaatgaacctgacccaggggatcaacctgagaaaaattgctgagcttatgccaggagcatcaggctgaagtgaagggcatgtgcacagaaaccggcatgtatgccctgagtagcgagtccatgtcactcagaaggactttgaggtagtccaaagtcctatctcatgccaaaggacagtgaggaaaaacatgtccatcaagaaactatggaattgagggcacatcctttgtgtgtatccctacaataaaactcagtgggacaagcaaaaaaaaaa

SEQ ID NO: 61628 - DNA, 2356 bp, Homo sapiens
tttaccggctcgacgatttcgtcccaggcaccgcaccgggcagtctccggatctgccgttctgccccggcccggaaaacccggcgccttccaggcccttcgaaagatggattctgttgacgtatctggcggccctggcgagcctggtggaaagttgggttttgccagattgcgccgggctcctctttgtgacgcgcggccagccccgcatctcccccggagccggatggccatgaaatcacatctcagcacatgcctttgactctggattgcacatgtattcattagctgaagcccaattttaaaatccaatcaactctatgattccttgaaatgactgcaaatcaagtcacatccagtgctcctcaggccaagtggcatcagagctgagtgatggacgacctgcagtcccagaacctctccatggacatgactgactcccctcctgccttggctaataacagactggagaatggcatggctcagctgatcaccaccgaggcctggaacatcaactccactgacctggtaaagaaggccctggtgaccgtgccagccccatccattctgaacccccctgccgagtctcagagtggcatggctctgaaggtggcggccactgtgttgcagcccctgtgcctcggggagagcccagtggtgatgcccattcacatgcaggtggagggaagctccgcaccagagctcaatccgaatggcaatgccacctacgtcatgaccacccagggccccgtgcaactgcccgtggtgctggagcagcacgtctttcagcacctcaactcccctctggtcctgccgcaggaggccccatgctcctccagtaccatccacaacaacctcttccagggagcggaggaccccgaggcccagccccagctcctggacctgaggatccccagccagccgcaggagcccactttgccatttgaagctgtgctccagaatttgtttccctcccagggcactctcgggcccccaccctgtcagcctcctcctggctatgcccctgtgcccccacagccttttagctcccccttgtcccccctggtcccaccagccaccctcttggtgccgtatcctgtaatcgtccccttgcctgtgccagtccctattcccatccccatcccggtgcctcagagttctgaatccaagttcagctccagtttccccaagccaccatcttccttcggcctgcacccctttaaaggcacccagacccctctggaaaaagatgaactgaagccctttgacatcctccagcctaaggagtacttccagctcagccgccacacggtcattaagatgggaagtgagaacgaggccctggatctctccatgaagtcagtgccctggctcaaggctggtgaagtcagtcccccaatcttccaggaagatgcagccctagacctgtcagtggcagcccaccggaaatccgagcctccccctgagacactgtatgacagtggtgcatcagtggacagctcaggtcacacagtgatggagaaacttcccagtggcatggaaatttcttttgcccctgccacgtcccatgaggccccagccatgatggatagtcacatcagcagcagtgatgctgctaccgagatgctcagccagcccaaccaccccagcggcgaagtcaaggctgaaaataacattgagatggtgggcgagtcccaggcggccaaggtcattgtctctgtcgaagatgctgtgcctaccatattctgtggcaagatcaaaggcctctcaggggtgtccaccaaaaacttctccttcaaaagagaagactccgtgcttcagggctatgacatcaacagccaaggggaagagtccatgggaaatgcagagccccttagggaaaccccatcaaaaaccggagcataaaggttaaaggaaagtgaactcccaggaaataccacatgctcccaatcaaaaaacaacggctggccaccttttttccaagaaagtaaataacggctttttaaaatttgtatgattataatatggggaaaggtgcattggttttataaaaaggcatttaaaacaaattatctttgttaattattttggggagtagttgggaaatggaaaggtgaattggctctagaggccctgtatgctagtatcattttcttttttaatttttgacttttcacaaatgagtaaataagagcaacctatttttcaagcagattgcacattttttgcagctttaatggaatattgggtgaattagaggggtaaaaaagctattttcattgccacaaagtgctttgatgatgtaatacctaataaagggtaggatgaatatttcacaataaatgtttgtttgcact

SEQ ID NO: 61629 - DNA, 1928 bp, Homo sapiens
gcggccgcgcggcctcccgggcgggcctacagccatgtcccgggacccggggtcgggcggctgggaggaggccccgcgcgcagctgccgcgctctgcaccctgtaccacgaggccggacagcggctgcgccgcctgcaggaccagctcgctgcccgcgacgccctcatcgctcgcctccgcgcccgcctggccgcgctggagggggacgccgcgccgtccctagtggacgcgctgctggagcaggttgcgcgcttccgggagcagctgcgaaggcaggagggcggcgccgccgaggcccagatgcgccaggaaaattgagaggctgactgagcgactagaagaaaaagagagggagatgcagcagctgctgagccagccccaacacgagcgagagaaggaagtcgtcctgctacggaggagcatggcagaaggggagcgcgcccgggccgccagtgacgtcctgtgccgctccttggccaacgagacccatcagctgcggaggacgctgaccgccaccgcccacatgtgtcagcatctggccaagtgtctggatgaacgacagcatgcacaaaggaatgtgggggagagaagtcctgaccagtcggaacacacagatgggcacacctctgtccagagtgttattgagaagttgcaggaagaaaatcgactgttaaaacagaaggtgactcacgttgaagacctcaatgccaagtggcagcgctacaacgccagcagggacgaatacgtgagggggctccatgcgcagctcagggggctgcagatcccccacgagcccgagctgatgaggaaggagatctcccggctcaacagacagttggaagagaaaataaatgactgtgccgaagtgaagcaggagctggcggcctccaggacggcccgggatgctgcgttggagcgggtgcagatgctggaacagcagattctcgcttacaaggatgacttcatgtcagaaagggccgatcgggaacgggctcaaagtaggattcaagaactggaggaaaaggtcgcctctttgctgcaccaggtgtcctggagacaggattctcgagagccagacgccggccggattcacgctgggagcaaaactgccaagtatttggccgccgacgcattagagcttatggtgcctggtggctggaggcctgggactgggtcccagcagccagaaccccctgcagagggcgggcatcctggcgcggcccagagaggccagggggaccttcagtgccctcactgcctgcagtgcttcagtgacgagcaaggggaagagctcctcaggcatgtggccgagtgctgccagtgaccgagactcacccgtgcccttgcggcctcctggcccggtgcagctgccctcagggacagggtgggtgctctcagatgccatgggttgagctctactgagagccaaggcccctagaatagttgcggggcactctgatcgttcactttggtccctttggctatggaacaggctgggtcacagggaactgccagtgaggctggaggctggaggtggagatggggtcaggaacatctggcagagggaggtcccagtctgtgtctccatcaggcttaagccagagctatctggtgctggtgtgccagcccctcccccagcctgcctagaaaggggtggctgcctgagggagtcacttgtatggtccccagggtgggagccccatcctgttctatggaataaagcgtcgcctctctgcctcgaaccagtcaaatggagtattgcggctgcacgtcacactagggtggccacccccgccattgcgagccacatgtctgcactgagaaactgcatttcagtagcatttgtcatccagccggaagttaaagcacacttactttattcacctatttttataataaacgttcttgctgctgtgaaaaaaaaaaa

SEQ ID NO: 61630 - DNA, 465 bp, Homo sapiens
  misc_feature (1)...(465): n = a,t,c or g
nttgttgacgtccctagtccagngcggtggaattcatccctcccctacagaagcccccagagcgcagcacctcaccatggactgcacctggaggatcctcttcttggtggcagcagctacaggcacccacgcccaggtccagttgttacagtctgggtctgaggtgaagaagcctggggcctcagtgatggtctcctgctacgtttccggatacaccctcactaaattatccatgcactgggtgcgacaggctcctggaaaagggcttgagtaaatgggaccttttgatcttcaagatgttgaaacaatctatccccagaagttccagggcagagtcagcatgaccgaggagacatctacagagacaacccaacctacctggagttgagcagcctgagatctgaggacacggccgtgcatcactgtgcaacagacacagtgtgaaatcccccagcctgagagcgt

SEQ ID NO: 61631 - DNA, 1605 bp, Homo sapiens
aatacaaaagttagccgggcatggtggcacgtgcctttggtcccagctgctcgggaggctgaggcaggagaattgcttgaacccgggaggcggaggttgcagtgagttgagatcgcgctactgcactccagtctgggcgacagagcaagactccctttccaaaaacaagcaaatgaaaaaatagagttttctctatcacacaaatgggaaggtttgtattgaatgttatatttatcctctatccagtcttgtcttggagcacaaagcaaaaaggcccagcatcctccactatcttctgaaaacttgccctcaggcctgagcaagagggctgcccggttgcttccatgtagccagccagcatatgtgcagggccaagtctagagggaggagggggtggcacatggatggtttcgtttaattggaagacagtgggtagattggagctggcatttgaagatgttgagagttgtggatcatgggcaagaaaagcgctgttctgggactgcggggcaggagaaggaaactgatgcttctgagggtgagtctgatgagataacatgcctgtgtgtgggcctcaggttagacagtgctgaggtctcccgtcactgggcatccagctgggtgctacggccgtggctcctgccttctgcagccctgtcagggcccaaggccttccccatcagcacttgctccagcctactcactggagttgtgttctgggtgggtgtgtagaatactcgcactcctacttggggcatcagggagctctctagcaatttcttctgcacctagggagagcccactgctaaaaaaggcctagtcaaatcctcaggtgtacatggacatcaagattgggaacaagccggctggctgcatccaaaccctcctgcgttccgacgtcgtgcccatgaccacagagaattttctctacatgtgcacccatttaaaggactcggcttcaagggaagcagcttccaccgcattatcccccagttcatttgccagggcagtgatttcacaaaccacggtggcaccaggggtctgcgcaggcatggcactaagtgtcccatggcacatttggccctcatggaggcctcaaaagggcaggaccagcaccctcttctacggaggaaggaacgggcacagcagggtgagccactgcgcctgatcaaggcatcaccgttgaacctcctaagaggaaaacataaggctgtgcaataccaggaactgggattctaggttgccccagacaccaaggcatcaaaagccaggggatccagagaaaacacagacagccaagagagaaactgcgggaaaaagccaaaaggttgagagccacaccatctagaagcttcctgcctgtggtgcggcacagaaacaaggagagtcagcaattaccagccagccaaggtcctggaagctgacgtagagctcgtgccgacggcagacctgccggccgtgggagccgcggacgtcatctgcagggacagaaggggcaaggtcttttctggggttcctgctgtgtgcagctactatggggtaccagggtgggggatgccctgatgagcacatttgtcaaataaatgaatgacaggaaaaaaaaaa

SEQ ID NO: 61632 - DNA, 1503 bp, Homo sapiens
cctggagggaggcaggaagggtggacacgcctgtgtgggtgatgggcagaggggacctctccttcctgtctccctcgagcccggagcatctctccttcctgtctccaggactacagtattgacgaggaggccgccttccaggctgctctggccctgtctctctctgagaactgaagggaagcgcagccacccgcctgcgtctggggtcagggatgtccccgctcctgtgtcgcacctggcacctgctcgggagcgcacctcaccggactgagctcacaggaggagcctgcacccgcgcagaaggggagccggggccgagcctccgggcctgaatacgggccagccgccgaggccgccagagcagggccgcctggtcccaccggcgtcgctgggttcttcggtgcttctggccgagcaggcggcctacttgggcagggctggacgctgggacctggagctgccgccgtctcttcaaagccatgataccccctcgtgggaagaagggaccgacgcgcgagtcgcgctccgcagtcgagccgggaggaacccaggctgctgccctgcccagcccgaccctgccccggccccgcttccaccttgcgcatttggtactggcttttgtgatacttaggaaccctggcatcttttctatattatccagtgtgataatcttttcacgttttatagagcaaagacagagcagttactcttcatattgcaatatctgtgtttgactaggaataatagtatttttatggaacatttacaaaattatattttttaagaaaacaatcaaaacaagcattgggggattggggcaaggatggaaggagcagtggggcagctgccagagctcaggcgagccatggggtctgctgtggggtctgccctggccacccactgtgtgtctgggtccttgaggtttgtacgtttctctttgatgaccaggaagaaatcccagcaccccagccacaggctgtggctgctcccagcagaggcggggccggcagagaaggggcctcctccacccagagtcctggccttggcccgctgtcaccttcaaagctgactgtgccccgctgcgggaggggacggcaccccagtggtggcagagcttgggggcctgggcaggggcccgcttggcgggccgggcaacacgtcaacattcttttctgttcttggcattaattattgctgtctttttttaaaaaaaaaaagtttaaataaaatgtctcagagcatcaaaaaaaaaaaaagggggggcccttttaaaagaacccttggggggcccaaatttaacgggggttggaaaggtaaaatttttttctttatggggggccatttaaaaccctccttgggatttttggaaaagaaccttttttttggggggggaaaaaattggcccaacccccccccaaaatttaaagccttaagggaaaaaaaaaatttttaaggggaaaagggggaaaaacaaccggaataccctggctgttaaaaaaaatg

SEQ ID NO: 61633 - DNA, 1945 bp, Homo sapiens
ttttttttttttatctgtatgaaatattagttttaataaaacagaaccagtccatgtatggaggcatgggcataaggtcaacttgcactaaatgtaactcgtacgttttttctaaaataatttcttgagcattgtggtggccttatgtactaacccgaagctgaacttcctgggaagctgatccaatggagcacttggaattcaggggtggagtcttcttcctgggtcagagctggttcagggtcacatgctcttgaggtccctaaaggccacatgtgctgcatttcgcccagcagctcccatcacacctcctccaggatgagccccacttccacagagatacaggccctggagagggcagcggtagccagaatgcaggggcacggggcgggcgaagtagagctggtccagggacatggcgcagtggaatatgttccctccaggaagcccgaagattctctccaaatctggtggtgtgaggatgtctctgccaaccacagagtccttgaagccaggggcatagacctcgatgcaatcaaacactgtgggaaggcaggccatccatggcatcttcaaaggcctgatgaaggaggagggtgtcttcacagttcaggtggatggagcattggtgatggggcagcggctggcccctgggagcattgggggccgccaggaagctgggcagcctgtctacggccacttctgaccaggctgcagggggacacaggctggaggtccgggaatggagatgatgactgagttcagctgcccccagcctggaggtttctcactcagatgggtcaaaggagacagtgctgcaatgtggtgtgcctcttaccattgatcttggtgacaggcgaccgggtgtccagctgagagattctctccaggaactcctcaggaagccactcctgtggcgtcagcttcaggaaggtgatctgcggtgatgtgttggacagcaccattttgcttctcacctctgtgccatcttccagcacaactccttgaacacagccttcactgttcacctgcaccttcgccactgtcttttcagtgaagatgcttgctccatgtgtggtggctgagcttgcgatcgcatcagagagggcacccatgcccccctggacgtagccccaggccccctgcattccctccaggccccccatcacatggtgcagcagcacatacctgtggacagaccatccgactcagatcctggaggtgggatctcatctccccagagttccaggtgcaactattcctttccatcttgatcttcagcccttccctgccaccatccagccctctcccagcagccttcaatgagctcaagttcttgtaagagccctttgccttctctacaccctctccctaacaagtgtgtctatgtgcatagcttattaccacaaagaaggcaacgatgcccaaacctgcagctccagccctctcctgagctccagctccggtgtccagctacccacagatatctccctttggaccctttcttggcagcatcttaaacccaccaccttttccccattctccagctgcttccccttcaatctttcccatcccagtgaacggcacctttcaacaggaggttctgtttccgacagaaatccaggtgtcagccttgaccgctaccatccttccccatctacatccacaaagcaacaccaactcagcctccaaagggctttcaaggtcatcccacctctcagcctctcttctcttccttatgctgctgcagtagtgcccctcattggaccccctctcccacactttctctcctgcaggtcttgtccacatatatcctggagccctatcttaaagcccagctctgctcctgccactcacttatcaccattccaagcctccccggcttggcactgctcttaggataatggccagtcttctagcaggcactccagcctcatccctcatc

SEQ ID NO: 61634 - DNA, 1002 bp, Homo sapiens
ttttcaaccttaaaaaattttaatggaattttcttcttttttttttttctttaaataacaatttgacaaaagggtgaaaaaatcctaaacaaggtattgaggccagtgtccaggctgcattcagttcacaaaactgtcctcaggacgttgcatggaactggaaatgtgtataattacagaagaaaacagggaggacttagtgcagagaggagacgagtgtggacgggcaacagcatccttagtctttcatatttatatatggtatatgtattttctatatatatatttatatattttacatccaggtatcccagtcatctgtaccatttcccagggagacatgggtgcttccaaggcgagacaggaaagggttaggcagggaaggggcagcgacggtgcaggctggggcttggctcacagaagctgcaggagcttcagcgactgtaagagggccccgggctccgcagacgccaggtactggcagcaaagccagtcctccagctccacgccccgcctgcgatccaccgccttctccgcaaacttcatcatcatcagggcccgcttcatgtcgatccagttgtgcagcgtgccgcacagcgcctcctccgaggtgcccggctgctgcaccagctcgcgccgaggcccccacagcaggcactgcagcacgcgcttggcctcgccgatgcggatacgcttgatggggtcggcctccagtagcagatgtgccagctgctgcaggccgggtgagtagagggacagcgcgggcagcggcggcaggtcctcctgccggtagtctctctcccgcagctgggcgcgcacctcgaacgggttgggttggtgcagcagctcgtagatgaggatgcctgtctggaactcatcgaacttgcggtactgggaagcagacacgatatcgggggccagccgggcctggctcttcttctgctgcaggtttggggtgctgcccggcttctgcttggccttcaaaaagttgctgatgatgag

SEQ ID NO: 61635 - DNA, 3266 bp, Homo sapiens
  misc_feature (1)...(3266): n = a,t,c or g
ggaccgcgctcaacggcctcttctggttgctgtcttcctcgtccctccggcccttcttcctactcagcgtctcacttttggcctattttctgctggatctctggcagcctcgctttctccctgacgtttcagcatcatccccagaggagccacactctgacagtgagggtgcggggtcaggcgcccggccgcacctgctgagtgtgcccgagttgtgcagatacctggctgagagctggctcaccttccagattcacctgcaggagctgctgcagtacaagaggcagaatccagctcagttctgcgttcgagtctgctctggctgtgctgtgttggctgtgttgggacactatgttccagggattatgatttcctacattgtcttggtgagtatcctgctgtggcccctggtggtttatcatgagctgatccagaggatgtacactcgcctggagcccctgctcatgcatctggactacagcatgaaggcagaagccaatgccctgcatcacaaacacgacaagaggaagcgtcaggggaagaatgcacccccaggaggtgatgagccactggcagagacagagagtgaaagcgaggcagagctggctggcttctccccagtggtggatgtgaagaaaacagcattggccttggccattacagactcagagctgtcagatgaggaggcttctatcttggagagtggtggcttctccgtatcccgggccacaactccgcagctgactgatgtctccgaggatttggaccagcagagcctgccaagtgaaccagaggagaccctaagccgggacctaggggagggagaggagggagagctggcccctcccgaagacctactaggccgtcctcaagctctgtcaaggcaagccctggactcggaggaagaggaagaggatgtggcagctaaggaaaccttgttgcggctctcatcccccctccactttgtgaacacgcacttcaatggggcagggtccccccaagatggagtgaaatgctcccctggaggaccagtggagacactgagccccgagacagtgagtggtggcctcactgctctgcccggcaccctgtcacctccactttgccttgttggaagtgacccagccccctccccttccattctcccacctgttccccaggactcaccccagcccctgcctgcccctgaggaagaagaggcactcaccactgaggactttgagttgctggatcagggggagctggagcagctgaatgcagagctgggcttggagccagagacaccgccaaaaccccctgatgctccacccctggggcccgacatccattctctggtacagtcagaccaagaagctcaggccgtggcagagccatgagccagccgttgaggaaggagctgcaggcacagtagggcttcctggctaggagtgttgctgtttcctcctttgcctaccactctggggtggggcagtgtgtggggaagctggctgtcggatggtagctattccaccctctgcctgcctgcctgcctgctgtcctgggcatggtgcagtacctgtgcctaggattggttttaaatttgtaaataattttccatttgggttagtggatgtgaacagggctagggaagtccttcccacagcctgcgcttgcctccctgcctcatctctattctcattccactatgccccaagccctggtggtctggccctttctttttcctcctatcctcagggacctgtgctgctctgccctcatgtcccacttggttgtttagttgaggcactttataatttttctcttgtcttgtgttcctttctgctttatttccctgctgtgtcctgtccttagcagctcaaccccatcctttgccagctcctcctatcccgtgggcactggccaagctttagggaggctcctggtctgggaagtaaagagtaaacctggggcagtgggtcaggccagtagttacactcttaggtcactgtagtctgtgtaaccttcactgcatccttgccccattcagcccggcctttcatgatgcaggagagcagggatcccgcagtacatggcgccagcactggagttggtgagcatgtgctctctcttgagattaggagcttccttactgctcctctgggtgatccaagtgtagtgggaccccctactagggtcaggaagtggacactaacatctgtgcaggtgttgacttgaaaaataaagtgttgattggctagaactgctgcctccctgactgtgagctgccttccacaccctgcactgcactgtgttctctcctcacccttaacctgcttcactccagtctgttctggctgtttattaccttgttgcaaaacagggccgaagcaaggattaccttgacaaccctagcttctccttagccatcttccttgacagtgtgatctgtttagtgagatttagcatgtgtgaataaagtatatgcaggaggaaattgctttgtcttcccaatcggtagaaattcgggaccataaaaattgtgttttaccatgtggcctacaaccttaacactgctttcttaagaagtcttcacccatctacatgctaacaactcactcagcctggatttatctttactggggaagccaaacaagcaatagaggacctttacctgtgttagaaatgagttggagccaaggaacactgaagaaatagtatcttaacagttactgagtccattgtatgtgcttggctctgctctgagtgatttatatgtattaagatttttcctcacaggtcagatatatactgttactaatttcattttatagacaggttaagcttcctgaaggccacaggtcccagtaaattgtggagccagaacccaaacccaagaagttttggcttcagcaaatgcatcagacagcccctgtccattaatagggcacaggtaggaagatgcacaaggatgtgggaactatagagaaccaatctgatgccttggcttaacaaagagtggacatggcaagccttcctcttcggggaanaaaagcccagaactgagcagatggcctcctttatgagttcatgtcctccgccttcagctggaggtaccatatggcgatgctacctgtctttctgctggaggtaccatatggtaatgctgcctgtctgtctgctggaggtaccatatggtaatgctgcctgtctttctgaggttgacttttatgccatgtctttcctaagtgtgtaagaatttttctgtttgcttcacatttgactgagaa

SEQ ID NO: 61636 - DNA, 5010 bp, Homo sapiens
gtagatttggttgctgtgtacgtggaagaagcaagcgcatgcgcacatgggcccccttcgtctcagctgtgcgggaacggccgagggtaacatcccgggctcgcgggaggctgtcagggtaatggccacacgctgacagaaccagccgagtggaaaaggggagcgaagccgttcctctgcacccttccccaggcctgaggccttcccgcttggtgctgccgccgccactgccggctgaggaggggcgatgagttggttcaacgcctcccagctctccagcttcgctaagcaggccctgtcccaggcccagaagtctattgacagggttctggacatccaggaagaggagccgagcatctgggccgagaccattccgtatggagagccgggaataagttcccctgtcagtggaggatgggatacttcaacctgggggttgaaatcaaacactgaacctcagagtccaccaatagcctctcctaaagcaatcacaaagccagttcggaggactgtggtcgatgaatctgaaaatttcttcagtgcctttctctcgccaactgatgtccagaccattcagaagagtccagtggtatcaaaacctccagcaaaatcacaacgaccagaagaagaagtgaaaagcagcttacatgaatccttgcacattggccagtcaagaactcctgaaacaactgaatcacaagtaaaagactcttctttgtgtgtttcaggggaaactctggcagcaggtacttcatcacctaaaactgaaggcaagcacgaagaaactgttaataaagaatcggatatgaaggtgccaactgtaagtttgaaagtatctgaaagtgtaattgatgtgaaaacaactatggaaagtatatctaatacgtctacgcagtctctcacagcagaaacaaaggacatagctttggaacctaaggaacaaaaacatgaagacaggcagagcaatacaccttctcctcctgttagtaccttttcatcaggtacttctaccaccagtgatattgaagttttagatcatgaaagtgtaataagtgagagctcagcgagctcgagacaagagactacagattcaaaatcaagtcttcacttgatgcagacatcttttcagcttctctctgcatctgcttgtcctgaatataatcgtttagatgatttccaaaaactcactgagagttgctgttcatctgatgcttttgaaagaatagactcatttagtgtacagtcattagatagccggagtgtaagtgaaatcaattcagatgatgaattgtcaggcaagggatatgctttagtgcctattatagttaattcttcaactccaaagtctaaaacagttgaatctgctgaaggaaaatctgaagaagtaaatgaaacattagttatacccactgaggaagcagaaatggaagaaagtggacgaagtgcaactcctgttaactgtgaacagcctgatatcttggtttcttctacaccaataaatgaaggacagactgtgttagacaaggtggctgagcagtgtgaacctgctgaaagtcagccagaagcactttctgagaaggaagatgtttgcaagacagttgaatttctgaatgaaaagctggaaaaaagggaggctcagttattatctcttagtaaggaaaaagcacttctagaagaagcttttgataacctgaaagatgaaatgttcagagtgaaagaagaaagcagtagcatttcttccttgaaagatgagtttactcaaagaattgcagaagcagaaaagaaagttcaactagcctgcaaagagagagatgctgctaaaaaggaaatcaaaaacataaaagaagaacttgccactagattaaatagtagtgaaactgcagaccttttgaaagagaaagatgagcagatccgagggttaatggaagaaggagaaaaactttcaaaacagcagctgcacaattctaacatcatcaagaaattaagagctaaagacaaggagaatgaaaatatggttgcaaagctgaacaaaaaagttaaagagctagaagaggagttgcagcatttgaaacaggtccttgatggcaaagaagaggttgagaaacaacatagagaaaatattaaaaaactaaattccatggtagaacgccaagagaaagatcttggccgtcttcaggtagacatggatgaacttgaagaaaagaaccgaagtattcaggctgccctggatagtgcatacaaagaacttactgatcttcacaaagccaatgctgcaaaggatagtgaggcacaggaagctgctctgagccgtgaaatgaaagctaaagaagaactttctgcagcattagagaaggcccaagaagaagcccgtcagcagcaagaaacattagccattcaagtgggggaccttaggcttgcattgcagcgtacagaacaagcggctgccagaaaggaggattatttacgccatgagatcggtgaacttcagcagagactccaggaagcagagaatcgaaaccaggaactgagtcaaagtgtttcatcaacaacaagaccattgcttcgacaaatagaaaatttgcaagcaaccctgggatcccagacatcgtcgtgggagaaattagagaagaatctttctgataggcttggtgaatcccagaccttgctggcagcagcagttgagagagaacgtgcagctacagaagaactccttgctaacaaaattcagatgtcttccatggagtcacagaattctcttttaagacaggaaaacagtagatttcaagcccagctagaatcagagaaaaataggctgtgtaaactggaggatgagaacaataggtaccaggttgaattggaaaacctaaaagatgaatatgtaagaacacttgaagagacgaggaaagaaaagacattgttgaatagtcagttagaaatggaaagaatgaaagttgaacaagaaaggaagaaagccatttttactcaagaaacaataaaagaaaaggaacgcaagccattttctgtttctagcactcccaccatgtcacgctcaagttcaataagtggtgttgatatggcaggactacagacatcttttctgtctcaggatgagtctcatgatcactcatttggaccaatgcctatatcagcaaatggaagcaatctttatgatgctgtaaggatgggagcaggatcaagcataattgaaaacctacagtctcagctaaagctaagggaaggggaaatcactcatttacagctagaaattggcaatctagaaaaaactcgatcaataatggctgaagaactagttaaattaacaaatcaaaatgatgaacttgaagagaaggtgaaggagatacccaaacttagaactcagctaagagatttggatcaaaggtacaacactattctgcagatgtatggagaaaaagcagaagaggcagaagaacttcgattagatctcgaagatgtaaaaaatatgtacaaaactcaaatagatgaacttttaagacaaagtctcagttaacttgtgaaaattgaattcccatcaaactgaatgtaagcatttaatatctaaacatttaatgcggacttccaataaattcttttatataattatatagtgggatttactgtagagtgtaaaaatttttttaaaattgatttacactatgtagtaatatttacagttaaattattttgtgcaatatttgaactttatttttgaaactattctttaaagatttattttttaaagcattcattttttttccttgaatagcacagagatttattactttatcctcatataaatatggctagagaagaagaatggtgttcatatatgtattgtagatatacaactagttgtatctataatttgtaagtgtttatatatatattaagaacatttgaagagtaatgttaacatactgaaactttgaaatctttcacatttaaaatttcaacatatcttaattactgctcatgaaaatgtacattaagtgttaaagtaaaaaattattaaatctgtggctattaaattttaaactaatttttttcctttaaaagtaagagtcacactgacactgtctgaaatttaaagagtgaatgatttaaacttaaaaaaaattttgatctgaaaatttatttcacccagctttcacaattaagtctgtataaaatgtggtaccttttggtacctatccagagaaacctgtacatattcaatgttatctagatgtgattggataatggagaaaatttatttataatgattttgcaatggcatcaataacatttaaatgattttgaagaagtattattttactaccctataaaatgaatcgaaaataataaagttcttaacataatttactctttaaaaattacctgttcatattttgtaaacccatatttttagcacattaaaaatgaatgtttgatattacagaatattcataacaaaatggaagaattataggaattaacttgaatttggcatttttaattttgtgatttatcattttattttttcttgaaatttcaaacacaaggaaagcatagaatagcttttaaaagtagctatgccttcttccaaatgttattttattcaaaaaggtaaccaggttgtgttttaaacctgtgaaatattgtgatgcattttattactgaaagttatttaactgcctttacttgcacataaaaactctcatttacggccaggtgctgtggctcatgcctgtaatcccagcgctttgggaggccaaggcgggcatatcacctgatgtcaggagttcaagaccagcatggccagcagtttggtgaaaccccatctctactaaaaatacaaaaattagcctggcgtggtggtgtgcgcctgtaatcctagctactcgggaggctgaggcaggagcattgcttgaacctgggaggtggaggttacaatggagcccaagattgtgcccactgcactccagcatgggtgacagagaaagactccgtctc

SEQ ID NO: 61637 - DNA, 2481 bp, Homo sapiens
cggtcgacgatttcgtccaggaggcacgctggttttccggggccgctccatcgcgccttcctcctgcgcctcgcttctccggtccagccgccatcttcctttccgcacaggggccgccgagcggggccatgcagccaacgctgcttctcagcctcctgggagccgtggggctggcggctgtcaattccatgccagtggataacaggaaccacaatgaaggaatggtgactcgctgcatcattgaggtcctctcaaatgccttgtcgaagtccagcgctccacccatcacccctgagtgccgccaagtcctgaagacgagtagaaaagacgtcaaagacaaagagacaactgaaaatgaaaacacaaagtttgaagtaagattgttaagagacccagctgatgcctcggaagcccacgagtcctccagcaggggagaggcaggagccccaggggaggaggacatccaaggcccaacaaaggcagacacagagaaatgggcagagggaggcgggcacagccgagagcgagcggatgagccccagtggagcctctatccctccgacagccaagtctctgaagaagtgaagacacgccattctgagaagagccagagagaggatgaggaggaggaggagggagagaactatcaaaaaggggagcgaggggaagatagcagtgaagagaaacaccttgaagagccaggagagacacaaaacgcttttctcaatgaaagaaagcaggcttcagctataaaaaaagaggagttagtggccagatcggaaacacatgctgccgggcattctcaggagaagacacatagccgagagaagagtagccaggagagtggagaggaggcagggagccaggagaatcacccccaggagtctaaaggccaaccccgaagccaggaagaatctgaggaaggtgaggaagatgccacctctgaggtggacaaacgacgcacgaggcccagacaccaccacgggaggagcaggcccgacaggtcctctcaaggagggagtcttccctctgaggaaaagggacacccccaggaggaatctgaggagtcaaacgtcagcatggccagtttaggggaaaagagggaccaccattcaacccactacagggcttcagaggaagaacctgaatatggagaagaaataaagggttatccaggcgtccaggcccctgaggacctggagtgggagcgctataggggcagaggaagtgaagaatacagggctccaagacctcagagtgaggagagttgggatgaggaggacaagagaaactaccccagcttagagcttgataagatggcacatggatatggtgaagaaagtgaggaagagaggggccttgagccgggaaagggacgccatcacagaggcaggggaggggagccacgtgcctatttcatgtctgacaccagagaagagaaaaggttcttgggtgaaggacaccaccgtgtccaagaaaaccagatggacaaggcaaggaggcatccacaaggtgcgtggaaagagctggacagaaattatctcaactacggtgaggaaggagccccagggaagtggcagcagcagggagacctgcaggacactaaagaaaacagggaggaagctaggtttcaagataaacaatatagctcccatcacacagctgaaaagaggaagagattaggggaactgttcaacccatactacgaccctctccagtggaagagcagccattttgaaagaagagacaacatgaatgacaattttctcgagggtgaggaggaaaatgagctgaccttgaacgagaagaatttcttcccagaatacaactatgactggtgggagaaaaagcccttctctgaggatgtgaactgggggtatgagaagagaaacctcgccaggggtcccaaggctggactgaaaaaggcaatatgacagggtgcccccacttgaaccagctccttcactacagaaagaagtcagcttgagtttccagacttctatgattctgaggagccggtgagcacccaccaggaggcagaaaatgaaaaggacagggctgaccagacagtcctgacagaggacgagaaaaaagaactcgaaaacttggctgcaatggatttggaactacagaagatagctgagaaattcagccaaaggggctgactgtcattggagcggtgggcactgttaagaagcagccatcacatgatctgtttttcaccacttcactgaaagacaccatttatctacccaagggcagaaagtagaacttactattcattaaatgtttgacacaattggaattgtctttaatttctgtcagaatgctattgaaaatgtgaattgcatgacttgtagcatattcttttctgcaaaatagacatattaacatgcttatgacaaatgacttgtgctacttgtcttttgggaaaatgtttgtctcagttggaaataataaaagattcacctgagaccaaaa

SEQ ID NO: 61638 - DNA, 2793 bp, Homo sapiens
  misc_feature (1)...(2793): n = a,t,c or g
ttttttttttttgtcatactaaatatttattttctgcagactgacttcggagtaattcttgagccaggaggggagaggttagtgttcaaattgctgagatcttaggtcaaaaagctacagaaaagaaatcactttgaaaaacacaatgactcagaggcagtcaccccttgccagcaattccaagagctgaggaggcttcatgcctcaggacatggtgactagttgagtgaaccagagattgaggcagtggtttttacaggggaagaaacaagccttgggtgtatgggagcaggaaaggagggtgacagactggagaaatgataaaggccattttggaagcccacagggaagtggtcttgggaaacctgaagacactgggatattcagaaggccaaggggatccagcttatcctgttgggcaaggtgctgggagtgaaggcaggtaagccatgtcaagggcctgggaagcaaggggaaaactggaaggggtaccccaggtgaagaagggtatggaatggggtgcagaagtccatggagatgaccggcagatctcagggcggtttctggcacatcagaagttgggcttatgcttcttgagctccaccataaggtggtgaatgttgatgagctcagcccgggcagggagggctcggagctgcggctgggacaggcacccggtggaagcgatgatagaggctggatcagctgggtcagcgctccctgaatgatactggtgccatttctgaagttggtgaaactccgcattacatcctgactcagagattccactgatgatttccaggaactaccaaagccacggatcagctgagttacccgggcttcttcccctcgaagtcgctcagcctgtccacgctcaatcaaagcctcagcctccttcacaaatgccactaaacccccaaaagggggagacagcaactcttcaatgaattcctgtgtccgagcattgagcagctgctggaagctctcaacctctttgctgtcatctgcagcccgctcctattaccatcagcacacccagcatcatgtcatagttgttgatcagaaacacaagctgctccttccttgaggagaactcagctgccactcggaggacaaaattctccacctccacctgcagctgtcccagcaattgcatggtccgttcattaggaattgtctggttgatactgacaagagcggaggagaactctgcatagcggcgtgtgatatagtggggccgagtatccaacccccctaggcgctgggggtcagtgcttcggacgctctgaacattcatctccaggatcagttcaaaccgtggccatagcaaggcaagcacctgttcccagtacctgtccagggcaggaacatccctctttgctgcaatgttacggaaccggagaacaatgtggatacagagaaaaacagcaatggcatcgtagcagtcagctagataagaatccaggtgtttcagggtcatgctgagtgtacggcccatgacagcatggaacaggtcgtgtgcagctgggccagacacaacaaaaaattcacagatgaaaaggtattcgcggcaggaattgtctaggagggcgtagtgctggctgcggaagagggcctcaaatggatacctctgctctccgcgctgcgctgtgtgaggcaccaggatgggggcctcaagttcagtgggggagatgacagagccgcgggttcctagggtgaaaatggtgttcctgctgcggagcgatggctttgagaagaatcctttctttgctgtatcttccacacccattagatcatctttctcagcgacttcctcatactgcaccttcatgagccgccccaggtaagagcggtagtaagacaggtaaatcttgctcagcgtctccacatattcatccctgatctcctttgctgttgctcgttcattgcccagcagaaactgatagaagaacctgtacttcagcagggccgtctgggggatctgatagttggtcatgggtttcctgaaggaataaatcttctggaggataaactctcggatcttcgtcactgccttgacccggagccgatcgagcacgcctctgacatctgcgcaggctgctgtgcctctagcttcctgctctctgactgcggctgccttggcatccagctcctgtagctgctccaagaacctgggctctgtcactggagcctccagaattgccgtgaccagagcagaaggcaccaccagaccatcaacaagctccccaagtttcccccgaactgcctggcgatttcgaagtcgaatgttcatggctcctgactgttcctgcagtgtccggatctcagagctgatggagctgaggtcactctgaaaagctcccaacatctgctccattcgctccaggacagcatcacaggctgtgatctggttgtgtagagatgctatattctcactctcttgaatataatcccgaatggatttctgttcaatctgctgtagctccagctcaacttgctttgaatagtgacggagatctacacccatccacttcatccaggatgaattcatcagaagtgatatccaactccccaagttgcagtggttcctggagcccaggaccacccgcttccggcaactgtcagtcccggcgagtccgttccccggagtggagctacaagtcccaaagggtcttcctcagcgcgaaatcgttcccagatatttgagataagttgtttgactccagctgtcccctttcagctctaaccactacgaaatcgtcgacccggaaattnnnngcggtcacagatggg

SEQ ID NO: 61639 - DNA, 1711 bp, Homo sapiens
ggaattcccgggtcgacgatttcgtgcggtcatggaggcgggcgccggagccggcgcgggagccgcgggctggagctgcccgggcccaggacccacagtgaccactctaggctcctatgaggcttccgagggctgtgagaggaagaagggccaacgctgggggtccctggaacgacgggggatgcaagctatggagggggaggtgttactcccagctctctatgaggaggaagaggaagaggaagaggaggaagaagaggtggaagaagaagaagaacaagtgcagaaaggtggcagtgttggctctctgtcagtcaacaagcaccggggactgagcctcacggagacagagctggaggagctgcgggctcaggtgctgcagctggtggcagaactggaggagacccgggaactggcagggcagcatgaggatgactccttggagctacaggggctcctggaggatgaacggctagccagcgcccagcaggcagaggtgttcaccaagcagatccagcagctccaaggtgagctgcgttctctacgggaggagatttccctgttagagcatgagaaagaaagcgaacttaaggaaatagaacaggaattgcatttggcccaggctgagatccagagtctgcggcaagcagcagaggattccgcaactgaacatgagagtgacatagcatccctgcaggaggatctctgccggatgcagaatgaacttgaagacatggaacgcattcggggagattatgagatggagatcgcctccctccgtgcagaaatggaaatgaagagctctgaaccatccggtagtttaggtctctcagattactctgggttacaagaagaactgcaggagctgcgggaacgctaccatttcctgaatgaggaataccgggccctgcaggagagcaacagcagcctcacggggcagcttgcagatctggagagtgagaggacacagagagcaacagagagatggctgcagtcccaaacactgagtatgacgtcagcagagtctcagacttcagaaatggatttcttagagcctgatcctgaaatgcagttgttacggcagcagctacgggatgctgaagagcagatgcatggcatgaagaacaagtgtcaggaattgtgttgtgagttggaagagctacagcatcatcgccaggtcagtgaggaggagcagaggcggctgcagagggagctcaagtgtgctcagaatgaggtgcttcggtttcagacctcccacagtgtcacccagtcatcccctacccccaatccccccatcttctccttgcctcttgtaggccctggtggtcatctcggctttgctctggtgctggtgggctgagacgtcgtcctaatgcagaacatgtttgggttgtggaagcctatggtattcttggctattgcagctgtggctctgtatgtgttacccaacatgcgacagcaggagtcagagttctgcctcatggagtgatggcagaccttggccagcgcgagggcagatccccagtggccaccaccctcagctttgggcaggacacactgtgccagaaccctccccatatgttccatgtgtccccatctcctcagccctcagtcacccaggctgaaaaggcttgtggggagcggctgacttccatctcctgccttgtgtaagaacctgagttcccttgtaattaaatatcaactgaattac

SEQ ID NO: 61640 - DNA, 925 bp, Homo sapiens
tttcgtgggtactggggcgtgcgtgaggcgtttactgatgcttcctggtccggtggcctcggtcccggtaagccaggcatgaagatcacaaggcagaaacatgccaagaagcatcttggcttcttccgcaacaacttcggagtccgcgagccgtaccagatcctgctggacggcaccttctgtcaggcggcgctgcggggccgcatccagctgcgggagcagctgccccgctacctcatgggggagacgcagctgtgcaccacaagatgtgtgttaaaagagctagaaacattgggaaaggacttatatggggcaaaactgattgcacaaaaatgccaagttcgaaattgtcctcatttcaagaatgcagtgagtggatcagaatgtctgctttccatggttgaagagggaaatcctcatcattattttgtggcaacacaggatcagaatttgtctgtgaaagtaaaaaagaagcctggagttcctctcatgtttattattcagaacactatggttttggacaaaccttctcccaaaacaattgcctttgtaaaagcagtggagtcaggtcagcttgtctcagtgcatgagaaagaaagtatcaaacatctcaaagaggaacagggtttagtgaaaaacactgaacagaggtagaagaaaaaagcgcaagaaaataagtggtcccaatcctcttagttgtttgaagaaaaagaaaaaggcaccggacacacaatcatctgcttctgaaaagaaaagaaaaagaaaaagaattcggaacagatctaacccaaaagtactttctgagaagcagaatgcagaaggagaatgaatcctttggatactttcaaggacattcaaatgtgaaaatgaattttttacaactagaagtatttataataaaagaccaaacttatttttgtaaatg

SEQ ID NO: 61641 - DNA, 2129 bp, Homo sapiens
ttttttttttttagaaaaacatttattgtaatcgatcacattcaagtcgtagttctgaaagcaaagtgaaaacacacagtacagctatgcctcagtatccatgggggatgggttccaggactgcaacctcaaccctcagacaccgacatctgaggatgctcaagtccctgatgggcaatggcatagcgtttgcacgtaacctacgcacaccttcctgtataatttaaatcatctctagatttcttataataccaaatacaatataaatgctatgtaaatatgctacaccatattgtttagggaataatggcaagaaaaaaaggtctgtacgtgttcagtaccaatgcaatttcttttttcaaatatttcctatccaaggctggttggatttaaatgtggagaccacagttacggagagctgactgtactggggaaatctttagggtagaaacattttttagagatggtttatatcaccccccttcagaaagagcaatacaggcatacctcattttactatgctttgtgaatactgttttttttttttaaattgaaggtttgtagcagcctggcatcaggcaagtctatttggcaccattttccaacagcatgtgctcactttgcgtttctgtgtcagcattttgaacagtaaatatttttaaattaaggtttgtatatttgttagacataatgctattgcacatttagtggactgcaatatgcagtaaacatgacttagatgcactgggaaactaaaacaatgcgcttccttgctttattgtgatgttggctttaccgaggtggtctggaactgaacccacaatatctccgagatatacctgtactttttactaaaaatatttcatttgagaagtaaacctcaagaactaccaggacttttcagatgggaagagcgaggccctggcagggcgagtctaggtgtgcagcctagtgggggccggggtcaagtccactcggtatttgtggcttcactcagcaggccgcccgtcccctccgtggggccattcgacagtccctgggtaggggacggttgcactaggaggtaaacatgattccagcatgggctgctccaaggccctgagaccccaggacctgcaggggggtgggatccagtcctgcagcaggtgctctgaagaggagtcatctcccaagatgagaaggccccggggggaggatgaagtgtggtcagaccgtcggctgagcgtgatcacttccccagacccatgcgggtgagaggactcagcagacgcctccgaagcctgcggcaggcaggcctttactcttcactggggggccagtcagagggctgtcatggcaggccagtgcacatgccaccaacacatgctgcttcatcagtaatttctggaacatgacactgcacagcggtggcctctccagcgggacattactagtaatacactgatgatgtggagattccccagggggcatccgctgggcttctcccaactcccaagccacctcttcagaatcacagagtcatttaaaggggccccccacctccccggaggtgcggcctagtcatcatactggatctcggcccgcagctccttggtgacgtagttcaccagcatggccagcagctgctgctgcagggcctcgctgcccatgaccagcgcagtcagctgcacggcgtccgtccactccaggtgcctgatgatggctgcggcttcgttaaagagcctctgttgctcggcagggggcagctccattaggatctgaggaaccggcttaaactgtccacttgtcatccaggcacctaacagccccccgacagcccccccaacggcgagtcccggtgggccgcccaccaaacccccgacgaaggccatggcccctgtgaccagggcacccttcccagagtgcttgacagccgccttcatcttcctctccccagaaagggagcacagcagcttcatgatgtcctccaccatgatagtcatcgtggcgggcttgtgtgacttcagcctctccatgcctcagtttctccatagggacaatgactacactaacagtgtccaccccggcaccggcagggcgggctcccggcagggcggggaccctctccccaaggcactcccgggacgaaa

SEQ ID NO: 61642 - DNA, 901 bp, Homo sapiens
ggatgtcctgctagcgctgcgatggcggaggccgagttgcgtattgacgagctggtccgggagtacctgctcttccgcgggttcacgcacacactgcggcagctggacgccgagatcaaggcggacaaggagaaggggttccgggtggataagattgtggaccagctgcagcagttaatgcaggtgtatgacttggctgcccttcgggattattggagctacttggagcgtcggctcttcagccgcttggaggatatatacagacccacaatccacaagctgaaaaccagcctgtttcgattttatcttgtctacacaatccagacaaacagaaatgacaaggctcaggagttctttgcaaagcaggccacggaactccaaaaccaggctgagtggaaggattggtttgtcctgcccttcctgccatccccggacaccaaccccacctttgctacctacttttctcgacagtgggctgacaccttcattgtgtccctgcacaacttcctgagcgtcctgtttcagtgcatgccagtccctgtgatcctgaactttgatgcggagtgtcagaggactaaccaggttcaagaagaaaatgaagttctgcgtcagaagctttttgcattgcaagctgaaatccaccgactgaagaaagaggagcaacagccagaagaggaagaggccttggtccaacacaaattgcctccttatgtctccaacatggaccgcctgggggactcggaacttgccatggtgtgcagccaaaggaatgcctccctctcccagtcacttcgtgtgggcttcctgtcctcgctgctgcctcagagtaagaagagcccctcaaggttgtcgcttgctaaggcccttcttcacctcagagctcgggccagaaagaagcctc

SEQ ID NO: 61643 - DNA, 2463 bp, Homo sapiens
cttccgaggcgatcaggcagcatcagtcctcagccgctaagccaagaagtagtcagtcagagagccttgggccagagttccaggggctctgggagtggctaccaggtgagttgaacagtccgatttccagtggagtctggatttgaaattggtgagatgtttcttgggttggtcggtatgagtacatgaggtcgtaggtggatctttctcacggaccaaagagcaggaggacaggggattgatctccgaagggaggtcccccaatttgagtctcggcaccaaatttcatgcacgtccatgtgaagagaccaccaaacaggctttgtgtgagcaacatggctgtttatttcacctgggtgcaggcaggctgagtctgaaaagagagtcagcgaagggagataagggtagggccgttttataggatttgggtaggtaaaggaaaattacagtcaaagggggttacccgaagctcggcgtccgtgatggtctagggggcttccgaggcgatcgggcagtgtcagtcttcagtcgctaagccgagaagatctgggaaggaattgcaacttttttttttattattgtacaccttgaaggtgaggttaattaagtcctgttgtggggtttgagggaaacaggcccttgaaaagaaggtaatgtggagcgggtagcctccgtattgattaagaaggggacgggcttaccttccactgtgagagttaccggaagctcggcgtccgtgatggtctacggggcttccgaggcgatcgggcagcatcagtcttcagccgctaagccgagaaggagtcagtcagagagccttgggccagagttccagggactctggagtggctgccaggtgagttgaacagtccaatttccagtggggtcccgcacagatgggacacggcttaggaggaatcctgggctgcatgcattccttggcctggtagtcagatttctggcacttgtagcaagctcctgggggagaaggttctggagtaacgcctggccgctgcggttcaggcatttggaagttcttgtgtgctggagatgtggctggggtttgtctcacagtggaggttacctaaccaaactcctgcaaaaccacaccacctatgcctgtgatggggactatttgaatctacagtgccctcggcattctacgataagtgtccaatcggcattttatgggcaagattaccaaatgtgtagttcccagaagcctgcctcccagagggaagacagcttaacctgtgtggcagccaccaccttccagaaggtgctggacgaatgccagaaccagcgggcctgccacctcctggtcaatagccgtgtttttggacctgacctttgtccaggaagcagtaaatacctcctggtctcctttaaatgccaacctacttcagatgaattaaaaaacaaaaccgtgtgtgaagaccaggagctgaaactgcactgccatgaatccaagttcctcaacatctactctgcgacctacggcaggaggacccaggaaagggacatctgctcctccaaggcagagcggctcccccctttcgattgcttgtcttactcagctttgcaagtcctatcccgaaggtgctatgggaagcagagatgcaaaatcatcgtcaacaatcaccattttggaagcccctgtttgccaggcgtgaaaaaatacctcactgtgacctacgcatgtgttcccaagaacatactcacagcgattgatccagccattgctaatctaaaaccttctttgaagcaaaaagatggtgaatatggtataaacttcgacccaagcggatcgaaggttctgaggaaagatggaattcttgttagcaactctctggcagcctttgcttacattagagcccacccagagagagctgccctgctgttcgtgtccagtgtctgcatcggcctggcccatcacactgtgcgccctggtcatcagagagtcctgtgccaaggacttccgcgacttgcagcctggggagggagcagcctggtgccaggaagtgacaaggtcgaggaggacagcgaggatgaagaagaggaggaggaccccctctgagtctgatttcccaggggaactgtcggggttctgtaggacttcatatcctatatacagttccatagaagctgcagagctcgcagaaaggattgagcgcagggagcaaatcattcaggaaatatggatgaacagtggtttggacacctcgctcccaagaaacatgggccagttctactgaaaaccacatgcatcttgatgcgatcgcactttctgaagaaggaaggatcccaaatgcccctccagttctggttcacctgtaccttctatgaaggagaattcgtcatgtcattcaacactcgtgaggccaggaagctattaaagggatgtttcaagctgtttctagcacattccaaaataaatgaggagggaagagtcaaaaaaaaaaa

SEQ ID NO: 61644 - DNA, 1403 bp, Homo sapiens
gtttcgtctcgaacttggtcggggcgcggatcccgagagggaaagtcataacaaccgcacgagggagttcgactggcgaactggaaggccacgcctcctcccgcctgccccctcagccctgtggctgggggcagagctcagactgtcttctgaagattgatgtctatttccttgagctctttaattttgttgccaatttggataaacatggcacaaatccagcagggaggtccagatgaaaaagaaaagactaccgcactgaaagatttattatctaggatagatttggatgaactaatgaaaaaagatgaaccgcctcttgattttcctgataccctggaaggatttgaatatgcttttaatgaaaagggacagttaagacacataaaaactggggaaccatttgtttttaactaccgggaagatttacacagatggaaccagaaaagatacgaggctctaggagagatcatcacgaagtatgtatatgagctcctggaaaaggattgtaatttgaaaaaagtatctattccagtagatgccactgagagtgaaccaaagagttttatctttatgagtgaggatgctttgacaaatccacagaaactgatggttttaattcatggtagtggtgttgtcagggcagggcagtgggctagaagacttattataaatgaagatctggacagtggcacacagataccgtttattaaaagagctgtggctgagggatatggagtaatagtactaaatcccaatgaaaactatattgaagtagaaaagccgaagatacacgtacagtcatcatctgatagttcagatgaaccagcagaaaaacgggaaagaaaagataaagtttctaaagaaacaaagaagcgacgtgatttctatgagaagtatcgtaacccccaaagagaaaaagaaatgatgcaattgtatatcagagaaaatggttctcctgaagaacatgcaatctatgtttgggatcatttcatagctcaggctgctgctgagaatgtgtttttcgttgctcacagctatggaggacttgcttttgttgaactgatgattcaacgagaagccgatgtaaaaaataaggtaactgctgtggcattgacagactctgttcacaatgtgtggcatcaagaagctggcaaaacgattcgagaatggatgagagagaactgttgtaattgggtctctagctcagaaccattagacacatcagtggagtccatgctacctgattgcccccgggtctcagcaggcaccgaccgtcacgagctaacttcctggaagagctttccgtctattttcaaattctttaccgaagcctcagaggccaagaccagctccctgaagccggctgtgacgcgccgctcccaccgcatcaagcacgaatg

SEQ ID NO: 61645 - DNA, 1791 bp, Homo sapiens
ttttttttttttgcaatactgtaacgacagcttattctttaataaaagtcaggggtgtcagcagcgtcactggtaagacatgatggcgctccacgactgaccagcagcgctgggaagggacacgcagaacccaccttccaaccacgcccaacacatcacagaaatgcctgctcgtttgttttgattcatatacaaagttacaaagtatttcctgccccaaattcttaacgaaaatgaaagaaaaaccctaaaatgcggtggttttacaagtatattagcccagaacatcctagggcagctgcgcgggccgcgggtgcggcagggcgcaggcgcaggcaccgcagagccccggccagcgcgaaacggacgcaggcgcattccccagccctccgtggcgttctcagcagcagatcgcccaggcctggcccggtcgggcttggtgttgcctccgaagtcgagacgacggtgctgctcagttatcttccgcctttccgcactatggtgggcaggcgacactgctgcggggcaggcttaaggtcccttccgcggatctgtcttcttgctcgcagggatgcactttcagggtctcagcaaccgcactcttccatttgttccagatccaagcacggactggcagcgtggggcttgagtaggacgacagtctgaccactccccgaaagctttagtttgggcgagttccatgacataggccggtcctcgtctcttgggacggtcctcctcttgctttagggactgtttctctgttcttggaagtaggggtgctgcagggcctggtgggcggcgattctctcatcgggaatcatagcccaccattgcgtgcaggagggagaggcattgtggggacaaattggttgttagtagaggtattcctgatccctttttaaaaggaaaatcaaaattcatagctctcgactgtttgaacttggtgaggatcttctgagcgggtgtgccgatgacatcgtggatttttgagatttggtccagttcatttactccaggaaagaggggctgcagactggcgatctcgtagaacacacagccggcgctccacaggtccatcttgtacgtgtagaacccatcagtgaggagacactccggggcccggtaccagcgggtggagatgtattccgtgtacggctgcttggaatagacactccggcaggagccaaagtcccctaatttcaggacatcctttattagtatattttctggttttacatctctgtgaaatattccatttctgtgaatatgatccagggacttacataactggtacatatagtgcataatttttttttctgataatgggtatcttctccctcgtattagctcataaatattcatgtccataagttcacatattagtgcaagagaaccagattttctgtcactttcaaagcgctgcttcatttgtttacatgcatagtagtttccatctctcaggctttgcatcttcataacttcagaaaacgttccctctcctattttgccaattgctttatagttcttcatcttggatgcggaagccggtgacaaccccttgccgacactggacggaaaagaaagaagcaggaaggttgtccccctgctttccacttccctgaggcggggtcccgcactaggatctccgtggtggtccctcgaaggagagcgttagagatcccgccgccatgttgtgtccctgtcaccctagcaaccgtcaggccctgaacgccacgcaatcgtctctccggccttccgtggccggtccctcacgcatgcaatctatgg

SEQ ID NO: 61646 - DNA, 3143 bp, Homo sapiens
  misc_feature (1)...(3143): n = a,t,c or g
ttttttttttttgacgtagtttcgctcttgttgcccaggctgcagtacagtggtgcggtctcggctcactgcaacctctgcctccagggttcaagccattcttctgcctcagcctcccgagtagctgaaatttaccnggtactacccaccatgcccggctaattattttgtatttttattagagatggggtttcaatcattttggccaggctggtcttgaactcctgacctcaggtgatcctcggcctcccaaagtgcagggattacaagtatgagccactatgcctggccaaccaacaatctttttaaaagaatcggtttttttttttttctgagcagtaggtctcaatagtgggattaaaatattcagtaaaccatgctattaacagatgtgctgtcacccagacagtgatgttccatttctagagcacagaaagaatagattttgcataattcttaagggccctgagattttcagagtggtcaatgagcactggctgtaacttaaagtcaccagctgcagtgctcctcaaagagagtcagcccatcctttgaagttttgaagccaagcgttgacttctctctagctatgaaaattctgcatcttcactaagcttaatcatttctagctctggacttaaagtgagagacttgcaagtcttcctttcatttgagttctttgaggccactgtggttactaattagcacccctggtgggtgtcaccctcctccctcctctatcgagttcacctacaccggggcgtggggaaaggcgcttcctgcaccccacatgccctgcgctcctggggctctcccacagggggctttcgtgagccaggcagcaagggccatccccctgctccagcccagccaggcagcgcaggcagaaggactctcccaacctgcccgggcatgcggggctttgtgttcactgccctggcccctccgaaactggggatctcccatcctcagactccctggtggcctccgaaccccaacaaatgacaggaagaccagaacccgcagcgcgatggcctgctgggcgcgtgctcagtgggacaccttggggcccctcaagctgagtcacaggggaaaggtgtgcttgcgccacccacgtcccaccggagtccgtggtgggcctggagccgcaggtcgccagggcggcatgggaacccgaagacggggcaccttcacctccggagctcgtgaccccggaggcctccgcgtcaagcacagatgccagccaaccgggcacctcccaaccgctccaggagccggggctctcctctgcactcacctccagcctgttagatgagctcctgtcaaccccagagtttcagcaaaaggcacaacctttcctagatccggcgccactgggggagctgaaggacgtggaagagcccgctttgctggaaccactcctcagccaggaagaacacagggctctgctggaggagcaggttggggcgggtttggggcagggtggcggcctctctttcgcggtgaacctcaggcttggtgtggagaggcgtgtcttcccttccagctgacctgcctaggatccctgagttccaggtccagcgagagactccacacagaggagggctgtcaacaatgacaagaaagcattcctgagcatcccggggatcccagggctggtcccaggtacagggaggtaggctgtcctaactgcatgcgcgggtttcccagcagcagcctaggatttctaactatcccaggcggagctctcatccctttttcccccgcgttcttcagtcgggttggcggagacctcagtccgcgaaacactgggccagggcagaagccaggccagttctcctttctgcggctcgactcctccgcctcttcgctcaccatcatgttgccaacccgtgtcccgccagcctcctcgccagcaccatagagcgccttgcaactaaataaagaccccagacctcgcgcaaaccagggtgctgccctttccaggcaagagggaaggcaggcagagatgaggacaggaacggagacagagtgagatggaaggatggagctaggcaaggatgggtggaaggagggaccccggaagggagagaaagagggagggagggagaaagggaggaaaaagccaggggagggagggaagaacagatggaaggatggaccaagggacaaaaggagcaagaagcagagaacggaaggcagagacaaaaacggtcttatgcctccagaaccaacaggacccagaactccgggaaaatgttgggtgcccagtacaggctgagtgctgggcccacagccccgttggccggcggggcgctcagcggccctctggatcaccagcctgggttacttcgtcccggagcaattcagaccaattccgtttccgaaggaatgagcgaattccccagagagcaatgagccgagacccaggtagttgtctgtttttcatccacatggttcacagatgacatatccccacgttgagccctgcaacagagctcgaggcggatagtcccatccacacaggagtcacactcaggccaactgaagcgtgattctggattccacgtttctttgccctctgtaaaggtgcctgttgctcaagtttctgccccccgaaagcgtgaccatgttgactgtttcgcgagctctgtggggccccagaaacttccaggaatgcgtggaagaccagcatcgtgtcggtgctctcctttccagttttcaaacaggctatattggagactccccattttgcaggaaacaggaatccatcatcaggccgtgatgcacgggatgtttcttttctctgtggtttcgctctcgttgtctacgtgaaaacgaacgagatgaacacaactgcgtgtgtgagactatcacggcaactgtgacacccaggcgttggcaatagagttggcagcctgatcctgggacaaaggtactgatggacatccagacacaccccaccacaatcactagcaaacccactcccaaacacacagacacacacgggcgcacgcgcgggaacacaagcacacacacagacacacaaagacacagacaacttgaaggagagcaagggacagagggatgagaaatagaaacggaaggagagaaacagcgatggagagagagacagagaggaa

SEQ ID NO: 61647 - DNA, 863 bp, Homo sapiens
tggcgtgtgagtgcggggtggggtggtggccgttacgttctgggcaacggctacggcagtggagaagtaagaagagaaacaacgtccggcgcttccgccttcgcttaggaggaggaagagctggtagggaaaggaaagtgcttcgccctgggcctggactggaccgagtcgggttggtgggggtctgggctatgagcttttgagggtcgcctgggacgcggagcgagacacgagagccaggagctatgtctcagccgccggcgccgccgcctccgttgccgccgccacctcctccccctgaggctccacagactccgtcgtccttggcgtcggcggctgcttcgggggggcttttgaagcggagagaccggagaatcctttccgggagctgcccggatccgaagtgtcaggcgcgtctatttttcccggcctccggttctgtcagcatcgagtgtaccgagtgcggccagcggcacgagcagcaacagctgctgggggttgaggaggtgaccgacccggacgtagtgctacacaacctgctgcggaacgcgctgctcggggttacgggggcacccaagaagaacacggaactggtaaaggtgatgggcctttccaactatcactgcaaattgttgtcgcccatattagctcgctatggaatggacaaacagacaggccgggccaagcttctccgggacatgaaccagggcgaactgttcgattgcgccttactgggtgaccgcgccttcctcatagaaccagagcatgttaacactgtgggctatggcaaggaccgctccggaagcctcctgtatttgcatgacactctggaggacattaagcgggccaataaaagccaggac

SEQ ID NO: 61648 - DNA, 1168 bp, Homo sapiens
  misc_feature (1)...(1168): n = a,t,c or g
atttttttttttcacttcagactaaattttattaaatatggtgtcatttggctacaatcggtttgtctttataaaactaagtaacttattttgtagtaaaaacaaccccaacccactgcccctctttggcagcccttgaaactcagttcaaagctaggcctggctcccggccatggcccctgctgccttcacctgctgagcgctctaggaagcctcccaaatcccaagtgtcaggcccccggagtccatcacctctgcctcaaacagccaagcccaggggctttggggccgcaggtatgaaggcccctccagtagccacacctgtgtcagggctgtgccctggggcctggccaacatcccccctccccttgaaccatcaggaactgggcaagacgcccaccagaggcttgaccacagggggcgtgcatccccttctgagcctgggagaccctaggggagtgggtagcctgggctggacccctggtgggcttgtgttctggatgtcgctatggcactttggtcctcaactcaaacccccacccctacccaggagtctgagacctcggccttccctggacttgttgggcagaaaaaggcaccaaggacaggatgagaaacccggaggggcagccccacaaatgagggcgctctgacctgtcctcccattgccaccccacccaggaacagcccctcaactggtcacagccaccaggaagccccaggactgctcccacaccacagcagtgccctcttctccatcccaccctcaggacctacccagggtcctccaggcagccaggggccagctccaggacagggcaggagaatgcggtccaggtctggcacgtaactgagggtgggtatgctccagagaagtaaggcaaatggcccagatgacgaccacctggggtagacccagggtctccagggaatggctcgggggcagacgctgtgtctgtgtgtgcaggatctgcccccaccagcaggaaaggggcaggagggaggcaaagaggaggtgcccaggacttgtaccctggctgccaagcagggtggggtgttttcatgaggattgcttttaaccaaaagtcctcagccttctgcagacccagggcagcggcgagttgctctacatcatgtgctttacggaaatccnccgcgctaatccaat

SEQ ID NO: 61649 - DNA, 1345 bp, Homo sapiens
  misc_feature (1)...(1345): n = a,t,c or g
ttttttttttttcctgtgtacaaaatgtttaattttgacaaagcagttaaaaggctagggtggcccttctgcagccactggtgactgggaagagtgctctagggacactggccacccccctgctcctgtcttcagacctctgctctgggattgggtccaaccctgtcctttgcagccatgtggcgatcctcagcatggagctccttgccactgtcccccaaaggggctcagtcgtccatcttcacgaagactttgggccgagaaaagatcttgatggcctcctctacctgcaccagcttccggtccagctcagcacggtggctctggggctctcagtgagtctgccccagcaggcagcagtaccagctcacgcagcagctggctctggctctggagcagcttggtcagtgtttccagccgctggttctcaggcatgcgcgtgtggcctgggggcatggcagggtccggctggctctgcttgcgggcctcggcctcccgccgccacaggtccctgcgctccaacaagtaatgtggcacatggcccttctgcgtggcattgtagtgctcctgggcctgccgctgctgctctagcacttgtgccaggacctgcagtgagcaggaatgcctccggggggctctcttggcagctcgtgcattgtgacgaatgaagtccacccccaggcctggctccttagcttcgggacctggtggggttggctggggactagatacatggggtggtgggaggccagggccgcagcgggagtgcgcccgcaggaagtgggcagactctgtcccagaggcagggccaggctcctggagctgggccttgacccgggactccaccttgtcgtacttgggtgagcgccacagagctttcaggggcctgggctggccctgctcccggctgcgctcctgttctctgaagcgcttctgaatctccctgatccgcctcaggttctccttctcatggtccttagggtccttcctcttgagagaggccccaggacctagggagatcccctcgagttgcaacagcacgtccccgacgccgcgctggccgcgctccaggatctctccggcaccgggaccgatgcaggggccacggggagcggtggtgtccagggcccggtcggaagtcagcaagtccagcttcagcgcgtttccctcgaggcgcccttgagccgaggtcggccgcctgtagttgtcaggacagagcgtcgggtctggggggatgggccccgagatgcgggacgggccctcgcacatgccgccggcgccgcccagcaacggtgcctgactaanggtcctcaannctagtgtctacaaagggggcggggcgcgg

SEQ ID NO: 61650 - DNA, 2829 bp, Homo sapiens
cccacgcgtccgacgaccacgggccggaaggctgccaggcccagtgggcaagcgaagaaatgaaccaccgcaacgcgggcgcttcggggcggggccgagtgcgaacctgagccccaaatcccgacccaggcaggggcggggcccggagcggggccttggaggcccagcccgcgcggcgacgtctccgcgtggcgtcacggcaccgactgacggccacccaccatggccgcagaccagcgcccgaaggccgacacgctggccctgaggcaacggctcatcagctcttcctgcagactcttttttcccgaggatcctgttaagattgtccgggcccaagggcagtacatgtacgatgaacagggggcagaatacatcgattgcatcagcaatgtggcgcacgttgggcactgccaccctctcgtggtccaagcagcacatgagcagaaccaggtgctcaacaccaacagccggtacctgcatgacaacatcgtggactatgcgcagaggctgtcagagaccctgccggagcagctctgtgtgttctatttcctgaattctgggtcagaagccaatgacctggccctgaggctggctcgccactacacgggacaccaggacgtggtggtattagatcatgcgtatcacggccacctgagctccctgattgacatcagtccctacaagttccgcaacctggatggccagaaggagtgggtccacgtggcacctctcccagacacctaccggggcccctaccgggaggaccaccccaacccatgtggaggatggactggaaaaggcattcagttagaaacgtgtggtccaaggaagaaacaggcaaatctgcaggaggcagattgcagccttcttcgctgagtctctgcccagtgtgggagggcagatcattccccctgctggctacttctcccaagtggcagagcacatccgcaaggccggaggggtctttgttgcagatgagatccaggttggctttggccgggtaggcaagcacttctgggccttccagctccagggaaaagacttcgtccctgacatcgtcaccatgggcaagtccattggcaacggccaccctgttgcctgcgtggccgcaacccagcctgtggcgagggcatttgaagccaccggcgttgagtacttcaacacgtttgggggcagcccagtgtcctgcgctgtggggctggccgtcctgaatgtcttggagaaggagcagctccaggatcatgccaccagtgtaggcagcttcctgatgcagctcctcgggcagcaaaaaatcaaacatcccatcgtcggggatgtcaggggtgttgggctcttcattggtgtggatctgatcaaagatgaggccacaaggacaccagcaactgaagaggctgcctacttggtatcaaggctgaaggagaactacgttttgctgagcactgatggccctgggaggaacatcctgaagtttaagcccccaatgtgcttcagcctggacaatgcacggcaggtggtggcaaagctggatgccattctgactgacatggaagagaaggtgagaagttgtgaaacgctgaggctccagccctaagccagccctgctctgcctaagtgtactccagaagaaactcatctcatccaaatacacgctattgagaaggcgagcctgacctccctcttacagataaagtcagctttcagaggctcagggtgggggggcctgcccgaggccataatgctacccaccccctcctcctaaccactggtctgttggaataacccagatgtctgcatcccctcaagtcagtcaatttcctttctgtccactgggggtggaatggggtagggtgggatactttaaagtgctcctgcttaaataaattagaccagaccagtgtatttctaaagaaaatcctgacatgcacacccattaaaaatagtacattttacagtgtcccagtcatacttttaattggcaaattaaaataatgcaatctgatatattctatcctactaaattaaaaatactgaatataaccaactaaatatacttactcctaagactcactaccagtagtttcacttaaactctgccttagaggctcttcccacccatttcccattatggcacatagagaaaaaggcctctatcactgtccactggagtaataaccactgcttcccctaactgcctcaaagactgtcattttatagaaaatttaagactatcctaatccactctttccaaactcccagccaggatagagacttccaggagttccacctgtcccaccttatctggctgccaactcctgctcagaaacagaacctgccacaccctgccactgcaggccgcaacctcaactcccaactgccaacttgaagcctgaactaccctttccctgaccagagttcaggaggggaagagctacacctccctgcacatgaatccactcatttgaaagcacaactgaccctggatttaagctggccaggaccctgggagatctttggaaggatttttgcctgggtttagggttaacttaaagaggtgcccagaagaccaagtgaggcagttcatgcctgtaatcccaacactttacaaggccaaggcagaggatggcttgagcccaggcaacatggtgagaccaggctttaaaaaaacatatgagccaggcatggtggtacatgcctgtggtcccagctactcgagaggctgagatgggaggatccggtccgcccatgaggtcaaggttgcagtgagccatgattgtgttaccgcaccccagcctggacaacaaagcaagactctgtctcaaagcaaaaaaa

SEQ ID NO: 61651 - DNA, 2320 bp, Homo sapiens
ggcttcaggctttcaccagttctcaggatgcccatagggatgggtgaagcctgcctggcctgtggtgctttccagtggccgtcattttattagggccccacagtggcattaggatgcacctctcggcggtgttcaacgccctcctggtgtcggtgctggcagcggtcctgtggaagcatgtgcggctgcgtgagcatgcagccacactggaggaggagctggccctcagccgacaggccacagagccagccccagcactgaggatcgactacccgaaggcactgcagatcctgatggagggcggcacacacatggtgtgcacgggccgcacgcacacagaccgcatctgccgcttcaagtggctctgctactccaacgaggctgaggagttcatcttcttccatggcaacacctctgtcatgctgcccaacctgggctcccggcgcttccagccagccctgctcgacctatccaccgtggaggaccacaacactcagtacttcaacttcgtggagctgcctgctgctgccctgcgcttcatgcccaagccggtgttcgtgccagacgtggccctcatcgccaaccgcttcaaccccgacaacctcatgcacgtctttcatgacgacctgctgccactcttctacaccctgcggcagtttcccggcctggcccacgaggcacggctcttcttcatggagggctggggcgagggtgcacacttcgacctctacaagctgctcagccccaagcagcctctcctgcgggcacagctgaagaccctgggccggctgctgtgcttctcccatgcttttgtgggcctctccaagatcactacctggtaccagtatggctttgtgcagccccagggcccgaaggccaacatcctcgtctcaggcaatgagatccggcagtttgcacggttcatgacagaaaagctgaacgtgagccacacaggagtccccctaggcgaggagtacattctggtctttagccgaacccagaacagactcattctgaatgaggcagagctgctgctggcactggcccaggagttccagatgaagacagtgacagtgtccctggaggaccacacctttgctgatgtcgtgcggctggtcagcaatgcctccatgctggtcagcatgcatggggcccagctggtcaccaccctcttcctgccccgtggggcaactgtggtagagctcttcccatatgctgtcaatcccgaccactacactccctataagacgctggccatgctgcctggcatggacctccagtatgtagcctggcggaacatgatgccagagaacacagtcacacaccctgagcggccctgggatcaggggggcatcacccatctggaccgggctgagcaagcccgtatcctgcaaagccgtgaggtcccacggcatctctgttgccggaaccccgagtggctcttccgaatctaccaggacaccaaggtggacatcccatccctcattcaaaccatacggcgcgtggtgaagggccggccaggaccacggaagcagaagtggacagtcggcctatatccaggcaaggtgcgggaggcacggtgccaggcgtcagtgcatggcgcctccgaggcccgcctcactgtctcctggcagatcccatggaaccttaaatacctgaaggtgagggaggtgaagtacgaggtgtggctgcaggagcagggggagaacacctacgtgccttacatcctggctctgcagaaccacaccttcactgagaacatcaagcccttcaccacctacctggtgtgggtccgctgcatcttcaacaagatcctcctgggaccctttgcagatgtgctggtgtgcaacacgtagcgagcaggccacagcctggcctcgggaaggtggctcctgcagttcagcgtccctgggcccattaatcccactgtggagacttctgggaactatttattgagcaggcctgtgcctccacatcatcttgttgtctctggggtgtggtgtcacagcactcctctttgccctagagataagggacctgacttccccttctcccatcctgaacatttgtacccctggagaagttccttagcagggaggaggaagaggagaggaggaagcaaagaatcacaaggaacctctggctaggtgatcctgatgtttcctactgagtttttctggtatccagatttctggaaaccgagtaatcatgtactgtttgattgggtggttcatctgcttccatcccagtgaaatttacctgtagcccagtgaagggtgtgtttggaacattcattaaatgattctaagcaaaaaaaaaa

SEQ ID NO: 61652 - DNA, 3993 bp, Homo sapiens
ttttttttttttataatatgatcccatttatttaaaaaataaagattacatatttgcttatatacgcatacaaattttctgaaaattacataagaaattgttaatagattacctctggagaatagtactggggtaagaggtgagggggcagaattctcattttacagccttatatactgttgtgaatttttttttttaccatgtactttttaaaaatacaaaattgaggagggaacctcctactccaaaattacgaagcattcttttatgtacatttctctaagagttatatttgatatttttcaaggcaaactgacttgaggtactcgatgtttttaaatgtatttctaataattattagtagggtcacacctatttgacagcttttttaaaaagtcacatattgctgtatttttaaagatgacaaacctttatttaaatgagatgcttgctggagattttctttttcaaactcactttttaagttatggaaataatatcactgctgaaagtttggaaaacatatataagggtgccaaaaataccactaaaatcacataaaccaatcttaccattattaatggtgtgatttctttctttacatatctattaatacctagtactatctatgtagaaaatgtgtttgcaaagctgagatcacactgtacctatagctctggatcctgctgctttttcccccaacacttaacagatgctcagtaaacatgttaaaccaagttgttaattagtattgtaccatttctcctcatcaaaaattacttctatagaaggcatttagttggtttccagttcttgagtaaaataaataacacttaatgagtatgtctttacctaaacattgtctgcatttatgatttagaagaagctactggatcaaacggtatgaaatattttaagtttctgataaatgtttttcagaagaattatactggttttcactcctaccaacagcgcagcctgtgttgctgtttccttgccaacactgtcaccattttaaaaagtcactgttatttcacaggtaaaaaatagaaagtttgctctgagaaaatttcttcctcccattacaaaataaagtcacagtctttccgtatgtccactctagagtgctatcttccaatctaaaacagaggaactgttttcaaacatcattagtttagcggtctccactaacaaagacatacggataaagtaacatgtaagtcagattaagaatctcaactttttaagaaaaaccaaatgactaaaggcatatttttattctatactttttgtcctataggtactctaggtccttgtgtaattattgaggacaaaacgtcagttaaaggtgagagggaaaactaggttgcagactagcagctgttttgcatctcacaagaacaaaggccttaacaaaccgtatactttatgcaaacaaagtgatgcctcactgacttaggagacaagtcacatgccatcagtgtgtcagaaaatttctttcttcagtgatagttaaggtaacctcgccagctactttccagagacagctccagggcaatactggggaaaaaaaaaatcagagacataggacctcaatagagccctgtgcaacaaaaagatgctagataacaaaactcaaagcaaaactaagatcattccaatttaggggaaagtttttttattcagtgtttaagattaaaaactacaagattttgcttgcagctgatgagtaaaaagagaagttaaacataaattctcatctgagtggctagttaaaatgctctgacaccgagtcaagttactcagtgacataccagttactttgggcttaagagtcttggagcaaagtagctctaaacaaaacgtgtcatctgaagcatagggctaatgggcatatgaaatactaaataagaagctgatggaggcaggctgtggcagatttttggttcttttagggttctagcagtggttgccatataagcaaggacctagcagagagttatttcctgtctttacttttctgagttaaacaccttcaacccacacccactaagcaggaataaagagacattttatagaccagttggaaaatataaagcagtcccacttctccagtagaattttagttgaattaaatcataagagaaacaatgattattgcacatattatacttgtcacactacatctgttgagtggaatttccattccaagtgttgttttcatcttcaccatcatcttgagtccttaatctataaattttcccctcctttttaaagtcgtctccacgtttttccagcactctttttctcactggttcccttttttctgatttgctagatgatgcagggtttgggggttctgacgatgttactctcactgaagtctgtgtgggaggcggattactaaacaagaaattgctaattaatctccagatggcaaggaatggataaagcactgttcccaacaaggtccaaatgtctccgctggaagagtgtacaatggatgcagttggtcttcctgcctagaaattaataaacaaactggcaacagtaccaccgaagcgcttggggcaagttccaaatccagtaacttctttttataatcttctttggtaaattccctcctgggaaacatggttgctaacgaaaaattaccgtaagtgttgccaacagtctgtgcagcaaactgccttgcctcttctagaggagcatcagaagggaactgatttgtaaaggaagaaccatcaggaagacggaattgaattcttgcaacagtgcttctttctcttgcataagattccctcttgacttccatttctgcctgttttgctagcaaggcagcagctttggcagcctctacttcttcctttgtctttgcaaaacgagcagctctctctgcacggtccaatgcaatctgctgttttatacgttctcgagctgccctatcttctgctttctctctgtttctttcctccagcattctttttgttaattcttcttcttgttttcttttataatccaacatttcttttccagtttttctcctctcaatttccttcttaatttctctctgttcttcctcttttcttttctcttctctcctttcttcaagtttttttgttagtctttccactcggatgttgaggtcctctgcaggtctctgatctgagcatccactaggctcctgagaggaagtggcatggcctgcactttctcctcctgttgcagtatctgactttgtatcagaagtggatggtatctcacaaagctctgcatttctggactgagagttttcacaagtgttgttaggttcaaatgacgcagatggagtagacactgaactttctgactgactgccatttgctactgatgtttcactttttagcaaatgcatctgtcggaccttgtgaattcttgtaacaagttcatctgcagaaacacttcctgctattacttccaagggaattccactgtctccaataaagaaactggatggaacacacactacaggatagatttgtgaaaactgtaggcaggcttcacttttggtatcgattttaatagcaacaaaactgtttgaagatgcttctgtaactttatcatcttcccaacttgcagccatctgtgtagactgttcatcatcacctgccacgaacaccacgaagaccgcgccgctccttttggccgtcgcgatggcggccggaatggcgccctggaaccacagcatcgctcccttcgggcccaggcgctcgctcggtgtgtagtctccgcagtcccgaagccggctccgccctccgtcttcgtccggctctgcggcccccgcaaccttggctggttcggcccccacctccggctccgcacaagcgcgcacgcccgtcagcggcacccggagacgcgcgctagcgcgcgcgagaacacctcacgtcacagtcgcaacccgtcggtgtccgtgccccaggaccttctctcgttggcgagtcgatggtcggcgca

SEQ ID NO: 61653 - DNA, 2077 bp, Homo sapiens
cggccgcagctccccggcggaggcaagaggtggttgggggggggactttggctgacgttttcccgggcaacgactccacggcgtctcaggacgtggccaaccgcttcgcccgcaaaggggcgctgaggcagaagaacgtgcacgaggtgaaggaccacaaattcatcgcgcgcttcttcaagcagcccaccttctgcagccactgcaccgacttcatctgggggtttgggaaacaaggcttccagtgccaagtttgctgttttgtggtccacaagatggtgccatgaatttgttactttttcttgtccggggtgcggataaggggacccgacacttgatgaccccaggaggcaagccacaaggttccaaaatccacactttacggaagccccaccttcttgcgatcacttgtgggttcactgctctatggacttatccatcaagggatgaaatgtgacacctgcgatatgaacgttcacaagcaatgcgttcatcaatgtccccagcctctgcggaatggttcacactgagaagagggggcggatttacctaaaggctgaggttgctgatgaaaagctccatgtcacagtacgagatgcaaaaaatctaatccctatggatccaaacgggctttcagatccttatgtgaagctgaaacttattcctgatcccaaggaatgaaagcaagcaaaaaaccaaaaccatccgctccacactaaatccgcagtggaatgagtcctttacattcaaattgaaaccttcagacaaagaccgacgactgtctgtagaaatctgggactgggatcgaacaacaaggaatgacttcatgggatccctttcctttggagtttcggagctgatgaagatgccggccagtggatggtacaagttgcttaaccaagaagaaggtgagtactacaacgtacccattccggaaggggacgaggaaggaaacatggaactcaggcagaaattcgagaaagccaaacttggccctgctggcaacaaagtcatcagtccctctgaagacaggaaacaaccttccaacaaccttgaccgagtgaaactcacggacttcaatttcctcatggtgttgggaaaggggagttttggaaaggtgatgcttgccgacaggaagggcacagaagaactgtatgcaatcaaaatcctgaagaaggatgtggtgattcaggatgatgacgtggagtgcaccatggtagaaaagcgagtcttggccctgcttgacaaacccccgttcttgacgcagctgcactcctgcttccagacagtggatcggctgtacttcgtcatggaatatgtcaacggtggggacctcatgtaccacattcagcaagtaggaaaatttaaggaaccacaagcagtattctatgcggcagagatttccatcggattgttctttcttcataaaagaggaatcatttatagggatctgaagttagataacgtcatgttggattcagaaggacatatcaaaattgctgactttgggatgtgcaaggaacacatgatggatggagtcacgaccaggaccttctgtgggactccagattatatcgccccagagataatcgcttatcagccgtatggaaaatctgtggactggtgggcctatggcgtcctgttgtatgaaatgcttgccgggcagcctccatttgatggtgaagatgaagacgagctatttcagtctatcatggagcacaacgtttcctatccaaaatccttgtccaaggaggctgtttctatctgcaaaggactgatgaccaaacacccagccaagcggctgggctgtgggcctgagggggagagggacgtgagagagcatgccttcttccggaggatcgactgggaaaaactggagaacagggagatccagccaccattcaagcccaaagtgtgtggcaaaggagcagagaactttgacaagttcttcacacgaggacagcccgtcttaacaccacctgatcagctggttattgctaacatagaccagtctgattttgaagggttctcgtatgtcaacccccagtttgtgcaccccatcttacagagtgcagta

SEQ ID NO: 61654 - DNA, 2268 bp, Homo sapiens
  misc_feature (1)...(2268): n = a,t,c or g
gccgagccgagctgggggcgcagagcgcgggagggcggcggcggcgcggagcccaggtggctccgctgccggatgggagtgccccagtgtgctggatgaagctggcgcatgcaccatgtcatcatgtgtctctagccagcccagcagcaaccgggccgccccccaggatgagctggggggcaggggcagcagcagcagcgaaagccagaagccctgtgaggccctgcggggcctctcatccttgagcatccacctgggcatggagtccttcattgtggtcaccgagtgtgagccgggctgtgctgtggacctcggcttggcgcgggaccggcccctggaggccgatggccaagaggtcccccttgacacctccgggtcccaggcccggccccacctctccggtcgcaagctgtctctgcaagagcggtcccagggtgggctggcagccggtggcagcctggacatgaacggacgctgcatctgcccgtccctgccctactcacccgtcagctccccgcagtcctcgcctcggctgccccggcggccgacagtggagtctcaccacgtctccatcacgggtatgcaggactgtgtgcagctgaatcagtataccctgaaggatgaaattggaaagggctcctatggtgtcgtcaagttggcctacaatgaaaatgacaatacctactatgcaatgaaggtgctgtccaaaaagaagctgatccggcaggccgcttttccacgtcgccctccaccccgaggcacccggccagctcctggaggctgcatccagcccaggggccccattggagcaggtgtaccaggaaattgcccatcctcaagaagctggaccaccccaatgtggtcnaagctggtggaggtcctgggatgaccccaatgaggaccatctgtacatggtgttccgaactggtcaaccaagggcccgtgatggaagtgcccaccctcaaaccactctctgaagaccaggcccgtttctacttccaggatctgatcaaaggcatcgagtacttacactaccagaagatcatccacccgtgacatcaaaccttccaacctcctggtcggagaagatgggcacatcaagatcgctgactttggtgtgagcaatgaattcaagggcagtgacgcgctcctctccaacaccgtgggcacgcccgccttcatggctcccgagtcgctctctgagacccgcaagatattctctgggaaggccttggatgtttgggccatgggtgtgacactatactgctttgtctttggctagtgcccattcatggacgagcggatcatgtgtttacacagtaagatcaagagtcaggccctggaatttccagaccagcccgacatagctgaggacttgaaggacctgatcacccgtatgctggacaagaaccccgagtcgaggatcgtggtgccggaaatcaagctgcacccctgggtcacgaggcatggggcggagccgttgccgtcggaggatgagaactgcacgctggtcgaagtgactgaagaggaggtcgagaactcagtcaaacacattcccagcttggcaaccgtgatcctggtgaagaccatgatacgtaaacgctcctttgggaacccattcgagggcagccggcgggaggaacgctcactgtcagcgcctggaaacttgctcaccaaaaaaccaaccagggaatgtgagtccctgtctgagctcaagacctagaaaataagtccccttcctgcctgttgcaaagtaacgtaagagttccctcacccgagtggatgcagaccttcttgctgtcagccacccttccttcatacacatagccagcccaggtgaccagaacctcccaggacagatgaggctttgtgtccttatgagactgggagaacctgctgggcacccctgctgcaggtgctgtggtgggtggggaccccactgcccttcccactgagcacatcgtggctacctgacttggtgggagctccaggcagtcacttctgtttcttaaacatagctttactgaggtacaattcacataccatgtaattcacccacgggaagtgtatgattcagtggtttctaatacagacttctgcagccattaccaccatcaactttacgacattttcatcagcccaagaagacaccctacactccttagctgtccccatccaactcccccaccccagtaaccactcagaataggtatggatttgcctattctggacgtttcgtataaatggcgtcatacactaaaaaaaaaa

SEQ ID NO: 61655 - DNA, 2049 bp, Homo sapiens
  misc_feature (1)...(2049): n = a,t,c or g
catctctccactgctgctgccccacttcttgcattcagcaatatagacatctgatccgttcctcaagattctattctcacccttcctaacaaagtatgacaggaaaaaaaaaaaaatcacggtttcaagggacccttttattgttaacttaagggatcatcaattttgtctcactacctacaaagggaatttcatcttgtttccatgctgagtagggaaacagttgacaaagctaatcataataacctacatcaaaagagaactaagctaacactgctcactttttttttaacaggcaaaaaataaatatatgccctctaaaatgcacaatgggtttaggtcactaaaaaaattcaaattgggatccttgaaggaatgtattgcaaagtccaggggtgcagtgaaggatgagctgaggatgtctgtgcaaactgttttaaggggttcctggggcacttgcatcttcttggcccactagcctggaatcttgaccatggaaaggtttttagcctaatgcccaagtgggaggatgccggaaaatgctaaagttggactttaggggggctgttgcacaggaacctaaaagggcagggaaagtacctaaatattggctggagagcatccacccccagggaagggactttacccttcaaggagcttccaaactgggcaccacccccccagtgactcaacatggctggacttttatcctccggtgttcccatttgggcacaggcaagtggccagtggtctccaaccaacctatgatggtgatggcaagcccctagaattggatntgctttcacccacctcatcccatgagagcttttggttcccccgggcaaaagcttccccattcaaaatacccccccacaggacccattcccacacaatcctgcttagccccgagtgaacaagccctcaagcatacttccttgcctgcctttccaggaccacagtcccaagccccatcccagcccagcaggtaatgcccagaaagccaaaagtggcttggccagtcttggcatttctcatcaaaacttgtcagcaggtgacaaagtcaaacaggcaaaggtaatcttcacacaattcttctcagctttggacattaggtctttgacaatcttggctccctcttcatcaaacagagaagtgccaatctccatgttgttgagctaccttaaaggaaggtaaaagccattccaccaccaataatcatctcattgactttgtccagcataattcattgatgagctggaatcttgtctgcaactttttacgtccgcccaggatggaccaggaagggtcgctctgggctctccaaggcctttgcaaagtagttcagctccttcttcatcaaaaacccaccagccttctgtggcagattgactcctaccatggagctgtgggctctgtgagcagtgccaaaagcatcattgaacatagacatccccctagcttggaaagtgaagcctcggaaaagcttctattttggcctggctcggcttttaacctttgttccccagaagcatcttttcccttcccttcttcctccacatgaaaagccggaggtttctccagcaaggatgacagacccagctagctgggttggccacaggccttttctcccacttctgggccctaacacagtcccttcaagaaacagaacatcccttgcccaagcaagaggatttgagttcctacagcaacttggcttctaaggagtacttgtcaaggcatgggcacaccaatcaggccgggcctaggtggcctcaataaggactaccgacttggctcccattgtccaaagcaagaatttgatgctttgggacagcagcccttaatcctctggttgtttgttatctggttgttcttcataggaacattgaagtcggactctcataacgacccgcttccctttaacggtccagcttgtccagcgtcagcttgttagaaagcgacattttggaaatacagctggggagagaggtcggtgattcggtcaacgagggagcctgactgccgacgtgcgctccggaggcttgcaga

SEQ ID NO: 61656 - DNA, 3182 bp, Homo sapiens
cacgtttctgtatgtcttaggccagtatcccaaacctcttccacgtcactgttctttccacccattctccctttgcatcttgagcagttatccaactaggatctgccaagtggatactggggtgccactcccctgagaaaagactgagccaggaactacaagctccccccacattcctcccagcctccctcactctccatgctggcagagcaggagggagactgaagtaagagatggcagagggagatggtggcaaaaaggtttagatgcaggagaacagtaagatggatggttccgggccagagtcgatgtggggaggaacagagggctgaagggagagggggctgactgttccattctagctttggcacaaagcagcagaaagggggaaaagccaatagaaatttccttagcttccccaccatatgtattttctaggatttgagaggaaagagaggaaaatgggggaatgggttgcaaaatagaaatgagcttaatccaggccgcagagccagggaaggtgagtaactttaggagggtgctagactttagaagccagataggaagaatcagtctaaactggccatgctttggaagggacaagactatgtgctccgctgcccaccttcagcctgcaatgagggactgaggcccacgagtctttccagctcttcctccattctggccagtccctgcatcctccctggggtggaggatggaaggaaagctgggacaagcagggaacgcatgattcagggatgctgtcactcggcagccagattccgaaactcccattctccaatgacttcctcaaccaatgggtggccttgtgactgttctttaaggctgaagatatccaggaaagggggcttggacactggccaaggagaccccttcgtgctgtggacacagctctcttcactctttgctcatggcatgacacagcggagaccgcctccaacaacgaatttggggctacgaagaggaatagcgaaaaagcaaatctgtttcaactgatgggaaccctatagctatagaacttgggggctatctcctatgcccctggacaggacagttggctggggacaggagaagtgctcaatcttcatgagacaaaggggcccgatagggccagcagccacaaggccttgacctgccgagtcagcatgccccatctctctgcacagctgtcccctaaacccaactcacgtttctgtatgtcttaggccagtatcccaaacctcttccacgtcactgttctttccacccattctccctttgcatcttgagcagttatccaactaggatctgccaagtggatactggggtgccactcccctgagaaaagactgagccaggaactacaagctccccccacattcctcccagcctggacctaattcttgagaggggctctctcttcacggactgtgtctggactttgagcaggcttctgccccttgcgttggctctttgctgccagccatcaggtgggggattagagcctggtgtaagtgcgccagactcttccggtttccaaagttcgtgcctgcgaacccaaacctgtgagtctcttctgcatgcaggagtttctcctgggcagctggtcactccccagagaagctgggccttcatggacacatggaactaagcctcccaaatgggagttctggctgagcccagggtggggagatcctgggaagggaggcactggaggaagacggcacctcttcccccatggcagggtgtgagggaggcaggtttggaatggtgcgagtatggcaatctaagcaggggtctggtctctttgactccaggctggcctttggccgactgtctgctcacccagagaccttggactccggactatccatggctccgaatctaagtgctgcccactcccatgctcacacccacagaaggtcttcccatcccctttagattcgtgcctcactccaccagtgaggaagatgcctctgtctttcccacgactgccaggagatagggaagcccagccaggactgaccctccttcctccagcctgccctgacccacctggcaaagcagggcacatggggaggaagagactggaacctttctttgacagccaggcctagacagacaggcctggggacactggccccatgaggggaggaaggcaggcgcacgaggtccagggaggcccttttctgatcatgccccttctctcccaccccatctccccaccaccacctctgtggcctccatggtacccccacagggctggcctcccctagagggtgggcctcaaccacctgctcccgccacgcaccggttagtgagacagggctgccacggcaaccgccaagcccccctcaaggtgggacagtaccccggacccatccactcactcctgagagggctccggcccagaatgggaacctcagagaagagctctaaggagaagaaaccccatagcgtcagagaggatatgtctggcttccaagagaaaggaggctccgttttgcaaagtggaggagggacgagggacaggggtttcaccagccagcaacctgggccttgtactgtctgtgtttttaaaaccactaaagtgcaagaattacattgcactgtttctccactttttattttctcttaggcttttgtttctatttcaaacatactttcttggttttctaatggagtatatagtttagtcatttcacagactctggcctcctctcctgaaatccttttggatggggaaagggaaggtggggagggtccgaggggaaggggaccccagcttccctgtgcccgctcaccccactccaccagtccccggtcgccagccggagtctcctctctaccgccactgtcacaccgtagcccacatggatagcacagttgtcagacaagattccttcagattccgagttgcctaccggttgttttcgttgttgttgttgttgtttttctttttctttttttttttgaaaacagcaatacccacagtacatattactgtagttctctatagtttaacatacattcataccataactctgttctctcctcttttttgttttcaactttaaaaacaaaaataaacgatgataatctttactggtgaaaaggatggaaaaataaatcaacaaatgcaaccagtttgtgagaaaaaaaaaaaaaccccaaaaaaaaaa

SEQ ID NO: 61657 - DNA, 869 bp, Homo sapiens
tggttcaagctgaggccgagtggggacgacgtggagctgattggagaagaggaagatgtgagtgtttacgacattgctgaccaccctgactttaggttccgtacaactgacatcgtcatccgcatcggcaatactgaggatggggctcctcacaaggaggatgagccatcggtgggccaggtggcccgtgtggacgtcagcagcaaggtggaggtggtgtgggctgacaactcaaagaccatcatcctgccccagcacttgtacaacatagagtctgagattgaggagtcagactacgattcggtagaaggcagcaccagcggggcatcctcggatgaatgggaagatgatagtgacagctgggagacggacaatgggctggtggaggacgagcaccccaagatagaggagccccccatcccacccctggagcagccggtggcccctgaggacaagggagtggtgatcagtgaagaggcagccacagctgccgtccagggggctgtggccatggctgcccccatggccgggctgatggagaaggctggcaaggacgggccacccaagagcttccgggagttgaaagaggccatcaagatcctggagagcctcaagaacatgactgtggagcagctgctgacgggctcgcccacctctccgactgtggagcctgagaagccaactcgggagaagaagtttctggatgacatcaagaagctacaggaaaacctcaagaagaccctggacaatgtggccattgtagaggaggagaagatggaagcagtgcccgacgtagagcgcaaggaggacaagcccgaggggcagtcacctgtgaaggctgagtggcccagcgaaaccccggtgctgtg

SEQ ID NO: 61658 - DNA, 1766 bp, Homo sapiens
ttcagtccaatccagtgatcagagctgcatttatcccgcctaagaaaattcatttcttttatgttgtcaattatagttaggtcggcatgttagttgcatcagttgttttttttttttttaaaaaaaaaacaatcctttaataaaattagtccatctaaaactccccaatgcctaaggttctagtcgtggaagggttagctgcagaattccagttcagaagccaacggaggctcagtccagacagggattaaccgacttgtgctggtatctaggtgcttggattgccgagttgagtttgctggaagggaaatggggcggcgtcggggggcccgacaggcctggctgccagtcggcttccgcgaaaacgactcttgctgtccacatagccagccgtgaagccaaactgcaggcctctgccctcccctaaatgtcctcctaggaggcagtcactcgggaggaagatgtgcctgttaccaagtgcttcgtcccggccccagcgcagacctatgaatgaagatggagggagagctgatgtgaaaggcctgggtcccggccgcagaaggggcgccagaccgaaatcggcgatcgcgtctctcccaccaaagcctcccggccagcggccgcgtctgaaagtcctgggctaagcaccacgccgggggggtaccagacaccccggctgcagctgccgagggcctcactcaccttgcagggccgccggcctgcgtcggcgctgggactgcgcacgctcggccctgcgtcagagcgaggaagaaaaaggccaagatcttccagaaggtgctgcggcctccccgcacgcccgcttgaggcgactcgggatggggcggcttgagtcacgaacgccgaggcggggcagggtgcggcgccggcgcgcctgccccccggcaggctcggggtcttccgcgccacggaggtcacccgaagagcgccgcaagccgcatccggaaggcccgaaccctaccggaggggcggacggcggacagggcaaggccccgagcccgacgcggcaggcggtgcgggacgggagcggtggcgggcggggactcgagggccgggcggcgaaggcgggcgaggggaggggaggggaaggggaagccgcggccccgcttgccccggcagtctgaagcggctcagctctttccatgaaggccggtggggcccctttaaagggcctttgtggtggcatggggaggcctggcggccgggcgcggcccgggccctcttagtactccttgcggaagccttggttgccctttcttcgccgccccgaagggcgcctcggccccaacggtggcgctagtctatcttgggcagcagcacgggccctggatggttgggcagggacgcccttccctgggcaattcgtcaaggcagcccaggaagcttttagagctccctcgtcgttgcggattggccagcttgcaggtggctgggggatgattcgcgtcttcttgttggtgccgcggccgcattgcccggccggctccaggagtctcagctggtgaggtactccatgcactagccgccaaggtagcagcatggcctgccggcgccaacgcgctcggcgtagtggcccttccgcagcagccggtgtacacggcccactgggaactcgacggccggcgcgcgacgagcgcgacttggccttggcgcgggccttgccgccagtcttgccgcggcccgacatgctagcgaggtagaccggtgaagcacgacggctcaaacactagaacagacgcccaccgcag

SEQ ID NO: 61659 - DNA, 1647 bp, Homo sapiens
gcttcactgaagttctccttggtcctgattcttggcctcctcccaccagaacgtgagctccttgtgggaggcagtgcccctcccagcctcctccctgtcacagactgtgtgggggccacccaggggctgaatggaccagggggtcagcagggagagtgctaagtggtggcggggggcctgtggcagaggccttgtgacagtgagggttgagggctggtccagagagatgatgtgatccccaggagaagccacaggggaccatgacatgggcgccaccagcttccaggtgaacgtggacctatcgaaagccagcttcagggcaggacactgtcctttctggaggggatggccccaccccacagacaaggcaggcccagacaactctaccccactgcctagaagtgcgggtccccagagccagggtagaccccctgagtcaggagcccgggcacagaactgagcacctgcactgcaggcccagggccgggttccctggagaaggagaaagactgaagccactgcctacctcctgcccacaacagactgcaggcccatttggtgacacaggacaagcagcacatgtgtcgaacactgccgagcccgcaggcacgcctgcatcccacagccacgagcctgtgaggctcaggcatgtgacctgcaggagctggaggcgggcgggaaggcaggtgggggcctctccctggctggagcagggagctccaggagacctcaggacggcccccacccggtgggtaaggaccctgtttcccaatttgcccccaaggcctaatggacccaccgggcttagggagtcctcactcagaggagaggagcccacccctcccaggacacctggctgagccggaacagcagcgcaggggagctgtgacagcagagagcagcaccaggtcacacaagcagccgccccggaaggacacggcccatggtgacagaggacaagcagcatgcgtgtgtcagacactggcctggcctgtggacacgcccgcgtcccacagccatgaccctgcgaggccaggagagactgctccagggcacatgacctgtggtagctggaagtggggcagggaggcgcagccacactcctgctctggtccgagggagatctcaggaaaccgactgggaaatcaccccccacagggacccccacccctcccagcctcactgcgccccgtcaggccaggcagctgccctcagggtctgccaaggtgggggtcaagggccatgggggcaggtagctctgcctgcaaagcccacaagcatgtcagatcacctgggctgcagacagacaaacacctgagctgttctgaataccttcaggttcctggcctcgctgagcaagtgcagaaatttttaccttcaaggatcagggtttttctgtttgtttgttttttaacacacacatatgtgaacaaagagtatgcgtttgtactggcagaagaagcgtctggtaagacaaccagcaagttaacaatggtcacctccagaaatgggctgggtaaaccaaagaatttttttgtttttgttttttttgagtcagggtctagctctgtcacccaggctggaacgcactggtgtgatcacggctcactgcagccttgacctccctggctcaagcaatcctcccag

SEQ ID NO: 61660 - DNA, 1544 bp, Homo sapiens
ttttttttttttcccttccacatttcgtattaaatacctgaaatatattaatcttaaaaaacaatatcgatacagtactcaatggatagaggcagtggagtgaacaagaagcccagattgcaaaatcgtaggtcataaaaaaactggagtgcgcgtgcgtcaggttccaggcacgcgagaaaaagcaacgcgaaagctttcagtctcggaggaggttttcgggcttggggtagccgaagagaacaaagtcggcctcgtagagtttatacagctgctgcctccaggccagggggatcttggcgaaccagtcctcctcccagctgctgggcggtcctgttcccggtagctcggggggaagcggagctgccaggtccacctggagtagctgcagcagctgcgcggcgtcctcgtccagagtctccagcttccccacgaagtcgtagtcgatctggcacgggtggcagaggcggtacacctgccgccagtgctcgttgaagggcgccagcttctccgtgtgcgggtccagcaggtactggatgaagttggcgaaggacaccttgaggccagcgcggaaggcctcgcgcgccgaggcgggcaggctggtgtggttggcgtacagccgcagcatgggcacggcgaacttgcggtagaactcctcgttctccagctcgaacttgctgcggaaggcggagatcaggcgcacgaaggggtcgcgcacgaagaggaacttggtgtacttcttgagcttgaccttcatgaggtggcgggagagcttcccgtagcggcgccagaacttgttgaaggtcaggtgcgcgctggcgttgtgcacgtgctcgcgcgggatgcgcagcgggtcgcggtagggcgcaccgcggtgcagcaggcttccgctcagcacgatcatcacgcgcttccagttggtgcaggccaccttgggcacgtagcagtagatggccccgtgccggtcgtccacgatcaggtggctcagctccgagttggggatgtcgtcgaatgggcgctccttggtggggaaggccaggctggagttggcgcagaagccccgcagcacgctcctccgctccgcctgctgccggccctggtctgggctgcgccgggcgtcgcgcggggaccagtcgtagcctctcacgctctcctccatgctccccggcgcaggcggctgctccgtctcctttctgggaaggtcgctctgcttcacgccagcactgagaaacttgtccagaaactcgtcgacatcggagtcggccgtgagctccctgtccctgtccggcccgggcgtgggcagcggcggccccgtgtgcggcctagagaaggacgtgtgcaagtagaagtgcgcggcgcctgcgctgtcccagtacacgatgatcagcaggatcatgaacaccgaccccagcaccagccacagccggaacagccgggccttggtcatcctgccccgggcgggctgggccctctccgggcctctcacttcagcttcctgcagagccggggcatcctgctgggaacctcgcgcccctcacctcgcg

SEQ ID NO: 61661 - DNA, 1598 bp, Homo sapiens
  misc_feature (1)...(1598): n = a,t,c or g
tgaaagaaacagtgcagttttgttgctcacagggacccgtccccacacactggagagactttgaaggttggggttctgcccattccacctggggaatattctgggcccagcctaaaaagttctgttggggccctaaggcctggggcaggctcctgggggctgtggagcccgaggagccaggcagagcggggtccttgggggccaagcccatgcgtcggatgctgtcctggtacttgcggcggccgagctccaagactgcgcgcacctcttcagccacgtcctgccggtcactctgctccagggcctgcaccaggaagccccacagcccctggctgcccagcctggcgctcagcccaggagaagagcatgtgacggatctgctcatccagatcatcccggaactcgtgccggatgcgctgcacctcccggtaggacacccccaggtgcagggccacggctggccagtccagacccagacgcccagccacactcagcaggttgctctgcgtcagaaagccggtctcggcatctcccagattcaagggtgccaaggagaggccagccccccgccgtggcccctcggaccctcgaagtctcggcagcttgatgggcagagtggccatccacagggcgtctgcgcccttcctctgccgggcagcctcagcctcctcgggcacccgcacaggcaccgcgccacggtagaaggacacctccttcacattcttcaggtgcgagtagaagacaaagcagattctgccctccacacagtcagggcggtcagcatccacgtcgatgccgcgctcgaaggccgcaaagaactcttcgccctcgaacatctccaccgtgtcagagggctcggggccccggtaccgctccagcagccgccgaagggtggcgtcccccttgtttcggggcaggcactgcagcaggacctgctcagggtcccggcgccgctgcagagcgatgaggttcacacggtgcagccgcagccgctcccaggccttccgagccaggcctcccacacagttcttggtggtgtaccagagccagtaccaggagaagtgtgtgacctggaagcgtgcgtacaggtgggtgagctccaggaccacctgagctgtgatgtcatcccaggtggctgcaggaggggcccagtacaacaggtgcaggcgggagcggtccagactgaggcctgtgatgccagagggcagaggcagctgcacggtgaccggttggaggaagctggggggaccgctctgtgacaggcacagcagggggctcactgcagcctctggttctcccaggagggcctgcagctctcggccagccatgcgcaccacctgcatggagactcgacgaggctcctcagtggccccaggggggaagatgactttgaccccaggatgacccgaggagcacagcagtgtcccctccggtggcaccaggcaggcattggacacagggcgggaaaccacaaggaaccaggagaagtggggcacctggcagtgagcccagagccgctggggtgcctcttcctccaggtaggtctccaggtcaccccagctgttgtcgaagtccnccgcgagggctatcatctcagt

SEQ ID NO: 61662 - DNA, 1040 bp, Homo sapiens
ggaattcctgtgctcatggcctgcatgacgctgctgcccacctggttgggaggcgctcccccaggccctcccggccccgacatctcctcgccctgcggctcctataacccccactcccagggcctggtcacctttgccacccagctcttcaacttgctctcgggtgagggttacctggaatggtcccctctcttctatggcttctacccgccccgcccacgcctggcggtcacctacctgtgctgggcctttgccgttggcctcatctgcctcctgctcatcctgcatcgctcggtgtctgggctgaagcagacactgctggcggagtccgaggctctgaccagctacagccaccgggtgttctcggcctgggacttcggtctctgcggggacgtccacgtgcggctgcgccagcgcatcatcttgtacgaattaaaggtggagctggaggagacagtggtgcggcgccaggctgcggtgcggacgctgggccagcaagccagggtttggttggtgcgggtgctgctcaacctgctggtggtcgcgctcctgggggcagccttctatggcgtctactgggctacggggtgcaccgtggagctgcaggagatgccccttgtccaggagttgccactgctgaagcttggggtgaattaccttccgtccatcttcatcgctggggtcaattttgtgctgccgcccgtgttcaagctcattgctccactggagggctacactcggagtcgccagatcgtttttatcctgctcaggttccagcctcacggggatggctgggaatgatgaagggtgggggcggtcagagggatgttggcgctgacaggtaagacacggaaatcctgctgataccgaatccagggattcaaatcctgactctgttggccaggtgcagtggctcacacctgtaatcccagcactttgggaggccgaggctgaggtcaggagttcgagaccagcctgacaaacatgatgaaaccccgtctgtagtaaaaatacgaatattagcccggccgtagtggctt

SEQ ID NO: 61663 - DNA, 1086 bp, Homo sapiens
ttttttttttttcaattaaagatttgatttattcaagtatgtgaaaacattctacaatggaaactcttattagatgctgcatgtactgtgctatggaccacgcacatacagccatgctgtttcagaagacttgaaatgccattgatagtttaaaaactctacacccgatggagaatcgaggaagacaatttaatgtttcatctgaatccagaggtgcatcaaattaaatgacagctccacttggcaaataatagctgttacttgatggtatccaagaagaaatggttggtgatggataaattcagaaatgcttccccaaaggtgggtggtttttaaaaagtttcaggtcacaacccttgcagaaaacactgatgcccaacacactgattcgcggtccaggaaacacgggtcttccaagttccaaggggctggggttccccaacgatcaagttcctgtgctgtaatcaagagggtcctttggactggatagggagcacttgggagctgtacaccatcagtcataatggatggcagtgtaaaagatgatccaaatgaccatgaacaaggcaaaagaggtcataaacccttccttcgtgagctcccacgtgccaccatattcttcctcatcaatctgtaggtaattgctgaagtagaggtacaggactcctgcattgatcaggcagaatcctgctattcccaagaaccctcgtaatggcaaaactccccaaatgacacccaggaccacagcaatgatctgtcggaaccagtagatcacatctaaaaattcatccttatcctcccaggccgcgtcgctccgcagcaccttactccagacggagactttgagggccccgttggccagctgcggctgaggcggctcctccttccgccgcccgccgctcatcctcccgtcgcgccgcccgggccgggcctggggcgcgcgggctgagccaaagggtagtcggggtctagggtcgcaggtcacggcgcggggcggctgcaggctcagcggcccggtcctgcgggcgctgcggttcctcacaacctggccaagctacccggttgccgccggctctacagagcagg

SEQ ID NO: 61664 - DNA, 701 bp, Homo sapiens
ggaattcaagacgccaagatggcgacgagtcagtatttcgacttcgcgcagggcggcggcccgcagtacagcaccctcctggaggacgggactttggtctggttattccccgctgctgtgacagcgcccatgacagcagctggtccccactggcacccaggaagtatttatccaatgactcaatgaatctgccgccggatcgcccgggactgctttcactttctgtcagtccagaagtggagaccactcccccggcccttgcatctgggcttccttgtgccctgccttggacagttggctgcagtggaagtgacgctgtgactgccctgtgcccaagcttaagaggccttgcctgcatctgctccatcttatgggaccctgcctggtgaaggacccaaggctggcctgctggaggaggagatataaggagaagagtcacagtgccccatccaacaggtagctgccctccaggggcagagaagcccagccatggtcaggagagccacccagctgaggcccacctccaccaggattgccacccagctgaaccccacctcagccaggagagccacccagctgagccccatctggccaggagagccatccagctgagccccacctctgccaggattgccacccagctgagccccgccttggccaggagagccacccagctgagccccgccttggccagaaaaagg

SEQ ID NO: 61665 - DNA, 427 bp, Homo sapiens
ggatattggcccctcactgcagctgccaacacttggtcagtcactctcagccatagcactttgttcactgacctgtgtcacagcactgagctccacccttttctgagagttattacagccaaaaagtgtgggctgaagatggttggtttcatgtttctgtattatgtatctttttgtatggtaaacactatattctgtacttaaccagatctatttttaccccagatggggatattctttgtaaaaaatgaacataaagcttttttaatggaagagcactacacagggggcgccgatctagaggactccttgctggacccagttttacacgaggctgagagctgttactgcctgccttatatggagctgaattattccctggctggggatactgggtaaggaacctttattctgcgtagtaacaaaa

SEQ ID NO: 61666 - DNA, 829 bp, Homo sapiens
actagagagaaaaacgtatcataaatccttatgttgcccactttaacaattgccaacatatgaccataacaattaacaacatatgactaatcttatttcacctttacctacctccctcattagtttgaatcagattgcagttattttatttgtaaatatttcagtattctgatattcagttgatcttttttgtttatccttctgccagggccatactatcttgattactggagggttatattaagtatagaaggcaggtaggttaaattccccaatttttttctcagctattcttggacttttgcctaagtcaaatttaaaattcttctgtcagtttctagaaagaagccttctgggcttttgatttctttttcatttcttgtgaaacaaatatcagatgggcttttgattttgattgcattgaatctaaaggtcaattctgggagaattgacatccttgacaatagtcttttgatccatgaatgtggtgtatctctccctttatttaggtctttaggttctctcaatattttctagttttcagtatacaaatcctgcacatctcttggtacatagatttctaaatatttcatgctttttgctgctattgtgaagttcttaaaaagtaaatttttaattgtttgttgatagtatgtatgctttaagtagtgaattatctttttagaaaattaaaacatgagagaaaaggccttggttttttatattatgttaaaaatattagttttgtttacacattcttctggtgtgctttattgtctgtagaaatgttaccctgcagcctgggcaaaatagtgagaaactatctctc

SEQ ID NO: 61667 - DNA, 1344 bp, Homo sapiens
tttttttttgccaggtgtttttacattttattagctacagtatagatcctagagctgcctcattccctcccctcccctcccctccccccaccatggaggtcaggccttgccaggagcccctgcctttgctgcctgggcccgctggaactcctgctgcagctgagcaagggtctccctctgttgctctgactgccgctcaagatcccgaagctgggattcgtatcgcttactaaggagagacaagggagacaagcagaaagggagaaattagtaggactcactatggagagtgctaaacgcaagaaagagataggtggaaaacttgagatccaggggagggagaagaaggggggttaaaagggaaggaaagggttggaggaactggaggactaggggccactatggagagctgttctgcaatggttcaacacctctactccaatggttcacttgcatcacagggtgcagcacacggtggtggaataaaaactcacatttcagctgtgatatagtccagcctcttccctactgtggcccgagcctcccccagctcctgtttgactagcaccggacccagaagtttaaagaccacgttggacccatccagcagggccagttcctgatggagggatgggacatatgtgatcagaaccatggctagtacaggtccctcctcgccccacaaatcccagtccctcacctctttcacgatattattttctgttagttgtgcttcaagtttctgcctccccgacatggatttacttaagtctggggatgagaggaaaggcaatttagaaacatcaaatgtgccacctatccccacaatcctagtcaggtggatatggatctgaggaagcagaaaagggtgggggcagcgggtgagtgaacagggaagagtactgagactgaggcggggaagtctctgcacgcgagggcccagatggggcaacaaaccttatctcggtaatggctttgggttgtaagtgcattgggcgagaccataccgaccctgttcccttacccttctgtagctgttgatatttctccacttctccctgtagcttcttctggatcagctccgccatggcggggatgaaagcctactgggtgcgagacaagggcgctgggtctcactctctggaaggtacctgagctcccttttctgatctggcctgcggaaatgatagcactcttgagaggtagccctgaggggcaccgcaacctcccccccgtcccggatatcgactccaccctgtccccaggagatggtgggcgaaacgcaagaccccaagcctctcaaccgaaatcctaacctactcacgttcttccttcagtagtaat

SEQ ID NO: 61668 - DNA, 1521 bp, Homo sapiens
aaccccgccccattatatttatcacccccccccttcagcggaatggggcccccggcccccccccacacacagttattctctaatttgtatataaatttcacttttaagcattttttttttttttaagaaataataatacattttaatgcaagagaaatcatagcctggtacacaccccttccccgatctgtcctgcctggggatgtgtttatggtgagtgtgtccccaggactggtagtcacctggctgtccgggtccccgccctactggcggcagcatgcctgtccccagcattacattcaactgctgctctggctctcgagaggccggctggcctcgggcctccggcttggcgttctttgctcccctgtctccctgctaaggccagcagggccaaactgctaggccaggtcagccagggctgggggaatgggctgtaccctgctcctccccaggcacgactgtccccccggggctccatcaccgggtggggcggagcgtctgctggggcagctctgtgggccacaggatccccccgcacccactgcatctctctgcccagggtgcctgcctcataggatgccccgcgccacagagtctctctgcccagggcgcccgcctcacagctggtcctcgtccacccagatggtcttgcgctgctcctcgccgatcttgtccttgacaacgcggagcagctcctctacgctgccccacatgtcaggttccaccgtggcgtacaggcacggcagggcctccagctccttctccttcagccggcacacgcgcaggaactcctcctccgtctcaggtcggggcagcagctttctgaacctcttgatgttcttctcacacacccggatgaagagcacgatggggtagatgttggacttgatcaagtctcttgtgcagccgatcccagcctccagcaggcagtgcttgttcttggcggccacagcttcaatgttggcaggggcgatgcattcgaacgcgttggggttcttctctcgggagtagatgatggtctccgtcttctgccttctgaggaactcatctcttgtgacgatatctgacttgcagatggtgaactccatggcacctcccgagttgagcagcctctgcaccagcgtcttggccagcacggtgggtgtgaagagcacgggccggcggcgctcgcagtagaaggcgcgtaccaggctgtaggggatgaggctgaggttcttgcccagctcgctctcagggtccagctcttcctgcttctcagtcaagagcttggtggcgtccagcgaggaccgggccaggctccctagcggactccccgagatgatgcggacccgctcgttgctgttcatccgcttatacttgttctcggacctgctgacgaactgaaggagctggccaaaaaggaagcttgctcgcgagagacgggggctgacccgggggtcgcttgttgaaagcgcttcttctggctgcagggtgttccggagtgcccgcagggtgtggtgggtgccgtctcctgcctcc

SEQ ID NO: 61669 - DNA, 6155 bp, Homo sapiens
ccccgggtcgacccacgcgtccaaaagctccagaactgtctcactcccaggctacatcttctcacttgctaacaaggacctctgagttcagcagccatgagttcagactcagaattggctgtttttggggaggctgctcctttcctccgaaagtctgaaagggagcgcattgaggcccagaataggccctttgatgccaaaacatctgtctttgtggcggagcccaaagaatcctttgtcaaagggaccatccagagcagagaaggaggaaaagtgacggtgaagactgagggaggagcgactctgacagtgaaggatgatcaggtcttccccatgaaccctcccaaatatgacaagatcgaggatatggccatgatgactcatctgcatgagcctgctgtgctgtacaacctcaaagaacgttatgcagcctggatgatctacacctattcaggtctcttctgtgtcactgtcaacccctacaagtggctgcctgtgtataagcccgaggtggtgacagcctaccgaggcaaaaagcgccaggaggccccgccccacatcttctccatctctgacaacgcctatcagttcatgctgactgaccgagagaatcagtcaatcctgatcactggagaatctggtgcagggaagactgtgaacaccaagcgtgtcatccagtactttgcaacaattgcagttactggtgagaagaagaaggaagaaattacttctggcaaaatacaggggactctggaagatcaaatcatcagtgccaaccccctactggaggcctttggcaacgccaagaccgtgaggaatgacaactcctctcgctttggtaaattcatcagaatccactttggcactactggaaaactggcatctgctgatattgaaacatatctgctagagaagtctagagttgttttccagcttaaggctgagagaagttatcatattttttaccagattacatcgaataagaaaccagaacttattgaaatgcttctgattaccacgaacccatatgattacccatttgtcagtcaaggggagatcagtgtggccagcatcgatgatcaggaagaactgatggccacagatagtgctattgatattttgggctttactaatgaagaaaaggtctccatttacaagctcacgggggctgtgatgcattatgggaacctaaaatttaagcaaaagcagcgtgaggagcaagcagagccagatggcacagaagttgctgacaaggcggcctacctccagagtctgaactctgcagatctgctcaaagctctctgctaccccagggtcaaggtcggcaatgagtatgtcaccaaaggccagactgtagaacaggtgtccaacgcagtaggtgctctggccaaagccgtctacgagaagatgttcctgtggatggttgcccgcatcaaccagcagctggacaccaagcagcccaggcagtacttcatcggggtcttggacattgctgggtttgagatttttgatttcaacagcctggagcagctgtgcatcaacttcaccaatgagaaactgcaacagtttttcaaccaccacatgttcgtgctggagcaggaggagtacaagaaggaaggcatcgagtggacgttcatcgacttcgggatggacctggctgcctgcatcgagctcatcgagaagcctatgggcatcttctccatcctggaagaggagtgcatgttccctaaggcaacagacacctccttcaagaacaagctgtatgaccagcacctgggcaagtctgccaacttccagaagcccaaggtggtcaaaggcaaggccgaggcccacttcgctctgattcactatgctggtgttgtggactacaacattactggctggctggagaagaacaaggaccccctgaatgagaccgtggttggactgtaccagaagtctgcaatgaaaactctagctcagctcttctctggggctcaaactgctgaaggagagggagctggtggaggggccaagaaaggtggtaagaagaagggctcttctttccagacagtgtctgcccttttcagagagaatttgaacaagctgatgaccaacctcaggagtacccatcctcactttgtgaggtgtatcatccccaatgagacaaaaactcctggtgccatggagcatgagcttgtcctccaccagctgaggtgtaacggtgtgctggaaggcatccgcatctgtaggaaaggatttccaagcagaatcctttatgcagacttcaaacagagatacaaggtattaaatgcaagtgcaatccctgaagggcaattcattgatagcaagaaggcctctgagaagctccttgcatccatcgacattgaccacacccagtataaatttgggcacaccaaggtctttttcaaagctggtcttctggggctcctagaggagatgcgagatgacaagctggcccagctgattacccgaacccaggccaggtgcagagggttcttggcaagagtggagtaccagaggatggtggagagaagggaggccatcttctgtatccagtacaatatcagatccttcatgaatgtcaagcactggccctggatgaaactcttcttcaagatcaagcctctgttgaagagtgcagaaactgagaaggagatggccaccatgaaggaagaatttcagaaaattaaagacgaacttgccaagtcagaggcaaaaaggaaggaactggaagaaaagatggtgacgctgttgaaagaaaaaaatgacttgcagctccaagttcaggctgaagccgaaggcttggctgatgcagaggaaaggtgtgaccagctaatcaaaaccaaaatccagctagaagccaaaatcaaagaggtgactgagagagctgaggatgaggaagagatcaatgctgagctgacagccaagaagaggaaactggaggatgaatgttcagaactcaagaaagacattgatgaccttgagctgacactggccaaggttgagaaggagaaacatgccacagaaaacaaggtgaaaaacctcacagaagagatggcaggtctggatgaaaccattgctaagctgaccaaggagaagaaggctctccaggaggcccaccagcagaccctggatgacctgcaggcagaggaggacaaagtcaacaccctgaccaaagctaaaatcaaacttgaacaacaagtggatgatcttgaagggtccttggagcaagaaaagaaacttcgcatggacctagaaagggctaagaggaaacttgagggtgacttgaagttggcccaagaatccataatggacattgaaaatgagaaacagcaacttgatgaaaagctcaaaaagaaagagtttgaaatcagcaatctgcaaagcaagattgaagatgaacaggcacttggcattcaattgcagaagaaaattaaagaattgcaagcccgcattgaggagctggaggaggaaatcgaggcagagcgggcctcccgggcaaaacgcagagaagcagcgctctgacctctcccgggagctggaggagatcagcgagaggctggaagaagccggtggggccacttcagcccagattgagatgaacaagaagcgggaggctgagttccagaaaatgcgcagggacctggaggagggccacccctacaggcattgaagccacagcggccaccctgaggaagaagcatgcagatagtgtggccgagcttggggagcagattgacaacctgcagcgagtgaagcagaagctggagaaggagaagagtgagatgaagatggagattgatgaccttgctagtaatgtagaaacggtctccaaagccaagggaaacctagagaaaatgtgccggactctagaggaccaactgagtgaactgaaatcaaaggaagaggagcagcagcggctgatcaatgacctgactgcgcagagggggcgcctgcagactgaatctggtgagttttcacgccagcttgatgaaaaggaagctctggtgtctcagttatcaagaggcaaacaagcctttactcaacagattgaagaattaaagaggcaacttgaagaggagataaaagccaagaacgccctggcgcatgccctgcagtcttcccgccacgactgtgacctgctgcgggaacagtatgaggaggagcaggaatccaaggccgagctgcagagagcactgtccaaggccaacaccgaggttgcccaatggaggaccaaatacgagacggacgccatccagcgcacagaggagctggaggaggccaagaagaagctggcccagcggctgcaggcagctgaggaacatgtagaagctgtgaacgccaaatgtgcttccctcgaaaagacgaagcagcggctgcagaatgaggtcgaggacctcatgcttgatgtggagaggacaaatgccgcctgtgccgcccttgacaaaaagcaaaggaacttcgataagatcctggcagaatggaaacagaaatgtgaggaaacgcatgctgagcttgaggcctcccagaaggaggcccgttcccttggcactgagctgttcaagataaagaatgcctatgaggaatctttggatcagctagaaaccctgaagcgagagaacaaaaacttacagcaggagatttctgacctcacggaacagattgcagaaggagggaaaccgtatccatgaactggataaaataaagaaacaagtggaacaagaaaagtgtgaacttcaggctgcttttagaagaagcagaggcatctcttgaacatgaagagggaaagatcctgcgcatccagcttgagttgaaccaagttcaagtctgaggttgataggaaaattgcctgaaaaagatgaggaaattgaccagatgaagagaaaccacagttagaatcgtgggagtccatgccagagcaccgcctggaatgcctgagatcaggagtaggaatgatgccattaagctccaagaaagaagattggaagggagacctcaatgaaatggaaattccagcttgaaccatgcccaaccgcatggcttgcttgaggcccctgaaggaactacaaggaacaccccaaggcatccctcaaggataccccagattccaccctggattgattgctctccgggagccaagggaggaccttgaaaggaacagctggccatggtggagcgcagagccaacctgctgcaggcttgagatcgaggagcttgcggggccactctggaacagacaagagaggagcagaaaaattcgcagaacaaggaagctcctgggatgccagtgagcgtgtttcagctacttgcacacccagaacaccagccctgatcaacaccaagaagaagcttggaagacagatatttcccaaatgcaaggagagattggaaggacattctccaaggaagcccgcaattgcagaagaaaaaggccaagaaggcactcactgattgccgccatgatggctgaggagcttgaagaaggagcaggacaccagcgcccaaccatggagcggattgaagaagaacattggagcagaccgttgaaggatcttgcagcttccgtcttggattgaggcttgagccagcctggcccttgaagggtgggaaagaagcagatcccagaaacttggaggcccagggtacgggaagcttggaaggaagaaggtttgagaattgagccaaaagcgttaatgcttaaggcttgtccaaaggtcttgcgccaacattgagaggccgagttgaaggaactcactttaccagaccggaaggaagatagaaagaatattctcaggcttcaagatttggtagataaacttcaggcaaaagtgaaatcttataagagacaagctgaggaggctgaggaacaatccaacaccaatctagctaaattccgcaagctccagcatgagctggaggaggccgaggaacgggctgacattgctgagtcccaggtgaacaaactgcgggtgaagagccgggaggttcacacaaaagtcataagtgaagagtgatcatgtcctgatgccatggaatgactgaagacaggcacaaaatgtgacatctttggtcatttccctctgtaattattgtgtattctaccctgttgcaaaggaaataaagcatagggtagtttgcaaacaaaaaaaaaa

SEQ ID NO: 61670 - DNA, 1447 bp, Homo sapiens
  misc_feature (1)...(1447): n = a,t,c or g
tagtagaggcggggtttcaccatgttggccaggctgagtcttgcgcacgggacctcaagagatatgcctgcctcagcctcccaaagtgctgggattacaggcgtgagtactccgtgcccagtcaatttttgtatttttagtagagacggggtttcaccatgttggtcaggctggtctcaaacttctgacctcatgatctgcccacctcggcctcccaaagtgctgggattgcaggcgtaacacnccgcgcccaagctaatttttaaaaatattttatagagacaggtctcactatgttgcccaggctcgtcttgaacccctgggcccaggcgctcctcccaccttgacctcccaaagttctggaattacacatgtgagccaacacaccaggcccagactgggtaatttataaagaaatttacttctgcccacaccggcccgcctccccgcggcgagtggctgaggcgtagcgctgccatccccgcacccctgggaacatggcgctgcgagtggtgcggagcgtgcgggccgtgctctgcagcctgcacgtggtcctggcacctgccgcgccctgcctatcgaggccctggcagcttgggatgggcgccgtctggttactgtaatctgcctgaagttgggacaaaattgaacaaacaagatgagtttggtgctttggagagtgtgaaagctgctagtgaactctattctcctttatcaggagaagtaaccgaaattaatgaagctcttgcagaaaatccaggacttgtaaacaaatctcgttatgaagatggttggctgatcaagatgacactgagtaacccttcataactagatgaacttatgagtgaagaagcatatgagaaatacataaaatctattgaggagtgaaaatggaaccactaaataagctagtatgaaataacgcaacccagcagagttgtcctaaattagtggtggatagaagacttagaatagcaacttttagcattacccatgggaaaaaaaaactactgttaacactgctaatgaaagaagatgccttttaactttctaatgattgtagataaacataatatgtgtctttttcacaacatcctatgatttttagactaggctctagtattcatgaaattatccatgaaattatccatggtaaaaattagttacaaaaattacataattcaaagataatgttgttattcttaagccttatataatattgtaacttgtgtatgtccatacctggatttgggatgaaatacttaatgatctttccattggaaataactgggagtgaagaagtttttgttgcttgtacagtgtcagatgaagaacaacactatcttaattttgcaatacactgcatttgctggtgctgtttttatatagtgaagcaacagctgtacagcaaaataataaaatactcacttcttcgttaaaaaaaaaa

SEQ ID NO: 61671 - DNA, 1498 bp, Homo sapiens
tttcgtcacataggcacacagagatacgcgcacacacacacacaaacgcactcagatttcccggaccctggttttcctcctgtgaccctttcggggccgggctctcaccctaaagaagcagccccgccctggggtggccccaccctctcttgggacctgtcataagtcggaccccgggcgcccggctgcgcagtcccagccgccttccccaggcagtggaaccttcgggctcctgagcttcaggatggttcgtactaagacatggaccctgaagaagcactttgttggctatcctactaatagtgactttgagttgaagacatctgagctcccacccttaaaaaatggagaggtcctgcttgaagctttgttcctcaccgtggatccctacatgagagtggcagccaaaagattgaaggaaggtgatacaatgatggggcagcaagtggccaaagttgtggaaagtaaaaatgtagccctaccaaaaggaactattgtactggcttctccaggctggacaacgcactccatttctgatgggaaagatctggaaaagctgctgacagagtggccagacacaataccactgtctttggctctggggacagttggcatgccaggcctgactgcctactttggcctacttgaaatctgtggtgtgaagggtggagaaacagtgatggttaatgcagcagctggagctgtgggctcagtcgtggggcagattgcaaagctcaagggctgcaaagttgttggagcagtagggtctgatgaaaaggttgcctaccttcaaaagcttggatttgatgtcgtctttaactacaagacggtagagtctttggaagaaaccttgaagaaagcgtctcctgatggttatgattgttattttgataatgtaggtggagagttttcaaacactgttatcggccagatgaagaaatttggaaggattgccatatgtggagccatctctacatataacagaaccggcccacttcccccaggcccacccccagagattggtatctatcaggagcttcgcatggaagcttttgtcgtctaccgctggcaaggagatgcccgccaaaaagctctgaaggacttgctgaaatgggtcttagagcttccctactttgtaattgactgacttcaagcaaatactcttgtctataaatccatgaagagtgctaagccatcactggaatacattagcgaaaaacttgtatcagggtaaaatccagtacaaggaatatatcattgaaggatttgaaaacatgccagctgcatttatgggaatgctgaaaggagataatttggggaagacaatagtgaaagcatgaaaaagaggacacatggaatctggaggccatttagatgattagttaatttgtttttcaccatttagcaaaaatgtatactaccttaaatgtcttaagaaatagtactcataatgagtttgagctacttaataaaatacatttaagtggtaaaaaaaaaa

SEQ ID NO: 61672 - DNA, 1189 bp, Homo sapiens
ttgagccccaagaggcagaggttgccgtgagccaagatcacgccactgcactccagccagggtggcagagcgaaaccttgtctcaaaacaacaacaaaaaagaagtaaacagctggtaaagcaacctagcctaaaacttacaaagtagcagagtgaacacatatgtgcatgcacacacacacacacacaacacacatacacacagatgagagtagcacacacgccaaagatacatcaagcaagtgcttttttaatcaatacatcaaatgatatttttgctagcctgaggaagcttctctttgcctgtcctatcattcccacccattgcctcacagggatggaaagaaattccttcttggacccaacattagataaacataaccaagtctttacatgtggctttggagaaggctgctaggatgcttgcgaacacgacatcgggggtctgggatgcatcgatggcggagtgggatcccccgtttcctgtagtacttctatgagtggggtgggtttgagtgtgggtagggcttgcaggcgggattttcaagggcctttttcatttatcatcttgatcgacgggatcaaggggttccccgggtgatgttcatcttttcatgggggctcttttgggaggggttgaactcctcgtgggtagggaacggccactctttgggggtgaaatcagccatttctgcgtgcctcacagtccgagggaagccatccagaagaaaaccatttttgcacaagggggtctccaaattcttctcaatgagctccactaccatttcatcactcaccagtttcccagcatccatagttgccttcagcttttttcctagctctgagccagaagccaccatggccctcagcatgtccccagtagctaaatggcagacacagaagttttcagccaatctgggtgcctggggcagtagatagcagcagaaagagcaggagctttggagtcattcagatgcaagctctgtaaattacttgctatgtagcctagagaacaagccattcaaacttcagtttctccaactgggtccctttaccggccccgggaggccccagcagcacggcccggatgcctttaggatactcgggttctgccgctggcacgctgggagccatgtccgccgaagtctctcactgaacaccagttcgcacgcctcacaggtccacgaaa
